United States Patent Application Publication US 2015/0376612 A1 - sequence listing, part 51

SEQ ID NO: 120681 - DNA, 1028 bp, Homo sapiens
agctcagggttggttaatttggtggcttaatgatattgtcaaggatctgggcttttctgttttttagactctgccatcattatataagctttgtgctcaaactggatcctttcatgatcacagtatgactgttacaggtccaggcataaggtccaaatgcaaagcatctcttccctttattgctcgaaagagctaagaaacctttcccagaatctccctagagatctccatacacaattggcgagaaccagttgaaattatcactcgcatatcagtcattggtgaagataatggaaccatggtgattactattcaagatctatgcctgtaaagggcattcctcctcttttcacgttgggaggagagaatactatacaattaggactgatacaattagtaagaaaattctataggcaacaacatctgttacacagcattattccttaatgaaaatgcctgatcttgtcctctgaagttggttcgggggtggggggcacattaaagaaattctatatgtaattattgttgctgcctgaatggtttctcagttagtgacatttgctactgtattggccctggtcttttaggtttttaggtgtttaatatttttctactttttaatatttgtcattctttgactcagtgtattttgaaaatgtgcgttttaatgatttcttcttaatttcatctggaattaattcctataagcctagtggctaagccttgggttctctggaaaacagagcctgaggtgaggattaaggtggtaatgctttcttggagggttgcaggtccaagtctataagggtaagggcaaaaggaagaagggaaggtgcaaagaaatggattcgatgtgttatagagccagctagcttttgctttacaacaaactaagaagagacatggaaggtgactcaggaagcatgcagcttttttctgaaagggttgcaaggaggaactaagagtagtccttggaaaagagaaagaagggggagaatttatctgcctgatatttcttcctgtctcct

SEQ ID NO: 120682 - DNA, 1079 bp, Homo sapiens
actgcctttccagttcattgaaggccccggaacactttagcatgtggtggcagggcttgccaggactcaggttctgagccctggggtgggcaatttctttctggctagggctggtctaaatgctccctctgataggtgccaactgagttctgcccagtgctgctttccactgtgacaaaatagcactgagttccaatgcaaagtcccacagtcactacactctgcctccctccaagtgcacagattctctctttgtgccacatggccatggccactactggggaatggggaagggatgttgtaggtgattcaagactgtctttcctaccctcttcagtgcctctttccttaatataatattattatgatcacttacctgactcttcattcttatgaaggggctttttttatgtggatagttgttaaatttggtgttcttgctggagggatgatcaccggaggattctgttcggctgtcttattctgccttcctatttctgattttcatgagagtgatttgtcatgattaaaaaaaaagtgggaatcatggtgatagagtctttcctttcctaggaaattggtttctgattatgattctgacttatattgatgtggtttaactacaatgtagaatgtccttgtattagtcccttttcacactgctgtaaagatactatccaagactgggtaatttataaaggaaagaggtttaattgactcatagttctgcatggctagggaggcctcaggaaacatacagtcatgacagaaggggaagcaggcaccttcacaagattgcaggagagagagtgagcaagagcagggaaaactgccttataaaatgatcacctctcgtgagaactcactcactatcatgagaacagcatgggggatactgcccctgtgatccagtcacctccctcccttgacatgtggggattacagtttcctcccttgatacatggggattacaattagacatgagatttgggtgaggacacagaaccaagtcatatcattctgccctggcccccaccaaatcacatctttttttttttttttttttttttttttttttt

SEQ ID NO: 120683 - DNA, 2551 bp, Homo sapiens
ctctcctgagtcccgcccaggttagggcaagtggaatcatatgcttagttttgccagcttttttaattttccaagagaagtaaggaatctagagtgttttgttaaagtcttaaatttataaatatcatcaattaatatttatagtttatagtaagtagtttataaaaatactatgggccagatggaacagccttaccggtcagataggatctcatgggtggcactttgcaatctctgtattagtgtgatggcagtggaaatgcagggggaaaatgagattgaggtatattttgagggtggtaatgacaaacatgatggatagagtggatgtggaagagaatggatagaggagagaatgagagagggagacatccttgacactgggtttttggcatgaaaactgggtgaatgggggtacaatttactgagatacagaaaccaggaaaaaagacatactgtgggtgcgggaagaccaaacatttagttgagacttgccaagtttgagatgcatgtgagtcatcaaatggaagtttccagagagagttggatacgcaagacttgttcttagaaaacaggtcttgtgtatatacaagagataacaaattgagagttactgacatgtaggttgtttgaagctgttgggtagatgaaatcaactagggaaagagtagtgaaggccacctgtccagctgtagagtcataactgtactctcttgataaccatctctgatctctcctccctgtatattctctgtataaatttatgggttaaatatgtagtcaagttcatataagttttctatttcagaaaataaaaactgttttatctttttagtaagcatgacagcaatcttaggaaccttagaatttctactcatatacaaatggaagagatggctgactttatattaaactttctagaagcagaggaagaaagcagagctttgactaattcttagtagagatttcaatgtgggtcaatcccagaatgaaaattttgttgttgttgttgtcgtttgagatggagtcttgctctgtcaccaggctggagtgcagtggtgcgatctcggctcacagcaacctccatctcctgggttcaagtgattctcctgcctcagcctcccgactacctgggactacaggcacgtgccaccatgcccggctaattttttgtatttttagtagagacggggcttcgccatattagccaggatggtctccatctcctgacctcgtgatccgcctgcctcggcctcccaaagtgctgggattacaggcgtgagccactgcgcctggccagaatgaaaattttataattgacctctatgtccatgttccagttataaaattccctcctgtttgaattcttccctcttccttattcccgtattcccttcccttctttcctcaaatattttgagtaccttctatatgcaaggcattgtatatgcataggtaatgtaatagtaaaacaaaaaacaaaaccatgaagcttattgtctattgtcagtaataacatgttcaaatattctattattgtgacattcatttttttcatgctttttatatgaggggaggcctaaaaacaaaaattagaataaatatgaataatatgtacttcactttaggagtctttcatctgagttgaccagaaacattgtctttaagtttctattcatcattgcatctgcgtccagcattaagacagctactgtgttttcttgacttgatgtccttctcatcaagctgtgaatgtatgtgaaagagaagggccctgtttagtacagaccatgggaaggtgatgctgtgtataaagtattgccactctagcatgtaacatcatagaacgcagcatgaggtacatcacagctctgctttgctttggagttaaattcagagtagtgattttatgtttttaaaaaatttatacttaagcccttaggtatcttaacattcgcttccagtgaggcaccgctgaagctctcctgctagtcggcacaagtctttgctgtccagggataccagtgttttcttgagacagactttttattctataaatctttataaagtttgcactttgggttgaccttcaggtataagacatactgcctttgtttagtacttaaaaaagaacaaaaactaaatctgaacagagccaggctttctttttcttagaattttgtgtctacttttataccatgtaagtgcccagaggcatcttaagatggacatgattttatcaatcttaaataaaaataaatgctttataggtttgggatttgcaagtgtgtaatatgctgcaagccagcggaatctgttgtaatacaataaagtttattgtaacataaaccaatttatcaaaaatatggctcatggattactagcctattccataaaattggaccccctatggagtatttcatattaatttattatacctccaccgtgtgtgttattacttagcacttattacatgccaatgatttcttaggctctgaacaaaatcaaaagatggaacttgacccaggccaaaaagttgtttgatactttg

SEQ ID NO: 120684 - DNA, 1332 bp, Homo sapiens
gtaatcccaacacttgggaggctgaggtgggtggatcgcctgaggtcgggagttcgagaccagtctgaccaacatgatgaaaccccatctctactaaaaatacaagattagctgggcatggtggtgggcacctgtaatcccagctatctgggaggctgaggcaggagaatcacttgaacctgggaggtggaggttgcggtgagccaagatcatgtcactgcactccagcctggctaacagagcgagactccgtctcaaaacaaaataaaacaaacaaacaaaacagtatcgtaacagatataataataatgaaaaggtttgaaatattgcaagagttactgaaacgtgacagagttatgaagcaagcatacactgttggaaatatagtgctaatatacttgctcaaaatggagttgctgcagaccttcaatttttgaaaaacacagtatctgcagtgtcataaatcaaagacaaatagaatgaagtatatttgcattaaaaaaatcaccatgtatatcaattagggatacattttagtacaaatcacaggaaattttggcttaaataattgaggtgtttattcttattagatgataggttggtataggaattcaacagtaccttcagaagccaggttatttctgtctttccactctgatattcttggtatgttggcatttgtcctcattcttgtccttgtagatccatctccagccctttgtcaatattccaggcaggaagaacaagaaagtctaacaggaaggggcaaggcctatatcaggaaagagaaaactcatcggatagaacctttgtgtcatcctacatccctttttctcatgtaccacatctaatccatcagcaaatcctaggggccctgccttcagaatatatagagaattggaaccacttcttaccatatccactagctactacctgatgcaagccatcaccttctctgttagattattgcagtggcttgatacctggtctgcctgctgccattctcacattcctatagtctgttctcaaacccctggagcagtgtgtgtgtgtgtgtgtgtgtgtgtgtgtgtgtgtgtgtgtgtgtatgtgtgtgtgtgtgtgttttaaatattaaagcattagtcacatataaaattcattcttttttttttttttttttttgagacggagtctcactctgtcacccaggctggagtgcagtggctcgatctcggctcactgcaagctctgcctcctgggttcacgtcattctcctgcctcagcctcccgagtagctgggactacaggtgcccgccaccacgcccagctaattttttgtatttttagtag

SEQ ID NO: 120685 - DNA, 1007 bp, Homo sapiens
agggaaagattaatgcgtgagttgggaaaaaaaatagatattttgctttgaaattgctctattctttcttccaagatgccatctaggaatgcacgattttgaactttgtaggcacattttcattttaaaggaaaaggaaaaatgacttgaaaaaatgtgttggcaaaacctgaaaagaaagctctacaaaaaaagaactctagcccgaaaagagaacaggaagaaatgattactgatgatttcaattttcagtaaattacaaagcatacgtaatagacttcgaagagagatgattccaatggcatacttcatgccgccttcacagataagtgtgtaaatgaaagggaaatgaattgtttcagcctggaaaatctgtaccattttggtggagtgaaaatgagtgaaattgaagtaatcctatcacttcttactgaaaatataacatataaatgtttttgatgtgtttctagagaatagtatacttatagatttgctgcaaagaaacataattttgaatcagaggtaactaaatgagtataaaaaataagggtataatagtgttttatgtaatttacactgcaaaatttgaaaatttgaagtattgctgtgtgggtgggaatgtttttctttttaactccttagaacctagcaaaattttcacaatggaaaagaaacttcattcatgtattcatttaacacataattactgaaagtctacagtgtgccagataatattaataagacagaaaaagtccctgccactaaggagcttatattttagtagtgaagatggataataaataaggaatcatgtagctaattctaccatttcacttatcatatgatatgtgctgtgaagttcaggattctctgagaggtcctccctgaggaaatgatgtttaagctgagacctgaggaaagacaggaggtaaccaggtggaggagaaggagaggtggtgcaggatgaaggaacagcatgaacggatgaaggaacagcacgtacagag

SEQ ID NO: 120686 - DNA, 1093 bp, Homo sapiens
agccaagcagggaagtgttttcacagaggatggagtgatcaactgtgtcgggtgccaagaggtcatgtaagattaaaactgatgattgatgactggatttggcaaaatggagatcctgaatgcccttgagaagcagttttagaggagtggtgggaggaaagctgaataggagtaggttcaaaatggagagagggactgggaacagcatgtatagacaactattttgagaaacttacttgtgaaagaaaggaaagcagtagggtggttccctactctgaaggcttagctgcacagtcacttctggtgtcaactgtctgggaaaagttatttttgcagaaaccttgttattaccactaagatttttttttttccctctcctgacagctgtcattttggattgcttttctcctttcgtttgacagttcctaagtgaggacctactgaaatcttactttcttcttgattctcaaatagtaagcaaaaatactgagccagcctgtttggggacaaacatactgccctccaaagcaggttaccagggctctcagtttagagacatcacatttcctaagacttggggcaatgccatgggaacaaaagatagctaatatatcttgagtgcttctgtgctagcacagtgttgagtgttttatatccattatctatttaaccataatagctggttgggtgatagagattcataaagagaaccttacaggtaaataactgggatttagcatcatgttttatcttaccagcgttcatagctcattggaatactgagggatgttttatgaatgtctctgaagtgcaaggcatttttatgaaactgagcattaaaaggagtcacattgtaggttacttttaaaaaatattgtgaacttctggttaagaagatagccttcacttatttatactgagaggctagatttggggaaaaacagcccaatctaatgaaaatcctctaaaagatcttaaatccttagaatttacaagtcacctttacccatgggttctcttgtccctttctgcagttattgattttttcctggtgccttttctataatttctgcctggctgtatccatttcctt

SEQ ID NO: 120687 - DNA, 1896 bp, Homo sapiens
atttttggtagagacgaggtttcaccatgttggccagcctggtctcgaactcttgacgtcaggtgatcctcccaaagtgctgggattacaggcctgagccactgtgcccggcccatttttattttttcattaatctttgagattgggccagccttgccatcttactcttcttcttgagagtatcttgcgatgagttagtcctgccattacttcctctttctggactacttttatacttcctctttccatatagtcagtgtagtaagttcaaccagaacactttgtgcaacccaggcattcattctgtgtctcattcttgttctctctttgcatgtaagcctaagtatgctggacactgcttccgatttctatactgtgttgttggcctgaagataggaaaatcccaagatacagaattggacttaagatagaggcccttaattgcatcttgatcctaagccaaatgttccagtccagttttactgtattcctgctctgtggtatttagatgctgagccacctcatagtatcatactttgattttcattcagcttgtgatttcttattttctgtaaatgtaaatgcatatggagagaatggtaaatggcagagcaggaattcctgggtcttcagccaccacactcttaaaatccctaataatttctacattctgggtgtttataaaatcttcctgggtgtctgtaaagtcttcctttctttatactgctgccttaaaccctgccttcaacatctctatagcttggaccttgcaggtctctttacacttttctaatccgttctccacattgctgtgatcctaaaatgcagactaaacctattgtttgccggtgtaaaacctttgagtggctcctccttgtctataccatgaaacccaagatccatagcacagaggcaatatagtgtattggttcagggtgcagttctagagtcagtctgcctggctttgaatttggctttcctttattagctgagtgatttttggccaagttacttaccctctctgtcttcagtctgcacgtctataaaatggaaataacaatagtggcttctttgtaggagaaggtttgctatgatgtttaaattgcataagaataatataaagggattaaaacaatgcctagagtagggtaacacttagtaagtgttagatcccggcctactttgctagtctcatttcctgctgaaaccctaagctccaaccaaaccaaactgcttctagattccaagtgtacactgtgctagttcattgttctgtatctttaaacatggtatgccctttgcccggagtgaacatcgccctgcctgatgcctgagcattgtcttcactctgaagattcccagaccagtctgaataacctgagtattgtaggtattgaagattcagtgaagtacagattggacaacatgtctgtcttcatagaaattatgttctactggggagagagagacaacaaaataaataaagcagggaagaggatgtttatggggtgggtttgcaatttcaaataggcaaggcctcattataaaggtgacatctgagtaaagacctgaagattaatgaacaagccaatgtgggcaaagagtgttccaggctgagggaacagcaactggctctggtatgctcctggaatagtaaggagggcactagggctgaagctgaagagaaagtagtataagacggtgtcagaaaagaaatggggccaggttgcagagcgcttggttgagtgagattgacagccactggagggtattgagccaaggaatcctgtgatttgattgttctaactactaggtagaccataggttgtataagggcagacacattctaacaagaataatttagacaaaagatagtggtggcttggatgagggtag

SEQ ID NO: 120688 - DNA, 1915 bp, Homo sapiens
taaatatatacttacatttaatctcaatttttaatgtaatgaaaccccttttccacattcactatggaattttggtcgttatttcaagtgaattcactttaaatgtcctttttcaggtaattgttgttctggaataatgagaacctcctgtaatgggttatatacttgtctttatgtgtctgtgtgtcttccctctccagttttgctggtaacgaacagcagcaacaaacacaggcaaggagagttagagatggggtgagtcatccttagtaaaattgtcttttaaccagtgaggcaaagaaacagaaccttgatgagcaataatctattctagaagagtagctaatcagcagattatacttttatcttggagaaaggactgcaggtcactcattaaatcaaaaggcattacataaataaagatttccagtttgggggtactggaggggactgtagcaatattgtttttgaagtctttgtttctctttagtagcatcacccatagctttgatgttactcacactctaagatgaatacattttggagcttcctaatccatttgaaaaggaaaacgtgtttgtaactttaccagccttaatttggcctactggtagacttggcaggctccgctgcaacagcaagagtggagtttcatataccctgctggctgctttcactacagccaagcttctggaagcccattatttctgaggataccattcctttttggattttttttttaagtcttagagtctggggaataccccaaggttgtgatagtatccaagaattcagtgttttggggattttgaaatctgtgaaaagaacatatatcacttgaaattacaatgcacagttgattttctggtaacttccaaacagtatgcaagctccgttctaataaaatcagaagattatttttttgggaacttgaaaagtaaatgtataccttaaagccattttctaaatagagctcattcattatgacccacgtttgcattcatgcctcccttgaacttaggccagaatatttatctacaatttaaatagcaacacgttagttaagtgcttgatttaaagtggctggcacttccatttatttttcttttattggaaaagttcattcctctgagaggggttgaattagtcactgtatagttgagataagtcccttgatctggggacaaaacattcacaggatttgtgtggctgtctatagcatctgtgtgacaggcacatcatgaatctcttaatagttgtgagattgcttttcactcaaaagtatgatgtgtgactgactccttcttctctattttatggcaaatcatgtagctcatatatcatgctagccataaatcttaatttatgtttgtctgaggatttgactctgagatttaccttcttagatgctgaaaatattcaataccatatggtttcttttattagtatgatcaaaattttcatcaaaatgttgaaaagttgacactgagacggctaaactagtaaatagtgtgttttgtttaatgtctttcatgtgtccagtatgaaaaaatatatagaaattcattgaacccagaacttcctgttcccaatggtttagtaatcagtcttagattttttttttttttaagggacaaggtttcgctctgtcacccagactggagtgcagtggcatggtcatagctcactgcagccttgaactgctgggctctactgatcttcccacctcagcctcccaagtagctgggactacacatgccacaacactcagctagtcaaagatcttttaagttctatcatttagctagattattaacgagaagtcttgccattatctcttttcccaagggtggaaggattatttctgttggctttggctcttatggcaaagagtatcctacattgtctagaatct

SEQ ID NO: 120689 - DNA, 1750 bp, Homo sapiens
aaaaaaaaaaaaaaaaaaaaaaagttagataggcagacaaaaggggaaagcgtttggagcagagacaggtagggaaatcttgagggaggaaagaacttggcttgcttaaggaaatgaaaagatgtcagtgtgctgggagtggcagcgaggtagaggaggaaaggtgggtaatgaccaggtcgtacaggtctgcatgtgtgtgtggggcacgttaaagagcttgtggtagtctatcaaaaatgcagctcctaggaaggtattgagggatgtgacatgatctgactttagttttttaaagactttgcctccttgtggggaatggattgagttgggccgaagtggaagaagggaaaccagttgggagacctctgttgtagcataggagaggagtggtggtcttgtgtaaggatcgtggcagtggagtcagagagaaacgagtggatttgagatgtgttcttcagcttatgtgacttccagggagcattgttagatacaggcttgaagatggaaaaggaggtctgggctagaaatagaaacttaagagttgttgtcttagaagatgatatttgaaaccataggagccaattagatccaaaggaaatagaatgtagtaaagtgtagaggaaaaagaaaagaggacctaggactgagtctgaagtgctccaaaatttgctcaggtagaagagaagttgtaaaatgaaatggggaaagaatagccagcaagaaaaggacagtcaagaatgtgtggcttcaagaaagagggacaggtcatcagtggcagatcaagtagatgaggaatgggaagtgtccatcagccctggcaacactcagtgcatggttcaccttggcaggagcagttttactgatacagtagtggtggaagtcagattagagtgggttaaagaaggaaatgtatactttataataaaattaaacatgcatacacccattgagccagcaatccccttgttggcaaaattcattccaagaaaataggtatgtaagcatgtttattgtagcattgcttatagcttcaaaaaactgaaaactaccaaaatgcccatcaataaggaattgattatatctgtatgaattgacctagagggattttaataaaaattgttagatgaacaacacatattagagatacttcttttgtcaataaacaaccttacgtatgtatataaatgtttatttggatttatatgagaatagagaatggtgtggaaggatacacaccaaactttaatattgattaagcaagtagtagtagatgtttatttatcttttgttatacttggctatgcgatcatttttaaaaaataaatagggagttgaagttactttttaaaagttctgggagatgaggaaatgaagaaaaaaagaatagatcactttttttgagaaacttcgccatgaaggtaaataaaggtacctggtggacactagaaatgcatgtactttttaaagacgagaggtgctaaagcatgtttaaatactgattaaacggattcaggaggaagaaactgaagagggaaggagaaagacagtcaatggaataagacacatctccattttgtgtaacagaaagaatgttatattttcgtattgtgatgacttctattttcctgtgctatcttcaagactgcaaagcatatgtttttaaatgtaccctacagaatctgggtctgaaggagtccacatcataatttgatctttgcagattttggcttcttaagaaaaatacaat

SEQ ID NO: 120690 - DNA, 2131 bp, Homo sapiens
ggaagagtttctaggaccttcaatccagcttctaaagtgaataagaaaatgtggtcaatgaaataaaacttcattgattgctttttggatgaccaagaagatggagggacaattagatcttgtagataaacaaacaaacttagatacagattttttgtgtgtgaattacatagtcatttttctatcctgcttactttggcaatggtgctctaaaaatgatattgttgagtagttaataattctgtcagtggagagttaaatcttgtacattcagatttcaccccatactacttaacaatgattgctctgacctttcatagtatttatagcttgaatctcccaattagccattaattatatatcttgtatacttttgaaatcattttgcagttcctggaccttgctttatattcctttggtggtagtggctcatcaggtatcttgttgaatctctttagctctctaaaatccctgaatgcaggtgcctggataataatctgtttttctggaaaatacccttttaacactgctatttttttttgccagtgttagaaggaaataataggaaacaaaattttatattttttttccacaggaaatatgtttaaagaagactgtgagtacaagtcccacggttagtaaaatcatcagagctttctcagtcatcattataaatggtagaagttccctagatcagggtgctgtctgtggatacaaggttagctcaagggagagtagaccagaagtaaaaccagattgcttgtcggctgccagaaaatctgggcagagtgccaggcctggttcatcttctaaaaattcatctcccagtatgaaaatagagggctcaatccctgcaaggaacggtggtagcacgaacacttggacttccttcagcccaaagcactttattgatgcgaagaaaggtggggggagtggattgtggattggagtggactgttggcattgacctcatttaagagctgtaatattttctttagcggccttacttatgtttcaaattataatttcattagttaataattcttcttccaaataatatgggtcatatatacacatgaatatgtccttcatgataagaagctataggtttaatttctaatagtcatagaaattctgtgcacattataaagctattagaatgtaacagctgttttagttcatctcattttgcaaaagaaatgtgatgcagactaaaatgatcagtaattattttgaaagctaaaccttcagttatagaaagaactaatttacacattagttactgataaaactacagtatgctatggtttcaaagttagtgttatcgcctgcctaagactatgaaagagaaatctgtgccaaaagacgtttttccttcttttaaatcctgttttgcattgcccattgtaattttggagttgcaaatcaacagtaatgaaaaactgcttgatatttttctaaggaaaaaaattagaaggactgttagagagagtaggatttagaaggactttattttatgtctgttgatcagtgactaccatctgccttccatttaatgttgtagaagcatgcacgcgtttcccagttctgaacagatgatgtgcatggtttgttgagatatatgtgtattctggatgtgtgtgtgtatgtatacctacagtgcttaaaatcacacttgaagtgtaaaacagataatgagtctccattttggtctcatttgcatattcagctcttacacacaaaacaatagactacaatgacactgattttcttttctacttgagaatcagcactaaccagctgtcaacgaatatttcgattaaacacttttctttgttggggaactttggggcacattctttgtataaacatattgttttctttgatttcaagggacttattttcagtgtgattcatggctgcatcacaccggtaagctgtctgcacaaaagtatatttttctctgtaaacttcctttttaccattgatttctctagggcaaaagtatggttaagaaaaaatatttcaactcaggatatttgcccgaaataaaggtggagaatatacctgctttaagtaaactgaagattttaaagtatagattcatatacttgacttctttaagattttt

SEQ ID NO: 120691 - DNA, 1098 bp, Homo sapiens
aggaatgaggataaagagaaatgaggttacaggacctcagaagtggtaggaagggaacagtctaacatttattgagtatcttctgtgggtcaggcacatctcattaccttgtgtaattcttacaatagtcctgtaggagaaaaaccgctacttaattttataggtgaggaaattgagccttagaaaagctaaatttgtaaccaggtctgcctgactccacattacattgctgatgcaagaatcaaggtaaagaaatagctctaccttagagtaggagaaggaggcattgagccctgaagaagctcttactacctctttggaaggagcagtttccagcaatcctgtaggggaggacctgctgtggccaaattctactagtgctggtcacagccacccagactacacacacattatactaataatgatgatgaacaaccggggatattttctgttttaaaatgctccaaagggagtgcagcaatcctttatctaggtatgttttgtcagtttgtttgtagagcttcgaattttcctgccccttagttctccataagatcattttagagtattattatagagtgaacctaatattcttgaatcctagcttgttttcattaaactgtgtttagaaacaaattccatatattaggaaatttttatttacaagatctcttcacaccttgagttgctttttttttttagttgggaaattttctgtttattattttcatctagaacccttttattagggggaaaacacaacaacaatagcaaaaaaatcccccaaaaccccgccatgttttatattcagtaagacctttgagaaatgactgtttgtccttaagttattcaattgaatccaagcttctttgttttgttttgtttagaggataataacatgttgagcttcttttgtgtgagaaaacagaacaggattgcccttttcctttgcattgtattttataattttagaatataaattagtgtcctaataagcttattgcatgagatgatgttactaacattaatcacctgttgttattaccacaaatagccattgcctgtttttcattctgaaagggcaaaaactatatttgc

SEQ ID NO: 120692 - DNA, 1975 bp, Homo sapiens
ggaacaagagcgtaggtgggagaggtatttacttcaggggctggtcagagtttagaggaggattaggagcgttgtttactggagacaaggccagacagggtgttgagatgggtgtaaattgacaatttagagtctggcataggagagatgaacttggttaatacaaaacggtttctttctttatttccttttttaaaaaattatcaaaatggaaatatctctcattataaagttataatgtatatattttaaatattgataaaacttgccatctggaaatgttgtactcaatttctaccaattgcatgtaaaaatgcccctttctgtgaaccttcaccaatgcagacactgtcaccgttttgccaatgtaatacataatttgtttaaaacaaaaatcctattttactttgaatttctttattggtgagttaaagtatcttttaatactggccatttgttaatttcttatttatgaaaagcctgtttttgtcttctgcatatttttcttctgagatagttttctttttgtcttgtgagaactttgtatcaatacatatatatatatgacattatccttttgcctgtcatatatgaaatttgttaacgcatttttagtgttttattggtactttttgccatatagaattttactttttaaaaaatgtattcaaatctgtcagtcttttaaatgatttctggcttggtattatgattagaagattattcctcactctaatattaaagtatgttaaacttttatgtatatatatatattttttccactacttgttttttttttttaagccttatatcttaagtatttaatacagtcaggatattttgcatagatcttttcaggtagggatagtcagttgattaaagtcatttatttgataatcatttcttgctatcctaatgtgatcagccatatttatgatgagctggattctagcatataccctactcagttccactgatttctttgattcttgctgaaagtattttaattattgtagttcacttccctcctttttcttcttttcttagaatgagaaattgtgtgtgccatatgtgtcatagaaaaaagaaagggtatcatagagcatctgctaggctgtcttctggttgttgtagtcacattagaggccgtaagtgatgataaacatctcactagaatggttctactttcacttacaacaggaaatttaggcatgcttcaccagctaaggaaatagattttatgtattcattcgtcactcacccattcaacaaataagcgcctactttatgctattgttgtacttgatattgaggccacaacactgaagaagattgccaaggtttctgtgcttttggaatttgggagaaacagattaaaacaaacaaataataagcacatcacataattataagtgttgcaaagatggtactgtgatagtaacagaagtcaggggagaaggattattttaaataggatggttagaaaaggccagagatggggggtaggtgttttaagctgagatgaagggggtgatattttctggtcattgttttatttgtttttggttttgtgtgtgtgtgtgtgtgtgtgattgtttctttgttttttagatgggcttgctctgtcacccaggctggagtgcagtagtgcaatcttggctcactgcaacctctgcctgctgggctcaaatgattcttctacctcaccctcctgagtagctgggactacaggcatgtgtcaccacactcagctagttttttctatttttagtagagatggggccttgccatgttgcccaggctggtcttcaactcctggactcaagcgatctgactgcttcagcctcacaaagtgctgggattacaggtgtgagacaccatgcctggcccattgttttagatatttacacaacatctaaatattttctttggtgtacattgaatgttatttggcagtagctggtctactgtggga

SEQ ID NO: 120693 - DNA, 2267 bp, Homo sapiens
tagagctgttacgtgtttagagactggctgtattcatgaaggcagtttttgtcttggtatagccagctcccaattctggttgaaaaaaaatgagcaacagtgatgttagtgataatgataacaagaaaaggaaagaatcttgatatccatgttaataagaattttttaaaaattatagccactttattatattactactttccttagtaaactgtcttttttactaggttataattttgatagtatttaaaaatgaacctaagaatatgtctctgtagattaactgaggatgtcttggtgtttcttatcttcacaattattcattgtctacctaaacaatgttctaactgcacttcttccaagaacttcactgggcaaataaattgtttatttccttagcacgtaagtgttcagtttgcattatgttagttaatttgcacgtttgtatgtcagctttgttctttagtgtcctttgcgtgtttatcttgcctctgatactaaaattataagctcttggaggcaggcagtatggattctaatcttttattattcttgcacagtgctcagactgtgaccttgtatgcagtaggtactctataaatgttagcacaggtttcatggtgtcaaggcaatgactatgtaatgaagagagattgatgggaacattaatatgtacatatattccttgagactttttatcaatgtattcattaatacatgtatgagtgctggaaaattctctgtaatggtaaatggttctgaactgtttgcaaaggttactttgttttttcttcaggaaactgaatttggaggttattcctgaagaatgtgtcatgtattgatgaaagattacatctaatacatttacaaaaatgataccttatgtatgagaaatctgagattaccccgtcctctctctgagtttaggctaaactgcatataaatcagaactgtgtagtagaaaaacaatgggctgtggagttaggtagagctcttctcaaattcttgtttaaaacagtgggctgtggagttaggtcgaactcttctcaaattcttgtttaaaacaatgggctgtggagttaggtagagctcttctcaaatctttgtttcacctcatatttgtgttgtaatacgattgtgcctctctgagccctagtatctgcatccataaagaataggaataccaacacctcttcatggggtttgatgtgagagttagatgatacagcacatttacatgtacagagcacagttctggcagaaaggagggactcaataaatggcagtcatttttattatttttcctaatttcagaaactcctgaatggtggttgaccttcagagagagtcatccctgccatcctcgttggtcacggtagctctcactgtgaggtggctctcactctaacctctaaagaccctagtctttttggtacttttttgtatcgccaacccatacatacagtccaaaacatgccttaaacagttttatcttaacaaccggcctatctttgtatatgtctaggagttttcatatattttggttggtaaaatatatataacataagatttgccactcatctatcttgtcaaatgtaattcagtcagcattcacctcaccaagatagtcgatgttatctaatggcagataatatcaggcttcaaagccagtgtgaacattccaaccatgataatgaactcagagcaatggttcgctttgcctttctggactcattttaggaatgttcgtgagttaagtggggattgctctatgtagccaaaagcttagaccagttatcctcttcagcctttaactggagatggagaaaagtgactcatcaatttatgtttagtttttcatatgccttgagaaccatgttatgtcttatcagccttttctttctcaggaaaggcaatttccgctttacccataatctgtaaccttcaaattgtcttcttggttatctggtaaactctctcccagtcctttccacagctttcttagatgatcgagcctagtactaaacagaaaacactagtaatgaatggtggatattgagtactctggggggtgctcttaaaattttgagctattcctcaacatggtgctgttaatttggcagccatataatattgctgaaaaatgagaaaactttagaacatgagcgaaaatggatagaagtagaattcaaagtgtgcatgtgactggtggctggaattgcaagtgggatcttggtctaaaacctgggagttgagagagaagaaag

SEQ ID NO: 120694 - DNA, 2545 bp, Homo sapiens
agagtgaggggacagcaaagaaagtgaggggatgacacaaaataagctgaccttttctggtcacaactgtgggttgcaggatgacatttatggtcacctaaatcttccaagattgttcctgttgatattacagtacaagtaataactgcatctcaaatttaaatttggcttatgacaggggaatatagatttgttcaggatgggacctgcatgtaatggttcggagtagctgactaggggaggattataggctgttttcgttactgccagattatcagctggcaagttttaagttgtacgaaacacgcattatctcttgactggtgtcattgatttttttgcaggtagcttgtatgtgggagggtaggagactgggaggcagcaggagataagctgccctctgtgagggagccattccaagttgactttcttccttagaggggtggccgaacaccctggccagggaaggtagagggagaaagcatacttcctgcttctccattttctgttctttctctctctcgtggcatcatttatcttctaatatggtataggtgagacatcctgaccatgtttgaaaaggagtaaatatcttgcatgcctgatgtgccaagcactgtgtaggaccctggggatatgaatataagtacaggatggcctttgttcttaagcagcttatgatttgagaaagcagacagacaacctgagagataatttcagtgcattgtaggtgaatgctatcataacattcttttgttattagaatttgattatgtagaaaatgtaattagtgaattctgtattttttgtaccttttaacactttattaaagtacagctttgtattgttttttaatgtggtaatttttttctgctttttccttttgattcacaggtcttactcatacttcattgaagtgtcaatggatgaacttgattgggtcagagtgatagatcattcacaatatctgtgtcgttcttggcagaaattatattttccagcccgtgtctgcaggttagttttcagtggttaataaatgatttttattcttatataaggagatttggacttggagaagcagaactgcatttttcatcttgaaaaaagagttattcaggatgtcaactactaaacatatcccaagtaaaaaacttaggaaagtatggaaaatcatgcatcttaatatttacagtgtgttgtggaactatttatacaacatgtcttgtataatatgtatgtagtacacatgtgaatgaatgagaagggacagggaacatttgagaagtggaatgctttttaaactccgtgctatacagtgaatggtaatattcattgtgatacattgaaagcagaattattgttagggggtgcattcttcttatgaaagccatgagaaatatttctggagtcttccctgggaatggccagggccagaggacatctttgaatgccattgtacatgttctggttatctgttttttcctttaggttagtggttaacaaatggggtttgacagaacaggtgtttcaagtggggttgcatttggggcaaatgaggcttagctagtggggctctaggctcagagcttctcttcagccagagcacctctgcttttatttttgttatgtatcgcagccctcgatatggttgtcttttaaaagtatcaaaaagctactgttttaatatttcatattctccctttaggtataatccatcatttaaaatttctgaaattttgtaaagcctatacaaattagtgaatttgtttaggtggttaaaggcccccaaaattttgttgcttttttctgctgtgttttctcactggaaattgcctttagatattctttaccttaaagtcaaaagattaaaggtagaaagtgattagtttgtttgctcaggaagaaaagggaagggatatggtgagtgtacaccatggagaatgtggagctggcccctcacccatgacccatctgatctcccactgtggctgattgggagcagatgggaaggcaccacagcacttagtctcttggtcagaagttactcttatacttgtgaaacttatggtctaacagcaaaaggctgaatttttacctccactaaggaacttcacaaaaccgttcagcctctggtacagtaaagaacgttgcctacattttttttattggtatgaccggacacaatattgttacccagggatcctcttgtgtgaaaatgaagaaaatcaatttcatttccccaaagacagactaaagtgtctcaggtctagcggttgctcttttatcagaggagttttgaatggattaaaataagagggacaagaaattgagtgaagattccatatctcagagctgcctagggatacttccagagtgacagagggacccccacatagaggaggagattgagtctgcattgactcaggttattactgttgtatctgattaaaacacaggcagcataacaaagcgtctgatatggactgaaggactgtgtgtttgcatttaatttgaaacaacaggaacatgactcccagaacaaatc

SEQ ID NO: 120695 - DNA, 1484 bp, Homo sapiens
acatcgtgttaagagactcatttgcagctcccgaaaaagatattttcctagccttattaaactggtgtaagcacaattcaaaggagaatcatgctgaaatcatgcaggctgtgcgtttacctctcatgagcctcacagagcttctgaatgttgtgaggccttcaggactgctgtctcctgatgccatcctggatgccattaaagtgcgatctgagagccgggatatggacctcaattatagaggcatgctcagtaagtacctgtctatcctaaactcaaccaagaagcttggtatgcctctcatgccattaaaaccgcaaagctactacagaaccgtgtagtgcaggtgtacatgaaatatgtacgtttataaacagctagcctatggaatgtctttccctttcattttcctgttaattcctcctgagattgattagcttttgtagacccccaaataggtatttcttgccattcctggacagatttctcaactcctccccagaatgtcagaaatggacactttcctaaaaagctgctgctcatgttaagaccttttcttccttcctccatcaaataaatactgagtacattctatgtacttattattttgggtaccatgaacatggagattcttttttttttttttgagatggagtttcactcttgttgcccaggctagaatggaagttgcaatctcggctcactgcaacctcgcctcccaggttcaagcggttctcctgcctcagcctcctgagtagctgggattacagccacccgccaccacactcggctaatttttatttttagtagagacggggtttcaccatgttggccaggctggtctcaaactcctgacctcaggtgatccacctgccttggcctcagaaagtgctgggattacaggcatgagccaccacgcccggctgaacatggagattctaaataacaataataatagctaacacttatgtaacatacatacataaggtagctaacacttatgatacttatcaccacttaagtggtgatttttcttattaatggatttatagcaattaacacttacagagtgcatagtatgtatcaagaacaggtcctacacgatttaattctcacaactctttgaggtatatactgttattgactccattttacacaatgaggaaactgaaacagagaagttaagtaacttgcccaaggtcacacagaaagatgacagagctgagagtcaaacctatgtagtttggctccagaagttgtgtaattaaccactaaactatgctgcataattgttaaacatagtctctgcctttgatccttttaatttcattgtggaaataagacataaactcccatgaaaagttaaatacaacaatattcaagggagtacatgttatagaacttcagaagaagtggcttggtatggttgagggagatttcatggaggttatgaagcttgagttgagccttgacatttgatttga

SEQ ID NO: 120696 - DNA, 3567 bp, Homo sapiens
taagagtatgcaaaatgtggcatacataaacccacattagcataatactacagtttataaaggcttctaatttaagttttctactaagaagtttggatactatccaacgtgtagcaacattgcaaagctccacatatgaacatatgaacatgcataaaatggaattactttacattttagaaagacatatatcgtcagtatatgttgagttgagctttatattggtttctattcttaatttttcattataaattactgtttagtctttatttttcttacaggttgttcacttaaccctgtagtatatattgatgcatatttgtgtcaacagtattcttgttttgtaacttttaagtaactagattgtacattgcagttccaatatgaattattctctttgtattagcaaagtacatgtatgtataatctttccaaagagaattgaaaaatagcatttcattcttatcacccttgcatattttacctagtctgaagatggtatgttaaagtttgagaactgctgctctgaggagttagctgacaggtctagaagtcagagtcagaatcatttctgatatcttacatttacttagcaaggttttataagttcaggaccttgacaaaccctttctgaatctgctacttattgggtatgtgattggacaaattaccgaatcttgtctgtgtctcaatttcctgtctgtaaaatggatattttaaaagtacctacctaattcaattttttgaatattaaataagatgatatatataaaaatgctaggactgtgtctggcttataagtaagtcttcaataaatagtagccattattgttagatgagaagtactttcagtgtccctactataaaatggttaatttgttaccagattctaatttggttttaagcttgttttcagattaatacatccaacgaatatatatttagtcaacaaatattttaatgctttttgtgtggaggttcattgttaattatattgtatgtttcaaatgatttaatcatttaaaataatcaaaggtcactttcttataaaatctttactaccagtaagtagtaaagttgtcatattggccattttcttattatttgcttgtgttgacaatgttatattatcttcaatcagtggtttcattgtgggaaccttttttattttttaagacagggtgtattagggttctctagagggacaggattgataggatagatgtatatatgaaggggagtttattaaggagtattgactcacacgatcacaaggtgaagtcccacaataggccctctgcaagctgaggagcaaggaagccagtccgagtctgaaaacttcaaaagtagggaacccgacagcgcagccttcagtctgtggccaaaggcccgagagcccctgacaaaccactgctgtaggttcaagagtccaaaagctgaagaacttggggtctgatgttcgaaggcaggaagcatccagcatgggagaaagttggaggccagaagactcagcaagtcggctgttacccttcctgcttttatgctggcagctgattagatggtgcctactcagattgagggtaggtctgcctctcttagtccactgactcaaatgttaatcttctttggcaacaccctcacagacatacccaggaacaatactttgcatctttcaatccaatcaagttgacactcaatattaaccatcacacagggtcttgctctgtcacccaggctggagtgcagtggcatgaacatggctcactgccgcctcgacctcttgggctcaagcaatcctcctgcttcagcctccctagtagctgggactgcagatgcacaccaccatgccaggctaatttaaaaacaaaaagttgtgtagataaggggtcttgctatgttgcccagactgtgggaacctttttataattcacttgtcattttgtgagagagaatttaattaaaactagataacttttggaaaattcacttaagcaagcacatgttaacttaatacttcccatgcacaagtaaggacactaccttcagccctgcatctttgtggaattcccactcttctctcaagtcacctatttatttgatgacacaaatgactgtttttgacatgtagatcatgagaaggaggcagtgccatccacttactaagaactagtaaagctggctgggtatggtggttcacgcctgtaatcccaagcactttgggaggctgaggtaggcagatcacctgaggtcagaagtttgagacgagcctggccaacatggtgaaaccccgtctctactaaaaatacaaaagttaaccaggcatagtggtgtgcgcctgtaatcccagctactcgggaggctgaggcaggagaatcacttgaacccaggaagtggaggttgcagtgagccgagatcacaccactgcactccagcctgagtgacagagcaagattgcctttaaaaaaaaaaaaaagaattagcaaagctgatttttattctcatttttctaggttaaaaattaatatcaatccaggcatggttgtgtgcacctgtagtcccagctacttgagaggctaaggcgggaaaagcacttgagcctaagagtctagcctgggcaacatagcatgacctcatgtctaaaataaatacatacaaacacatcaatataagtgttaatgttttctttccaaattcctgtggtttgtattgcagtctccctcgaatatgagcagcccactttggagagcacatagccaattatttgaatattaacccttactctcatataagaatataactgataattttctgagttctgttcatttagtattctatttagcatctttgtggttgttttggtatggtacttatggaagtatttgactttctaaatttcataaaatcatagccaccctatgagttttagaatttacattacttgttatctggtcctactttccttagtagacaatgagttcttcaaaagtagagacttttattaatctttgtgtttctgtcgcctagcactgagcctgtattgtagagagagctcaataaatctttaattgaatgaatcatatacatattcagaaactagtttgttcattggcaaagaagtggagaatcaatgtgttaactggtaattggaattacatgcatgcttaataaaataattttgtcaaatatttttatgatactattctttagtggtcaaaccggagcatatttataaacatttatttacaaacataaaattacagaatgacaagactttggagcttaactggacattcaaaatctttcccagagaagaaggtatgtcaggaatcctgtcatgtgaactccagtcatgttcttacgtagcactttactggctggaggataattctcttctgcaaggtttagaattgggtttgcaaaatatcagagtcaaggttacatctagcagcacggtcagtcttcacctgttccttagacttttggatgacaggggtagagtatatatcaagagaagtgaagtatcctttctgtgagaagtagaatgtgattttttttggagagtgttta

SEQ ID NO: 120697 - DNA, 1063 bp, Homo sapiens
ctttgggaggctgaggtgggtggatcacttgaggtcaggagtttgagactagcctggccaacatggtgaaaccctatctctactaaaaatataaaaattagctgggtggggtggtgcacacctgtaatcccagctactcaggaggttaaggcaagagaatcgcttgaacccaggaggtggacattgcagtgagccgagattaggccactgcactccggcctaggtgacagagcgagactccatctcaaaaaagaaaaaaaaaaagaaatagctggaggctttggtaaagcacagatttctgggtcccacccccatagtttctgattaagtaggtgtggactggggcttgaaaaattgcatttttgaacaagttcccaggtgatgctgatggtgctgttagaggatagatgaaagaaaaggaaccagcactaacaaagtggttgaagtgtatggagaaccaggagatagtttagagaagaataagaattttaacagcctccagactctctaggtctaccagtctgatttccaatttcgtagagcttatctcattcttatttttgttttctccagaatctattataatgcctgatacatagcaataacctttgaagctgcttaatactgtcctggtgcatgatggcatgtacctcacacacagatttcatttatcctcttttatctctgatgagtcatggggaggatatgatttctaattttacacacacacaaaataactacagaaaatttctttcatatatctggtgtgtagctatgtgcatttgactttgtgttagatgccctctcccccccctttttttttaaaaaaaaggaacaatccagtttgcaaaataatttttaataatatgtgccaggattccagtctgtgtcctgtattaggcacattgagtcttaaaagggaagcaaataatatattccctgttcctgggaagtttacagataagatgggtgaaatgagcaaaacccacaggaaagaaacaggaagaggtataatcacagaaacatggatgtagagaatctgaatctaaggacatattctttg

SEQ ID NO: 120698 - DNA, 1195 bp, Homo sapiens
gcggtagccgtcccgttcgcagtccacgaaggtgtagtgggaagtagacgtttcggggattcggggtggctctaccagcctcccaaagagaggagttcgaatcaggggcagcccaggttccctagcagtctcgtatcctgtctgagacgacgttgcctgggactgaggaggcgaaacccgggaccccggggtgggggtttggaaagtttgggactgctggggccctcatctcccctgccctggccagcctctgagtaggagctggttgttatggagagagttgtgaatcagtgcctgcgtgcggcatcagacacacccacgaccttgggagggcgacctgtcagtatagatccggggcagccaacctgttgcctagagtttctaacttcacatgtatgtgcatgtgtttccttggcgttttagtacattgttgttacagattttgagaccaaggtgctgataggcatcctcatttcttacttcctcatagacttagttatcttgctatatttcccagaaccgtgttgtgcttttgtcattagtagatccaaggaagtatggaagcatgttttgtttgtttttcctaaaggcagtacaggctgctattttctgggcagaaaatacggattctgttcactgtgtgggcggaaagtgttgatgatgggagaacccagcatgtaaaggtgtagctcatcctcagccctgtgctgtcttctcagtgctctggactctatcatgggtagatgtataggggttgtggttaccatacttgggagcgaggaatattggagacagggaagaagccagtcttttctttctgttgattaaggcaatttgtagaaccagtgaaaagataggctgtactgaaatctaatgttttgtgtaagaggatagaggaaaataagttcaaggttctcatttaggtctaaaattctatgattctgtttcataactgagaatctgtaaagtatgttacctcttggaaccagtaataaccttgctttgtaacacttattagattactcggaattcaaagtgtcttcctccctccactgtaatagcttttaggacaggagtcatctgtgttttcctccttgccctatgtctaacacataggaaaaatgtgcttgccacagagtaggcatgcaatggatatttgttatatagcacactatgctcaagtggtgtatctatg

SEQ ID NO: 120699 - DNA, 2287 bp, Homo sapiens
atgtgtgcaagataacattttagtcattatgaaaagtatgacttttcatacttttctgacaataagaatttttaaaatttaaaactgtaaacaaaataatgtacttcattaaaatgcaaagtaaatctttaattaataaaagtttttaaggccaggtgcagtggtttgtgcttgtaatcccaccactttgggaggcaaggcaggaggattgcttgaggccaggagtttgatagcagcctgggcagtacattgagatcccgcctctacaaaatcaaaaaattagccaggcaaggtggtgcgtgcctgtcgccccagctacttggcaggctgagctcaggaggtcaagcctgccttgggccatgatcatcccatgcactccagcctgacattcagagcaagaccttgtctcaaagaaagaaaaacatttttatggtgttttcttttttagtcttttcaataatgaaaattttcattttacaggtaaaatgaaaggcctggcatttattcaagatcctgatggctactggattgaaattttgaatcctaacaaaatggcaaccttaatgtagtgctgtgagaattctcctttgagatttcagaagaaaggaaacaatgtgattcaagatatttacataccagaagcatctaggactgatggatcactgtcccgattcaaattattcttcagtccatttccccttcctatttcagctgttccttttcacctaactgttcagtcattctggttttcaagcagtgctttatctcatgtccttgaatatagttgtgtaactttattttttaggtaataattagaacagttcccttcagaggctgcatttgccttcttctgccacctaaatattacttcccttcaaatctgcctttgaatcatcatttttaaaaaaaaattaacatgtttttgttgtagttatcttctggggtttcaattcctcagaaacaacttttttcacaacggaaaggaaagaacactagtgttctttcagtaaagtacaaagtgtttattttacaaaagagtaggtactcttgagagcaattcaaatcatgctgacaaggatactgatagaaaaagtgatttcttcttattataaagtacatttaaagttcaaggactaaccttatttatttgggaaaggggaggaggaaggaaatgatatggtacccagacactgggctaggctgcaactttatctcatttaatactcccagctgtcatgtgagaaagaaagcaggctaggcatgtgaaatcactttcatggattattaatggatttaagagggcatcaatcagctcaactcaagatttcataatcatttttagtatttagattgtgcctcaaagttgtagtacctcacaatacctccactggtttcctgttgtaaaaaccttcagtgagtttgaccattgtgctcttggctcttgggctggagtaccgtggtgagggagtaaacactagaagtctttagtacaaaactgctctagggacacctggtgattcctacacaagtgatgtttatatttctcataaagagtcttccctatcccaaggtcttcatgatgccagtagccatatatgataaattatgttcagtgataacttagttatcagaaatcagctcagtggtcttccccgccatgattcacatttgatgagtttttaaaaatcaaagtgattttgaaaatctctaatggctcagaaaataaaaacatccagtttgtggatgactatatttagatttctctagactctagtggaagacctttggaaaggccatgccaaccgtgcttgtactgctagaagcactttatgtttcctttttgggtgaaatggatttatgtgagtgctttaaacaaatagcaatacttatagactgaaataaaatgaaacttcaaataagactatgtttaatttgtaaacctttgtccatcatgttctttctttaaaaaaaaaaaaaaacaactccccttagtgagtactgaaaggatttgaaaaggcttgtaggctcattctgaagagagaacaattgtgattctgtacagcccgtaaagcaggtagtgtctatggataagggagtgtgggaaaggtgggaagaagaaagtgaatacggaataaaggattgtggtagataaagtgcaaacagaagaatatcaaaaggtaaggaacttatgaagaccaatttcacatgttgagtgctagaactgacaaacgggagggctaatacattcacaaattcagtaatttaagctttatttccaaggaaagaa

SEQ ID NO: 120700 - DNA, 2608 bp, Homo sapiens
gtgtgtatatatatgaaatagcaacaaggttctttatatttttcagtacaaataaacacagttctcttttggagatagccgtttctatttattaacaagtaccataatttcagctaaatgttactatatttacagaattgatgaattacagaagttttcatttttgtatttcaaatatttacagatgcatttttcatgatattttttcactgatttttcctcctgcttattccattaaaataggcttactacatatagctcttctttttagtaaaacttgaatattaagttatgttgattatagtatgaattagcctttcctgttgttaatgattcaggcttgttgttttttcattgcaggctaatccaaaaatgtgattttcccattatgaagttttcactctacttcttggcttatgaggataaaaatgacatccctaaagaaaaagatgaaaaaatagcctgggcgctctccagaaaagctacacttgagctgacacagtgagtatgagtttctatatttatatatattatagattttttaaggtagtttttaaaaatcttttttgttttgtttactgaccagtataattcaaaccagatctgcctatgacttcacatttttaataatatattgaagtgtttttcatgcatcttttgatctttgtattgttcttgggcaaatgagatgtgttttttttagagacaggctctctgaagcctctaacttctaggtagtcttcctgcctcagcctcctgagcaccttggactacacatgtgtgccaccacacccagctagtttttgtttgtttgtttttggtagaggcatagaggcaaggtctcactatgttgcccaggctggtctcaaactcctggcctcaagtgatccgcccgcctcggcctcccagactgctgggattataagcatgagccaccacgcctggcccatttgtcttttatttttatttatttatttatttattttttgagacagagtcttgctctgttgcccaggctggagtgcagtggcgcgatctcggctcactgcaagctctgcctcccggattcactccattctcctgcctcagcctcccaagtagctgggactacaggcgcccgccactacgcccagctaattttttgtattttttgtagagacggggtttcaccatgttagccaggatggtctcgatctcctgacctcgtgatctgtctgcctcggccgcccaaagtgctgggattacaggcgtgacccaccacgcccggcctccatttgtcttttagataagagaatataagaccctgaaattgtaagatatttgcctgtttgtctctaactaatttttaggtactataattagtctttcagcatccaaaattttgttcttttattattttgctacattttggatccagaaatgtgatatcatgtgttcctttaaaaattcttcaaaccattttgtaataattaacattcaaatttggtatttttataacttgagcacttaaaaatgtaggcaatttctttacattgtttatctgcatactttaaaagagattgatttcagagtgtgtgatttcgtgtgtcccttgattcaaaataaagctttggaatcaggcaggcttagatatgagtctgtgactctaaacaagtaagtggcagtttcatcaatagaatggagatgttcacacctagcccatggagctgttttaagggtttaaatgaaatataaagtacttagcacaataaatgagcattattattattcttattattgttcttgtccagtacctgtatttactgtctctttagtctcgttaaaatcatactttggccatttgtcctttctatagttgaaaacttaatatttttgtagcaggggttaggccaattatgtaaagtagcatataaacgtggtaagatttcaaagatgttacttgcttttcagaatatctattccctaggacattgtagctatgttttccttccttttgtagcaattggggcactgaagatgatgagacccagagttaccacaatggcaattcagaccctcgaggattcggtaagtttgcctgtttttatgtgatatatgtagatttgtgtgattttgtattatgtatataattatgattttaataaacctaaaacattaatgtcctaattaagtatgatcaatttattagagatatgattatttttattttccacaaataatcttatttaggagttgtttaatttcagagtctcgatctaaaattacacttaccatctcaccatgatttacttttaagtctcagaattaatttccagtagacttttttttttaaaaaagctgtagttaatactaatcccagtttctgctagcacatacacttctgccttgatctccagtctctcaatcaagatgacagtattgcaggcttcagctggctgctatagtcaatgccaaccacaaacctattaagtattagtaaatgattactgttttttggtgtcgattattcttaactgattagactgtatatgagctgatattgattaattttaaataatttataattcaaggcaactaattaactacttatacccagcccattagatct

SEQ ID NO: 120701 - DNA, 1031 bp, Homo sapiens
ctatagtgagggccaaacagcatggtggagcttttgagtccagtaatccagtgaaatgattttcagaaaatcctcaagagaccacaggatgaagctatttagtcaagctccccgccacccttgaaagacaagctgattgaactctgaaaaaggttgtgaactctctctggatatgatagaacatcttctgtcttagtctaagagtaagaatgacgggtgacagagatttgtcttctgttttatctcctctggttggttttagcgaaattattctaggccctgtttaatggtttgtgttttatatcaatgattcattaagagcttattttagggaagttgcctgctatctcatttaaaaaagcaaaataacatttctctttttaagattacagaaatgataactgttgtgcaaacatattcaaccttgagtaattctaccatagaaggaatagatattatggcaataaaattcagaaatatataccaaggggttaagaaaaagcaatatgacattctggatccaagaaggacagaatttgacacagatttcttagatttcatgacaaaaatcaatggtttagaggtaagtaattatacctacttttacttagtaaagctgaaaagtagtcagtagtactatctggtactttttgtaaatattcacatgtagtaagtgtttctatatttatgatttaagttcctctttcacattgaccaaacatatttgcagtgtgagtaacttttaaactactccactaaaggatttttttttgaatgaatagtgagcatatccaataaaagacatcagagagtaactagaagcccaaagggcttttatagctaggattcttttttttttttttttgtgagatggagtctcactccattgcccgggctagagtgcagtggagcgatcttggttcactgcaacctccacctcccgagttcaagtgattctcctgccccagcctcccaagtaactgggattacaggtgtgtgccaccacgcctggttaatttttgtatttttag

SEQ ID NO: 120702 - DNA, 1049 bp, Homo sapiens
aaacaaacaaacatgtaaccctgaacttaaaataaaagttaaaaaaaaactatcatattgcccccgttttctggtgtgtgtatagcaaagcccgtttaagttagtatttttgcctatagaaatatgggctctagatactattatgacagatattaatatgtagctatgtgctccgtttgaatacctccttgaaatttgggataagggcagaaaaaaaatacatgtaataggaaataaaggtgaagagaaaattaagtgtcgtatatggtcaacatcattgtttcaaaatctcaggttaccttggatgtgcatttacatatttattgactacctactgtatataaaacatgaataatgataaaacaatacaaatatagctgtatatattttttgccttctcccttgtattgaattcaaacattaacatcagatttttaattacagctttatcattctcagaaagatgacccccctcttgctcgcaacatgccccctatagcaggaaaaatactctgggtgaggcagctctatcgccggataagtgagcccatcaattatttctttgtaagccaagaattaaattttaatatgtggattttggtggttttaatataacaaatatatcatatcctataatatttgtgtgcattaaagtagccaacaacgagccaattcttttaccaggcaaggaaaatttagtttataaatatacttgagagagacaaagtcaattccttcaggtttagtagataagccagtctaattacagttatctcaaagtcagtgaatcttataattttatgtcttttaataacacaggacactttgtaaagccttttaaaaagtaaaaataaaaaatttgaaaacaataaagtacaggcctagcacagaagcttacttctgtgtatgggcagataggtcactgatacatactcagtgaaggtgaagataaagccaaagagtgtattcctgtatgaagaactgccactgagagcggaatataatacagttgattcattctctatgtccttcagattattagatttctg

SEQ ID NO: 120703 - DNA, 1081 bp, Homo sapiens
aaatatttatttatttatttatttattatggagttttgctctctcgcccaggctggagtgcagtggcgcagtctcggctcactgcaacctccgcatcctgggttcaagcaattctcctgcctcagcctctggagtagctgggattacaggcacccactaccatgcctggctaatttttttgtatttttagagagacagcgtttcactatgttggcgaggcaggtctccaactcctgacttcaggtaatccacctgccttggcctcccaaagtgctgggattacaggcgtgagctacggcacccggccaagaaattttatttttatcgtttgatacatggttacctttttttgcgtgctggaatttaggaatttgccctgttattcatggttcaaggaacatcagtcaattatatcttgtccagaacagtgggatgggatcagaaaaggaggtagagacactgaatgcctggggcaggctgtggggctggaggcctctctctttctaaaccctttgtttccttttccagtcttccctctatatactgataacgtttccctacttctgcttcttgctgatatggccttccccatctctgttttactgtgaggcagaatctaaactggtagcataattatttgatatcattttacatataagtactttcattatttggatataaaaacattcagcagtcttttaaagtaaatcttttcccttaaaaaaacagaaaaactcagacattttatcaagtccggacggtaaagctgtcatccgtcagtataacaagatctcctatgtgctggtggaattcgaggtggtctatcacacagcctggatcagagagatttcacagttgcattacggtgtgtataacactgccatgagcctacaaagtagggattaggtgattttgaatgagttcatagttctggagaactttttccatcccttccacataatcttaggatagttacaatttagatttagggatgctacagtggtttatttgtttacagttgttaataatattctgattttataagtgaaaatgatcatgaccttgaagatgacatacttaa

SEQ ID NO: 120704 - DNA, 1006 bp, Homo sapiens
cttcctctatcattctccccctcaaatcagccttgcactgggccagccgaggcttgccccactcagtggggaatggaggtggtgaaaattgagggatggactgtatgtgccggcagtattacacatttgtttcttctttccacaggtgatgattcctagtttggatgacattcaacaagccattaaccgtatgatccagttaaccctggaggtcagcagaggagtggctcactgggggcaacagcaaatccgtcccatcaagtctgtcattcccagccccaccactactgacgtgacccatcaaaacacaggaaaactgctgaagaaggaagaaagtaagaatgtaaaattagtcaatgatcttactgatcctttttggatttgatagcatatagatttttaaattattttatatgtttgataccttttgcatttaaaaaatagtatgtttcatcttaaacataacgtgcaggcattttttcctggctttgggtggtgggtgaaaaggatttttaaatcacttttctactatgatgatcttaagttaaaaattaaaataaaccttagcactaattttactttctgcatgatagtaggttggataaacttaaggtaaacataaattcgtcacttaagtagttatgaatatgatatgatagtgacccaaaatgttatgaacatttttttgacacttcctgtatagaaagaaactggtttcttttttattttattttattttgttttattttattttattttattttattttagttctagggtacatgtgcaggatgtgtaggtttgttacataggtaaacatgtgccatggtggtttgctgcacctatcaacccatcacataggtgttaagcaagcatgcattagctatttttcctgatgctctccctcccttcacccccatcccccaccaacaggctccagtatgtgttgttcccctccctatgtcaatgtgttcacattgttcagctcccacttacaagtgagaac

SEQ ID NO: 120705 - DNA, 1037 bp, Homo sapiens
acatgtgggatttttttttttggataggatcttgttctgttgcccaggctggagtgcagtggtgcaatcatagctcactgcatccttgaactcctgggctcaagcagtcctttcacatcagcctcccaagtagctgggactacagtcacatgccaccacacctggccacatgagggaaaacttctggtaggaatagggtgtttaagctcaatcttaaaggcagatcagggcttagtcaagggaaatgttctcataaaatccagcttgtatttgaaagaaaaaaaagtcaaatgaaaccttagccgcagctatgaccttatcattaagttttggtcacattgtttgcaatgattggtatagtaagtttctcattaaaaagtagcaagattttttttctttacagaataaaccatttgctaatgtcaagttatagtctgacttggaatatttgggagcagtaaacttggccttaatgacagatctttaacgaagtctttgtattgaaaatggatatagttgtatgcatttggtatctataagacattgtacacgcaatgtatgaaatatttgattggatgaactctgcctttccaataatggactttattaaatattatacatgatgtgataacttagttactttgtttcccagaaaagaactcaacttgctgcagaagctgtatggattgtatgacaccgtaatgagcagtattagtggttattatgaaatactttggggagatgtagatattgaaaaaattaatgcagaactgctggaatttcaaaacaggtgagtttcaatggaattttttataatgcctgtcttcttaggatcctataggtatttcagaagctaatttattccctaatataatagtgtatatacataaaaccttcctcaaataaatgtgaaggtggcatattttttttctctttctttctgaaagatgtcgtaaacttccaaaaggacttaaagattggcaagcttttttggatctcaaaaagagaattgatgatttcagtgagtcatgtcctct

SEQ ID NO: 120706 - DNA, 1071 bp, Homo sapiens
gtcttacagccgcatctccctgcagtatctgacaacatcaatgaggtgacatttcatgcaaaagactatgatcgcatcatggccgtcatatcaagagaaggagaaaaaattgttgtaatttaccttgctttaaatttttttattagaatttctttaaaaacttaggttgaggagaatacagttctcttacagaaaaaaacaggaggagagggagttctcattctacagccctgggctttgttaaaaactagtttagataaatcctttaacttctctgagactcattttgtaatttatgaagtgaaagttttggactaggtgatctgtgtagttccttccagctatagtattaggtgattttacccatatttaaaatattttgtataaaatatgaaactgtttgcttggcatagggcactatgatttattaagtgtgcatggaacgtctgtaaaaatgccaaattattatcaatttataatatccttgtaattttgttttagttggataattctgttatggccaaaggtcctgtggagatttggctactggatttgttaaaaatgcagatgtcatcattacataatataattagatccgctttctatcaaatcagtgattcaggatttcaactcttaccattcctcagccactttccagcacaggtgagaatacacaatgcttaagtaatggtgaaaagaaatggaaataaaggggaaggatgcttagcaggtggttgacctgatggtgtgaggcaattgtagctttgaattaggttagagtggcctactcacactcattttagcctcagctcccaaccacctgcttgtcaacctacaccattctagaccaacccatcccatgtcccagaggaggatatgccactattttcccatcatgaaggatacatacattgagtctaatagatacatatgtaagcgtgtgtgtgtgtgtgtatttgtatacagaaactcctcgacttatgatgggattatctcccaacaaactcatcatagttgaaaatatcattaaccaaaaatgcatttaatgcatctaacctaccaatcataagc

SEQ ID NO: 120707 - DNA, 1107 bp, Homo sapiens
gttaattgtgtagttatatgagacgtctttggtacggcatggcttgatgactcttgggcccagtggttctggaaagacaaccgttatcacgattctaatgaaggcgcaaacagaatgcggaaggcctcatagagaaatgcgaatgaatccaaaagccattactgcacctcagatgtttggcagactggacactgctaccaatgactggacagatgggattttttctactctgtggagaaaaacattaaaagctaaaaaaggtatacacaaacctcctttgtgatcattttttccctgctagcgtattaacacagtatttttttgatttttccattttaattacttgcaagtgaaaagtgattttctgttttaattattttcaggtgaaaacattttcctcattttagatggtcctgtggatgccatctggattgagaacttaaattccgttttggatgacaataaaactctgacgttagctaatggagatcgcattcccatggcccctagttgtaagcttctgtttgaagtccacaatatcgagaacgcctctcctgccacggtttctaggatgggcatggtctatatcagcagctctgctctcagctggaggccaatcttacaggtggggcagagagatgggaagaagaaccctcagagtctctccacgtttcactttctcaataaacacagattctgtttctttgttgcaggcatggttgaagaaacgcactgcacaggaagctgctgtattcctgacactgtatgagaaagtctttgaagatacatacacatatatgaagctaaatctcaatcccaaaatgcagctcttggagtgcaactatattgtgcaagtaagatttttttttgtacatttactacttcgattttgatttttttttcactcagttgcagtttacagccatctgaaatagaaagttcagacagtccataaaaatcatttgatgatgtggctgtaaaagctctgataattttgatttctattaaagatcttcttaatgatcttactgttttctctattattttcacttcccagagggatgttgtcagaggaaggggaatgaactatctttcccattgtcaggt

SEQ ID NO: 120708 - DNA, 1050 bp, Homo sapiens
cttctggtcaacatcctccaaagagacttgtagaatataaataccaaaatccttaccatgatccaagactctacacattttgaccgcctctccctcttcccgtgactctttgcttccaccacatttactgatctttgtatacgctggatatggtgttcactcagtacctctgcatttgcagtttcctctgcctagagtgctcttcccctaggtatcgaactggcttactttctcaccttcttcaggtcttggcttatatatcatgtcaggtgaagcctcccctgctctccttgagtcacacccttgagcccctcctatattctacaaaagtcttagagtataccattttatttacatatcaacatgcatctgtacatcttgtctctcaccactagaatgtgtgcttcatgaggacagaaaattttgtctatgctacaagagaggctggcacacagtagtcattcatgaaatgttggttaattgaaagacggttatatttgaggtgcttgtgtgatatgcactaagagatgctcaatagagacttgaatatacaggtgtagagcttagaagagaatttgaagctagagttatagatatgagattctttagaatatagggttgagatagcatttcctggaacaatgagaagaggaaagagcccaggatggaaccctggagaacagttacatgtgagggatgagtggacaatgagtggcttaggaagtgatcccagagccctgagatggacctggaaaaaaaacaagcctctgaaaccaagagaggtaacatttccaaggaggggggttggcagtgttggaggatgcagagaagataagatgagaacataaaaccaacaaccaaaacagttagtaatataatattgaaaactcaggacagaaaccatcctacattctgatctaaaggtttttaagtgttgaatattgagtatgaaagatgtctacagtaaaacttgttgtaacttggagtattaatgtaatttaaccaaatatcttataactcacatatctaaatttatttggaaattagttt

SEQ ID NO: 120709 - DNA, 1447 bp, Homo sapiens
atcaatgctttccatatctagagtacctcgaggttatctcttaacgggtatctctctgggtaagaatgtggtattgttacagctttgcctttttatatcctagaagttggtagaaatagtaaattagcatataatacagtctttgtgctcaaacagaaaaaacatctattactatacgtatagctgcatgtcagacttgcctgtccacttattatggatatacagatacatgaaagactgttgactgagtttggatccacacagtaaaatccaggttatgatatgcagatatatttatggaaatcctaacacattaaggaccctaatcaaagcaatttatagaagatagccattattaactttaaaggtgaacattcgttgttcttacctgcatgacaaccaactcacgttcagtttttgttatgacatatttccacatatactaccaataattagggatgattattcccacagttcatatagtccttaagaattcaggggaggtgacttgttcaaagccaactgatggtagtagaacaaggtgttggaatctgcatccagtgccttggtcttgaatccatcctatccaagagattatggtcttttaaatcctaagttggtttatttatgatttttttctgtccgtgttgtcacaaaatgtgaacttaatcttgatttatttactcagcagattttatctaaaataggatttgtgagacagttgtaaaagtaattctacttttagttgtatctgaaaactaactgagagtattacattttttcatctctaggtgaagatgctgccaactccttctaaatttcattacatcttcaatcttcgagatctttccagaatttggcaaggaatgttgaccataaaagctgaggagtgcgcttcaatccctactctcctgtcccttttcaaacacgagtgcagcagagtaattgcagacaggtgcgtgttgcggcactagagtttaaatgtatgacctgagaagtttatactacttggttaattttttttatttttatttttgagatggagttttgctcttgttgcccaggctggagtgcaatggtgcgatctcagctgaccacaacctctgcctcccgggttcaagtgattctccaacttcagcctcccccgtagctgggatcacaggcatgcaccaccatggccggctattttgttgttgttgttgtatttttagtagagatggggtttctccatgttgatcaggctggtcttgaactcctgacctcaggagatcctcctgtctcagtctcccaaagtgctgggattacaggcatgagccaccctgcccagccggttacttcttgcattacctactaggataagtagagtaaggagcattgtcatcatttgctgtggggcttgtgaagcattgatggcatctctcacctgcccactgtcttaaaaaaatgc

SEQ ID NO: 120710 - DNA, 1004 bp, Homo sapiens
gctgtctctccaagttggcttctagaaacatcctcctaccccactgtaaatagaattatggtacttaaaaaaatttgttggcagagatatgatagagttagtgttcattgttgagttaggtgtctacatgattcagtgtgtcaggctgatgaataataaaaaaacaattgtaaacatttcttatatcttctgcagattgggaagagcagctccactatccattgggtctaaaaataataaaattctacatgcgtgcacacgcatgaacacacacacagaatagttttaaaatagaagggagtaaatccagtttgttctgttcttcatgatgtaaacatagatggtcaaggaaagattcgagctgaacaaatcagtattaaactttaattttaaaaattctgtcatagaccattaacgaggaaaaagtctaatatcatctagaaacatatgatcaaaacttgggctcatttagtgcaagaaaatgtaaacattgcattcttttttcaaataagcacgttttaaatctcaaaacagatttcacgaataattcgaacgtcgtgtggaaatgcattgctggtgggtgttggtggttccggaaaacaaagtctttcaagattggcctcttttattgctggctatcaaatattccagataacattaaccaggtaggatgaaataaaacacaatatgtttttctatagttaatttctctatagttaaatgtttagaaaaaaaggaagcacaacagtttcctgtatttctttttaaggtaaactttaagtattatatatataaggatatttacgcaagtgtcacaaagtaaatacatctatgtagccagtctacagatgaagaaataaaacacttcttgtatcccagaagtgcctccatgttacgttgcagtcattaccctcccaagggtaaccatattcaaagggtaagcccattgattagttttgcccagttttgaattttgtatcaattgaactatacaggatttgctc

SEQ ID NO: 120711 - DNA, 1028 bp, Homo sapiens
tgaatgaaaatggatcacagcacaaattcatttcaaccacttatccctaatatttgtccagaaccttaaagttttgcactgttgacaccagctttcacatagattcatatatgcgattttatttgatcttcacaaaattctgggaggggtagagcagatattcttttctctattttccagatgaggaaacagagttggagttaagggtgaagtcaaagacccctcagggttgaaacatcagacagatttagtcctttttccacctcacctctgagaaaccttgctcaagtcctgtcttcctgctagtgaatcactctacatgatcacactgatttcaccttgggaaaggtgtcgttttatgggagtacgcacaatgattgaaatggtccttttaatgttctgctttcagataccgccgaagagcacatgtgactcccaaatcttacctctcatttataaatggttataaaaacatttatgctgaaaaggtgaagttcattaatgaacaggctgaacgtatgaatattggtaagaggaatggaatggaatgggatggaatagaaatagggtttatttgatagggatctcaatattttgtttggtggacattttgtctgaaaatgaaatactcactttgttagtagtagataattttaaaggatggccttgagggtattttgacctgtcgagaaactctgaacagaagaaaatctaaacagaagtggcctattttctctgcagaaccatttctcctggctctttcaactctgggtcccctgtgctgagtcactgagccattgctggcagatggggacaagccagcttttgggaatggacaacaatttcagtttttggtttcattttgatttgccttgatttgtataaactttgccatgttaattttccctacatttctaataaagaaaaaggcaaaatagaagcaaaaacaaataaaaacaaaaagagattgtgtacctaagcaagagttttccaagtgtctgctatatgtagtataactagcaaaagta

SEQ ID NO: 120712 - DNA, 1015 bp, Homo sapiens
taaccagttctttttctctacggtgctaaaagttgcaaagtccattacataagttttcacagttattttcatttttataacaaagagaaccacaaaaatgttaatatattttctatttcatttgccacctcagctgcaatatgattcaaaggcaaaaaatgatagctacaaactgtttacaaagccacagagagcataaatttgtcaaataagtttcttggccaaactaatcttattcaataggacattgtgactttcccttaaatgtagctacgtgatattcttcggtcagagctattttctttgccttcctgttgaaactcagaaatatggtcaatattgttgcttttaagacatgtatatttttaaagcttttgtctacaattttgtgtttgttatattacatgtacagtgcctaataaatagtaaacattgaataaatatttgatgaaggcatatacctgtactcagtaaaggtatatatgtgtgtatttgtaaaggtcttgataaactaatggaggcaagtgaatctgttgctaaactctctcaggatcttgcagtcaaggagaaggagttggcagtggcttccataaaagcagacgaagtgagtttgcatttattttatcactgatgaggaatatttttccatattaaaatgcattgttttaaaatggtactaaagaacaagcagggtataaacccatggacaattcctgataagatagtgttcacaaagaccattagacatttttgtttaacttataccagcgtatacctgaactattaattttgctacttggcctaagactattatttcttctctcactctgtctgtctctcttgttctttttcatctgtttatgaaatttctgcttgactatgagttatatttggtcttctgtttaaggtccctgtatgttccaggtttctgggatggcccaaatcgaggaagagttggtagagtttttttttttaaaagaaagaaagaggaaaaatccatactcctctcaaggag

SEQ ID NO: 120713 - DNA, 1010 bp, Homo sapiens
caggcagacctgcattcaacctctatatataatacacacacacacacacatacacacacacacacatacatacacatatatgtgcatgtatatatatgtggatatatacacacatatatacacacgtgtatatacttacacactgctaatacacacacatataagtatgtatgtacatatagatgatctggagtaaatttgcttaactttcttgggtttctatggggattataatttctcattgatccttaaagaatcaatgtgagcattaaaattaattaatacaaaatgctaggcacatagaaagcactcaataaatattagtgcttctgttcctgctgatgacctggctcctgtctgtctcttcaactttatctcttgtcattttgtccctacacacaatgcgatccagtcatacagaaaaatgtataggattctggaagaatggtcaggatctgttacctttaaacgtgcctccacctctgctgggaatgcttttcctaactttcattgcctaattagagtcattctttaaatctgggcccagacctcactcctcccaggaagttttcagttcttcttcgaggccttcctttgttttcctatcactcacatgcttctgtcatggcagaaatccttatgtagggtaattgtatttgctttgccattttcagaggttatgaggacaagactattttggtttgctttgttttatatgggagaatgcctgcaattgttaaatgaatgaataaatctatgataatcatttaataaaattttcacaatgaccaggacacattctgcacccccacttcctttatgggtcttactgtaacgtacaaaaggaagagatcaccgaaccgaaggagtcttagaacatgttattgatcatatggtctcccagtccttgccttgatggtcaggcaatgtcttaatccaaacccagccaatggatagaaattttcaaaaatgtttttatgagccatatattacagtaattttcttgtctc

SEQ ID NO: 120714 - DNA, 1134 bp, Homo sapiens
atctaaacacgaagacccaaccaggaattcagaattgcagttttaaaaaaatgtaagcatatataaagtgaatgtctagtcttttaggttgactttacggaaagtgttaaattcttcccagtgccaataggagacagaatacatggatagaccctcagtgcgactcaatatatcatttctgacattcttatgtttactttttatcacttactcatcttgtaggggtcctgagaaaataaatgaatatccagatatgcaagttgctttgctttctctgagcgattatagctatgtaagtttgaaaggattaatccttgactattctcttccatctgtcaggagcagaactctgacattgcatctgagcaatgccccttaaccctcctcttttgatcatagagaccccattacacatctagaccccattcaacaaaatcatgactcaccaagttttagaaattaatttttgtatgttactttaatttttttaagtaagtcttcttctattgcccttaaaattcttgattacctgtccaacaaatctctcggtttcccttagcaatgggcacattctttgtaacacagatagaccaatgagttctttctgtttaggtgacatctctgaaccataaatattttcgcacacacttggaggacagcctttccttgggccgaccccttctcattgaggacattcatgaagagctggatccagccttggataatgtattagaaaagaattttattaaatctggcaccactttcaaggtgagctttgtaaaaaaaaaaaaaaagaaagaaagaaagaaaagaaaaagaaaaaaagaaaaaaattaagaaagagaaagaaagaaaagaacaatggtgacatctacttatcttattgagcatagcagcaaatgcaatttcctttaggcagtagtatttggtacgtcggaaataaactatttccagactgatacttcagtgtttccttttattttttatagcgtataaaagtttctgaggtgggggcaatattttgataagagtagtcgtttagctaaaactaagtaacattaaggaaacacattgtctggtcttaatatgttagtgcaacacacagtatatatatgtttaagcaactctagatat

SEQ ID NO: 120715 - DNA, 1038 bp, Homo sapiens
tcctgctgcaacattattgctagaaaccccacaatcatggatgttaccacattcttctcgtgatgctcaatcctggtttttccatttttgtttatcattacctgtgaattttaaacctcagtctagtttcctcctgatattcgcatggaaagcttattccattttctatagtatatgctccattttaccttcaccaattttttgttcgttttatgatttgggagacacaccttctgatttctaagaatgcatctctagcagtcttggaatttcatgatcaatatgaataggtagtacttaaggagtgacagattgagacagttaaatttccattttcagttaaaggcagactttcatttttcattaacggatcatttcaggcaaagaaggaatatttaaggatgctatgtttaaatactgataatggttttcactaataattgcaagctgaatggagtgttgagagagatttcccatcacacctaataaatacacaggacattaattttctagaaatgctctgtagatagccatttcagctgtaataagaaattataccatttataaaaataaaataagatattggtttatttttaagcttttgatctcagaatgtctgtacaaactttggtgcagcttttccctgggaattaatgactagagagggttaatgggctaaaactctgttgggtcatcaacttttccagctagtcattaattctcaaatgccctaagcctcaatctttatcacttaattaaattcaataatttatttaatttatacatgtatatctcaaagcaattatacataattatttttactcggatcaaatgtttcactctattgagtgatttgacagtttaactttgggccttaaataatttctttagtttctgtgggtgcaaaactttaatttaaatacggtgttcatgttaactgtctttggaatactagcctttataacttccatggtctgtttgtcaaagtggggtaagtattgattatatggcataatcagaaaagaaaaccagacatga

SEQ ID NO: 120716 - DNA, 1012 bp, Homo sapiens
ctcacaccggcttaactagtaaaggggatgtgccgtctatacaactggggtttcagaggaaaacagcattcaggattagtttgtgtcatcatggacccacttactttctggttccccactctgtgttccacaatgccagctttatgctaaacatggtgtccctcaaggcggcaacatggctgcacctgctcatgtctggttttcttttctgattatgccatataatcaatacttaccccactttgacaaacagaccatggaagttataaaggctagtattccaaagacagttaacatgaacaccgtatttaaattaaagttttgcacccacagaaactaaagaaattatttaaggcccaaagttaaactgtcaaatcactcaatagagtgaaacatttgatccgagtaaaaataattatgtataattgctttgagatatacatgtataaattaaataaattattgaatttaattaagtgataaagattgaggcttagggcatttgagaattaatgactagctggaaaagttgatgacccaacagagttttagcccattaaccctctctagtcattaattcccagggaaaagctgcaccaaagtttgtacagacattctgagatcaaaagcttaaaaataaaccaatatcttattttatttttataaatggtataatttcttattacagctgaaatggctatctacagagcatttctagaaaattaatgtcctgtgtatttattaggtgtgatgggaaatctctctcaacactccattcagcttgcaattattagtgaaaaccattatcagtatttaaacatagcatccttaaatattccttctttgcctgaaatgatccgttaatgaaaaatgaaagtctgcctttaactgaaaatggaaatttaactgtctcaatctgtcactccttaagtactacctattcatattgatcatgaaattccaagactgctagagatgcattcttagaaatcagaaggtgtgtctcccaaat

SEQ ID NO: 120717 - DNA, 1042 bp, Homo sapiens
atgggcagaacttcacattacctctccctgccctgtccaaagatggaggggaacttaatgctcatcccagaaaatactgtgtgtatttacccctaattcattatccctaccactttactaggttcctggctgcccaggagagggatgtggtgtttgtctgcctcccaacactgagaaagttaaaatcagattaaatgctttgctggtggttatctttactaagttccattgtggcctttggattgtcaattacagctttcaagtcacagaagcctatttcatacattcttatctgggaattgttcgctttgctagaccttatcacatcctaatacaaatattgctttaactctgctatttcattcccaattcacaaataatattttatgattgtgttcccagtagtgatgattcaactcttccactgtgcttatcatggagagctggttgggggtatttgccatatggttaatgtggcaacctgtgtttttagtggccattatccaagtgctaaagggaagaagagcaacaggaccatggtccagccatggggctaaagtgcccttgcacttaacaccacatgtgtttgggttaaaacggaggaaaaatattttcactgctagggcggtgaagttaccagtggagtgtccaggaataaaaggctgaatatctcttaaaatcaaataatagagggctagaaataacacttcactaagagtcaggaggcctggactttcgtgcttgctgtgaaatcagttagctgaaagcagttagttgatcaagttatgtctctctcagggcttctgtttccccatctgtgcagttagaggcagaagtaggtgatctttcaaggtttttttcaatttctaaaattccatcgcccaattctgtgacaatacagtgagtgtaggtaattctttttcatcaatttcagaagtgtttactgtgatatttccaaaatctcctgggaattttagacatatgtttcagaaatatcacagaagtgtttgctgtgattttgtgtaaatattttttttacttg

SEQ ID NO: 120718 - DNA, 1049 bp, Homo sapiens
ttgttcatgaacttgtcccaacaaaaatttatttagatttttttttaaatggtggaattattcaggatcggaatcatggaacagctgcagcaagaaggattggaatggcttgtgaaaacggcagtgtgtgtgtgtgtgtgtgtgtgtgtgtgtgtgttgagttggggaaggcagaaaagaaaaagaaaagttagtatatacttagaggtaaaagagtagaattaaacattcccatagatgtatagggattctactctccacatgagtcctcaccttaggcactagaattagggtctaggaactaatctaataaatccctggcccttccttagagactgattatgtgttgcgataggaaaagctgatgccatagaaacatctggactcatctatgtgggttgttggatcatcaattcttggagctatcaggtctaatacttgccatacctttaaaatgctctctggaatatcaaaacaattgaatcatttgctctgagtccagtttgattatttattggtgatttgacaattgtaaacagttagccactattgcacaggagtctcttaggccctctttgattaagtagagggaaacaaatgagggtcatgtgaaagtttcaagacagacacgtcatgtatacaacagaaatttttagttttcaaaatctgaaatggcaagattgcaaagggaagccatcacagaatctaagtgctcttgagagaggtttagataatccaactgaaaaaattcaaacccttgcatttgacatttcaaactttcaagagtccattgtagaataacagttcattcaacaggtatttgttgagcatctactgcattttttgagttgtcagtggagacctagactttttttaaaacccaagaactccaacttggcaaatctttggagatttctttatataaaccccttagctatagagccatgaagtaatatttctaatatggctatatgccacataacgtttcagtcaacatggattgcatatacggtggtggtcctgtaagagtataatgtatttttactgta

SEQ ID NO: 120719 - DNA, 1064 bp, Homo sapiens
acttatcttaaaagttgaaacatgcatgcagttgaatacatgaacagagaacacaatattctagtaaaatgacacaaaaggcatttgagacccattccgacattttgaaatatggcacaaccccagttttaaaaagtcatataaagtaccgtataagaaaaatacaaataagtctgagaagaaagttcaatgaaaatagctgatgagacaacaaaatgaagtcaacaaaagtcaaggatccacatgttactatatacattttcagaaatttaaatttgtatgtgattcatattactccatgagctctctctagcattaggtacactacagatagaatatgtggatgaactgctatgttagggaagacagaggggtgtcaccatggctgacatcttacagagagccacgaaacaccaggtaagcctgggtaacattgaacctctgactttatcatgaactctgtgcatccacatttccctggagccccagagctctttgtttcctgtaccaaacaaatccaaaaccttattattttagttctcccttatccctctcctggactgctccttgccccatctactttagtgacatcaatgtctgcccagttgcccaactgagaaccctcagagatggcttcctccttgctgtggctccccagaccttcttagtttccaagctctagttccaaatcatttccagcatcccctccccgtgacccaccgtcatccccactgccttcagttctgccccctaacttcctgatcatcctctgtgtgcggcactgccatcacctcctaacacatcctcctgcctccaaccactgttccaaggtaagttttgacatttgaaaagtgattattaaatgtattcgaagactccccataaccttcaggataaaatctgaagtctttcacatggcatacaaacctttttcatcactaagcctttttctatctccagcttctgctcttgcttccttctttcttcttcccacactctaccctgtgctgtgagttacctgaagctcatcaagcattccatgactcccctcatatttctttgac

SEQ ID NO: 120720 - DNA, 1050 bp, Homo sapiens
catattttattgttcccacaaccagaggcttttgtattgatctcttcaaaatagtcaataagtgatacatcaaaaggaacaaatgacagatatttaactggctgtcccacaaaatcaaatattttcattgattggattaggaaaggctctctttagctgtcatagctaaggcaacaatgatctttggaaactatagctaatcatatttgttggtaactgctctgtaaagatttttgctgtattaactttctatgacatttctaataactctgcaaacataatgaagaaaaaaattccactgtacccctatgaaggttagattgcaaaaagaatatctaactgacacccagtacttaatcatgtgaaaggagaaaaaggtacaattttatttcagctctttaaggtacatttccaattattagctaagtacaatcagtaagaaataaaaatcattttagttgaacagtagttttggaaacgcaggaaatggaaagtttaatggcaagtttggttctgcaagacatattttagaattcatttgggctggtagagatacatctagaggaagaaaaagaattgagaaagaagaggttattggaagagaaatgtcagatgagaaaatctcctttattgcattgtttactttgttttaggtgaaatctcgtttgataaagatgggccatcttaattcaatgaacatatttcttagacaagaaattgacagaatgcaaagagtcatttcaatactccgcagtagcctgagtgatctaaaattggccattgaaggaacaatcattatgagtgaggtgagctgttattacatcagtaggcatttccttctttgttgatgtttcttattcatgtgttttaactttttcttctccagaatctgagagatgctctggacaacatgtatgatgctcgtatacctcagctctggaaaagagtgtcttgggattcgtccacactgggcttctggttcactgaacttttggaaagaaatgctcagttttctacgtggatatttgaagggaggcctaatgtgttttg

SEQ ID NO: 120721 - DNA, 1050 bp, Homo sapiens
tgtagaggatggtgaccgtttttccatctccagtgaggatcggatcagggaagtaaatgctgattagaacgaaagacagtaagattcattgcaaagtgtttctggaatccccctgtgggggctcaccgtgtgaggactgtgttttttgaaccaaaaacggaggcacatgatttgacagtaaaaccatgggcagtcccagaaaatcaggacatatggttaccatcattaactcagtgggtgacaatcaactacatgaataatgggaccacttaaaagccatcatatggtaaattgtatccctctccagggtgctttcagcctcagaactttaaaaagtcagtgagaaggtgtggtagatagaatagtgtcacccaaaacttcatgtccacccagaaccttagaatgtaattatttggaaatagggactttgcacacattgtttagataaggacatactgaattaaggtaggtcctaaatccaatgtgactggtaactttataagaagaggagaggacacagagatatatatacttatacagatgaatgtgagaatggaggcagagattgtaatgatgaaggaaagccaaagattgtcagtaaccaccagaggcgaagagagaagcttagaacaagattttcccttggggcctccagtagaaaccaaccctaccctgatttgacttctggcctcctaagcaatgagagaatagatctctgttgtttttagccacccaaggtaatgatactttgttatgacagcctttggaaaggaacacagattttgattccaggaagcaggatgctgtggtaacaaatgcctacagatgtggaaggtattctggaattgcataatggggagaggctggaggaattttgaaactgcctaaaagagattgttggtgggaacctggaggttaaggtgcttctggtgaggcctcagacaggaatgtggaagataatactggaaactgaaggaaacgtggccctcgttataaggtggcagggaacttggctagaacttggaaatcatctggtccagcccccttact

SEQ ID NO: 120722 - DNA, 1041 bp, Homo sapiens
acatccccactcacatgtctgaggaggctgagtttccagtgccagaaacgcccacggatttgtcatcttggagatagggacagagccctcgcattcatagccccccatcttgaagaagctgtgaagatgcgggggaattagaggctaaagcatcaaatccctgcaccaggtcaggtggggattttgcctggaaatagagaggaggtgctttaatgaaccggtcatgtcctgggtgagaatgagaggagaggtggctctgtcaggagaaacagggagctgccggcacagcacatgtgtgaagaggaatttccacactccctgacgacacctgttccgtcaaagcagcttataaagaaacaacggtaacactgtcaccctgtcacatcccacattcccaagaagggtgatcttgcaagccccggagggctggaagcaactgtgagctcctcctctccagtttgtttctggggagaatggaatgggttagggtaatcttctataagccagcagcttccgtaaggaattggtattgattcagggtagacagaacagcttcatttcttaagcattactccaaagtatttatgttcatcttagaaggttggatgtaaatcaagacttgagtgttcaaaacctcggttcttatctgcagtcaaagccagatgctggaagatagaaacgacagagttgactagcttttttccacctgctcaagacacaaaagtaattttctgaaggcaaaatacaactctatccctcagaagttgcgaggaaattcatgactctgagaaaaacagcaaagtaaaaggagactttcaggtttcagttgtctttgtgcttggaggtctcttcaaaacctatccagttactgtgctcagtctagggactccctcagccagggactccctctttccccacctctcagagaggacagaaaccacatgtccctctggtgtcttgcccaccatttcggacattctgaaaagctctctacatttcagggatatggagtctgtatgcaggtgtcaaaaacactcttga

SEQ ID NO: 120723 - DNA, 1051 bp, Homo sapiens
taagtgcactggggatcagcatcctcatttgtaaaattggggtaaaaaatgggccgggcgcggtggctcacacctgtaattccaggtgtgggaggccaaggcaggcagatcatgaggtcaggagttcgagaccagctcagccaacatgatgaaaccccatctctactaaaaatacaaaaattagttgggcgtggtgacgggagcctgtaatcccagctacttgggaggctgaggcaggagaatcacttgaacctgggaggcggaggttgcagtgagccaagatcatgccattgtactttagcctgggtgacaagagcaagactccatctaaaaaaaaaaaaaatcccactctacaactcagggttgctcccagggcagggtctgagaagagaagcaggaggtggaggggtagagcccttacctaaagaggcatcctctcgtgatacccccctttgcccccaggacttgctggcagccaggttctcctggcagaaagtggattcctggcccactgctgaggtctctgccttctctcagcagcagatcttcagactgtctggcaagggccagcctgagggcgatggtgagcattagatgaaataacacatatacagctcctaaaacagtgcctggctcaaggcaaatgctcggtaaatattggttcttattactggacccattttataccaaggtttagtgctattaaggatacagagtaagtgactgagatggatttgactgtcagactctaaaaatctgtgtttaggtatgtgtatgcatgtgtgtttatatcaggttgaaaaaaatgctggctctttccttatttcatcactcagaagatgaatgtggtcttgaactttgggaagtaaatgagtttcttagggacatggagcttggaaagaaacctgaactatgcgtgcaagagatacctgtcctggccgggctcagtgactcatgcctgtaatcccagtactttgggaggctgaggtgggtggatcacttgaggcgaggagtttgagatcagcctggccaacatggtgaaaccctgtct

SEQ ID NO: 120724 - DNA, 1122 bp, Homo sapiens
ggtgtctgctcagcctccttccctcccccactcaagcttgggttcatgacgctgcatgggacactggcgtcatcctggcaggcagcctctgggccatctcaactctactcagtgcagaaaatgttcttttaagggatggcatgcagccataccaggcgtcttgctgggcatagctggatggacgacaaaggaggagaggagggttgtttgcacaggggctggtggggagattggccccttatccacagccgctggcatctggctgtcttggtgacttggcctaaagggaagggcccagaccccagacactctggtgtgggaagggtggggacttcaaagaagctctggaaagcaaatgtatgggaacatcacccagaagagcagtccagaccccccaggactagcttggcaggttccagctaggcctctccagggaccagaatcactggccaccaccgggagccacagcattgccacaaaccctcaagggatgggggctccacagtgttacttggatttgtctctttctgccccaacaatctggcccccaagcatcagccctcctgagaggcttttcctgatggggaggccagagcccagcacaacagggatcctggctgactgagctcccctgggctgcacccccatggtcactgcagtgtctctctagatggcatcagttgagaagccctcactggctgccccttcctccctgctgtttcccgtctcagccacattccttccttccctccctcctcccctgtgaggtgctggggcctggagagaagccctcagggagtttagaagggtctgctgtagacaccaggaaggctgggggttgccgtcccccttctcaagcatccaagctgaaactggactgtgcgctgtaaagacagagtctctcttctctctcccatctcctgtctccctgtgtttcaccctccctctcattctcttccgttaaataatactgtgatggattgtaaaaggtacttagctgaatcacagagtttagagatggaaaagaccaattaggtcatcaagctgatctctctcctgaggagctgcagaaaataggagacaacaataaacaattttattgggatattaatttaggagccc

SEQ ID NO: 120725 - DNA, 1262 bp, Homo sapiens
aggcttcccaaaggcaccccttatttgctgtctcttcgtaagcgtgggcaccagtgggttgatgtgggaaacagtgctggtgcaagtgtttaagttttggataaactgaggattttgagaatcattattacattacatagcaacaaagaaacagattgatataatctgtgtgaaataaattgctgaggagagggattgtagggaagaagttgcttagttaggcacctgggaagctcaaatcatttagtttaaactgtaagtagagttgtcttcccaacgagaactggtgattcctgatttcagaaggctcatcagacccctacacccaagtcttttaacacggaggaagtttttccttcatgaatacatacaagataccgaactgaagaaatcttttctttgctccaacccccgctcccccggccccccgaagctattaatagtcattcaaatggcactgcactctttccaagctttcctaagctaaatatggctccaacaggtctgggaactattgaatgcaatgtactctgaaattccagcagctgtttacatgcctgatgcctaatgccatacgcctggaacttgctgagaactctcggctgcctctgtcctggggtactattgctgaccagcagggtgtaggcgctgcttttgtttgagctttgtagccacaaggtctgatgtctgttgtgaacagcagctgacttcagcactctggccagcttcctcaaacttgttagtggcttgcattttgtcaatttttctttgccatttcagtctttcaagcagctgaatcgcagaactgaaacaaaacacttatattgcaaagttccttccctttaaaatgagcttctggattgcagagatgattttttatggtcttagcgtgcctcatgctgtagaccacatcgttggagctctgggagagctctgagcagagaaagaccttggtgatcccccctggcccgatctataggattgaggaatgaggcttgtagaggtggcttgcccaaggtcacaacactagagggtggttgagctgggccaggacccagacaagcccttttctctcagtctagtgaggcctctgggaaggataggtgaaaactataaatagctgttcaagatactctgagtaaaagtcagtggtgttatctggaatttctactgaagaggaaatacagcagcaaaggtagactcatcagatggtgaaagtgtcatctcctttgtaatttatactggtgagaggaggggaagga

SEQ ID NO: 120726 - DNA, 1037 bp, Homo sapiens
cctggaaggaaggcaaagagttaaggaagaaagaggaagtggacggaattctaggcttgagatgaggactgagaatatctttgggtaataagaccagttaagctggagaagaagggtcatttatggaacaaaagattgtggatcgtgttgtcatggaatttcctagaccactgtgacccattagtggatggtgaaattaatatagaagatcttgttccctattaaaaatgtttttaaagtagaataggaaatacaagagaatgtctcagggagggtaagtgttgacttgtgaaactttgttgcatatatgtattctggattacagtctaaaatgtattccttattgtaggtcatgttcaaaagagttccgaaaacagtggactggacacagagctgtctaaatacctgtgtctgccattagcatctggcacaggggcctgtctactggcatttcaatctgttgaacaaattgagggtcttgggttccagcccaaggagtttggattttatcctgtagacagtgaaagtttttgaaggtttgtgaacaggagggtaataggtctttaagaaaattcatttagcagttgtacataggatggcttggggagggaagagataggaggcagggagtctagttaggagacattggctgggccttgggtgagtgacaatgacctgtgtaggttaatcacgggatgggaaggtaagggggcccagtaatggctgtaacagtggtttttgtttgtttttgagacagtgtcttggtctgttgcccaagctagagtgtggtggtgcaatctcagctcactgcagcctccgcctcccaggtttgagcgattctcatgccttggcctcctgagtagctgggattacagtcgtgtgccaccatgctggctaattttcgtatttttagtagagatgaggttccaccatgttggccaggctggtctcaaactcctgagctcaagtgatctgtctgcctcagcctcccaaagtgctgggattacaggtgtgcacctggctgattttttttttta

SEQ ID NO: 120727 - DNA, 1057 bp, Homo sapiens
ctagtagtcatcttgaatttcttcctttccctcactatcattcattcattcaacaaaaatcttgtcatgtgcccgctgtgttccagcttttgttctaaatcctgggagacagtgtaattaagacacacaagtcctactcttgtacaacttgcatttgagcttggggcagcagggaaaggaggacaataaacaaaaccagataaatgctatgaaagaaaaaagataaaaccagtagactgtgatagtgaattaggggtgaggggagcagagtactattttaaatcagctgagcagggagaactcactaaggaggagacatttaacaagaaggaaccaccctggcaaaaacggggactaagccaagggcacatacggtgacatttttgccgtttgtagtaggaggggtcaaccaagtgatatgaggggaagggagcattcctctcagagggaaccacaagtgcagaggccctaaggtaagaagcagcttgatatttgaggaatggcagtgccttccttgggccatgcctgtgtgtgatgtaacagtcacaaacacttcttcacccaggttttacagcagaagggaactggtactccgacaagttccaaatgaggcagaagaatgtccgtatctctcctcttgtttgttcccttcgtcagtttgtttacccccccacccccacacccatctacctctagctccctaacctttctcctgccaccccccataaaggcccctaattaaataaaatatattttggaggagaccatcctaggatccgagactgacctcatctctgcctatcactagttttatggctttagggaaattacttaacctctcagtgttttcttatcagtaagttgggaataataatgcctgcttcctggattaccagagttcatacattggaaggctctcagtaaatggtgacataggaacattcttctttttatactccctaaatgataaatttagtttattgtgaatctcagcatgtatattcagaatgtattttgtgtccatcagtccactatttccatctgactgctgtcacca

SEQ ID NO: 120728 - DNA, 1255 bp, Homo sapiens
acaaaccgtagtggggtggaggctgctggaggtgggagtgaggagatgagggcagggtctcaaacagtcctgactcacagggcctggaaacaagtcctatgtgggcctggggcctggggtcctcatcctccttgttggtctactcaggcccagcccagagctgtgttccctgtctcaggtcaagcagtggcagacgcaaggctttctgtgggcccccaagtggtaggagggagagtagcagagcatgggttactggaagccgggactgctagggctggtggccagggagctgcaagagtgaggctcagctctggctggttctgcccttacccctcctgcccgcctgagaactgcacaccctgcccgctggccccaggacctgcactcccaatcctgctgtcttctccttccctgtgccctgaacaaggacctcactgcccgccttcccctcccaccagcccccttgggccaggcagggtgaggccaaattgctcttggcccacaaatgggtgatggtcagatatgtgaatcaagctcctttctctagctagtgtttgatgtgcacgtgtgtgtgcacagtgcgtgtgtgcacacgcacacctgtgcactcgtgtgtgtttaagaaaggaaaggatttgggctggggagcaaaagataatgtgaaactgttggtggactctctggtgaggggtgggcagaacttgctgctactagagttcttgggttctccatgatgttcaccctggggctggcccactgtgtcctgaatgtttttgttattttttgttttattttttaaacaaactgctgtttttatatacctggaatctgttgttggcttcagagccagtggttaaagagcagggtcccaaggattgggagatctagtgtctgccctcctgccctgcaactcaattgggcctttttcggtgacctcatccaaggccatgatgtcaagggccatgtccccaagcagaggtggagaaggggacactgaggtgagcaaaagcaggaaggggcatccactgcgggtgactggaggccgggcaggaagcaagtcatcagagccgctcagctccgttcactctctgccttctgccccactactgtggggcagtggggccagagcccacctccccaacatgtgaagacagtgatgggcacgtgcccacacccccacttctctagccgtttgcagaggccgccacccagcaggggcctgaaaaggagcagcctcgtatttttctgtgaaatg

SEQ ID NO: 120729 - DNA, 1640 bp, Homo sapiens
gcctcctgagtagctggcccgccaccatacctggctaatttttgtattgttagtggagctggggttttaccatgttggtcagactggtttcgaactcctgacctcaagtgatccacctgccttgacctcccaaagtgctgggattgcagacgtgagccaccatgcctggcctgtcttgacgtttctagttgaggaaaccgagactcagagacaggctggagactgggatggggtcatgaatgatggcaggcccaagcccttgaggaagatgggatagtccagggtctagaacaggcccctttctatcccactgcacccccgtcctgtgctctggcctgacccctgctcagatcacacagcattggccattgcacatttcccgggccctgctaactcttcctgacctctggactgcctgtccgctcaggtgtgaaccccagcgccaactaccacgccctgtaccgctacttcgtggagctctggatctacttggggctggcctggctgtccctttttgtcaactggaaggtgagcatgtttgtggaagtccacaaagccattaagaagcggcggcggcgacggaaggagtcctttgagagctccccacactcccggaaggccctgcaggtgaaggggagcacagcctccaaggacgtcaacatcttcagctttctttccaagaaggaagagacctacaacgacctcatcaagcagatcgggaagaaggccatgaagacaagcgggggtggggagacgggcccgggcccagggctggggcctcaaggcggtgggctcccagcactgcccccttccctggtgcccctggtagtctactccaagaaccgggtgcccaccttggaagaggtgtcacagacactgaggagcaaaggccacgtatcaaggtccccagatgaggaggctgtggcacgggcccctgaagacagctcccctgcccccgaggtgttcatgaaccagctggaccgcatcagcgaggaatgcgagccatgggacgcccaggactaccacccactcatcttccaggacgccagcatcaccttcgtgaacacggaggctggcctctcagacgaggagacctccaagtcctcgctagaggacaacttggcaggggaggagagcccccagcagggggctgaagccaaggcgcccctgaacatgggcgagttcccctcctcctccgagtccaccttcaccagcactgagtctgagctctctgtgccttacgaacagctgatgaatgagtacaacaaggctaacagccccaagggcacatgaggcagggccggctccccaccccacctttgatggcctcttcccccctcaccctagggtgtcccgagatgaccgggacgcctggcccctggtgggggggcagcctcggaactgggagtggggggccaggggccttcctaaccttccatcatcctcagctagatgtatgcccgggacagggcctctgttctccagctgaaccataccctggctgtgggggcatctgtcctgagcttggctggtgtatctcacaatgcaaagacatgctggctggcgggacaggtgggcaggactgaccctgaggaggccttgcctgcagggtctttgtctcaccatttggtggagtatca

SEQ ID NO: 120730 - DNA, 1072 bp, Homo sapiens
ctcccaagacccccgccggtcgcctcttctgtgttttctatggtctcttcggggtgccgctctgcctgacgtggatcagtgccctgggcaagttcttcgggggacgtgccaagagactagggcagttccttaccaagagaggtgtgagtctggtatgtcccctaccctgggtgttgggcagagatgggggaaccatgacaggtgaggggaggacaggaggcctctaggaattggaccaagggtgtaaggacagatggcaagaggatagtttcagagctccttgccctcccgggtcaggctgggtacccagctagcttctcctctagctgcctccctggccctctgggtgcctttgctgggtttccaagtctccactattctctgacttggcctcctgctccccatcagcggaaggcgcagatcacgtgcacagtcatcttcatcgtgtggggcgtcctagtccacctggtgatcccacccttcgtattcatggtgactgaggggtggaactacatcgagggcctctactactccttcatcaccatctccaccatcggcttcggtgactttgtggccggtgagtccctgcctctgcctcccacctctttttctgcttctttggtttcagtgcaacagacctatgttgggggtgccctaggtagggttccatgttctgggcacttctcttacccagtgggattctcaacccactctgccatttgcaagaggaaactaagacccagagtaatgacaaaaaactcttttctctctggttccctttctcagacatggcctttttcctcctcctttcctctctgctcagtctctgatctcctctccctcagttctcccatgactcctgagcttggcttcatgggggacttgcaagtagggccttctgcctgcacggttggtacctgctacccagggagcccctgagcccaccagcacccactccacgccctcagcagcctttcatctttcacaagagtggagggaggtgtcctgaaggcatggctcagaggcctggggctttgttcctgctgtagcagcttaaagacaagggaggcct

SEQ ID NO: 120731 - DNA, 1015 bp, Homo sapiens
gggatgaccagaggtggtgctgcagcctcacctgtgatcagtgattcaattatcatttcaagatgttcttgtatgttcttatatactcttttcttgtaggccggtcccattcaagatcgatatctgaggtagcaaaggtagatgccaaaggagagctgggtggttccgctttctctgccatctgtttaacattaacgtggccctggtacttcctcattctcttgctccaaacagatttgatgttttcagaaacccattggatggtccttagtatttgttttagctctcctgttggcctgttagtatctaaatgtcctttagccatttcacattgaaatggtctggccagctagacagagagctctctgagggcaggggctgccttggccagagtttgatgcgatggtccccactttccactttgatgctgcacagccttcgtagcctcggagatgctgtgaaatgccggaggaggcagcgcagtgagctgtgtggtttgatggtctgacagacaagcgtgccatcatggaaaattctttgcagagtgtgcagatccatttacgcaggccggctgctgcttctgcaaattacactttccttcagaacaacccacccatgccctttttttcccaccaaacctcagtcatgctctgggtaggttagaaacaaggttttttttgtctccctctgtttccatccctcactcttctgtctcttctctctcagtccttgtcttggtttttataggcaatttggctgaatgcctagcttctggtctggatggcctacccatctgcaggcgctccttggggacaggacttgagccccagatttagagtcccttcttatgtgacttctggggtccaggccctgccagctgataaagccccacagataggttggagccagtggtgatagcagaattggggcctagtcagatggaaacaggtttgcagctgtcagtattgtaggagtagataagttccccacacctctgccccaccgctcctcgcac

SEQ ID NO: 120732 - DNA, 1007 bp, Homo sapiens
taacccatgaaccactgacaatccaggagtctagcagaggctggaatggaggaagactgttaaggctgtatcctgcagagcaagaaagagtcctgtgatcctaaagtgatggcggctgtggagctggaggcagggccgggagtagctctatgggtgccagatagctgtgatcccaacaggctaacatcttgactttggtttcccttaccccaccccgtaaaggggaagcccccaccttgccctgcctgcccatgtctgaaggtgggtggcatgtcccaaagccccaatctagatccctctctccaggaaggggatgccccaccactgccaagggaagcctcagatccttgggggatgaggggatgtctgggagtcaagattactcagtcagcacagtgagcacctgggaaggtggggttggggcagctggacatctgaagctctgggcaagggcacacatggctgtttcctcactggagcaacagcatgagagctggtcagagtggctggactggttttagggcactgttttttcagctggtgggaagtgggtgggagtatgcacaggcctctttcctgtggcctttatggggacaggagataggagaacagcaattaggacccagatgggcctgggttctagtcttggcttcactgtttttagcactttcttaacctctgtaagcctcaaatcctcagttgcaaaatggaaaaaaattatagtatcttcccagcaagaatctgtcctctctaaatgagctaaaggcacataaaatgctttacccaactcttggcacataggaagccctccgtaaatcacagctgctttatggtgacggtgatggagacagggaactctactccgttcccaaacaagagctgggcctgagctttgtgcaggctccccttttcccattactctccaggcttgtatggaaaatgaaaatattgtctcgtgtgaatttgggagccaagttaaagaatccagccagtgaacaggggccgcc

SEQ ID NO: 120733 - DNA, 1164 bp, Homo sapiens
ggtgactgatgagctaagtcctgaggatagaaatgcattttcttgaatgtgctatggagaggaggtaggggaggtatcacctgcccaggcagggggactccagtagtcatagtccaacctcctcattgtacagagaagcaggcaggcaaagcaatcaaagattcttcgaggatctcaagacagtactggcagagctgagctgagcctgggtttttaggccctgcgccgacgtcctagcacaccaaagcctccagccattgatttggcctgcctgccttcttctcaaatgtgatccatactccagatagatatcagagcaaatctgagaaaagagataagcaaccacaagttaacaaagtccgctttgcaacagcccagctctggtcttcgaggagacgggtgtggccctgctgcctttcgtccagtatctgctccttccctgggagagacaaagctcaggcgagctgggttggctgctggtgcaggtatcagggtggcaccactgggcccttgccaataccttgctcgtaaactacagctgccctccgagccacaccctggtcacctgacccggggggagaggcagtgaggaaaataccaagaattccttctctctgccctgcatactcctttttagacaggaagatggagaaggcctgagcctccctccccctgtcagcttccactagggcagcccctgcatattagaatcacttctggagctttttaaaagttgtgccaggtcaacagaatatctgcagttggggaccaggcatagcatttatttaacctccaaggggatctactgggcagcctgtaccgagagccactgcccattgtcttgcttcatgttcacgctgggtgggggctgggagggagttggactagagttcagagaagctgccatctaacacctcctggcctcagcctcacctggggaggtactggcggctgccaggggtgatgggggggaagtggtgaagacaggatgggaccagtggtggcatttctttccctcagcagccctgcccaacttgcttggttggacgagaaactggccagggtggctgtgagcctctgaggggcagaggccaggagagatggggcctctgagggatggggtgaggcatcttgggcttgcccgtttccctctgcccctgactc

SEQ ID NO: 120734 - DNA, 1033 bp, Homo sapiens
ggaaatgggcttggactgcagccggagggatttaggttagagtcagacaataaggaaggatttcgggacaggtggttggctctcaggaggatcctgcagggggctttgagaagaaagatgggggcaagatcatgctcagaggccgtgggtggatgagaaaaccagctccttgaatgagctccctgggggcccggtttgggtgggaaggggaatgttgtgtattaagcaggcagggagcttacttcataggggtagagaaacccagtggccccacccctggtacaggattaatcccatcctggttcctcataggcttttcttttttaattaatgaagaggtttacagtttaaccacttgataatcttaaacaaactgtaataaatgggtaggcttaataatctcttatcagaacctcagccctcaaggatggcagttacttattaccctaagctgccagccacaggcacagggggagagggaggagggaagagcaggtgaggaggcccctgggttggggaatttgctaggttgtcaggggcattctgagaggcaagaggtagggtagtgtcagccccaactgtgttcaaggatacaggtgtaacctagagagacaaatgtggcacaagggtcaggagccagcttcctcccagggaggtaggagtctggcggtattggcggtggtgagacttgtccttagagcccccggcaagggggcccagggcaggcagatgtgtccaggagaacaggactggcagccacaaggactaaagagcctcatggatcagagcatccttccttcccactgctggaagggcaggaaatcagcagcaatgcatggggagagctggggccatcaggccttcaaacaccctggtatccctcagctcctaccccccacccccgccacccacctgcctgcttcctctggaatcctgatggttccagagtccgcaggggaactgactcaccagggctagaacctctgggggctttgggcttgcaaacaggtagggtagggaggagaccccgggg

SEQ ID NO: 120735 - DNA, 1070 bp, Homo sapiens
agaaggggacggctaaaattttcagttttccaggtttttttagggcccatggtgggggtcccgggccaggaaaggtggagtaggggaaggggaggaggggcgggcactgtttttaggatgggtggaacacctgactgggaaattgctctggtccttgttcattcatgtcttttgagcctcagttccccatctgtgttttggcttcttgctctgcttcatgctccattgcttgggcttgaaggagcatggagtgagcccctgggactgtcctggcctcgctgttggtttgttggctgctttctctgccatcttctgctgtcatgtccctctttcccgactcctgcctgtctcttgttaaactatgagatcctcctgagcagggtctgtgtcttgcacttcctttattttgcccagtgcctgggcacatggttggtgttcagcaaacacttgatgaatcagtcgaccctggtttgagcttcattgagcaacagaagtttgtccatgactctggccccatcgttgttgggttaataggttgggtgggttgccctgtgcatgggtcggggagctggtgcctggctagatctggcatttatagcaggtgtgcccagctacatttttgtgcctccaaagaggggcatggcccaggggtccctagggggagtgaaggtgacgagaaccccctgttctaccaccttgccctcctgttcccctactcttcctgggaagtagccaggagcctaattttacacatggggagagggccaagggactgtgtcctggcagtccactgcttggtcagttgtttagctctcagcagcccgggatgaagggctctgcttcagcaggcttgaggggagacggacctccctgggcaagtctgacaagtggctgcccctgttaccactcactgaaaacagttcacagggggacaggatgcagctgtgtgaggcatagggcctgctcccctgcctgacttagaaacctggcacattactttcccttctttcattatatcctcccggccacatacaaagcactcttaccccacaaccctggacgtttgtaaa

SEQ ID NO: 120736 - DNA, 1066 bp, Homo sapiens
aagggagatagaattgcctcttagctgtgtttctgtctgacctgccagtcagctaaacccatgctgtgtcacatccactcatttggtttccctagggttaacctctagctggactgtggtctgcaccttgggagggtatcgctttagtcttgcccacatggcttggaacaggttattctgtagcatgccaaggacctcagggcggggccctttatggatgtttattttggcttgggtaccctttgtgtctaatgcaaggttcctgctcctctcatgcccccagtgcgggatggaggtaggcacctattcacagactctctggaggagaaagacgtccatcccctaccttccctatcactcctgttcaaataaaattctcacctcccgggcagtggaatgcatcctgacagtgttagctttggaagggtgcccttctcttctcagcatccctgcccccttcagagcagcgagtggaagggctgcctctcgccaaggggataagtgctgagtgggcgaagtggggtgagccgaggcagtagtgtcttgtcagcaccccccgggttagcaggaaaagggagggtgtcctgattaacagcttttcaacacctcacctcccccatcttccagactctagcctcagccctgcaatccacccaaatgcatggcccagagagttggactcacccacagttgggagactagaagacagctgagtcctgggccagctctgctgacttgctgtgtgtttaggccaggtcactgcacctctctgagctaagcacttgttcaataaggccaattaaacacttagtgcccgctgtatgcccagtgctggattaagggttgtgggaatgaagtactggacatcatttctgcctttggggttggtgggaaggtatcaccatgcaatgcatattatgaattgagtggggttggggcatattgtgagggcctgtgtgcttcaaggtagaaaagttcctgtaggcttgggctgtttaggtggctcccctgaccctggcctgggggttgcctcctttctagctgcattgctctctaggctcccctg

SEQ ID NO: 120737 - DNA, 1095 bp, Homo sapiens
ccagagctttttcattttgcaaaactgaaattatacccccttcaacaacaattcttctccctctctacccagcccctgggaaccaccattctcctttctgtttctgtgaacttaactactttagatgtctcctaagtggagtcatatagtatttcttttgctttgtacagtggtacaaccactgtgaaaaatagtatggagtttcctcaattaaaaatagaactactgagtgatgcagtgctcctacttctgggtgtgtatcaaccaaacttctaaagaactagaaaagggatggggatggtggctgtctcttgcccatagcccttggggaggtgttctgcaggatggacccaacaggctgtagccacaggccagggaggtgagagtcacatgactaagctcttctgggttgccaaggaatttgaactccatcaaatttttgcaattttcaagtaggggagggaacaacatttcagaaagtttcctccacagccatttacagcttaaaagaagtggaacattctactctaaaataacgacatttctgtgggctgatcccttcactctgtgggtgttctgataaggacaccccctccttcctttctcctgctgatgtgatgtagtgtgggttttcccagaaagctcatattgcctacagcccccagaaaaacccactgaccttcacactctagttcttttcctactacgagccccttaggtccaggtctgggtccctggcccagccaaagacattccgtctcccgtttggtgaccttcccagattgcatcttcgctatccctttatgtagaagtgggggtggtgtgctccagttgtagctctgttcagctgcctaaggcctctaggcttctggtgagcagttatcccaatctctgaacctcagagacctggatacagtggagttggaaacacagaacgggccctccctactggctatcctttctgtgcttgatgaaacctcagatattggagagtctttaaccctctggagatcagtgcagctgaggaaagataattgggccgcagtggtgaaatgagaggaaatacagtccaaagtgctcagtggtgggttgtag

SEQ ID NO: 120738 - DNA, 1545 bp, Homo sapiens
ataaatgaggaaaattaggggaaaagccagtgtaacttgtctgggatcacatagagcggagtcagttttcacatctaagtttcatgtttcaaagtacatggaaattagcaagcatttattaagtatccaccatgtgccagacactgggcaagactctcaggatacaaagaattaggctacactccgagctgctggagaaaaggatacataaacccactgggaacaagacagtgggtgtgggctacagaagaggttttcaggaggtcgcttaacgagggtctggtccagcctgaggggtcagggagggctctcaggagatgacctcaagccagagtggggtcttggattagaaagaacagctgggaacctgggaggtcaaagctgcagttagcctggattgcgccactgcactccagcctgggcaacagagcaagagcttgtctcaaaaaaagaaaaaaaagattaaagaaaaaaaaaaacctaactggtaaaggaagggagaagagactcctaacagaagatggagagtggccctttctcctagcctggggaaggcagactgcaggtttcttgctgtggctctagagagtcccttgtctcctgagggtggagcagggttgccctaggtcctgccctctgtctagcatcccagaccaaagtccaggttttgcttgactgctcatatagctgacctgttcccggaagcctcttggatcccactggcctccttccttcctaagctccaaagtgctttcttgtgttctaaggttttccatatgtacctcctttcattttctggaccctttggactggtctatacacactccagtccaaagtagtaaggctagttccaattttgaggttctggcactcttttaacaccaatcctgctccccagatttgaaaaataaaaccatgaaatatatgacaaaattacatgtggccaaaatgcttagaatggggtacattgaattttttggaaagttgagggttaatataaacaccctctttgtctcaggccttgttggaaattgtgaaatgcactggtccacttaaccgcctttgtaagtaaaaggaacacaatagctcttttggttatggaggatcttggaggcctccacagccttgggtccgagcttgagttcttactggctaggactgcagaagtggaaagtggataagctggttttttgagaggaaattgaagaggtcccttcctaatggcttgtttcttatttatgttccactcaaaagttgagggtagccaaaaaaaaaaaaaagccttagtctgccttagttaactgctctggttagagttttttaacagtgaaagtaaatgtttattacattgctttgagcgtttgactagaacccttaggatgattacagatggcacagtaatagagaattattgagggtagaaattagcaagtgttgaaagtttccagtgggggtgggggatgcaaaggaggtgatgattgttgcttttaaatattttcctggggttttgccctatttatagtctggcgtttagaagaaacaaaa

SEQ ID NO: 120739 - DNA, 4296 bp, Homo sapiens
ttagacttttttggaagaaacatcagtaaatgaaaatggaattacaataaaaataacaaaagcaataaactcctgacctcagtcacaatcattttagttaacacgccagtcctaataacaaacacgagtccctgagaccgcaacccctcgggcaccgcagggcgtgcaggtctgggcgggcggcgcagcctcccctggcggctgaccctgggagcgcggggagcgccaagcctcttctagcgctcacctcgcgctcactcctgcgctcgccgggctgcttgtgcggggaaggggcggggcccgcctgggctcctccccggtcggagcccggagcaagggggcagagcgcgccgggcgctggttaaagaggcgtgcggaggcgggcgcggcgcatactgctagtggcgcgcggaggagcgacgcgtggagaagcggcccacgtgtctgcccagagtcaagtcctgtgttcttcccgctccttacgcatccgcggtccagggcgccctttcagccccgctggtgttcgcccaccccgggccgcgtgagtggggccccacgcagctccccgcactccgtgggccaacttggccaagcaactctgtccggggagcggtgcttgcggggggtgagtaccgggcactgcgcatgcggagctccaaattcaaacagctgttttcagaggctggagggcgggcggactggtagcagctggggctaggagaggctttctctaggaggcggccgctcgggagccatggtggaccggggccctctgctcacctcggccatcatcttctacctggccatcggggcggcgatcttcgaagtgctggaggagccacactggaaggaggccaagaaaaactactacacacagaagctgcatctgctcaaggagttcccgtgcctgggtcaggagggcctggacaagatcctagaggtcagtcgccgcctgtacccccatatacatctgaagctggcttgagctttagggggcgctgaaaggaagaccccttcacagctttgggtgaccctcagtccctgtggaaggtccagggggtgatgagagagcgtgtctcatcatgggtcaggcttcgaggatctgtcgctcacccgagggacacaggggtcccccaggcgcggagactctttggaacttagtttggccggagacaaattggagttgattcccgggtgaactaggctccacggtgtttcagtgtgggtgtgacggtacctccctccttgggaagaggctgtgggacggataaaggcgtttatctttccctggagacgctcccggagtctgggagccaagcctggtgccatcccctcgtgtctccacctccccgctccagggccagtgccacgcctgccaggcttttcttaaggaacgtgaacccggcagagtggcgggagggtccctcagcccgagcctgggcaaaatcttccgcccccagcagagttccggagaggagctggaggctctgtggggcccgaacccacgggatgagggctggtgcctggaatgctggggacgcgctcaggcttccgggaaggcttatctcgcggagacatccttcaagggcttggagtaaaactttgtgaaagtagcaggttgcacaaacgaataatacccgcgtagtccctttatgatgggggaggagagtgtgtgcggaattggggtgggtgggggacttccctccgtgctgacattgggaaccgcttattttctggtgcacagcccgatgggtggcattgacctcactttggataaacgggctgcctatcctggctgagaccttggggcccatttggggaccgaggccctctaccccagtttctcgagggctcagcttcaaccatcaactcttcttggcctgctcccccagtggaatgaccaggacctgggtgaaagttctagattgcagcaggtagggagtaggggtagattgtccagggtgttaccttgctctcagggtgaaagatgccagaaaggaggtctgatgagaagcaacgtttagtctacagcagcacctcaatactttatgcctatctagtcgtcgctcattttccagcctccgtttccccatgtgagaaacgggaatgagcccatcctcattccttatttctgccacggactgttaggttggaagcatttggaaaacatcaaaatcttgtccccagattgatggacatcacacagataagcatatacgtatttgctggcagccgtgtgtggggagacttgtcctccaaggggtcctgtagaaggggaggtttagtctagcaggcttagtgttggattttagtggagagtctcttgccctgtagcagtttcccgggtagaggcagatgggaggtgatggtggggaggataagcttcagtagatggttggttggtttacctcctaacagcaagagtcctggcatgaagagtctacatggcttccttctgatgggcgtctaccctggggggtgtgttgtggggagggggttgctttatgatttcccttgaggaaacaattcctctagagaacaagtttttgtttagtttgttccagggctttgtttagagggggaagagggcaggcaaggatgataaagccttgagctgccctcgaagtgtttccctctaagctgttgctccaacactgcaggggaaggaaggaaagaattcaaggctaaatgtgggaaaataaacttcaaaacacaaggcaaagggaaaggctggcggggcatacggcggggggggcggggtccaggggttaggcagccgggtgcagctggtggtcatagctttggaggctagacggcttcttaaggtatttgaacaaacaaaatgcctcttatttagcagtcctgttaaatctgtcaacatttacccccctaccaaaaaaaagtaatgggcaggtaatttttagaaaaaggacttgggcatcaagccagtctgctttggaggctattatagataagttcttgaacaaggacagccctgtcctcatccccggccaaagaaactcccaaaccaaccccaactgggcgagtcccttcccgtcataggaaaaaccccaagaaatgaaaatggacaagtagaagcatttgctgacatcagttttaatctgcagaaatctgccttgctctgctttcttgtgacttggggtactgcctcaggcctcaggatattggtttaaggaaaaatgaaaactcaaaaatcttctttcccatctggctgcttgggcattttccacctgacgctctgtgttttagctggttctgaatcaccttggaatcatgaaggagcccctagctaggaattcctggggtacaaccaggggtgggacaaagattgttggaagagatggggtgcagtctgagttggggtttctcttaccctgaaagttgtgtgtgctctttcaaatgtgtgagaaagggagttaagtcaactttctttagaaataccccccgaattgtcagatacttccttccctccgctgtggttgaagtgaggtgcaggctgactttcaagtgctcagtgacccgccagcctgggaccacgtgatcgtcctctttcctgtcttcagaaccatcttgaacccttgctctcaagcaagatctttggtgactcattctcccaacctcttcctaaattgcagactcacacaagggaagttaacatttacagcacacctactctgtgttgggcattgtgggtgctattatcctcattttatgagagagggcacaggctggttttgccatctggctcggccatttacccatcaagccatgtaacttaactttgccttcctttcctcatctgcaaaatgagtgtttggtgaggctccaatagagtagaaacattaggcaagatgtctataaaaagtgaacaggtctcctgaccttagcatttattgaggaaggcagctttacctacctgccttatttcaggtactctttacagtatgtattcaagtaagcaagctgaagcccagagaagatagaatggccacagggacaccacaggaggcacagcctatggggcgggacggggaggggcaatgaccaggcagtctgccccaggagcttgcacctccctcttgggcctgtgaagattgttgctctgtaactgagcttaggaaattggttcagctggaccctgatctgctggaaaattctattttctatttcccctagcacaggtaatggcatacaggcgtctcctgtgttgttgcctggctgacccagcacctctgttactgaagtaatacatcagtccacccctctgcgcttctc

SEQ ID NO: 120740 - DNA, 1065 bp, Homo sapiens
ctggcacgtttctgattgtaataaagtacagccatttatcttctcacagagtgccctgctcttcctgaggggaaggcagtggcagtgagcgcagggtctgtggcagtgggggtgagtgtgcccaagaaattatcaggtacagccatgtgtccgcagggtcattcagcacacccttaaatctgggcatgcttgggtccgctaaggtgttacaaaatcagcaccaggatggatggcagcactgagcacccgtcggcatgtgacggctccagctgacagtaaatttgagccattaaacaggaaatggtctgattgggaagccagaatctttgcctctgagctgctgaccattgtggtaattgagctatgaacaccatcaatctccgtaagaatagacactttgtcttctcaaacaaggtgaggctgaagtgatctatggttgtgtgagacagctgagccccaaggaggcccagagtgggtattcagcaaatgaatcattagttgggtagttggatggccaagacgaccacctggaatgcctcctggctctgatgtcttgtctgccatggtagagccacataactcacttccccttcccacgcagggcactggttaggtgacagccatgtgggccccacagcctttgctctacagaggcccagagggccccttttggctttggtgaatgcttggaaatttcaacatcatcttctttaggattcctagtccagccaagggcatggaacaggctggctgtgggcattctgtgggctgaccctggagagtgggtatatagctcctcacacctagcaggcaagctgcaaatgccatatgggattggggcacaggtcatggatttcggttattaaagggcagacttcacaggccagcaccaggggaagacactaagactgtctctcagccccagccccagatctgaaaggcattcatggaaaagagcaacaccttcaaataccaacgacgagtcaatacagacttcaataatctgccctgtggcttccttcattattggaatcacttacagaggaaagagcaccagctttgaaa

SEQ ID NO: 120741 - DNA, 1186 bp, Homo sapiens
atcagattaatttctttcttgttccaaaaaatgtaaaacacaaaaaagtacagagaataatgtaaccaacatccatgttttccaatccaggatttgcttctaataatttttaactaaatgaaatagaatattgcagataaagctgaagtccctttcttggcctttcatttccatccctcacaaacacaactgctatcattaatttgccgtatgcttctggtccatgtttttatacttaatgacctaagttatagcttcatgaacaatagataatattgcttttttaattatgtaaattctatcataatgttcatatcattatttaacttgctattttttcccagcattctattttagaaatccatttatgtcaatctatcccaagttgctttattttaacatctctgtaatttgaattatctcagtttactaatcttttctgccacagatgtctacttaggttgtgcgtcttgcaccaatttcttgctaaccctaataatgttgcagtgaatgtccacatatatatgtccttatcgcatattgcgcatatatagatatatagatatatagatacacacacacacacacacacacacacacatatatatgtatacctgcccaagatttctctctaggaaatatatctagtagtttattgatggctgtgtgttatatgtatttggaacttcgccacatattatcagattgctctcaaaatttattcttaatttatatttccacaagcagtacacaaaatttcccatttccttatatctccaacaacacttattttgttagactttattttttaaaccttatggttctaagttatgtggttctgattatgtataaatttgagcattttatcaaatattcattaaccatttccagatttcttccttatgagttacctagtcatattctttgcttactttttctcactgatttgcaagagttctttattttatttatgtatttatttatttatttttgagatggagtctcactctgccacccacgctggaatgcagtggcattatcttggctcactgcaacctctgcctccggggttcaaggtattctcctgcctcagcctcccaagtagctgggattacaggcatgccccaccaatcctggtttgttttttgttttgttttgttttgttttgtatttttagtacacacgg

SEQ ID NO: 120742 - DNA, 1028 bp, Homo sapiens
catacaatgattctgtttttcactttcagtacagtcttcaataaattatatgagatattcaacacttcattataaaataaggtttgtgcaagatgattttgcccaactgtaggctaatataagtgttctgcgcacgttgaaggtaggctaggctaaggtatgatgttcagtaggttaggtgtattaaatgcattttcaacttatggtattttccatttatgatgggtttgtgggaacataaccccatgtcataaaccgtggagcatgtgtactagatttatctgagttatgctgatgtgctttgtaagctctcaggctttgcacattagcaaacttttggagtaagttgtatgaccttgtggaagtgcaaataattgggagacagggtgtgagttggggttaataggtttatgtgagttataggaacagctgttcttggacgtgttgtctaataacataaggatagggcaggaaggaaggagtagctttattgtgtgattgtgtttgttaacacaactttaagccccaatctccttgtgggatgtgtgtggaaaacaagaggattttggtttcaattagttccaaaatcattaaagggatactgactaacacatcctcacaaatttttgtttgaaagatatgttagttatatataattagcaagtttgttataaaatttgtgaacctggttagagcaaaatatacaacaggcaaactatattttggccttgatcttattacagtaagaatagcatgtttagcagggcgcagtggctctcacctttaatcctagctgctcagaaggctgaggcaggaggattgcttgagcccaggagtttgaggccagcctgggtaacatagtgcgactccacctcaaataaataaataaataaataaataagaatagcattttcttcttattaggccctgataagtagctagaagccttagtaaaagatatattgacaattctaacctcttttcttatctattatacatacctactaggtatagaagaaaagaaactt

SEQ ID NO: 120743 - DNA, 1085 bp, Homo sapiens
ttctgtgattgagatttgcatgacatttgggtagtacaaatttacacctcaattatgtacatggatagagtcaatgtttacaaatactgaaggaagacttttcccacccatagttcaggtagaaaggcaagtttctttgacattcctattagtgatagcttcaggtttataaagccatcttcaattcaaattacccactccctattggcctaagaccctggtttctgatgtcagccttctttctccatcccacactcctatgtgtgccccaggattagctcataagcttttatttcgattttcatttacttctttgttttgggtccttagatattttccttacatttttgcaaatttatgcattaaaaggagtatgtattatattttatccagaatctctaagtagattttagaaggagagattttaggctttctggacagctatagtgggagaattgaaagtctgagtcattttacatttccctctcctgtactaatgcaattaatttgtttgttattattgtgctgcaagactttttattgatccctgttactttttaaaattgttattgttaggtttggttctctcattctagcttttttgtctttaatcctgactcagttatctagtatgttagttttacctcccagccctgagtcatttgtaaatttgatgtgcatattatctgggtattccataattgtttggtaaaaatattaaacaggagccattcatgtacatagcccaggaataggccactaaagattttcctgtcagtgggtattgatcagaactctttgaaactgttgcagatgtctccaactctgtttgtatatttcagttcacatttccacattttacccacaaggcttgttcttagtcaacttgctcagctcagttcaatttggttcagcccatatttcttaagtgcgcactctgggcctttgtgtatacggtatgcatctgagatataaagaagaaaaagccacagctccttccttcgtgatgctcatagtctggtagaggaagaattcaggtaagcaaaaaagccagtcatatgatcatctctttctgcattttgctc

SEQ ID NO: 120744 - DNA, 1075 bp, Homo sapiens
tagaggttaggcagggccagtctcaaagaagatgaaaggccaactcggaacgtggtattgaataagagccttgatggagttttagaaaaattttgtctagatacagccatcccatccaccaaggccagcatgagatggacaaaatggaaggtggcagtggatgggaggaccagaaggaaccccttgcaagttgggctgaagaaccaaattgggtaccagaaatggggtggcccccctctcagccttcctccttggcaccttcaggtgatgtgctccccagaggatatcagccttcctcctccatccccatctccccagtttcccttgcctgctctgctgttcgcaccatctgaacgcctgagaggaggggccacccttagagacagcatgttaatgtagagggcagctctggccctcagacctctcaggaaccaactccccaacgccagtggacacatggttccaagtggccacctgcaggctggacagaggctgctgtggcttctgccttgaagctagtgttagagaaggggtgggagggcctgagcaatttatatgaagtagagaactatgggatggagctaagcattcaagtgctgccctctgctgaggggctgtaggggactccaaggcaacatttgaggtcactgtctggcttcacaacaatggccaggtgtccaggagatggggacatgggagatgcccaaaaggcatgaggtgtggtgatgcatgaggtctgtcttgagcccctcgccagattcatcaagcacctggtagtgagccatagctgtggaaacccaaggtgagtcttctaggactgtggattagtagacaggatggaggtgagggtagagaaggaagggaaagatacttaagacatgcagggagaggccagaggacttgtgacatgggaaacagacactgctactctgtcctgatggctttggtccctgcatcatccttccaacattgactgttctctggaacctaccagagctgatctaactagaatatataatgcctcctctgttcccattcaagaggaaagtttgcccccaggtcaatgttctgttga

SEQ ID NO: 120745 - DNA, 1020 bp, Homo sapiens
tcagtgaccagggatgggttgagggagggaagaaggggttgggcctgcaggtcgcatagtgtggctcacccactgggtatggctgacctcaggggcagtgagtctaggattatgatgggctgttggtggcttctcggagcccgctgtggatgtgattcaatccaccagttttaggcagagcccccgtccctcccttccaagaggctggagaactgattgctatgctgtggcaggggatggactcaaagaccccggggccccttcaactgtgattcagaagctccccttgccttcccccatcccgaatacaggcaacaagtggaacttcaagaagatggtcagctataaggagatgctagacactgtccggcagcagtggccagagctggagaaggtgccagaggaggaatccagcacagccaaggttagggagcaggagggtgtggggcaggcctggaggaaggtcgtacctccaccctaggatggagagctagcagggagctgcactgtggtggggatgctgtgatgtgggatggtaccatttaagcaggaagcatcagtgctatcacaaccacctccctgtttcatggatgaagatgtgggctcggctagggtggggggctcagtaacatgtcagaggacacactccaggaagtggcagagaggggtgctcatcccgcttccacgcagacttttctaaacatgctgcccacaggtccctgccttagcagcttttatctagggcaagccaggcataggtcaacccatgggtcatccatcctaccagagtcttctatcacctgagggccttgggtggagcttcacgtggggtcctctgggagagggttgaggagtggaggttctgatgtcatggagtgagaaactgggctcagtagcccatcccctccactgcccttttgctcccactctcccctgcccaggcctttaaaatccctggcttccaaggccagatcagcttcatcacatccatgtctgagcatttctgtgggacctgcaacc

SEQ ID NO: 120746 - DNA, 1108 bp, Homo sapiens
acagaggacggcagcttttgccaggccagagagtacctctctctcaccccatgacacacagagagaaagctacctgtttgccatagccagtgaaatgcaggaggatgggtgacaatgccaggaggaacgcccctgcccaggtgccctcagcccaggaagtcaggccaggctctgccctcagcctacttcatctctaacccatgcccttggcctcccactgagggatgttatggccagattgtgtgtgttgggcatagggaaaggtgttaacgtttcagaaatgagaaaggtgaggcctggggagatgctggcctggggtttttccacctcaggtttagtgaggtctccgctcacatccagatgggtttgagaagcctttggcctgatggagagttggggagtggaggcatcacggggctgtggccgtgcctctttcctccctccacattcccattcatccttccctcaggtcagtactgcatgcccgaggagggggtcccgctgacccccaaagccaacctgctgaccacagaggagatcctgaccctcgcccggctctttgtgaaggaaggcatcgacaagatccggctcacaggtggagagccgcttatccggccggacgtggtggacattgtgggtgagttggacgaaagtcatcgccacttctcccagcgctgcctcatccggctggacactgatgccgatgttaacagtggcagctgacattcatttagcacatgacactctcttggtcctacaacacctgctgagacaggtgctattattatttccatttttgatgagaaaatgaggcttaggttggataacttgcccaaggtcaggaagctcgcaaatgccagacctcagtagcttgctgtcacattgagaccaaggtcctccaggaggcccacgtgacctggctcttgctgacctccaaaacccttgcaggcttctccacctttcccctccttcccattcacatgaccgggccttgacatgtgctgttccctttgctaggagctcagggcactctcctcgacctcattcaggtctctgttcacatgtcatcttctcagcaaggccttcctcaaccatcctgtctaaagtg

SEQ ID NO: 120747 - DNA, 1034 bp, Homo sapiens
tatttagaatgttgatatttcacggacttctgaaaatttattacgattttttgaaatattacattaaaaaattacttactttgataaccgcagtttacctggcaccctcttaaattttgcatccaaggcagtgcctcattcgtttggcccttgtcctgtcctgcctactgtcacaccacgacctaaatctgagactagagcagccagaaaaactggaaggaaaagaaccccgttccttacctgagtttacccttctgccctagagcgctaccccggcccaggaaagtgggcacagggagcgtactacagctcccacaaggccacgcgggactgcgtcctcgcctattggctgcgcgggtcccgccctccccctgcccctccccgcccttgctgggatgaccccgggggcgagtgcccggccagtgtgctcccgaagcgggctgcggttccgctcgtatcaggcttcatggcggcgcggccactgtcccggatgctgcggcggcttctgaggtccagcgcccggagctgcagctcaggggctccggtgacccagccctgccccggggagtccgcgcgagctgcctcggaggtgagcccaccccgcctgcgtccacagcttcccggggcaggagtggccccggcacactgcccttttcccccagtagctcccggcctatctgcttgaccgcttctgggagggacccgttggcactcctcagtggagcgatgttctccagatggaccgcccggtctcacccgctagcccagcgggagaggttcctgggagtcccgcttcagaacctccctgccccccagccacgccaccccttctagccctgagcttggccagaaattcgggtaagcagaggactgggactttgggtccagtgaggtgtcttagtacctttcagccttgccttgcacccaccctctttcttaaacattttccctccctatcccaagagctgagagatcaggtgtccctgtgacacctgcttcatagtgcgactgactaaacatgtcacctcggtgtc

SEQ ID NO: 120748 - DNA, 1094 bp, Homo sapiens
gaccctgatgacaccaggcacaggtcagttgagccagacccttttagggtttcctgaaagctctgcccaccattttttactcatggttagaagttagtcagatggccatcctgaataagagaggtggggataggtaggtggtatattattgttgttggctttttgggggactgggaattgtagttatgaaggaatattggatactggataggcagttagatgtctgtgtcacagaggtaaagataaagagagcctacaagggaagaaacaatattaatgtgtagttaagtagactgaggagaaagggaatatacatcaataatcattgaactctcagcaacacagtcacattttaaaggtcactggcaaatccataggcccctgcctttgaagtgccccaccttaagactttttaatgggcttaaagtttttttttttttattttttacaaatatactggagaatcatgcaatgctgccagcactggacgcaatccagggccacaagtctgcacactcctttgctactggtcctgtaatggcagaacctttcatctcgcctttattgttcactgtgacccctgcattatcttcaaaataaagaaacacgccatcttttctgcggtatgactttcgttgtcgaataaccactgctggatgtaccttttttctgagctctggtttgcctttcttgactgtggccatcaccgtgtcacccacaccagcagtgggaagtctgttcagccatcccttgatcccctttcacggagatgacatacaggtttttggctcctgtgttgtcagcacaactgatcacactcctaccagaagacccaaggaaatctggaatttcacaccagaggacccaccacgtcctcgcttcaacatcttgaaagccggaaagaagaaaaaagcacttaaggcctttttaagtgtgtttttccctcttgtacaggcccatgaatccaattaatttataactttcaccctggaagaatacaaacaatatgcacaattgtttaacttaatattctttctgtacaaagaatgtgaattttcaatgcaataaaatcttatttaacaacaaaaaagcat

SEQ ID NO: 120749 - DNA, 1392 bp, Homo sapiens
aatagatgtaccttagtacccctgccattttcagtcattagtggggagcagcccggaagagatgtgaccctggcacacatgctatgatggattccaaactgtagcaactgggacccttggctagttatgtgctctgcactagaaggtctgccaggtgcattttcatgccaccacacccactctgtgcatgagtaaacaaacacaaagaggttgaccagcatgctcaagaacacacagctggcacgtagtggaaacaggattccaacttgggtactttgactctgggacacaacttcttaacaactatgtcatgcttttttgttgttaaataagattttattgcattgaaaattcacattctttgtacagaaagaatattaagttaaacaattgtgcatattgtttgtattcttccagggtgaaagttataaattaattggattcatgggcctgtacaagagggaaaaacacacttaaaaaggccttaagtgcttttttcttctttccggctttcaagatgttgaagcgaggacgtggtgggtcctctggtgtgaaattccagatttccttgggtcttctggtaggagtgtgatcagttgtgctgacaacacaggagccaaaaacctgtatgtcatctccgtgaaaggggatcaagggatggctgaacagacttcccactgctggtgtgggtgacacggtgatggccacagtcaagaaaggcaaaccagagctcagaaaaaaggtacatccagcagtggttattcgacaacgaaagtcataccgcagaaaagatggcgtgtttctttattttgaagataatgcaggggtcacagtgaacaataaaggcgagatgaaaggttctgccattacaggaccagtagcaaaggagtgtgcagacttgtggccctggattgcgtccagtgctggcagcattgcatgattctccagtatatttgtaaaaaataaaaaaaaaaaaactttaagcccattaaaaagtcttaaggtggggcacttcaaaggcaggggcctatggatttgccagtgacctttaaaatgtgactgtgttgctgagagttcaatgattattgatgtatattccctttctcctcagtctacttaactacacattaatattgtttcttcccttgtaggctctctttatctttacctctgtgacacagacatctaactgcctatccagtatccaatattccttcataactacaattcccagtcccccaaaaagccaacaacaataatataccacctacctatccccacctctcttattcaggatggccatctgactaacttctaaccatgagtaaaaaatggtgggcagagctttcaggaaaccctaaaagggtctggctcaactgacctgtgcctggt

SEQ ID NO: 120750 - DNA, 1079 bp, Homo sapiens
tgttgaaattcgaaaagacctcaggaacacttttttgttaagggatataattgtcagccaggctaggcaacagtcactgtctcaggattcccccttcccaaatgcaaagtaacttttctttaaaagtctgtgagtattgatttttcataagtacagcctgagtacttctgtatcttctgttctcagtgtgcctgcagtgaaggtctcagggcttcagcaagctgggtggggctttctctgttcttacaaccagtgggatttctgcaaactgctgccagaaaaatagacacacttattcaaaagaagagactattggcaggcagcactcaaaacctgcatacaccgttttaaagatcccacctagattatcaaacctagcctttccatgtgatgcagttggcagcaagaagaatttgttgtgacaaggaggcttctcacaggtaaatacctgaggtttctacctttgcataatagaatcaggcccatccaggttactgccccaatatctaaaaggaaccctgtcactttcacagtttaaaaatatctatttgtgctttcagcccttaaaccaaaggttgtagcttccatcatctcaattaaggttctgtacctcacagtcagtcaatgtttacaaggctcgtggtttcccttccctgaagcttctatcagagagaaattggcatgttttccccagaccaaagagagaagctagcttttacctctaaggctatcctgtgacccctatcatagctatttaggaacttctgacaggttcagtgatctttctccatgttctcattttgtataatgtgtgacatctttcttttgctcacctattctgaggaagtaggcccagattacaggctcttccctggttattttcctattattgttgggataattgatcttctggtccctttagccatcagctgaatatgctcctggagccagaattctcctccactatctcatgccggagtctgtctgggattggagcaaggaagatctcatggtctagtcctttccaagatgtcaacagtcacatgctcggtttcctactgatgagagaatggagctgg

SEQ ID NO: 120751 - DNA, 1107 bp, Homo sapiens
ggagaccagtgaggaagccactgctgcccagggctgctgattgaagctgggatgtctgtgtatctcggtgctctgcagatgttttccaaatcactgtgaaagtctctgccatgctcctgtttcactgcagcacctcccgcccacccatcagcctgcttcctgagttcatccctcctcctcctgcccagcattgcttaggctgcatccttaatgaccccctgctgccaccgccacctctccgggccaggtttcctaattggaaaactcacagcctgcatcccatggaaaggcaattcacccaggggcccagaaagctcatcgcagggtgtgtgaggcttcccctggcactctccttgcttctcatgtcagagttgatgccagtacacctggagcaagcatccagccaaaagcagcagttcacttggaaatggagtatgtgtgtatttgcgtgtgtctgcgtgagttagaaccaccaggtctctgtccacatgactgcaagtgtgtgtgtggcagagtctctccaggtggctgggaggacagagacacatactgagctggtggtgtggacctgcatgtggcactgccacgtgtgcctctgggtgcctgcctgacactctgcatgctgctgctatggtgtctgatggatgcaggcgtttgcataacataatgagaatctctttatggcccagaaaccaactgttgggcatgtgtctatggggagggggtgctggaagactagggggctgtggctgccctggcagaggcccacgtttcaggagagtcatgtatccctgcatcttctgcaagtgagaacattcccacgggcggcagctgtgacctgttacctacacctgtggtcggcatgtctgggagcgtgccaatgatctgtatcccctgggctctgctccacaccccaagccttctctctgtcatcttcattctctgggtgggcagaggaggctcctggggtttccactgatgccatcagcaccctgatgtctgcctttatggtttgcctctacccccgccccgtcctggatcttgtgaatacccacccaggccctatcacctcttagggacacctgggaattacggtgaacaaagccc

SEQ ID NO: 120752 - DNA, 1743 bp, Homo sapiens
atttttctttcctttcttgcttgaaaaaattcattataaaaccaattatcattaaaagatttttagaaaaggaaaggaagaaaaacactcatactctaattaccctaccccagcaactatttttttcatatttgcatattcctgccaatctttgtccataagcatcctttaaaaaaatcagttcccatcatgtactatggaattttcttgactagaataattctgtgttggagtgttcttatcctattctcatttatcttaatcagtaaaaatcccatacctaatcatttcattaatatactcagctattcaacaagttagtaagagctacactttctgaaatttgcactagctgatgctttcctggttctccgagcaggtgtgtgcccctcagctctgtctctttctccaacagtcatgcatctcccttcttgttcgctccgctctgcctgccaggtggaggagggcatgttgcttttctcagccacttctagtttctaattaacccacatccctgggagaaagaagcctctaggtggcttagcctgcctttaccacctgactctttaaggaaacttggctatggtaaatatcagccaatgcagatcgacttattaaacaaagcaataatgagttcaacacaatcaattttttaaatagtcaacaaaacctacccagcagaggaaaaacaaatataactggcgtgtaagggcttaaagccacaagggaaactgagtcacgtcaaaggaaagctggatactctctaagtgaaggaagcatttcacacattggacatcttggggagctgagcaaacaccaagttcaggtgacaagtgaaggatggcacttctggacactccatttgtaaataggggaggtctttccccactgtgttctggtggggaaggtctaggagggcaaggccattctgcatcatgttctgagatcagagccagcacatagcaaatgctcagggaattgaataaataagtaacaaatgaaattggtcaatagggaaccacagttcttaatgaattcgcctcagatttaattacattataaagatgaaatacacttatccattatctccgtaagtagtcttacaggtggataatataggctttatttgaactccataggtgggaaaactgaggtgatgccttacttataggaagctggtggcagaggcaggctgaggttccagccttgtgcttctcacctctggggtcttctctgcagatcacactttggataactgatgtccttccagccatgaatactgttactcaaggacccagagaggccgctgtctctcctgtggtttcaggtgcctctctctctcatgggaccttcaaggatttcagagaaggaatcactgtcaacccccttcttcccccacccatctacctacgaccctccattgccaccacctgggaaccagggcttctttgctgagacaagctcctgcccttactcctgtccccccgaagtgggagaggaatgttccatgagatatactaaagcacaaggaaggtgctggtcaagaacaggctacctggaagtcaggatggatgtcaaatggacccagggtttcatttatgagaccacctcagttttggaggcctttatatagtggactaacctcatgccctccttaggggcttctctcgttgggcctcctaaacggctgtctccctgccttggttccactcaggagagagctagaatgcaagatggatggag

SEQ ID NO: 120753 - DNA, 1052 bp, Homo sapiens
ccaggtctctctctctctctctctctctctctctctttgtttctctctctcttacctacatagacacacacacacacacacacacacacacacacacacgcacacactcctactgatgctcttggccaccttctggatggctgatttcttgaactcctgttcccctgtctgagtgaccccaagtttgacccactcacagaattcctgaggccatggccaccaatgctttcatctaccaagacacaaatccagctcaaggcatcctttgattttgtctaatccacatcacttcagacagtgagctccttaagaattagagacataataataaccaggatcataatcaacactcgaggccagatgcctcctcgggtctccctttccccaagtctggctcccccatccccatctgtgtgccttacagcctctctgccacaatgcaaagacttcgttttgtgcaggcctctaagcctttgggatggggcagctggaagctcactgtagagacagtgcctcctcactcacccgaggcgaggtctccatgagtccagcacatggcccaccttttgcggattccaaggaagcagaagatacaaaccagcctggccccaaggcaccgacatctgaccagcagaaatgatgtcctctctcagagataaagcataaaggtcagaaaaatattactagtcaaggaaacagagctatgggggttcagagatggggcaaccatggtggtaatggtggcggggtcaaggctaccactgctggcctttatcctagagagtcacaggaagataagacctacaggcacagtggtcaggggtctgaggattgaatgttccattgggtttgggtcagggagactctgtggaggccctggggtcagagacaggccttgaccctgaaggccagtaggatacctacaaataaagatgagagtggggtgtgcccagggagagaaactatagctgcagagataccacagccaggacccaaaccattgcatccaaaagctcagagatggtcctacacaaatgattaagtgtgcagat

SEQ ID NO: 120754 - DNA, 1034 bp, Homo sapiens
gatgatattggggggaggatggatggccgctgggtgggggtgagagaggctactctgtgtcaagtgcagagagggagacagtgggcctgatggggaggggtcagcctataaatgctcctcctgggaagagcccggcagtgagccttcctgatgacgctgtaaatcagggcccctaagtaaagccattaccacactgagatactcagtctattgccggatgccactgtttgagacattactttgaatttagtttatgactcctgctgctataaattctgcctagagtggatctaaggaggtggatgggtcacccccacaccctgggaatccccagttcagctggggtggtcccaggcctgagtgtggagaggctaagctggccaggagagtctatgggagcctggcctggggcccactatgggggtaggggcagcggagggagggaagagggaccgagggggctacctggcccttctagctaataccttgctaatatcaggccttttgacactgagaaattgtccagcctctgagactggctaggaccagagtccctaaaggggctaggacaggatgtaattcaagcctgccccttccctgggcatgtcctaccctagctgcctactccacccctgcccaagcaccctcccaaaactgaagggcatttcatccgccccctctgactccccatcctggacgggctccccagtcttattcacaaatcttcatttctccttctctgccgttcttccaagtcccactcatgtgggagcagctggtaaatagggctggcctctctccctcttccgttcccaggcacagtcctgacttggccctccccatgccaaggcgagttctaaccatctgcccacacctgcctcacccccaggcctccagctcctggaaactgcatctccttcctctctgcattgtctcggttagccctgggtggagcactttgaggaagctcagtaaacatttgttttgagaactattcatttctatggccttaatgtctcacacaatgtggaaaa

SEQ ID NO: 120755 - DNA, 1041 bp, Homo sapiens
tccctctgctgctctgaaaacttaaaggacccttagccgccagagaagcagcagggatggggcctccctgtcctgccaacacacacacatattaatcagctagagaaagctctaaaaagaaacctagcctatttctgtctgtgcatggagatgaagacattcctagaaattgactcctaagcctccatggtacatgcaaaggcacatgtgagcgtgcttatgtgcgtgcactcactcacacacacacacacacacacacacacacacacactctattatccccaaggggccagatttgggacttgcctgtagctgtggctctcaagaggctgcaggtgaatctgaggtaggggctggccatggcggtgtgggggtcagtttgtgtgtgtctgtgcatgggagtgttataagcatgtctccctgagagctatgttcaagatttccttaagtgctgactgcccattagctggttttcagccttacccatgtcttcctgagagttgacttgaagctgacaggtggcttgagggactgcatgtgtagagacccctccgtgcacacacatgatacccacagataacccaggtgcaaatgggctcctctctccgctctgctctggaaatatctgcctctctgcatccgctcagttgctccgtgtctgtgacttataattctctctctcctgcctagactcacaagcacagcagcagggacagctgccgggccaatgagctccttctgcctcctcctctggggggccctccagggtcctgaggcttgctgaatattcactttctcatcaaagggaggaaaggcacagggagcagcagctgccaggggctccctgtcaatccacagtcatttatcacagtgcaaagaccattagggagcagttgtttttagggggttccatctggatgaacatcacctgttgctatttttaaaacactgtttttagtgactaagctgggattcagctgaggcgaaggtagatatggaagcagctgagtccccagacattctgccttccccctcaacact

SEQ ID NO: 120756 - DNA, 1104 bp, Homo sapiens
actcttggagtctggatcatagtgaaacagagctttacccttcccccatgtcccattttcagctccaggtgggcacctagaagcccccgctcccttggaatctccctcttcagtcactttccccaggctcatatttcattcatggctgctccttgaatgtgcactagctagtcctttttccctgggtcatcgtcatagtcttcagagtggagttcctgaaaggcactcttgctcatgtgccatatgtcattagactaaaagatgccatccccatcagctgagggtaggcaggggcacagagataatgggtccagatattcagatccttggaaaataactgcaaatccattaaaagggtgttttatggtgactccctctggcaaatgtctgcccctgccgcagcctatctctgatgcccgaattttctcttttggggttaaagcactgtttcatgttagactgaagactcttttcacccatcacattaaactatgatcacgtatgatcatctttatgcaaatacatttgtatgggctttcaggtgtacagatgatgagagggaggagggacgcagaagaagcagcagtaattgggatacactgatggagtggagcattccaaagagccagggtcaggctagaggcagagggtgcctagaggtcatggggtagggggaggtgtggccagggagcatgtgaaggggcattctcagtgtcagtcctgcatttggagtgaggggagtaactgagccatgggtcctaggtcaacaagcctcacgcatgcttttcttcactagctcaacacaatttaccaagtgggtaatattttgggtggatcatttattggctaaactgtggcactttttaggatgaaagagggtgttattaatttctacgctgggacaacaggcaaacttggatgtacagtcaccttagtaacatctgcaaggctttgtgcaaaatctgctctatgccagacacctgcaaatgagaggcagaacaatcaaagctaatacttagcactttttaatgcaccaggcactgtactaagtgcttttttgtgactcatttaatcctttctgtagttactgttaataaaataact

SEQ ID NO: 120757 - DNA, 1050 bp, Homo sapiens
tacctgtgtcccaaggctctctgctactgggtttcccaaactttctgaactgtgattaactattaggaatatgttttccattgctacccattacttatacagatatacaactgcaaaacacacacacacacccctcttttctttctttcttttttttttttttcgagataaggtcttgctctgtcacccaggctggaatgcagtggcacgatcatagctcactgaggtcttgaattcaaactcctgggctgaagcaattctcctgcctcagcctcccaagtatctgagattacagccaccagccactgtacctggccctttaaaagaaaatatgcttacccttgtggccagcaatgagccccatctcccagtatttgtgctattttgtggtcccctctcacattgaatctggactgcttcagccagtgagacattagcaagggtccaagcctccaaatgaaggcttggtaagctctagcctattggaaagtgtgtcctcttggaaggtttactcttgtgatgcttcccctgggaaccaagctgtcatatggtgggaagcccaaactagccatacggagaggccacttggagaagcaccaaggtcccagctgagttcccagctgatagccagcaacaacttgccagccctgtgaatgaggcatcttggaaatcaatcttccagccccatttaagccaccccacctgctgcccatgaagcggagatgaactgtccccactgagccctgccaaactgcagaatcatgaacaaatgaatgttgttttaagcccgctaagttttggattgttttgttttatggcagtagacaatcaaacatctttattataagcgacacaccatgatgttatctattatgttgcattctattctatttttcaaagtgcttagttgatttcatgacccactaataagccgtgatccgcactttgaaaagtactactctaattgatgcagacgtgattgagatcatctgtcttccaacctctccctctatcctgatgctcttagaatcacgacatataagaaatgaa

SEQ ID NO: 120758 - DNA, 1050 bp, Homo sapiens
agaaacaaagaagaaagactcaggcaagtgggaggagacaaggaagcaccctaggaacatcatgaagtcacagaatgttcgagccagaagcccatacctggcacaaaactcacctcctcattttcccactgaggaaactaaaaaccagagaatgagaacagttggcatttgttgagcattcgctttgtgtcgggccctgttctaagtgttttttgtgttttaatcctcacaataattttatgagataggtactatcattatacccattttacagacaaggaaaccaaggctcagagaaagaagggtactttcgcaaggaaggtcccacaataggagactggctggactgaaccagactttggtctttccaaacccttcatccagagcggagggaagctggtcatttgtatgaatgaaacacctgtgggagcttttatgccagactttggaaactttttaagagctcatactgtctctttttgttttatgtggtctgttccctttgctgccactagccataaacatccctacaaaatctcaacagactgcaagcttgcctcagggacacagaggtgatggtttaatgaactacgagatgatactccaggggatctgggttgggattattaggcggagggagtgaatgtgtgtcggcagaggacctagtgcccaagggtcccagaagaacagagaggcctgccctggagctggtctgggaccttgcagggccttgcaatagcagccactgctcattttttctggtggaaaaattgaggcagggcaacctgttcctgtccactcaggttagtggtgagccctgcctacctgaatcctttgcctagtcacgatttttcctccactccaggctctcaaatattagacagtagtcctgaggggcattgaactctggagccagagtgtctggatttgattcctgcctctgccacttaatgtgtgaacttggaagaggcctccaacctctctaggctcagtttcctgtacctccaccaccggatggctaaggattaaagagctcgatgtatgctaagg

SEQ ID NO: 120759 - DNA, 1039 bp, Homo sapiens
agaactggtgagccagctccaacctggcatttccaactcgaagttcatggttctgtctcctctcagctccgtgcgccatctttgcctgtttcttgggtactgaaccacgctcagcagcagggctgccagccctgatttcctgggtcagtcaggcaacatatctgaattctaagaaagccacctggagcataatgactttcctctcaaggtgagactgtggccagctagtgagaaaatgtgaatgagggcgaggggcaactctggccaccttttagtcccgtgggccatgtatattagtcacataggctaggttttgctgcaattgcaggtaactccacaacagaacttatttttcatctgggctacgtgtccactgcaatccagccacagctctgttccatgctttcttctcttggggaccaagcctgttggataaggcactatctggaacatgttctggtcattgtgacagcaagagaaaagccagagaaccacgtgctagctcttaaaacttatactccaaagtgacacatgtgacttctgctcacatttcatgggccaaagcaagtcatttggccagagctgcatatatcagaaaggaggtgtctatttctcctgcagggaggggcactgaatatttgggacggtctttttccaggaagataccagctctgcctaaaatatagcagttgcatgcgatttagaaatctgacaaacaggattgtcagaaaagatctgaaggaagctgccatgtggggaattgtaattttttcccctaaagattatttcatgcttgttggatccatcatattctgaaatccttttgctgtccaacaaatattgataagtggaggctattcagtcacatagttcttaggcatatcacgccatagctccctgacatatgcctactggctgccttaattttctcccaatttgtagctccatgtttccccatcttcctccccacaccccatctttttctttttttctttttttttttttttttgcccttcttcatttcttctctggtctccaa

SEQ ID NO: 120760 - DNA, 1031 bp, Homo sapiens
ccactgttgcataatattccattgtatggatggaccataatatattcagtaaagtgtgaacatttagatttttttcccagtctctgtgtcataacaaatcctgcagtgaataactttgcatttacatcattttgtatgtgggggcatatctgtaaaaaaaaaaatcctagaaaccaaaatttagggtcaaggggacacgcgtttaaaattttgagctatgagcacattgctgtctgtaggagttacaccaatttctgtgtccccagtgctccctcctctgcactctgccagcttggaacaggtgccaaggtcaaggaaagcagcatatgccaccgggacctattcctctcattctgctccctcagggagaaccaggtttctggcctttattgtactccacccttttatctcctgggaagtcaccagatgttctgccattggaagaaggggagatattgtctccaaacagaagacaccaatctatctgtttacaatgattcacatccagagaatcaatgaactctaaaatccttggcagactccaactcatggctggaggagctgatggtggaaacaggccgcagacttcagttaaatattaataataatattaaacatttactgtgtgtttattcaattctgggaactgtgctaaggtccttgcatggattacctcactgaagcctcaagatcacccttcaagatgtgtactgtcattcttcccattttaaggatgcagataggaggattgagtaatttcctaagccacgtaattagcaagtgacaccactgggatttgggccttggttgtttgatttcttttctttcttttttttgagatggagttttgcccttgtcacccaggctggagtgcagtggtgtgatcttggctcactgcaacctccacttcctgggttcaagcaattctcctgcctcagcttcccgagtagctgggattacaggtgcccaccaccatacctggctaatttttgtatttgtagtagagacggggtttcgccatgttggccagg

SEQ ID NO: 120761 - DNA, 1009 bp, Homo sapiens
aatggcaaatggccccaaagttcagttgtctcccaaccggcagtgtctctgccaactttgggtgggggaagtagaaagcaccttgtgtaaggaaaaatatgggtacatctcaggtccaccagcaactggtgagtcattaaccgtctcagtggctccactgtcttctctgtgtggggagcgggtggaactagatgctctctaagctccttggaccggttgcattggcatcagctgggagcttctttgagctgcagaatctcaggccccatactagacctacagaatcagagcctgcattttaacaagatctcccaggtgactgttgtgcacattatagtttaagaaactcagatgaaggttccctcctcctcctatctgctattttaataatagcctctggctggggacagccactcaccagcagagggcactgtaaggaggggtttcaaggtgcagcacctacacccaggttgtctccctgcctccctccttccttccagacctagactggaaagttcactgacttctgggatcctcagctaatcccttacctgggctggactttgccaatagacagggacactctccctcacccctctttagacagctgggaggcagggctctgccaggaaatgccaggccactcctgcctggattccccgcccacctccacttgtctgctggcctgccgactgaatctggctgacccttgtttctcggagaaggaactggaccagccagcagcctctaagagctcctagacggtaagttgagcacccccttggggcagctggagaggggatgggcattgtgatggggttacctggagcttcgggggaggagccaggccagcttagcctgcctgctggagtgtagggaccctctgctggaggaggggaggaaaatgggacttggccaatgggtatgaggaccactgggatgattctgtgtcctgcggaaatgtctactatactaacaaatgccattcatgacttgggtttggaccatc

SEQ ID NO: 120762 - DNA, 1021 bp, Homo sapiens
gcagtaacagggcagccagtttgttgatgggatgccagatcagtgctgtgctcaccaccagcccatacagcagcagcaggtgcagcagggcctgggcatagaggccgggggtcagctggctgcccgagaaccagcacctccacctttctgcagtacccagcccagcaacgagctcagtccctggggctctgtgcacaccatgggagtgcagagaagtctgcccacccattacctgcctgcactcaattgctctgctgaattatgtgcttctggagccaggtggtttcaccctctcccacattacttctgctactgagcactgtgtgccttaccagaccagggttgtggactgtgaaaaagagaaccaggacagtccagctgatggtgagctgaacagcatagaggccaagaggcagggccaggggccaccccaagccccctcccaggtccttccacaccaggtaggaggcatagctgtggagacatggtggcaaaaacattcagtgggaggaggttccgtggcaaatggaggaggctctctggcataaggactcttggatacccttgtgggctgaaatgggggcagatgggtttaggcatcatgtaagggccagggagggagttggtgggaggagctgggcatggtgaggtggaggaggggctggggagacttagagagggtggaagaagggctaactggaaccccaggcaggcatagagggtttcttactttctggaggacccactatggtggtgagaggcaagacaaagcgcctacctttggaggccaatatatgggagtaattcagatatagaggacttgttcccaccccattgggtaccagggccatgtgtgagaaacaagtactcaccccacgacagagtagatggctgtctgtacaagcaataagactttgtagaatgggcaccaggacagcatcctcgggccctcacaccaaccagacatgtgatcacgagtgaacagccagaccaggatgggccccaggtggggcaggagcac

SEQ ID NO: 120763 - DNA, 1047 bp, Homo sapiens
tggtgtgagggcccgaggatgctgtcctggtgcccattctacaaagtcttattgcttgtacagacagccatctactctgtcgtggggtgagtacttgtttctcacacatggccctggtacccaatggggtgggaacaagtcctctatatctgaattactcccatatattggcctccaaaggtaggcgctttgtcttgcctctcaccaccatagtgggtcctccagaaagtaagaaaccctctatgcctgcctggggttccagttagcccttcttccaccctctctaagtctccccagcccctcctccacctcaccatgcccagctcctcccaccaactccctccctggcccttacatgatgcctaaacccatctgcccccatttcagcccacaagggtatccaagagtccttatgccagagagcctcctccatttgccacggaacctcctcccactgaatgtttttgccaccatgtctccacagctatgcctcctacctggtgtggaaggacctgggagggggcttggggtggcccctggccctgcctcttggcctctatgctgttcagctcaccatcagctggactgtcctggttctctttttcacagtccacaaccctggtctggtaaggcacacagtgctcagtagcagaagtaatgtgggagagggtgaaaccacctggctccagaagcacataattcagcagagcaattgagtgcaggcaggtaatgggtgggcagacttctctgcactcccatggtgtgcacagagccccagggactgagctcgttgctgggctgggtactgcagaaaggtggaggtgctggttctcgggcagccagctgacccccggcctctatgcccaggccctgctgcacctgctgctgctgtatgggctggtggtgagcacagcactgatctggcatcccatcaacaaactggctgccctgttactgctgccctacctagcctggctcaccgtgacttcagccctcacctaccacctgtggagggacagcctttgtccagtgcaccagcctcagccc

SEQ ID NO: 120764 - DNA, 1053 bp, Homo sapiens
ctggggccccttccacactctcccccagtggagctagggaatttgggtgggaaacaaaggggagaacataaggtgagctgagagggagagggagaagagagcaggccaagccatacccacctgccaggttcctgtctttgcctactgataaataggggatactaatggccagattttccattcccccaccccagcacccgctgtcactcaattaaaaaaagatagagggagagagcctgggggaggggcaggaggccttggctataaagcctgtggctaagtggggaaagcacgaagcctggcctgctgggtccttttcccgtcatccccagccagatttagctgctgacagctgcttgggactctgccgccagggcctggcccagacctgcctgcctctctcctctccctcagtgactcctgagccacagcccctccatggcccagaaggaagaggctgctgtggccactgaggctgcctcccagaatggggaggatctggagaacctggacgaccctgagaagctgaaagagctgattgagctgccgccctttgagattgtcacagggtaagcctcagatgtgggtcagggttctgctccctagaagagtgcagccttgggttaggctgtggaaattcaggatggttatattaggcgtcagggacagctacaaccctgcagcagtgagagtgcaccagtgggcccggcaggggtggtaggggacccagcagcaaattctcttggcttctcagggtgacaccttgggctctctaatcagggagaggtaggaggagctccttggaggcaaaagcccagagaataaaaccacccttcaggcctcctggtattgggatggccacctgcctctctgggtagaagcttagtcccagggagtttggcgaggacagaggatgagactggcacatctatatgtggctccgttcaaagcaacccttcccctcaacttctctgttcctgagtgggtctctccgctagccataggcctctagccctttctttagagcttcttcctggagtagatgctcccaag

SEQ ID NO: 120765 - DNA, 1018 bp, Homo sapiens
tcttcatgggttggcaaatgctcagcttgagaatgatcaggtgcccatgtgcatgtctaatagaaaacacctgccaacatcaagctctggaacattgatatttcctaaacgtgtctatgaagcgacatcttctcttaagggtgttaggagtgagagagaccaaaagtaaattatcttcatggaagcttgttgttttcatgttttagtaatatgtgagttgttgcaggattaaagttgggtaagagtgtcgtgagtacccctcctctattactggaagattttgatcagtaactggggccttgcaaagggggcttcgtcatagcatttctgtaggcgcaaactcaatcagactaaatgtaaaaaagatagtaaaggatcctttagccctctttcctgagggtaattagcctgtttctgttagagtttaatttaccctcagcaagaggccaaattggccttaattgtgtcctaattatttgcttaaatagctaatctttctcctatcacctcttgatatctgtaagaggttacttctgagctgctgcctactttacaaatgtctttttaactctttaaatgttcctgcatggactagcttgttgctatattatccccattcctgcattcgacatcctccatgaattctactgaggtcttctcaacataaggaaaatgttcccgtattgtattttcacacagcaattgttggtctccttcaaagtgtagccatttgtttgaaaacatgaaagcaggtctggcttaaaacaagttaaataccagtccatttggggaatttcaaaattaccataagtgaaaaaattgtccctgaaggactaaaaaacattcattagagaaaaatggaatggtaagattgccagtggatatgggagtgaggcatctagaagatgtctggaattagtaatccctgacatgtacacaggggcatactcagaggatttcagtatcttctctgctgtggttcagtagcaggtgcttgcaccatctaaatcttaccaaa

SEQ ID NO: 120766 - DNA, 1045 bp, Homo sapiens
ccatctgtaaaccttaacacaagtcaaaacatggattttctaggcttcctttacttttaaagagattatggttattattattatttttttcttggcgtttgagccttgattctttagacaaaacctagtctcattcaggattggctgtaagtggaattctgggacttagcaggaatgtgataaagcactttgtcatttgccgatagtagtcttgggtcaaattccgacgacttatcacacttgaagcctgaggaaaggaggcatgccctggtaatcagagtgaacacattattcctggaaacctagttagagtttggcaaacacccggaaattcacctgtgaatttttgcttccacataggactcaaacaaacctttaaaaaaaaaaaaagagagacttgacatcatcctgccattaccatcaaacaccatgtattgaatacttttaaatgattgtatatctgaacattaaactactacttttcacccgctcctctctaataaagaagctagttgcttattaactggcatttgggatgtggctaccttagatttctcatgctttttgttccaccttctgccctattacttgccttcagagaagggaaaggccctcacttgattgtcgtaagaagtctgtatgggagagttattctgcattgtctaggcaagtcttggtttaaccatggcttggttcatagcctggagtgtccctgtgtctggactagctcgcttgtctgtggcaacttccagatgttcaagtttcttaaaaatctggccacgggaaaaacacaccacttcttttattaatgttgctgtttttctttttttaaaaaaatacccaacttaacataaaatgcatatttcagaaatctaaacctcgggtctgaggctgtttgtgttaagcagcccccttgggtgagcaattaggaccttcagtcccatagttgactggagcccatgtatggttgcatttctctccttgcaggtcactttcgtccttcccgagagcagcattagagagagagtcacagcctaaataaact

SEQ ID NO: 120767 - DNA, 2919 bp, Homo sapiens
gatgatgaaagtttgaatcctttgtgttcagattacaaagaaaagggcttcgcacaagccaacttatgaaaacttacagaagagtttagaggcaatgaagtctcattgtctgaagaatggagtcactgacctctccatgcccaggcaaggaaatccatggtcctaaatggagatttaattgattggtggggtttactatcttacccaaagacaaacaacttaaaagcttaacccaaaatatagatttaaaggtggacaaaagtcaaaattttgtaaaaccaccagtgaaccagttgtctggctttagactaaggcacagccattttctagcttgagttgaatgaatcaggacaattaccttgaaatatacatctgcctcagcctgcttagcagagagcgaccattgtcattcagctacatttgttgaattctcagcaccctctgcttgaagcttggcctttattcctaaagcaatgtaagctaaagaatcaagactgagcaatggtggttttcctcttggaccacttcccatctcccaaacctattactttgcgtcaagaaagttgtaaattatcattcccttttatactgcacacttgttttggtcagtatgggtaatagccagaggatctgtccctgatgtaacttcttagactttagctattgggaatttagggaatgacattgagggttcagtagtccctttgctttcttttcaggaaatgggcctcacctcttttcttcctgtcaccctggtagttttgagtcaatgctgagcatacatgcagttttatcttgcgccccacattactttgcatatggcctcaaatgtcccttattttacactggtctttgatatatttatggtgtacatacatatcagaaactttttttttaatcacaattccttatggacttaattatcacattatgacatgaaattaccaattttaggtctcttttttccctaggcgtgttgaggatcactagagtaacatcttggaaggtgccaagtagtagagttttatggactgagtttattcttaccagggtgttgcaaagaccttactcctggattgcaactatcttaccatttcccagcattccctcttgactttcttttttgcagatcctgtacctcattcctcttctccttactttcgttaacattctgttaccataagtgcatttttaaaataccaacctttcaccatccatccacagccaattttagtcagtagtcatagagggataatgagtctctaatgtcatgacagttacacatttctaaatgtagcatgaaatagttggaaagtagtatcttattaggcaaacagaagtgatagtttttggatgttagagctgtctaggaatggtcttcggtgactcacaacaagaattgacttccaaactcctaccatggttgcccataagggtgtcagactagattatttgtttttatgctttgagtggatatagcttaaaagagaggagcagtttcctagatactttcgttaccatcaatggagatattttgtctttttcaggattggatgtggtcttgatcgtctgcaatgggaaaatgtatctgcgatgatcgaggaggtatttgaggcaacagacatcaaaattactgtgtacacactctgaaccagtgaacattttggatgtttccgtgttctcctgtgtcatctctactgggccataggaccgggcaaacctaccttaaaataggcagaggaaagtttcatgagaagtagtgtgtttaacaagacagactttggttgctgtattcaagtatttggattatgactgtggaggagggcttgcttaagatatgtggttgtgtttttttgtggaaaagtaaggagttaggtggcttgataataggcagggaaaccagattgtcgggactatgacctttttctccagtatgctacctgatttgtttggctggccactaggtggcagcattggttctacttctctgctttttaagagaaatttcaggaaggatgatcattccagttagtttggcattttttgtcgtttgtgcacataacttggtgttatccttatgtcatcagattcctcctaggggagagtttttgttttaattacaaaattaaattctacattgttaccaagaaatttgtggtgataaaaatggaaaaataaaaatttggggagttagtgaggttctgtgcttatgtctatttgttctggacatgggtaatggagggttcacctgcaacttaatttcaaacagtcagacaaagggtccaagcgggaggagaagcaaagtgagaaataagagataaaaatagacaagtcaaaaggcaggtttttagaatctcctcatggtgaactttttctctcttttgtccactgcatggtttctgtgattgaacctgcctgaatttaatcatgaaaacaagtgaaataatgtatgttaaatgcctggcagagtacttagcacagactagtgacccaataaatcagtgattgtcaaaaatccttatgagtcttctttaaaaaaataaaggccacttcctctcaaaaaattctcatacctgtcatctcagcactttgagaggctgagactggaggatgacttgagcccaggagtttgagacaaacctggttaacatagcgagaccctgtctctacaaaaaaaaaagaaattaaaaattagctgggcctggtggtgcaggcctgtagttccagctactctagaggttgaggcgggaggatggcttgagcctgggaggttgaagttgcattgagctgtgattgtgccactgcactccagtgtgggcaacagagcaagaccctatctcaattaaaaaaaaaaatttggtggtggagtgggatggccacttttgtgtttttaacctccatagaagatttggatgtgca

SEQ ID NO: 120768 - DNA, 1047 bp, Homo sapiens
ttagacaaaagcaattcttactgctttgtattatagttatttggaatgatgatatcttctctggattgaaaactctgtaataattaattccttttttatatatctgtattcctcataatgccttatacagctctttgtatgtaaaaagataattattgagtaaatacacatttggcaagtaaaaaactacacactataaaacaatttcaaggcaatagagaaagtttgtggacaaatgaggatatatttaaaagtagtagtggtacaaaagatgggttgtgaggaaacatgactgtaagaaagctgttaagttaaggaatatagtatttgggaatgctgataaaaagcaaagtgtttgtgggagacaataggtcttccctattcccttcttcagtgttgaaaattctagttctgaggtaaactcagatctgtaaacattttaaaatctttagagatcagtgtttggttttctttttcatttctactattaaataactttttcttagaaaagaaatctggagaagtggctgttctgaagagagatgggcgatatatatattacttggtaagatggggccaattcctttttttttcagggccagttcttaatacattttaaggatttgtgaacagatgggctgcactgcatttgtgttgatcatgatgttctattctagacaactaagaatgtcaaaaagcttcctatcttatgacaactccagtccagtgatggcggctacttggagcactgggttagaaagaaatgtgaggctgcatcccagctctgtgggaaagtcgtgtatcatgtaccataggcctgttctaagacttgcaaaagttaggaatgcctgccatactatatttcctaggcagagtgagataaaaacaataatgtctcaagagacagatttcccaaaggagcttttctcttattccatgtcaaatagcacactgatagcaagggggtgaataaaaacaaaaaataataagtgcagtcccaaataatacttagctcctctcctaactactgcctgaatgtggggttct

SEQ ID NO: 120769 - DNA, 1025 bp, Homo sapiens
accaattatccagcagttagtatatgccaggtataatccgtgtgttagggagggagtacgtagaggtcaataagaactgtgcctacctgatggaaattgacaggtgaacaggtagttaatacctaacggttagtgctataaaggggccaagttcagttgctgtgaagtatccatgcgtgagctagcctccgtgaaaggcttatcaccaccgcacttttgactggccttgaagaatgatggtaattcttccacaggaaagatggaagagcttgctcgaagagaagaaaagcatgtgcagaggaatcaaattacactgttggaggcaggaagatgggatagggaagtgggcagtagttgtgatagtttaggggggaaagcccagttggtaaaatacttgtatatcttgctaaggaatattttggaaacagttattattttgtatggaggttcaagtagaagggatctagagctatattttttcctaagattgaaaaaacgagtttctgacttgtttatgggttctgccccgtgatagtggctgagttctttggggatgaagaggagacttgtcctaggactctgaaaattatttttactcatgtgaatcatctagtgcattccctggcacataaaggtcttaagtatctggtgcccatttctaaattcacatttaatgttatacaactaataggtttcagaaaactcgtattccagtgctctttcattactaaaacttcggggacaggttttattttcactttttagggtgagtttttcattgttgcttaagtgattttcttaattcatttgattgtcacgttatccgcattagcagatgagatgatagagcttaagtagtctaaaaaacatgtatatttgcctttggaacgtttttttgtttgtttttggatacagggctttcctctgtcatccaggctggagtacagtggcgcaatcgtagctcactaacctggaactcctgggctcaagccatcctcccttcttgttctcccaaaacgttggga

SEQ ID NO: 120770 - DNA, 1017 bp, Homo sapiens
tccagaaatctgtaggatgatggggaagctggacagccctttgttgtagtctagtctttcatcaagcgtctatcaggacccacttgttgagttgtgaaagaaattgagtgagccaatgctgggaatttttaaataatagaatagaaaatatctgccaggcatgatgatggctcacgactgtaatcccagcactttgggaagccgaagtgggagaatcctttgagctcaggagtttgagaccagcctgggtagcatagggagaccccctctcttaaaagaaaaaaaagaatagaaaataccaaagtgcatcttgtgttgtataaaggtaaatgctgtttcatgaaactttcatttcagttacatgctttatacatgtgtgcactgagttgtgataatgaaatgtgtttcttactaagggttgtggtcaaaaaagttaaaaagctactgttctaggctttgcctggtagtgattatcaactgtgataatcctatggcttttcatatgcttacactagttgagtttctgaagaggttttagctttggagtttgtgtaggtccacatagaatgggttcctagtaagtggttggctaagtctcagcttttgcaccttggaatagtggggcaaagagaattgcactgagaagagaatgcactaggaagagaattttcatgctagccagaataaacacttattatttgtttctctctctttgaggaaaaaccattcaaaactttgtgttaagagcaagagctagacagactaaatctggcttagtttgtcataatcttgggcaaagaggcactttgggaaagactatcgaattgtattgcagtcttgctaactgaagctcacagtagtaggaacatatgactttactgaagccagttgcttatagcattaaccattaacagtatcaatatcatgatacaggctaaatcactctgtcattaatgtgagagagaattgctgctagatttgaagctgctcttcaaatcttgatactcttcaaagtat

SEQ ID NO: 120771 - DNA, 1021 bp, Homo sapiens
gacagtttaacaaaacttaggatttcaatgttcctggtgattctaatacattagtggtggtggcagtggcggcggtggtggtggtgattgtaggaggaccttactatctaacctactcatctaggacagaatgatctgttaactaattgctgttacttgcacatactttcattaagtgtgaatatttcagtcatgaatattctgttctaagtaatttctgtcaaagatagagtctgaaaatgaaaattttggactattccatggatcattacagtttacttctaaagcacttttaaagtgcttccagaaagcattctattaggtatttttgtattgggacttaagatgtgacagagcacttgtagtgacctggctcctacagtagtctgtttactcataggagcttgaaatttgtacacttgactgctctgtgtaatttcaatatttgttgttgcttctgataaagctaaaataaccatgtggatattatagaggccagtgaggaattccaccatggagactgcaaactgaccagaaagtgcttttaagaaatctttagtagtgagtttaaacaacaaacatatctagaattcacagagtaaaatgagcaggataaaggtatacatttgacatttcattttagcttgagagactgtagggaaaaaagggtcatcctctacataagcttccagagctgcttgctacccagcctcctagagtcattgctgggtacagtttgatttaccttcttcactttatttagaatttgtactcaaccaccatcaccaccatcacctttccctctcattgccttctctccagccttcactacagaccattcctggattggtttaaacaggcaactaaccttgccattatgattaaatgtttgtcatggatttagcccgtgtttggtgacaaatgccttatatctattgagacttctcaaagactctggatattctccattatgtctgaccttaaagtattgagcttggcatttagtaacaggattcataga

SEQ ID NO: 120772 - DNA, 1035 bp, Homo sapiens
ggagcaaaactgatttggaagagtcagataactgagtcagatatttcatgtatagcatgtatagtagaaaaggggatgaaaaccataaaaaaatatatttttggccgggcgcggtggctcatgcctgtaatcccagcactttgagaggccgaggcaagctgatcacaaggtcaagagatcaagaacatcctggccaacatggtgaagccccgtcaaaatacaaaaattaggtgggcatggtggcgcatgcctgtaatcccagctactcgggaggctgaggcagagaatcgcttgaacccaggaggcggaggttgcagtgagctgagattgcgccactgcactgcactccagcctggcgacagagtgagactctgtctcaaaaaaataatttttttttttaaggactacatcgttctttgttagtatctttgggatctgttgaattgtgtcattacttatttcctccagacacagcagcagattgctgtccagggacagcaagtggcacagactgctgaagggcagaccatcgtctatcaaccagttaatgcagatggcaccattctccagcaaggtaagtgtacccataagcttccctaggactttttggggcaacttttttgtcccttagacaactgacatctttagaatttgagtggtgaacttgacactacatattttttggacaaaaaaaaaaaagatttcctctagctctccattgattgttggtttcttgtcaccatctgtgaccaacagtgattccatgtgtagcagtttctatagtggttgctaatctagggattgtgtaagcttttagggaagaagtgtttctaaacagaagaatagaaatagggagttcattggtaaagagagaaatagatcaaaaatcaagttggctttagagtgctattgctgcttatgtttttttctgggtcattccattactttaaatgactattatgtatacagcacttttactaagaagggtcctcaaagagcctctagtctagtaagaaagacgtgaacaaataaata

SEQ ID NO: 120773 - DNA, 1050 bp, Homo sapiens
gcccttgctggactcctaactttctgaccctgaccctagtccacgcaaatcactttacccatctggccttcagatttatctgtaaaacgagtacattaaagtgtatagattctaatgattctttctagccctgctaagtactcagtatttaaatgatgatcaaaaaacagtgacaaaaatacagcatgacatggtttctctgggtcttttccttagacacctgaatctgaatactcttaacccttaagtatagagaacaacacaaggttcttaggaaagagatacactaacagccctgcagtgtttcaccatggagtgcaggccagactttaaattattttaagaataaggtttattgtctcttctttcctaatggggctacactttaagccatgtatgcagacttaagatgtattacaagcctttgatttacttggtaaagttatgtgtattctcttggggggataagtagtgagagccatgagttcctgttgcttttgcaaaggactttaatcatcatgtcatctttgtctctaggatccaaaccaagccgatgaagaagcaatgacacagatcatccgagtgtcctaaccccacgccatgtgatggagctgatcaaggtcatgtttctcactgttccaggaaattgatcaactcttccaatgggacattgatgatcacattctgccctttactacaggacagaaaccacttagtttttaataagtggctcagtattacaattgcagcgatgcctggcaaattgaagttgcaagcctttgtcttactctttcagtcaggacctatttcagactgttgatgacattgacatttcatggattcggatgatgcaaggagacacatgccaccccagcagtacacaaagcacttaccttgactggtgaagtcagccagccatctcagcagggaagaacaaccttctcaaccaaaactgcaatcaggaaagcagcagcccactccttcccatggaatctagacagcatttatccctctggtgggggaatctcacactgactaactgaatggacg

SEQ ID NO: 120774 - DNA, 1364 bp, Homo sapiens
taagatgatatttcagaagagttggctgccttctctggaaacaaggaaaacccaataattccgaggaacattgggggttaaataccaagaataaaaattggttcttctttgacttcagcttaactgtattaagacagaaattaagccctctaaaaacaccacaaagagagatgattgtaatgatagaaatagaggtacagagctatgcaaaggaaacaggaagtgaaatattcctagtcccagggatctggtaatcgctcctggcttccagatgtcaaaggactgatcctttggtaagctcactagaaacttctagctctacaagagtttgggatattaatgttattcagtaagtcccaagtttttcagagaatagattactaacaatgaggaatttatattccttggttaatttaggagtctaagatgcagagttcagaaagaaattactcagacctaactttgagtgcttaagctgccaacagttagaagatgctatttatttgtgtctgtaagtttgtacatagtaatgccagccttgttgctgaattttttatttggggggagatgactttgaattttgtttgaaatgcttcagttgtcattttgtcattgcatttcaaatagctcatgacccttttcttgtggtcactttggcacaccatagtagcccacaaagtgggggcagggtattgacatttggattttttctttgatactagttcttttattcatttttatttgtgactgtagtgataactttacagatggagaaagagtgaatggatgaatgaataattggtttaatgcctagttatgcaacttgagtgcttttttttttttttgcaggataattttaagtgtatatattttaactgcactggtacattgaacatgtcagtgtcgatgccactggaccaacagagcattttgtggctatagggtgcctgataataatgtcttgatttttctttgggattcaactatatcgaaggtttttcccccagcagtatgggggcgtacaggtgatcgatcattaatgtcattgcaattgttattttttaaaataaatttataaaaataaccgaaaagtaatgtgacttttgaggaatctgcaactcctgggttctagtttgtgtttccagtgttgaaattttgatctcccccgacaagacttgtctgcatggacggtgtctctgtaaacagtatcaaacttgtaatgtctgagcctcttagctttatctccccttaatttcttcccttttggcccttccaccctgttgaggagattttttctgtcacctgcaggctgatcatacatttgatgctactactgaaagtgtttatcaaaatgtgatgaagta

SEQ ID NO: 120775 - DNA, 1094 bp, Homo sapiens
ttgtcaaacccctccccttggccccagcacacacatgcacttgctcatatactcccgcatacatgcacgcacaccccatccacctcctggcatgcaaatataagcactggcacatatgcacacatgtgtatgtacatgggtgcatgtgcgtgcacacacacacacacacacacagacacacacggctgctgcttgctctctcctgcctccctcagcctttgtatatgttttgctgttatcttgggtgagttcaccttcaaatccaagcctctaagcaggcggacaccttgattttataagtcaccctgaagatcatggttctgaggggtcatagaaaggcactgagctgcatgattcgcatatgggtgtaggagtcagccagcccagtttgagttcctgctctgctaggcagtggtcctggacaagttacttaacctttctgtgcttcagcttccttatctgtaaaatgaggatgatgaaagtagtcacctcacaggggcgttgtcaggattaaacaagacaacacacctgtcactgtgtctggtctgccattggcgatggtgttgaagatatgatgacagacgtgcaggactggcctcctgcacagacaatgcagcatcactgtgagggatcccagtgaaatatatttcccctcatcagtctctgatcaatgtcactatcagtcctttaggtgaatgtatttatcccttatttagctatccctggaattcaatagcttttcatcttcacgtgaatgagttaagcagatcccttacaatttgactctagttaggggaatgttcctcccttcaattcttcaggaaatatttactgatcacttcctatgtgctgagtgccaaagacaaaaaggtgaatgagatacagaacctgctccccagaaacccctgtctagagagggaaacataccatggcagtcagtgagaaaatctatgatggagatgagctcaggggttgagggggaggcagaacagagtccctaagatggaggggaccaagcctgggaatgtgatctgggggaaatgagtgctcaggttcactggaaggaggtgacagacggcactccaggctggagg

SEQ ID NO: 120776 - DNA, 1019 bp, Homo sapiens
acacacacacacacacgcgcacatctctgtgaaaagatgaggcacagagaagaatcattcccagtcatgactggatggcaccaataataaaggctgacacgtccaaagctctaagactgtgctcctcactttgctaagcacgttcgacacttgcttcatttatttatttttatttggcaggtgagaagtaggcatcataattatacctattacatagagtaagaaactgaggctgagagattaacctgtcaaggtcccttagctaagtggtaaagcctggctgtgtgcccagacctgtccacctccaaagcagttgtcttgtaaagactgcctaggctgtccgtggctgatgctacaggaatggagcccagagaggactagggatggggagacttcctggaggaggtggggtttggcttggccttgaaagaccaggtaggcttccacttctacccatccagggcaggccgtatggaaaacagggaaagcttctaggcaaaacatgaagaactttaaaaacaacagtgaggagttgggtccagctagccaggagtgtgtgttggagcaggttgaggccaggctgtggagaccagaatgtcagccagcaaggtagcctcttccccactccagcccaatgacctatgtcagagagagctcaccaggaacaggaatggtgaaggctggggactagacagcagtcctgctcaggcagggagggcagagaactcacacctggtctgcaccccatttcctggccaggcacccctggtctcagtcattccccatttccaagtagtaaatagatgtataaagcaaccatttccatttaaagctctgcagaccgtagggaggagggcctgcaggccatctgggcccttgtttggcaatgtttgtgctcacaacaaacctgatagacagagatttatcgccgttttcattagctggggttggtttggtttgctgcttttccaccccctccccgctacacacacactcccgagttacagatttatggtggg

SEQ ID NO: 120777 - DNA, 1019 bp, Homo sapiens
acgcagagaaaagaactgcagctgggctagctcgggccggcagctggggatccggaaacactggaagaggggacggctcaggcagcatggcagtgtttagccacagagaaagctgcccaccgattgtgctcagagatgattttgtgggtctaggcctaaacagtctgtacccacacgggtacatgatgagggtccccggtaagcccactgctgccaacttcctaactcactcttcggccttaggcatgacccgtcttctctctgggcctcagttttcctaactgtacagtgggtgaagaggacacctgcagccccacatcctcgggctcaccatcctgaagctgtgggttgggagccaggcaagaagagacctgaaggtctcaacgtacaccctctttgttccaagggcatcgggagcctacttccatgggtccttcttgaaaggggtgctgtggagctcggggcagaggacactatgacccatgcaagtctcctccttcccaattaggcagtggagcctgattaaaaggggtgctgcctgccccctcccacccgatccccatcgacgagatttcccttcatcagaatctcacattctccagaaattaatttgatgcctcatgttatcaattaattgaatctcgttgggagagagagctccgcgaggtgaggcgagcttcagcttggcccttgtgtgccgccatcccccctccccctcacaccagggcagccttctcctcccccattcctttttttctgcctttcttttaattgcacttattttctaaaataaaaccactgctctgtgcccctttgcccagtttggcttggatggatacccatggactgggtactggctgggatttgccctttcagaggtgggggcaggaggacttcccctcccctggaccctgtctgatctctccttaagtaaacagaatctcaccctttgggaatttggccgtgatcctgtgtgctccaggggcttctggtgagaaacttaggaggactaggggagg

SEQ ID NO: 120778 - DNA, 1023 bp, Homo sapiens
cccctgccagaactgatccattaaaacacagggcagagggcataggtgtgtggtacctccaagcctcccaacagtcaggtcagatatctgcaggaacaagccctcagcattttcaaggacacttggaagcccttgctctgccccctgcatggaagatgggggaaggaagttctaataggacatccctattaggaaacctgggaggttgttgtggcaggtagagctaggtagtcaccaggccctgactgaggaactgtgctttgccgtttcacatacctccttgttcttatccccacaacaaccctgaaagattctccaggcagtggtaattatcactctcatttgataggtgaagtacccaggcccagagaggttacctgacttgccccgagtcacagttaactggaacttgcctttctgaaatgctggccataagggctgaggtcacaagtggactaacttcatccctgctgagttttgttgacccacacacagttcattacaatggtaaatttcacataaatatccccacttctgctccttttgaaaaacccaagccctgtcaacactgagcctgcatttctgtgtggaaaggatggactgggattgagtggcagctgcctcctcgtgccctcctcacctggcctcctaagtgaccagcctagcccctgaaggcattttggttagcagctttgacatggagattcacctgtccccagtattcctcaaggagaatctagtgtgggacagtgtctgaaggactctgcagggtctagccaggcacagtggctcatgcctgtagtcccagcactttgggaggccaaggcaggtgaatcacctgaggtcagtggttcaagaccatcctggccaacatggcgaaaccccatctctactaaaaatacaaaagttagccgggcgtggtggcaggcacctgtagtcccagctactcaggaggctgaggcaggagaattgcttgaacccgggaggcggaggttgcagtgagccgagattgtgccactgcac

SEQ ID NO: 120779 - DNA, 1017 bp, Homo sapiens
gctccttgctgaggaccttggtggctgggggaggagcatggattgggaagataggggtgtgtagagaagaaaggaggacctcttggagcttgcccctcattaccagaggaagcagctcagatctacactgggtggagtccactgtgaaagggacccggctgtgactccagcagaccgaccatcagtgcctaccagtattcacttaagtactgtggtttcatgtccacatgccagactgagagtgagaagagaccttcaggaccacctatttgtatagagacagggaagtagaggctcagagaaaagggaaggcagaggattcacaatggtgtgtggctgagcccaggcccctgcctgctcccctagccagggttcaggctcctgtggacactgacttctcctccataccccacacccttgtagttacaggggactgataatcaaggcctcccgccagcacccttccccatcctgtctttagctgactgggtcccaggcacccagagcctgctcacccacagtgcagggagcacaccggtgctgtcgcggcgccctgtggagaggtgggcaggagacatgaggctgctggtgtgctcatccttggcgggcaggtatcccagggcagaggtgagaattcagaaagcacttcggagtgcctgtcatgcaggtttggggggtatgttgttaggtgggcgggagcatggaaggaggtgtatgggtgtgtgtcagtggggtaaagaccctggagggggcagagcatgccacatgggaattaatgccattcacacaccctgcggaaatgacttttcaaatgcatataatctcaagcatgcaaatgagaggcttgcttcaccctgtttaatatgaatgatcggcccctgaatagctattattatacaccacattgcagcaattatgttgttcactgggtgttactctgtatgccccccccataaaaagaaaagaaaggagcacctctgtctgcatcctcctccttccttctttctctttttccaa

SEQ ID NO: 120780 - DNA, 1014 bp, Homo sapiens
ggggacatcgggaggagccacattccatcaggcatcccaggagcagcctctgggaagttgaggagaagtagatgcccagctactcctgtggcgatggttatgtttttgggggtcagcagtcactgccctttcagccttcagcctcagcctctcccctgtgtctctcttcctcctccaggtaccgctagagcgacatgatggtggaatctgcctcggagacaatcaggtcggctccatctggtcagaatggcgtgggcagcctctctgggcaagccgatggcagcagcggcggggccacagggacaactgcaagtggcacgggcagggaagtgaccacgggtgcagacagcaatggtgagatgagtcccgcagagctgctgcacttccagcagcaacaggtaggaactggtgcgccttggggtatctgggagcgggagaggggcactaggctgcattccacttcatcctggctgctggagcaccactccctgccaggcagcctcactttaccattcttaagacagtccagcctccaaggactccctgtccacccacccattctggtggccaccttgagcctaggctaccacagcattttcaagagatagaagtgggactcggaggtctgagatcatgaagcttgaaactgtcccagaaatgccaataagaagagacagacacacaactgggcagcaggcttgagattggcatgttggattggtgggcactccactcttcacctgcacactggctaggaaactggctaaatgaacagggttaagagggtgctgtgcacacagggggatcttcacattatttctgttgcaaaacattatctgcctccgagtcagcttgggcctccatttccagcagtgaagagaggcccaggcagctgggtaaaggccaagagaggtaagcaaagacaggcctccatttttagggctcaaactgggaatccctgtctgtgtcttatatttcctcttccaccctaaagtgcagagttcgggagtttaa

SEQ ID NO: 120781 - DNA, 2342 bp, Homo sapiens
aaaatggggcaataatccctaccttacagccttacagaggaagattaaataagctcttgcctgtacagtgcctgacccatagtagatgctcaacaaatagtactgatttactaatgccctgagtcaaccccctttattttcctctaagagtccctttttgaccatgggcccttccatttgctgtccccattgagtcctaacaaaacttcactgggtcccaggctgagtctgtagaggctctgatccctgaaccccaacagctcttctcagtgacttctactacccttaccccaagcccttatggacccatgaccctctcacccccaagaccttccaccttaccctgatctccttctccttactgccccaaacactccctaatccctggatcccacccagcctcccaggccattgctgactcagcccctgtcttgcaggctctccaagtggcccggcagttcctgctgcagcaggcctcaggcctgagctccccagggaacaatgacagcaaacagtctgcctctgctgtgcaggtgaggaagagagcaccccgctggctctgggttgggctggagtgtgggcctggcacagagggagggcaaggacccgttggagaactgctcttgccagttccaacaccaaaaagtgggcaacttttcaaaggaaatacagtcactgcaggggtggggcaaaaaggcttcccactttctctcgtctccacctgatcagccagaccttccgctagcttagcctctttgtccctgtcactcaaagtttgtctgcagctctccctgtctctttgtacctctctcactgtttgttctcccctgcctcttcccttcagggtctctcttggtcacttctcatgtttctgcgtccctgtcggtcactccctctgtccctctgtgttcctgtgtctggggctcagcccctcccaggccatctctgttgctgcagtcacgtcaccaagtccccccttctcttatcctccccccttatccctcatccaccagctctctcgcagtctctccatgcttcctgtctcttgatgtctctctgtctcttttgttttcctttgcacaatctgcccttttttccccttctcccttccctccagcttgccagcccatctggctggctgggggaggggagatctgtggggggtgggcggggggtgggggagccaggccttctgtttaccttttgtgtcacaaagaacttgggagaattgcagtctgagtccgggttgggtcactactcgggcagccactcccctccccctctgcccagcagcccgggatccatgctccccccacccctcccccagcagagggaggctcagaattggggaagggattaagccaggctttgaaaggaagtttatctaagggaagaagggtgagtatggttggttctgagctggaggtgctctggagtctggggctgggtgctgagggaagtgaagaggagggtggggtgggtgcagggtgctcagagaaggacccaggaccaggctttgtcctgggtggagattccagtgctctgacaaagtctgagttttatgtaaaacaagtttatgtttggaaaaagttcaaggtgcccaacagatgtgcagccttaacagtaaccctcttaaaattcttgaccctaaggagacaaccctcaaaggggaggagctgggcaaagatcagggcgtggcctggggtggaggaggggaagacacaatctggaaagtcaataaagagaggaagagaaagatctcatcagaatgagatctaaaaggttctcatacccatgctggtcaggattgggcctctttaaattaatgatccccacatacaatcccagggtttgaagtggtccttgggcttccactctgaatcctgcccgccctggacccagcttagaacaggaaggagtaggctggacaacagcaaacgttcccccaaaccagaaaggggctgctgacccaggggtaggagggtaggagcttgatggtagtgggagggactggggtaagacatctagaaggactgctcagctggggattaagggtcacagatctgaaataattgagagctgaagggagactatggaatcttccttaggaaactccctccctccaaaataagagaggcctagaggtttcagagtcagaaagacagataaaatgatgtttttctcaggccttctctctccttgtctcattacttccaaaaattcattgattgattcattcattcattcaacaaatacttactgagtacatcccaaactaacaactgacatatacagagtgcttaccatgaagtgtagacactaagcgctttacagctatctca

SEQ ID NO: 120782 - DNA, 1051 bp, Homo sapiens
tccagtcagaccgtccagccgagcacgctgtattcatgggtgggtgcagggtccctgagggaggggctggaggcagctgccggcgtttggcccagggctcacactgccagggcttaagttagcacttagctgcccagctactctccagatggtgactcatgggccctgctgagcctgctagctgcagagcgcccatcctgaggcatctgagcctggcaaggggccagcgggacaccagaggagctccagctcagttctcagacccccaaggggcacaaggagaggtggatgaggtcaaccaactcaggagatcagcatgcggcagccacttcccagaccctttgtgaccccagtgggccacctcgagacgagtgcacaccatgtaatccatccagatctctgtagcagcctccataggcagctgctcagccaagtggcaggaaaagcaagtgccaaggaggccttccaaggtcatctcttccattcccctgcttccaaggaagaaaggcccgaggaaggaaaggccacatccttttttcacatgctcctgtcagtgactcacagtcctggtgcctggaaagatcttctgagtgtctggtctcagtctttcctgttgcgggccacgttcgtctctagttcagctctcacagcagtgagaatgagtggcctagtgccttggtcctcagtgacctttgtcaggcagcaccctaaggcacaccaggggaggagacagagaaggaggggaaagggaaaatccagaatgttttaaaaagtgattttcttcacgtttacatagaatttaatggcgtacaagtcactttcacccctgctcccactgtcccttccgggtcagggtcagggcaggttatttaacctctctgggcctcagttttcccatctcatctgtgagatgttaatgatgatggcaccatcctcacagggttgccgtgaagattccatgagatacacgtgtaaagggcttagccaagtgccgtgctgggcacataataagcagtcagcaacgtctgctaatgatgcagggagggcaggt

SEQ ID NO: 120783 - DNA, 1064 bp, Homo sapiens
gtgagcgagaggtgttgggagccatgggattccccaatgtccttggattcactgtacctccctggttgcttctctgcctggggatttcctaatccatggcttaaggggtggttcaaggctgagtcctgcctctgccaggcattgaaaagagatccaactcctcctcccctaccccacaggtgaggctgaggcttgggagagggtcccctgaggacctagcctgtcacagcctaggacaagtccctacacagcactcctctctgactgggctagccctgtaaccttcccttcctgcttccgggctggcagaggggcctctgaggtgccagggaaggcatttcagctcaggggggctaacacttagtgtacctaccatgtgccaggcactctgccacaacttgggagtgagagaggaaattagagaagagtcctgtatgcatggggtcacagagtggagggggcggcagacagccccatcagagcacctgtcctgctaatacaggaacaagacaaaatagcagctgagacctgcctgtccatgactgcacaagcctggggggttcaggggaggtggggctgggaagagaatgatgtcattgcttttctctgaatcttttccctgtagctggattctttgggccttctatagaggcctgacccagggcagggggtagaaagctgttctactttgagaatcctgaatgttccagcctagaaggaatcatctcttacagcatagtctcttatgttttatgtttgaggaaaccgaaacataagagagggcaagtgacttgctagagtcacacagccagctcagtgcagagttaggagcggaagcctgccctgctaactccctgcctgccattcttcccaccccaccctagacatagctacacacatgcacacacattaggaccaggatggcaccaagagcgctctgtgggcttcacctctggccactgtgtgtgccgtccaggcaggtgtgccggggtgtgtgagaggagacaaagtgcaggtcctcgtgcaaggtgggccacgttttgaatccttcccatgctgtagac

SEQ ID NO: 120784 - DNA, 1043 bp, Homo sapiens
aaaagcagggagggttcagagctgtgggaatgaaactcctccatcccttgctccctccctccgcacccagaccctgctcagggcccctccaggctgactggggaaagccagaccatgttttagggaaactcccttctcctgcccccaggagcccagatgggacagggctggggttgtggggatagcagtaccctgccagtggtaaccctcctccacccccccagctacaggagtactacaagaagcagcaggagcagctccacctgcagctcctcacccagcagcaggctgggaaaccgcagcccaaagaggtaaggggctgtaccagggcccaccaccgccctcaccccctgcccagagctgggtgtccagagctggtcaggagggaattgccttgcaggaatagtagaaaaatctagaaaaggctgaggaaggggaccaaggatcagtgtgggggaaatggggatggtggttcttacgtgtctccatctcccctcatccccattcattctttctctccttgcctcgtgttgttgtctctgtgcacatgggtgtagacaggtgtgtacgtgtcacccccgtgtgtggtgtctgccgggccacgctcatgtgccttgtggtcgcaccatcttcctgcccccttgtctctttgtgacccagcacctcagccctcccctccttgtcctgcgaatctctgagtccctcagcaaaccacctccccttacctcagcctgcccccagcttcttccccttcttcttatgacttgcccagccacccctcggtctcctctcagagctccccagcctacatcccctaccccatcggagcttctataccaggccctggaggcccttctcccctgggtcccagacctgtgcatctctcctgctgcccaaccgcagccccaagctctaagtttcctcttcccagaaggctgccctgacacccaggaattctccagcacccccagtctccccctcagcagtcttgtaattgctgtgttatcagcaggtaaatctctaggctaagtttatcctgtgtc

SEQ ID NO: 120785 - DNA, 1021 bp, Homo sapiens
ggtttacttaattagttcatttgcaattagatctctctgtagctgggattttagcaaagacatcaaaggaggctgacgagaagggagaagccttcctccattgccccgtttttccacctctttctcttctttgtatctcttggtctgtctgcttttcaggccatgggtgggattagaggataggatgggaggatggtggcagcagggaaaccggagccaactttctctcctcctctcttccccttgaagacacctcaacacagagcacgccctggatgaccggagtacagcccagtgccgggtacagatgcaggtggtgcagcagctggagatccaggtgtggcccggaagatgctggggagggacatggtgggctccagcccctgcccacccacagcactgacttgctaggtgggctctgttgggagggtctcatggaagggtcctatggtcaaagccaccatcttatgctttctaggtcctaatgaccatggttgtgaggtgaggacagctggattctgaggggtaaaccaaggttgggggcgtctctgctgggaggtccagaagagactcacgctacatagaaacatcaaaaataattattagcagctaacatatggagcacttactttgtgctgtgctaaatactttatatagctcaaggaatcctctcaacaaccttatgtggtgggtaccattattctccccattttccagatggagaaaacaggcacacagagctaaagtaacttgcctgtgagtggcagagctgggattagaacccaggcagcctggctttcccaagggagtatcccagctacttgagaggggacactcagcagcacagggttcccaggaagcaactcagggcagctcctctgtgcttacccatctccctccagcacctagcagagcatcctgctgtgagagggtggtcatgagagacccattgagtttatgaatggggtgtctgagccattcatcagttcctgcatctgcattcagtatgcaaggccctcac

SEQ ID NO: 120786 - DNA, 1093 bp, Homo sapiens
ataactgggagctggccgtgggggcagcacagctgagagaggagggtgcagggacaggactgagggacacgatgaggtggggcagactagggccctagtccgggctcccatggtggtgaggggggaattgggccaagcaccccgccctcgcccaagcgtcctacaaaccagatgacctcaattcttgaagttatcctgccaggaggaggtgggacagacaaggtgacttatcttctttctctcctctttctgcctctgggttgtcaacccacactctcctctctccctgtttatttcaacaagtatgtatgaggcctttactgtataccttgtgctctcaaaatataagctgcctgttctgagccacagccaaagcatggctcccagactcctgtgggtcagtggaggtggcagtgagggtttatgagctctttcccaaacttttaaaagctttgtggaaattctgcatgcagctgagatgaagcatcctgggctcgcagagatgccggggcccgaatgtgatctgctgctgatccaaagccctgagtaacaattacatgtgtctttgattaacgaagatgatgaaacagattattactaactggatagcatttagttagtagacagaactttccaagatgtggcagggagagaggaggcagctaataaaatgggtcatccatggtgaagaggctgggaacccctggctctatggaaagggtaggggcccgccttccctttggctgggtctcctcccagcccacccccctcccctgctcatccctgagctggggaaggtgggccgctgctgcgtgggacatgggatgggatgaggactatcatgtttgtgcttggccaagcaagccgcctctgagctcctcttcactgcacccacagaacgccgtgcgccacaacctcagcctgcacaagtgcttcgtccgcgtggagaacgtcaagggtgccgtgtggactgtggacgagcgggagtatcagaagcggagaccgccaaagatgacagggtatgtgggtccagagctggatgggctgtacctgcccagggggcaggagccaactcacccccaccccctacctc

SEQ ID NO: 120787 - DNA, 1075 bp, Homo sapiens
ctatctttcttctccttcctccgttcgctcatctcccctctgctcccctcttctctcctccccaacccagagcagtctctgccccaggaccagcttttctttgaagagagccctaggggagatcagccctcaggtctgatgggatcctggggagggggctgtgggcaccccactgtgccccagagttctgggtgagtttggggggcagggggcagagggcatcagaggacagccgcctggtgcccatgccatacttttgcctcagccaccaggtgcaggtgaaggaggagccagcagaggcagaggaagacaggcagcccgggcctcccctgggcgcccctaaccccagcgcctcggggcctccggaagacagggacctggaggaggagctgccgggagaagaactgtcctaagggcctgtagtgaccggcagggctggggtgagacccctcccttccagaatccaggccccatctcccccaactccacagcccctcccgagcctcaaggcaagtccaggactcagaccggggaggcccgggccagcagctcccagtgtgacctgacaaaaacacgtaggggcagggacggtccccacccccagggacacaacccctggtcttggaccagtagaggacacggagggttcagacccctcctcagaccctccccacatctgaaactgcctccccccaaccaccagcagcagcagggccctcctcccccaccagctctccccacagggcccctcagcatcatggagacccgcaggcggggcttagccacccctcaaacccagggccccctggcacctggctctggccgtgttttctggccagaggcccccactttcctaactcgtgctcccttccgccttcttttccgtactgtgaagaaagaactctccaccccagctcccaccctgccctggcctgggtggaggaactgtgcctccatccccagaagaaacagccccctctgctgctggggtgggactgtctgtgtgccctgtgggggtccgtgtgagcaggcccacctggctccagacccgcccccaacctgagacagaaccagg

SEQ ID NO: 120788 - DNA, 1051 bp, Homo sapiens
tctctctccacccctcctccatccaccctgaggaccctggggctcagtggaggcagggccctgcccccctcccttccgctcctgcccagcctgggggaaggagaaaggaggggagaaagcgggctctcaccccctcaggagtgggcacgggagcccttctccctgaccctgggctgcttcctgggggctctccagacccctctctaggaccaagtcacccgtcgtgctgggagtgtggattctagcaaaagagctggaaaaaagtcagactctccacagaccccctatgggggacccccaactcaaggccaaggactgggcgtatcggatgctcataacacccctggcctggcccctttactgagaagactccttggatatttcccaagaaccccccacatacacccctcacaagccacccctcctgagaggcagggggccctccgccccctccccatgtattccccacctgtgttccgtttgaccagcacagaaatattaaacgtcctctattcaccgggccctgtgtgtgtcaccgaggtgcgggaggggaggagcattaaagctgaaagatcgctctgctcggggagcctgggcagagcagcagcaacgtgagggtcgctgtggtggtggtttctgtgagtggatggaatgagcagccctgcaggggcgctgggcatgtgccctcactgtggacagggcccacccacctccggttcccctgtgcctcctgtcccttccacgcttaaacagggttctctgtcattttcctgttttcttccagagtcccaatcctttgccctagttctttcactagtttgaaatccaagttcttgccagagtgttggagcaaggcagctgatttgctgcagggatggagaggaccaccgccgcagggttcttttacctgtgccaccagctctggagacatccacacccattcccaggtgtccttccaggcccattgtccacgtcttcaagggggctgcctggataggcgtgtgtgtgtgtagtgcccaggtgtggtggtggcatcctgaagcagtaggac

SEQ ID NO: 120789 - DNA, 1096 bp, Homo sapiens
gtatttttaatagagatgggatttcgccatgttggccaggctggtctcgaactcctaacctcaggtgatccgcccacctcggcctcccaaagagctgggattacaggcatgagccactgggcccggccgacttctcttaacctcagtctcttcatctgtagagtggggctagtaaaggcccctgcctcatagattcattggaggcctaaatgaatgtaattcatgcacagcactcagaacagtgccaagaacatgtatcactccatatgttggttaaacaaataaacagagggtggctaagagcaaggatgatccagactgcccgctccgatgtgcttaactgtctgtgcctcggggtcatcacctagaaaatggagctgtggggacggattcgtgagcttcaggcacacagtgaacactcagcgtccctgctgctgccgctgccgcaggcccccacacccccggctatttcacacacgctcatccctcccctctctcacccgtccccctctccaccgccaccccgcagactgctgtgtccactgcatcctgtcctgcctgttctgcgagttcctgacgctgtgcaacatcgtcctggactgcgccacctgtggctcctgcagctcggaggactcgtgcctctgctgctgctgctgtggctctggcgagtgtgccgactgcgacctgccctgcgacctggactgcggcatcctggatgcctgctgcgagtccgcggactgcctggagatctgcatggagtgctgtgggctctgcttctcctcctgagcctctgtcgggggctaagccagcctggcgcccctgcagattccagcagggtccctctgagtggggccaggcccaggactgtcacacaaggcttgagaagccccctctccctggtcctctcctacccacccatgtcctctcagaaccccagccttgaaaatagtggggggcactcagaggggccacctcctcagccgtgggtggtgggcccatggcagagaagcctgaactctttactgggttaccaggttcatacattgctgaggacctgacaggacaacctaggggcagggctggggtggggaccgca

SEQ ID NO: 120790 - DNA, 1036 bp, Homo sapiens
ctcctacctcttggggcccaggccccatccccctctcagacttctccagcctcatcttttttttctttgctctgttctttccaaggggggcagtggaatttatacaatatttaagcagccagagccgagtctgggaagatattattaatgtaaaagggacgggctgcaaatgcttttggacctggttacaattagagggtgatttttctaaaggtcaatgaattcagataatatccacaggggggagagaaatttaatacctttttagtgaattaattaattataatattatatcggcttggggttcttttccagagtgattaagggagctatctgtcttctgtgaggccggagaccggcgcctgccgccagcgaggaccctggcgcagggctcaggatggggggcccttccctctcctctcacccatgcagtggccaaggagctaggggcttgttaggcatgaaagaagacaggccggacctggtcagggctgagggtggtgcaggtattggcctttccccttggcctgtgtcttccacccccgggtctggccctcctgctgccatgtcaccaagcctcatgccatggtggcctgaagagctgagatgtggggtatggcctctttctttacacttggagaaactaaggctcacgggcttcagggacatgccttagctccactgtgggttaggacagactgaggtggcagagctggctggaaataccgagaagacaagaaggacctccctaatacctcccaaaccaggccttctggaaaatctccaccagccagaggtctgtggagctgcctgggaagcttctccatctctttcagggtgtatagtgtgcccagcctctgcttataaaatgaaaatgccccaggagtattgatacctccagttgctgtgaggcctaagatttctgtccctggagggatctgaaagtggccagggagtggtgcttttcacccatttattcatttattcatactcagtcaaatgttcattcaacaaacatttgtggcacacctgctct

SEQ ID NO: 120791 - DNA, 1028 bp, Homo sapiens
actggtctagactctagagctaccctatgctttcttccagcggaaacactttgggtcttgggtgccgtagggcaggggcaagtgctgtgatagaggcccaggggaggggtcctggtggctggtgcccataggtgtgttccccagccttctgtctgctcccctgcaggagctggagatgcaggctcgagtgcacggcctccctaccacctccccgtccggcatgaacatggctgagctggcccagcaggtggtgaagcaggagctgcctagcgaagagggcccaggggaggccctgatgctgggggctgaggtccctgaccctgagccactgccagctctgcccccgcaagccccgctgcccctgcccacccagccaccatccccattccatcacctggacttcagccacagcctgagctttgggggcagggaggacgagggtcccccgggctaccccgaacccctggcgccggggcatggctccccattccccagcctgtccaagaaggatctggacctcatgctcctggacgactcactgctaccgctggcctctgatccacttctgtccaccatgtcccccgaggcctccaaggccagcagccgccggagcagcttcagcatggaggagggcgatgtgctgtgaccctggctgcccctgtgccagggaacaggggccggcctgggggctgggagggccaggggcacctccctcccacccttcaggctgcactgtgtgtgaagtagccacctgccctgcctccctcctccccgttggcccctgtttggacttagtgcctgtctggcagcctgtggggtcaggagaagcacccccagggcagccctcttgactggcgcagtgggaagaggccttcagcccctctcccggagatggaatcgcggggcagggaggggcagggtgttctagaggtgagaagagggcctggtggagattccctgtcttctgagcccgagcccctcattaccagtgaaggacatgcttgaggggttcgggaagctcctcatct

SEQ ID NO: 120792 - DNA, 2627 bp, Homo sapiens
tccagaaactctagaattgattagatgacctgctctagggcttccataatgcctggggcctaatcctatcacatattattggttggatcactctctcagacactctaggccaggggctccttgagggcagggactacatcttataatagctctggactctgcagaccttcaggttgaattgctgggtgaaagggcccaaggtgaattttgacactccaggtgtccccaggaaggactgctcctgggatgataggccctagagggggctccccgtggagagggggatactcatgggtctccctcaccccctaccccacagctacccctgtccagcagccacctgaatgtgtacagcagcgacccccaggtcacagcctccctggtgggcgtcaccagcagctcctgccctgcggacctgacccagaagcgagagctcacaggtactgcctccctctacccctgtgcctttgaatacccgactcctccctccttttctccctccctcccagctcctctctccttctcttttggcctccagatgctgagagcagggccctggccaaggagcggcagaagaaagacaatcacaacttaagtgagtcctgccccgcccctctccctgcctccctcttccttgttctcacctgggctggctaaaaagccactccctgacctgcactggtggaaggcttccctgctcaaggccaattcacttgcagatggcttaagccctcccattgctgtcgctcagtggtgcctgggactattagtgctgtctttccactaggcctctttaggagtgggtaggaaggattcctgtaagggatattcatgaaacccccagtttatcaggttgttttctgggttaaggcatggaacctggggcatcagagttctgtgtagcagggaagagtcctaccccaggcagctttgctgtgctacgagcatcaccatggctgattctacctttcagtgctcttaattgtgtctggcctttgccctggaccccctaattcctgtagaaatcccaatctgttggtcacctcttacttcctggaagaactaaatctaagctgcaggctgccctgaagcacccctccctgggctgggtacttctccccatggggtggggggtccccatccctctaattgctccttctggaatctgttacctttagttgaaaggagacgaaggttcaacatcaatgaccgcatcaaggagttgggaatgctgatccccaaggccaatgacctgtgagcaggtttctgagggggagggtgatgggtctgggtgggcagcagctgacaagtattatctgccctcagccccatgctagttactaggatgggaggagaattccttctagaagttcatctatttgagaaaagatctctccctctcccaaatcaggaaagaatcaggaaagctcaagacagatgagtttctgtcctggaagtgaggctgaggtcaagggaggcttcttggaggagcagtcatgctgagaaagttttcttaaggccattgggctggcagacaagaggccgggctcacgcctataatcccagcactgtgggaagctgaggcaggcagatcacttgaggtcatgagttcaagaccagcctggccaacatggcgaaaccccatctctactaaaaatacaaaacttagctgggcacagtggtgtgtgcctacagtgccagctactagggaggctgagacaggagaattgattgaactcaggaggtggaggtagcagtgagccgagatctcgctactgcactgcattccagcctgggcaacagaacgagactccatctcaaaaaaaaaaaaaaaaaaaagaaaggtaggctgggctggagtcttggtagtctgggaaggaggctgctctgaattgcctggtttcatgagattaatgaagtgggcagtggcaacagaagtcaccaggagggcccattctgtgcaaactgagatcagccacctccacctccaggtctggggttgctgggtaagactgggacaggccacataagctctgcaaccagagcagtagcaaggatttggccactcttctgagcatgcacctctaatttgcctggcctgctgctgcagggacgtgcgctggaacaagggcaccatcctcaaggcctctgtggattacatccggaggatgcagaaggacctgcaaaagtccagggagctggagaaccactctcgccgcctggagatgaccaacaagcagctctggctccgtatccaggtctggtcctgaacttggacttctttggtaactctgacccttaacctggctcctggccctaaggggcagtacttgtacttctgaagttggagacacaggaataatgcccattaggaaggaggatgtatcagttaggatgttttgctttggtaacaaacaatcctcagcatctttaagcaacacatatcagctggaggttctgttctgtgagaccctcattctggcacccacgctgctggcacccagctctctgatggcacatctagagctggctcttaaagccattgtcactcttaaggtgccacatgtcacttctgttcaatgggcttggccaatgcaagcacactctacaagtactctaacctcaag

SEQ ID NO: 120793 - DNA, 1029 bp, Homo sapiens
tctcctctaaaatggatgcggtcccagtcattctggcctccccctgccagcccctgtgctttgaggaggacacgtgcctcatatacctgctgccccttctcatccacagggagccagcgccggcagccaccatggcgtcacgcatagggttgcgcatgcagctcatgcgggagcaggcgcagcaggaggagcagcgggagcgcatgcagcaacaggctgtcatgcattacatgcagcagcagcagcagcagcaacagcagcagctcggagggccgcccaccccggccatcaatacccccgtccacttccagtcgccaccacctgtgcctggggaggtgttgaaggtagggcctgttctggcctgccccccaccctgtccccactagtcccagcctcccctagagcccttgccttttccccctcccaggtgcagtcctacctggagaatcccacatcctaccatctgcagcagtcgcagcatcagaaggtgcgggagtacctgtccgagacctatgggaacaagtttgctgcccacatcagcccagcccagggctctccgaaacccccaccagccgcctccccaggggtgcgagctggacacgtgctgtcctcctccgctggcaacagtgctcccaatagccccatggccatgctgcacattggctccaaccctgagagggaggtgagtgaggagctggccagtggccatgctgcttgcagagctcgtgcccactgctgtgcttctgagactcccagtctaatggcagaggcaggggtgccttcagggagactcagtctgaggtggggacagagcccttctcagggagccccaatctcaggggggaagacacagccctgccctcagggagcctcacagaggaaacgccatccttactttcaaaagctctgctaggaagtcaggtgccgtggctcacgcctgtaatcccagcactttggaaggctgaggcagccagatcacttgaggtcaggagtttgagaacagcctggccaacatagtgaaaccctatc

SEQ ID NO: 120794 - DNA, 1011 bp, Homo sapiens
ggcagtgggggtacaaagacagggataaccctctgtagcagcataggaagggggtgggcaaaggcatgggtggaggctgcagctgtgttcctgctgcaggatgggaagggagtggtgggcatctgctcctttctttctggggactgccccgttggtagctgggtggagagacccaaggagctgagacagcccctttactgattcatggtgtagaggggcagagaaggaaggagggtggggtgagggccactgcctgccttcctaccttgtcgggaaggcacagtggtggtgggaggagccctggctggcagtcaggtggcatgggctccattcctgggcctggcagccaggcagcctgcaataagcttcctccctgctctgtgtggagaccctctcctccccagcatgggctcagaggccatgctgcctggggctgggttccagctctgtccctttcactgctgaaagacacttaatctcctgtgcttctgtttctccttatctataaaaggagagtaatatgcagaactacttcatagggctcttccaggtgaaggagtctggaacattgcctgacatacagtaaatgctcaaataaattcaagttattattatttctattatctggtgattttcactgaatatttgccagttctttttgctaatgctgactaagtccagtgtctggtattagccagaacatgtcagcctttgctgcttccctttgctatcccctgaggtctgggcctcattgttaggagcttgagacacagctctggcttctggtccacactgatcagttcgcctgccagtcatgtgcccatccatgtctcatgcactcagcctcccaggtgctacatactgtgcaagacctattaatttcatatagtgctccaatcttctgaagcagagaccgtttactaatgagaaattgactctcagagaggttaagtgacttgcccaaggtcacacagcaaagaagtggcagaactaggattcaagcccatattt

SEQ ID NO: 120795 - DNA, 1092 bp, Homo sapiens
tctgatgccccctccccaggccctacagtgactcatgaccacctccgtaatgtggaatggctttgtccatgaggattatgtgatgtccttgttctgtttcctagttcatcaggacttcctctgctgcctcctctgccagagggggctgagaaaaatcccaagtttggtatttttttctctcttcccttccctaggctgaaaggttcctaggaggccacaaagcccttcctttgcctccaggaatctcgaacctgttcaggaagcttttgtttagcggtcagtttctttccccaggactgaccgggcagctcccccacgactgagagtgtaacagactgaatcagaagaaaacttcttccgaccacagaggtgcagagcgtcatcaatggcttaaacaggcctcccagcctctgggcttgcacactttgttgtttcagccgccagacatatgtttttctgggaatacaggaaattatctctgctctttgaggaagggtagaatttttttttctgcctgtgtttggggattccagactgttccatcatcccggacaccctctggctcctgggctggatgaacgagatcagccgctgaaactctttgatcgcagggaggcttcttcagtgagaatttctaaaacaaaacgtggccgccctcaccctgaatgcaggactgaggccaaactcccagccccagggttggggcggtgcagccagactgccagggtccagccttgccactcattagctctgtgaccttcagcaagtgaccacctctctgggcctgtgtttcctcattccttgaatggggacaataatggtacccacgtcactcatatcatgaaataattatgataattacataaggtgctttgaacagtacctagcacacagtaagcattctatgagcattagctgttagcataaaatatttttttttcaattagaaagatatacatcttcattctagagaaagaataacattccaaaaggcttttaaaaccacacaaaatacttatggttacatcatccaaagaagtcagtaataattttgtatatttcctcccaagaggtttttctatacatattttt

SEQ ID NO: 120796 - DNA, 1020 bp, Homo sapiens
ttcaccgtgttagccaggatggtctccatctcttgaccttgtgatccgcccgcctcagcctcccaaagtgctgggattacaggcgtgagccaccgcgcccagcctcttttgtttcttgatctttattcatcacaaataggggttggtcagtcctcagtaagtgtccccacttggcagagcggttccatttcatgaaatatactgaagaccacatcctgcatgacagcctttgtgtgctgttggagaccatagcactcagccatggtgatgcaggacagggtcccggagggaacctgccagggtgatggtgacattctccatcttgatctaaacagtgattatacaaggccacacacctgtaaaaattcattgagctgtacactacaaatctatgcattttgctaggataagttacacttcactaaaagggaaaaagaccaaaacatggcattaaaactgttaaaagcatgtgcgtgtcccattgacctcatttctgcttctgatatcaaggacctttcaatcaaacagtgcacacttaccaggtgtcctgggtttgctatgtttctgtatcggaagttgccagctaatataataaaaggctatattatgaagtatctccagtgtgccaggaactgtggtaaacactccgactacttatcccttagaacccaaaggagtggacattgttattgctcacctgcctctctcatctcctgcagtgaatgacatgatatacaagctctggaaaagaaaatcttaaaagacccaaggcttttggagaggaaacagagggctcctggtaataggaaaagctggcctgaggccttcctgcccctatctagtaaggagagactgaagctggggttaccactaggctgctctgccccagtctgggctttcagatggtgtgtatgtgtgtatgtgtgaatgaatgggtgaatggatgggacactttccccaaaggaacttatgcagggatgcccccagtgggcctggacggagcaacactgaacagtgacc

SEQ ID NO: 120797 - DNA, 1156 bp, Homo sapiens
cccacttcactgtgctcttgcagtgtgacttctgacaagctgcttaatctttcttttttttttttttttgagacggagccttgctctgtcgcccaggctggagtgcagtggtgcgatctcagctcattacaacctctgcctcctgagttcaagccattctcctgcctcagcctcccaagtagctgggactacaggcatgtgccaccgcgcctggctaatttttgtatttttagtagagacagggtttcaccatgttggccaggctggtctcgaactcctgacctcaagtgatccacctgcctcagcctcccaaagtgctgggattacaggcatgagccactgcgcctggcctacttaacctttctgagtctcggtttcctatcctgctgtgttgctgtttatcccatcaagtgtttgtgtggatgaatgtgattgaacagaggccccttgcgcagtgcaatgtgggagggactcggagcgtttgccaagtgggtgataactgagtgtgtgggggtcactggaccagcagcccttgagggccgtgcatctctttctggaaagtctgatgggtgggatggtgtggaggttctgaagaagaaaagtgatttctctgaaacttccttgtagctgaggagactggtaggtggcaaggaaacaactagagaacaaagcatggcagacacaggcaggaggctggagtagatggagtgcccaggaggcgggtgcaggggcacaaggggtgggggttcagtcccaccactccccaacccaggagaaaggtggctgcctgctaaggggatccttagactgcaagcggcagctgagggatgcggctacacgtgtgtgcacatggacatgtgtgcatgtgtgcgtgcatgtgtgtgagagagaagagagaaagagaagcagacacggagagacagagcgtccacatgggtggctgggccggtccgtgcatatcacaggggtggaatccttttctagtttctcctttcatgttcctattagctacatgtccctcgtccctgtcctgccatgcccagtggcagtcgtctttgccagggcccagctggtcccagtgggacaggacagggcgactccctggtctgcaatggcctttgaagctgctccccctgttgtcccgggccaacagtct

SEQ ID NO: 120798 - DNA, 1785 bp, Homo sapiens
gttcctttcatacctgggtgtgggcggggggagatgggggcaggttgggggacagctcactcactccatccggtgggtgggtgacttggtgggctgttggaatgttgccataggaggccatttctcctctatggggggagatggtggcttccaggtcaggtctcctcctctggctccctgacagagatggggtgggaatgccagccggagcgcacatggacagggcaggagcaaagctgaattctgggtctagggcagctgacagcatttgggaatcctggggtgggcccctgttagctcttcccagaaccccaactcttgggcaggatgggggtgggggggtgtaagggtggttgggggtgggtgtaggtgtgtgttgtgaggggagaagagcccccgctgagttcctgggccactgcctgtgctgtctagtggcctctgccagcactggctgccccgtcctgcccccaccaggcgtgactcagatcgaaagcagaagctgccagacactgcacagggtgaagtgaggcagaaccaactctgctattttggaacctggttaattcccccttctgccccccacctccctgctctcagggctcccatcccctccagctgtctggcacttcagcttcctcaaggggacagttggggcaggccttggtttcccctggcatggacgtggaaggccatgctgaggcccctgtccttgctaggcccctctccctggccagaggtgctggattctggggacctgcgctctggggttggggaggaagagcgccctctcctggtgggaactcgtgggcagggcggccctggcgagatgacggtcaccaggcctggcacccactctcccccgcccatctttggccgctctcaggccagctgtcagctgcctctcccaggggtgtgagctgacgagagcttcaggtgggagcctctcccggcagtgaatctgagggttgggagggatttccggacccagagggaagatattttggggccgagggcctttccagaacccatgaaatcacacaccctgctgcgaccagactgaccctccctagttgatggttcttttttggacatcctaggcctgcttgggattctggccccatgatttagggtttctttggagcccatctgagcctggggggccctgtggtggtggaagaggtccagcctgcggtggtgaaagaggtcagtggatgtgtgtttctgagctgaaaatgggtgtggagttgagagctgtcacctcttcatggacagggtggatgagggtccctggcccttcagaagctgtgtcgttgggaagagggtggactttacagctgtcccgtgtgagtgtacatgggagtgggcacaggccttgcggtatggctgcctctcagggaaccctgaagtcagagctccactctgctgattaccccccagcaacctggtgaggaggatggtggtatactgggggagaggggagtcagcaggcaggtgaccaattaaaatttgggtccttgccaacctcaggtgggcaggacgtaggtttctcattgttcagatggagctggggtttaggcaggtgggaggcagaggcagagccgtgtggaggagagagtgggctcctagacctgctgtgggagcctccacactcccaggcctcctgcggagcacacaggcccaggcacacactgtcccaaaggttgtctgctctcttctggagctgctctttgggcaggcaggcaagtcctggtgcagtgtgtgtgtactggtgagtgtgtatgtgtg

SEQ ID NO: 120799 - DNA, 1118 bp, Homo sapiens
aatagctgtgttattgaatgaacaggcatgccaaggttctggaatgctggagctctatagctctatcctaggagcagcctgggggcagaaggcaatgctgggcttctagtcctactggcatttgctaccagcaacctaatgttgccatcactacccccggtatggaggtttcttctccatgcaacttgcaactctggcaagtcctgttttcttctctctaccatcccagctctccttctgagggcagtcttaaccttccgccaagtggggaagttccaagtacacatttggccattgcatccagcttgaccagtctccccagtgactggtcttcccctagctcacacctgcctctctccttccctgtagggtgggctagcttgcattactctgacccttttattggcccctatttctaagctttagagttagctattcagtatcaggtcataactgcctcctcagggcccattgggtgaggcaaggatatgagtgcaaacagtttatttgggaggctcccccagggagcaccagtggtagagtaggattcatgagacaggaaggcaaggaagctgataaaatgtgtgtgaaggagcaaggtgactgtgggcatctgaggctcactgccattggaggcctctgcagaatatgctttagagttccccagtcaagtgataggtgtctttggctaagaggtggtggggaagggagggagctaacttcattggttcaggcaccaattcaggtgctggcacctggaaatcttcaggtgggcacttttgacatcgtgagggcccagagcatgtggctggggccctgatagcttttgccacctcatcaagcccagccctgggggtctgccaagccctcttcccacatctccctttctatgtccaagaggcttccccaggcagacccttccccagtcgccagttccacgctcactgtgtttcacagatacttagggagcatctacaaggtgccatggacaaaaagaggaagctgtcaggatgcctccaggcactcacagcagaggaaggtgacctgtgcggctgaggcgcctgccatgtggcagacactggctcgcccatcccaggccttgtgcaaggccagcaatg

SEQ ID NO: 120800 - DNA, 2101 bp, Homo sapiens
cacttccccaatgtgagttacagtttgttcatctggaaaacaaacacgatgggctcaggttccgaaggccctttggttctcaccgtctcttttctcagggcatgggagtgatttctcagagtaggggtggtagaagcacatgcatacacacacgcacacacacagacacgcacgcacatgcacgcacatgcatgcacatgcacacacacgcacacatgcacacgcatgcacatgcacacacacgcacacatgcacacgcacacacacacacacgtgcacacacacacgcacacacaggactcagtgcagtggtcttggctgggaaaggtccttgccctctgaccaggaaggagccctcggagctgaggtgctcccagactcagcactgtttggggcctacaggatgtggtgtggcccactctagctcaggctggggggttcctgtgggtgtcaggggatgggtggccatccaactgtgtccactgggctgggctgccacagtgactttgtgtatgaccttcagggagtgtgggtggcatgcatcaggacgcctatctgtgtcgttatgactgggcgtgagggagggtgccacatgtctagccagccagggagcagggccagttagctcctgttcctgggtgcctcctggctctggggagaatagaaaatgattcatgcaaaggggccctccctgttttggccacagcctgaggagtaaggtggcctggctgtctgcctttccctgctgcccaccaggtgcctgagttctcccctccttcctcgcctcagaccgcgtttctccctgggggtaggtggctgcccttccctgcagcctgacaccctctcagagacaattagaggagtaggctgcccatgcctacagctataagagtgagtcagcgtagggaccggaggggatcaagtctctctgaatcctgcggccagacggtccctgcaccagaagaagtggcccagtgaggcctgggctgggatgctgtggtcagcactgataccagctgagtggctttccagcttgagaagacctgccagggacaggagaggacaagctccacctgcccaccacccgcctcgccatcctggctgcagccagctggtgactcattctcctggggagtgagccagctcctctcctggggtaccccagcaccctggtgcaggctgggtggccaggagtcctgggtgcctcagaaaacctgtgctgagcccagggccctggtaagctggggagggaggactgaggccctctgtatggggtgggggtcgcagccagacttctcttgctccttctcctggcccccgcagacttcaccctccctctggccaaagaggaggctgcaaccccagattacgtaataggtccaaaatgcctcgcaagcgagcagcccagccagtggctagactcaggagtccccatttcccagtacctgccaccagagcaagttcccattcccttcctaggccgggtgggggagtgggtggtgcttgctcacccctggaaagagctgtgctgcctgggagggggtggggaggctttctccagagacatgaattcttggcctgaccccagatgccagcctgcctgcccagctccactccagagtaacgctgggtgcacacacagccccattgtgtgcctgggccccgtgcctgcccagggcctggcaccggctctatcaacagcagtggctccgtcagctcctcagcagcccctgccagtgcttgagcccttgggcccctggtgaggaggaagagggaggactagtgattaagggtatgagtcctgggtggggtaccaggaccttttggatactatcaactatgagagacaagagcagggagacttagtcctgttctccgaggaggaaactgaggccctgagaggcttcagtaacttgcccaaggcctcatggctagtgagaagcagagccggggttggagcccagagctgtggctgagccccttactggtctcgtcacccaatcccagaccaggactcaggaaaaggcacggtgccctctttccacagccccactttggggagcctctttctcgaaaatatatgtccccagggtagaagagg

SEQ ID NO: 120801 - DNA, 1002 bp, Homo sapiens
ttcctagtttcctgctgggagttggtgttagagtggggaaacaactcaagtgacttggtgcctcagtacagctctgcctggagcagggagttcccaccagcttctgcccagtcctttgatgcccccacccttcatggagggtggccggtcacctggcttgtgatgtagggtgcacgcgggcatgccgatgcctccatcaacacagcagttaggttcgaaatgctccaggtcctctgctagctgtgggggactctgagtgatgggccagggggtaggccaggctgggttgtgaggtgggaggaggtggtggctccctgtcagagagtgtcctctcctggagggctgtttgcccaagttattcttagcacagactcattatagagtctatttttagccctgtttctaagtgttgccaacatctggtgcagccagcactaaagggggtgggggtggcaggggctactcctttggacatttctggggactggagcctctggcaggagagcaaggacagaatcttctacttcctgcacctgccacagcttgaagcttggcatgcagtaggtgtcctattcatgcttgtgcgttgattgctctcccaggatctcatccttccagctctagctcctgtgagtgggtgggtggtggggatggtgttaccacagctggagaggatgagctgaaggtgctcatcagataggtttcccacatccacccctcaggggtccagttggcctcagacccctgcagagaggcctcagaggagggaggcaagccccaaactatggtgcttgtgacagctaccgctgaaggaggagccagcagacattatagggagggggtgtaccactggggtgagactgcctggggttgaatcctagctcggctctttcctagctgtgtaaacttgggcaactcatcaacctctgtatgcctcagtttcctcctctgtgagatggagatgggagtgtagtgttgtgaggattaagtaagataatactg

SEQ ID NO: 120802 - DNA, 1270 bp, Homo sapiens
aaatgcacaggacagcccctgtaactaattacctggccctgagtgtctggtgttgaggttgagaaactctgatctaggaaaagagccaggaaacagatttgccataaacttgctgcatggcctcgaggaagtcacttaagtgatttgagcctcagcctccttggaatctgaaaaacggatagcaagcgttgctgcccttccccttcatggggctcttgtcaggatgggggagatggtgaatgtgcaggcattttgggggaggcgtccctgcaaaggggccttgtggctgttgcgttccagtagagccaggccttttcagcactggcccttcttccttgactgtgttccctgtccaccaagctggaggcatcaggtgaccgctgtgaacctcagtcctggttcgtgctgctgcaggggctgtgaggcgcttcccccacagtccctgcgggccccagccttttgatgagggctgcagaaatgaggggttctctgggagccttggggcccaggacaaaaacatttccaactttgtccttagctggatgggagtccaaggttgtgggggtgataagaggtatttatcatgttccttatctgaggccccattgcaggtctcgggcggcaaggggcgggagccagaggtcctccctgggggctctgcacacccaggcctggctcctactcatcctttgtgtccttccagaatttgccagcccagggaggcccagggttggaccagagtctgggtccatcctccctgggcctctctggcctcactgttctgggcttccctcacattgctggcatctcctgccttctccaggagccacggcctgcctcatctcctctctgctgcccgcttccttcctgaaacctgcactcacgaaagggcccagtaaactcatccaccctgagacgcagacgaccgataatagcttaacctttcttaatacagggtatttgcttatcaacgatgggaatcccttggccaccagaaagaagcactaagtgaaatctctgcccagtctctttggcaggctgctaaaaaagtgctggggggctgaggaaccactgaacttgcatgtgtatcaagaacagtttctgcacaagtgaaaagtgtgcggtggtgtggatcttcccggagctgcccagggctctgcttgatctcaggctccatttcaaggtgggctgtagtacggcctcgacctgggtgtctggaggccctgggaaggcccaaggccaagactgcaggtgtatggccagtcaggaa

SEQ ID NO: 120803 - DNA, 1103 bp, Homo sapiens
ctgtttatgactgtaattgcatcattagccagagttaatagagttacttagcacctgcccccacagggagtagcccagccaccccctgggttctgtctcttccttttcaaagtcaactcggtttctgcaggcaacaggggtttccccaaccacagctgtcatgaaaaccaggttgggcctttgtcctggggatggagggcagtcagcacttggggcctggcttggggctgccctggagatgaccatggaaattgggttggcctcctctgatcggagggtgggagttcagggttcccagagctgccagaaatgttcacgtcccaggacgcagtgaacatatatgcatgtacagtgtggatcctcatctgagaggagggagatgaaaacacacccacctcacaggctgttgtgaggactaagggtgcggcagtgcctggtacatggtgagtacatgatgttgctttctgggttggtgtggggtttatgtaatggttgtgagtttgtgtgtgtggttaaagtgtctaggaatgtgggtagagatgaactgtgcatgtgtgtctatgagagtgtaacaataaaacaagattatattaatagaatattcatctcttcttttatgctatactagaacaatattataataagattgattatacaatagttgccaacatttattgtgtgtttagagtgaggtgggaattactgtttgcattacacttacttactcagagaggttaagcaagtcacttaaaatcacacagcctggaagtgacaggattggaattttaacctaggtccaattgactccaaagtctgtgttctcagtccctaaagaagaccacttcttcaaggggtttcccaggagttctctcttaaaaggtgggggtgtggtggtctggggaccttcttttctctatccagggtttcctgctctaagcagatctttgggaggcctaggtgggaggatcactggagctcaggagttcgagaccagcctgggcaacatagcgagacctggactcaattgaaaaaagaatttgtatgaaaaaaataaaaataaaaaagcagggtgggaacttgctgaggcccctgtctgagcacca

SEQ ID NO: 120804 - DNA, 1050 bp, Homo sapiens
ctccccctaacaatcctagactgagacgcagtcaggcgcacgcccgcaagaggcggcgaggtgacaagtttggagtgcgcccccttcagtactgcgcgttctaagacttttggcggagactttcttggcaaaacccattccccaaagctacgcttcccctgctgagatagcccctacccccacctccacaggctgggacagccccgtccccaccatcctcctcccaagccaattaaatgatcacagcacgcgtgacagttaccggctggagagccggaggtgggaccgggagcaggggaccgtagaaccgggccgcgctcctcccctcctagagttcgtggaggcgcagcagagggccgtccctcttccggatgtcggactaagcgaacagcgcccccactgccggccggtagcagccggaagtgccagaccggaggtgcgtcattcaccggcgacgccgatacggttcctccaccgaggcccatgcgaagctttccactatggcttccagcactgtcccggtgagcgctgctggctcggctaatgaaactcccgaaataccggacaacgtgggagattggcttcggggcgtctaccgctttgccactgataggaatgacttccggaggtaaccgagcccgaggaacttggtccttttctggcccttaaatccgtatttcccctttcttgcgaggctggcgcctcagggttttttgtttttgttttttaacattaccagcattgtggcgtcttcgtagctctggctgtgcctcactgagatccctggccaggagagttcccgtgtggcaaaagcgatctttctgtcatgtggctgtatctgtaatgtcaccctgatcaagggaagaagtgctagcacgtaaacaggctttttcggccctggactagtgctttagctgggctttgcgtttgatcttacatttcttttttgttttttttttttttttgagacggagtctcactctgttgcccaggctggagtgcagtggcgcgatctcggctcactgcaagctccgcctcccgggttcacgc

SEQ ID NO: 120805 - DNA, 1124 bp, Homo sapiens
gggttaataaaacacattgtttttccaggaacttgatactaaatttgggactctttgctgcgggagtttggctggccaggaacttgagtgacattgacctcatggcacctcagccaggggtgtagccaagtaggtaagcactgaactacacccatgcgtgtcttaggagacctagagactgggtgaagcaatgttttctgtcaagtattcatgaaatgtacaaaagaatgtgatgtaaaacccttaactattcctagttaaatgtgttttcagatgttgaaagggatttaagtatctcttaccagtttccctcccatacttttacagttctaatgccacctgtcgtcttatcatctgattgcagacaaatggaatcctgtgctgaacccgaatcttccaaaaaacagcctacaatctgtgaccaccacaagatgtgccctgatggcagctgaagtttgattcagatgggcacttttcttccccttccctgcctagtttccttttgttccttgagtccacgcagaattccattctctggtcagcagacaggcttaagctaaagtattgcctctattctgtaaagttctgtacatagttcccaagcttctgcagggggtgatttttgctcttgtcctgagaaataacagtgctgttttaaaaaacatttgaaataaataccgcacacaaaggcagtcattttattcttttaataagaaacttttgcttacaaaaacaaggtgtaaaaagatttacaaaaatcataaaaacatgatttatatttcacacttgagagacaaaaacaagccccaaaacatggattttaatggaggtggtttgcttcattttaaaagggaaaaaaaaaaaaggaagctgtaaccatacattgatgttaacctagcatgaagtttattcttgaagaatttacattgttgagcaatattaggggaagaagccatttggtgttgcatagcattttagtgcaccagatgggttttccagacaccagggaggcatcattgctggaatagtgaggtttggtggcagaaagagggcagtgatgtgtagggggaggcaaagtgaagtaagcctgggcagtggtcactaaagtgacactgctgaggcag

SEQ ID NO: 120806 - DNA, 1026 bp, Homo sapiens
agaaaaccccctgtatgtgaaccttagattgtaaggcaagccagtgcactgtgtaatatgcaaagggagtggtgcaaaagagaaggcacccgtcccagctctccatgccctttccctggcaggcgctgactgagatggcgctgagtgaatgtggaaggtgctaagacccagtctcttcactgcagggctgtttacagccagtttcttttactctgaccttaaggtttccactgagctcatgaaacttcaacatatggtgtttaaaagtttcccactcaaatgcacacttgaaaattgggtccctcagcctcattactgaactaaataagtgaagaagttgtatctttggggtaaaactttccagggccacttaattttttaaccagttaagtacgcatcttcctggtggttcagactttttaagtcagtgctaaagctgaaaagcgccttctaaatatgactgtgagtttagtttgtatcttacatttagtaactgttctgttgggccaggactatgactttaattactatgtacttattcatcccacactctgcactaaatacaccatagctactatagcattgtggcaggcactcatttttgtggactcattccatacttctgctggcatatttcgtttaaaatctagctaaagattttcatagtactgtgttaactagccagggctgaaaagtgtgacaggatatcaaattgactttccttggggaaaatgttgctttggcaatagtgaagtccaactccttcatttacagaattagtgattactcatcaatttttgaaagttgtagattaagtagttttatttactaaattcttaaccactttgaagatttaagccagttgaaatgaaacattggctggatgcagttggctagcacctgtaatcccaacactttgggaggccaaggtgggaggattgcttgaggccaggagctcaagaccagcctgggaaacatagatttgaaatcttttcaaaaatgtataaaaatttaataaataaataa

SEQ ID NO: 120807 - DNA, 2270 bp, Homo sapiens
aagggtttaaaacaaacttccttttttggggatagcagctgaagagtggagtgagatgcatggaacaaatttccccatgcaaagtgggatggttttcatatgtcataccctccctacttgctgctgtcatataatcattccatacttctgagactggcatgaataccccttcattctaaagaaggggcaggtcatataaagaagcaatagactagcacatgttccatgctgagccaaaggacactcctggctatctcagttctgtagcagatccctggttcaggtctagggcaagcacatggtttggtttaaattgattcttaggttttctcagaactcaattgagggtgggcagagatagctgatgctccagggcttattgaaggcctgtcacccgttctcacttcagtgcggcatgcagcttcttagcctgcagcttctttcttgctcctggagagctagaacattcatgttcacagggtttgggagcttttggttctctagggtatgttaactgcttaggagtccacctcgtacatatctgaagagttgattaccaatggccttgacctgtttcctcccaaatctgataatccctactgttgctttaccccccatactcagtccatcagagaaaaaaacaagagtgccccgtcctttcccccagtgctagtaaaatacatcttcctttttaaattgggtcagtttctaaacagaatgaaattgcccagataaaaacccttgtccccatcaggcaccacttcattcttagttcttcacttagatttgctggtgaaagtgaatgcaaaccctaacttttgttgctgtggtcactgcagtgagcctcactcaacctgtcactatgaatgctcatcttttgactgagtatatcatattaatgtttgaattcaggtagaagtacagttgtcacttgaagggagtagatgtggaagggcgttcggggaggagtgggaagtggggaaagccaggctaaagaatgagggttatagctttagcaatgttgatgagccacatttcccacacagatctgtagcatttgctgttgacctcttttgagatgaactctcccataggccctgccaggcagcactgagacatggaggaaattcagacaaaaaatggctcaccctgatagggaaggagtgactatattttaaattaaacttgctttttccaacactgtgaggtttctgtaatatttagcttttatttggaagcgatagcgtatggcattttttatgctgtttggtttatattgtctactgcaggcttctttgtataagctttgcctgggctcaccctctcctggacactgttttaaagtgtcaccgctgtccatgctgccagaggctctgatgtgaagctgtactctcaagatccacgtttttaagtcggcatgattagtaatgactttttgtggcaatagaaaagcccattaactcaaaaaaaccaaggagagtaaaaaggaaaggaaactatgaatcgtgcctcatctttcattgaatcctatatttattattctagaaaaaaagaacttacaagatagagaagaactaatagagcatctactttacccctcaggctgtccagtggggataattattaataaacatttaatggaaaattcaaagatcttccaatttaatttttaaaaatagttttataccaaatattataaggatttattaagcagattaaggactttgtgaaataagtgcttaacttagctgagcacgcatatatcaaagtaataaaagaaactaacatcagagtctccactgagctacacatttgtgaaaggtgcccactgcagttacagacacctcaggtacccagaggcggcagcactggacacttaggacgttagtatttaaggagatttttattaaagaagagttccctgctgcataagccaatggctattgtgagggaaatgtccctttgcctttaatttatttacgtactgggtatagatgaatgtctcagttgcatctgaaattgaatcattctaaagagaagaaaataagaaccaggtaaaaactgactagatgctgccaaatcaaacccaaggtctcctaaccgaaccttaatgggcctgcttctctcccagggcaagtagttaagagtctcattccaggaaccctttgtagttagttggctggcatgtttacttgctgctgtagccagccaagatgagtgcacctaggccctcaaaaaggatttttttttacctcaatctagcctgaccc

SEQ ID NO: 120808 - DNA, 1092 bp, Homo sapiens
tgcttgagctcaggagtttgagaccagcctcggcaacatggttaaaaccctgtctctacaaaaaatgcaaaaattagccaggcatggtggtgtgcacctatagtcccacctactcgggaggctgaggtggggggatcacctgagctcgggaaggttgaagctgcagtgagcctttatcaatcacaccactgcactgcagcctgggcaacagagtgagaccctgtctgaaaataaataaataaataaataaataaataaataaataagtgtgaacattgattaccaccattttattgatgggaaaaccaaaaccagaaggttaaattttctcagtttcctgttttattaatacctacctctacctacgattatatatgccagtttttactagtaacaagcttatatccatgttctaggtggtctggccgtaatcatcgagagaagattggggtccatgtcgtctttgaccaggtattaaccatggaaccttactgctgcagggacatgctctcctctcttgacaaagagacctttgcctatgatctctccgcagtggtcatgcatcacgggaaagggtttggctcaggacactacacagcctattgctacaacacagagggaggtgcgtgcgctttactctgtggggtgggggacacggaaaggggttgatttgtccacattttattgttttccttttatttccatcccatggattacctagagggaaattacatacatcaaaaatccagtggaaagaattgtgaaaattgggttgggcgccgtggctcacacctgtaatcctagcgctttgggaggccgcggtgggtggatcacctgaggtcaggagttcgagaccagcctggccaacatggttaaaccccgtctctactaaaatagtacaaaaattagccgggcgtggtggtgggcactggtaatcccaggtactcaagaggctgaggcaggagaatcgcttgaacctgggaggcagaggttgcagtgagccaagattatgccactgcacttcagcctgggtgacagagcaagactcttatctcaaaaaaaataaaaagaattatgaaagttggattcaaa

SEQ ID NO: 120809 - DNA, 1010 bp, Homo sapiens
tgtgggaaacctgttccgctctttgaagaatcagaacaaaaatcaaaagtcaggcttgaggccaggtgtagtggctcatacctgtaatcccaacactttgggaggccaaggcaggaggattgcctgaagccaggagtttgagaccagcctggtggcatagcaagacctcttttagggaaaataaaaacaaaaacaaaaaccacaaagttatgctcgatatcattttgccatttcaaaacaaaatttgaaattttatacctggttaactatagactcacctatcctgttccattttgagatacagagtcaggtgaatcaaattgtttcattagagtaatatttaaaaaaaaaaaaacagtgattcctgaagccttttacttgtaaggaacaaaagaatattaacagctttaactccatcatttttggatatgatagattaggcaagaaataacttttgtttatctttacaagaaaggattgttctttggttgtcagatatgccaatttatcaggatttctctaggcaagtacaaataatggcagagaaggaaacctatggtgaggggatgagatgcattgatctgttgcctgtgaagtttcaaaactgtcagtcttctacctgtcttcctggccagcttaatgaaatggagacagaactgatcaatctcagttgaatcagtaatttctttttctttgtgaatttcattttagggaaacaaagcctgactctatattgtcttcatcttagctcacatactccctctgctgaaggtggcagtcactgccaggattcctagccagagctgcagtaattttcaaaaaaatggtgaataggaatataaaataaggccaagcccctctgtgaattccatttctgttcatgcccccacgtattgtgacgactacaccctggtaaaagcttctcctatggcacactcattctgatgcagtctattatgagaagttacacctccacatcctattgtcacagaaagctctgtgatacatca

SEQ ID NO: 120810 - DNA, 1083 bp, Homo sapiens
tagttctgttaagtttctgtgtgaatggtaggtatagtgatgatacatattttgataagttaattgtagctaaattaggtggtttgatgagactgttgtcctgtcttcaaacaggctattctttatttacccttggctataggctgtctgtgatcactaacttaaaaataataaacattcaatggtaggctgtcttgagggaaaaaagacaaaaataattttaaaatttactgagaaatcaggctcacacaacaccttgttcataaactaaaggttattattctaaaggttagtttagaataattacttttctagttatttgtatctcttaaaaacttaataaattacatatatactttgttttattattgaatatttgctaaggatatacctcactgatataataatttcatgggtatgtacagtgttcagcacatttaccacaggcaacataggagagatgctggaaaaaattatgaggtcagtgagacttatttttcgtgttctcatatctttttttttttttcttttaagtgacctctcttgttggtgtccattacaaccttaaggctcggaacttccttctgtgggatctcaggcaatgattcatgcttttcccttcctcttcagtttctttctgtcaacatttacttaggcagtatcatacgcctgagctctgctttccatctcctgctacagtaaattaacctgcacttagttattggtagttgattggcttagggtgtttcccttaaaatatttgcctttaatagggactttgatgtcttaattcaaatggtgagacttactggcacaccaggaggttgatattttaaaacagggcagaggtagctaagatttgtgggacttaaactgtagtaagttcattgcctggatatgcactggcgctctttttgtggtcagcctgtttgattcttgtacaagttagggcccagtcctctcacctcttgtgcctgctcactatagttgagttcccagaagtacgtctgctttattcttgtacaagagatgagggttcatgcacagtccacgtctttgaaatgccttctatgccttatttga

SEQ ID NO: 120811 - DNA, 1156 bp, Homo sapiens
gactatattctacttggagaaatcttaaataaatggggagtaacctacctctgaaaatgccagctagctagcttcttactcagagccctcccaggtggcattaccttggtgaagtcataactagggtctagaccttatctctaaaggttctcagcctcaagtttgtgagaataacgtatgatgcccagtttcttgggaactgacttatatgatcaacatcattggagtgaagattcattttcagtgagaaatagaactgttaagccaactagtatttgagtttggttgttattacattctctccctgtagccgaggtatgtggaaaatcaattttggttttctgtgcaaggaatcagtgcagagggagtctgctggatggttttagtgactgttggtatcaggcccttatatgatatcaacaggcttgagtagttgtattttttagttgggggacttgctgtctttagctgaaggaagaacactgcctaaccattggtcagaggatgctcgcctcttactgctgaccttcaatttgtggtcaggcagtcctccacagtcctccacaggaggctggcagtcctccacagtcatattctctttggctctgtgaggttgtatctgtcactttgattgggtttggggggccccagaactctgcagtcactcaaacctcagggttttagtatttttagcagatggattattgtgtccactgtatttttttttttctaacttcaacctcagaagataaaaccttaattgctgttttggagacattttatatcattgtcatgtgacaattccttatttcttgaacctgctcaatgacatcatcacctcaacagtcctgctcccaccttcccattaaggagcaaatcatgtctggaacaattctatggcatattttctttgtcagcagacttatatatgttggcttcttagaattagtaatgcattaaatggtcccttagagatctattgtttggtctcttggaatgcgtaatatgtattattttgtattttgcttctgccagtattagataggatgtttcttattcatagttccttcaaagcagtttagttcttttttttctttctttcttttgagatggggtctcacttgctctgtcacccaggctggagtgcagttgcgcg

SEQ ID NO: 120812 - DNA, 1053 bp, Homo sapiens
tactcttacatcagttttaaggacttgtagggagtttaatgcattgtaatttactggtccttttttgaatttgtattacaattaatgaaattgcttttttcttgccatgtattagcccaatcttacagattgtttcccacttgtaggtaatagagaagaggaaacctaaccaatgactgtggaataatatggaagaagatggaaaaaacttgtttaatgggtaagaaataaaaactgtaataaaacattattaatgaaagctatttataataatagtattatgtgtggctgaggttggcatactatgagggtaattgatcagttactgttttgtctaactccattctgaactttcaccgcttgctttcatcttaaccttgtgaattttttagtaccacgaattaacttaagctaagaggggacacagccatatttgaagttaaaatgggacctaaagaccagcaaccatactgaaacaagtctagggtaggtcttgaaacttggtggtaagatagagatcgtatctgtcatgacctgtcaagagtaattatctaccccttctttttctccaaatatgtcagttgctatgatgtttgtcccaccacgaggatcccgttcatttgagcaagtgcagatgtgtgtctggtggtaatcaaatagaattctgctttgggaggttgaggtgggaggatggcttgaggcccggaattcttttatttatttatttagttttgagatggagtcttgctctgttgcccaggctggagtgcagtggtgtgatcgtggctcactgcaacctctgcctcccgggtgcaagcaattctcttgcctcagcctcccaactagctggaactacaggcacccgccacgacacctggctaatttttgtatttttgtagaaacggggtttcattatgttggccaggctggtctcaaactcctgacctcaagtgatctgcccaccttgtgctgggatatgcctcccaaagtgctgggattacaggcgtgagccactgtgcctggctgagaccaggaattctagccagcctgggc

SEQ ID NO: 120813 - DNA, 1045 bp, Homo sapiens
tacaaattgtttggaaagcattctttctagtcatgtgttattgtttcggagacatgggctatttttaaagactataatactgtcccttttccattcacatgttaatagaagtctggaaagtaaggcattctcctgaaattttcagggttttttattatatgtcaaattgtaaacagcattctgtgacaagtattttctctctgtcttttattgagctaattagtgatttacactctagtagcatctcttccagctttactgtgtgaaaatgtctgctactccgtgccttctatgcagccagggctggcaaatgattgggggcagatgttggttagcacatcagaaggatcagggataaaatttatttttcttttgtggttttaaagatatgttttaaaggcttttgtctatgtctttgccccactccattattccctaccctcattcaaataggaatgttatgacctccgtaacctagagctactgttcttgattcagttttggattgttttctatcctgttccccacccccactgaaacgttgtgttgtgggatttggggaggattagcacggcagtctggcatagtttagagcccaggaagctggtcttcactgctccctcccatcatcagaatacagagctttcagtcattgcctttagaacccagcagtgcttcttttgctgggcaaattgtgtgaaagatgggagggcagcactgttgctagtgagttaggaggatacttttgtatgatgcttgtatctatccaagggaaggatgggctctactgttgtgttagctttttcaaaatgcagcagagaatggccaaaaggtaatttatagcttggctttagcattttgtcacattggtgtcctgctctttcctgcctcctgctctttctttcagtctctgacatgggaaagaagatgtgtaggatatgtcatatgctcacttggatggaccatgtgggtgcattaaaatagcaagaactttgactttgaaataaagtctttaaggatcaatttgttttgtagatatacattg

SEQ ID NO: 120814 - DNA, 1338 bp, Homo sapiens
cgggttgagaatgagatgaggaggattaaggggagaaagggttagaagccagggagaggaggagtgagaaaaagccagccaaggagataggaaggaggcaaaagccagggtgggcgttaaggaagccgggcagggaatgaggttagggctggggaaagggatcctggggttaggtgtaagagcaggggtttgaaggggaaatcttcgtagcgggtggtgttggggtgaggggtaccggggtaagtgttggaagtggaagacaaggaggggcagagctggggtaatagttgggagtaggaaagagagagtgattaagagccagacgtgacgagggtgtgaactagtgcggagcgagatgagctgaaggactgggaccaacggtgtggtgggaactgctggcgaggttctgagaaaggaatgggttagtgggtgggcgatggatgtaaattctgtaaagtgagggagggcaaatgagacctggactggaaccaggtggagtcaggaataagagtgtggtggaagggcgaaaggaaacagataagagatgggtgtctgtaggacgattctgggaccagaagagctgaaaggagactagagttagggtgtaagaagtgatggccatctgggacaaggataactgggtaattacgttaattgaagaggttcagcaagatccaaggtgaaaacagtgaggtaaagagacagggctaaaagcaaatggtgagaggagcaggaagagatgggccccagaatttaaaggatgagatggggagtaagggaagagagggggctaagagaagctgggggagtcctgatggatgtagaactggggtagactgcaggggggtgggaatcgaatgtgcgtgttatggggagttgctccagaaggtctgcaagggtcagggcagaaatgctgtagtgaaagatcaagtgtaagagagcctttggtgcagaagacgaggaaccatggtgagtgaaaggggacctagagacaggggtaaagactaaaaagtaagggcagaggtggggggtgcaggaaaggaattctttgttgaggagagaactgtgtgttgaaactgtgaatccttttgtccctaaaagtaggaaattccagaaacctctttctctcaagaaatcttgaatctgcttccacccttcattgcttttgatttgactttcctgtccactttgaagaaatgagactcattttgatttgatttttttcttgtatggatgataaagtataaactctgggtgttgaaaacctctgcatttcactagtgttgtgataattcggggaaagggtgtgcttatttagggtgtactcgtgtgatgtga

SEQ ID NO: 120815 - DNA, 1093 bp, Homo sapiens
gaagcagaccttgtcttagccttcattcaccctcattctctgtgcttttggttcccaggtggagtatggcccctgtgtggtagctagtgactgctggagtctgctgctcgagttcctacagagttttctaggcagccacacaccaggggctcccgcagtgtttgggaacagacatgatgcggtctacggcccagcagataccatggtccagtacatggaactcttcaacaagatccgcaagcagcagcaggtgccggtggctgggattcgttagtgatgagcagctgccagctgagctctgtcaccaggggtactccacaggaggagcaggtgctgactttcaggtccctggaccccagaaacccagggtagacatggactctactctccttctctggttctcagctgtggcttttgttctggggctgagtcccctccccaaccccctgactctcacacatagccccccatcagctgttttactccgtgccttactggatttggcctgtcctcaagaatggtaattatgaagagtggagaagtttggaccttgcctcctttaggggaaaggtaggacaggaatgtccctgcctggtactggtgggggaaatagtccgtatccccaactattaaggatttgtcccaggccaatggtgaacatgctgcattttatgtttggattgtgctgtaataagagcctcttccttccctcagaggatgtggctgggcttctatcctagagatggagtagaaggcacaactggtttgatagttactattttctgacctgtttgctgaagtgatttgcgaattgactttcctagggtgttgcctgagtcctttgaaatctccttctgacatctttcccttctgttgtgaaatatgttaagccacaggccaaactgctataagatcgaagtttgtttttttctcacctaataatagagaggtaatcagatggtctagggcagatttaactctacaaggttatcaggaactttgtttccttctgtcttattcagccattcccagtatgttttcttacccataagatcaaagcagactcatcagctccatatctgcattccactgg

SEQ ID NO: 120816 - DNA, 1013 bp, Homo sapiens
tgcctctcctgctatttccccctacctttctagaaaaggctgtcagtgagaggattcccctcacccccaaccaagaactgctgaggtagtgccagattgctgtctggcctcattccggggggagtcatttgactctactctggggtttgccagtgaaagtcttgatgatgaataggatctctgtcccttgcaggtcagaccgggaagctgatgtatgtgatgcacaactcagagtacccattgagctgtttcgccctctttgagaatggcccttgccttattgctgacaccaactttgatgtgcttatggtgaagctcaagggctttttccagagtgctaaggccagcaagattgagacccggggcaccaggtaccagtactgtgacttcctggtgaaggtgggcacggtcacaatggggcccagtgcccggggcatctctgtggaggtaagaccttggtgaaaataggagcaggatgttctgagggggctgcttagcaaagggctctgaagattttccagttcttctctttttttttttttgagacagagtcttgttctgtcacccaggctggaatgcaatggcacaatcttggcacactgtagcctcgacctccagggctcaagtgatccttccgcctcagtctcccaagtacctgggactacacccaccgaattaaatttttttttttttttagtagaaatgaggtcttactatgttgcccaggctgatctcagactcctgggctcaattgatcctcccatctcagccccccaaagtgctggggttacaggtatgagccaacacacctggcctccagtcctcaatttaaacagatatttatgcctacctgatccctgactccaaggcatctatgcttcctcttcgtgaatcttttatcctttctttaattattcagagactctctaacacagctggcaagtaggaagcgggaagctgggttcaaagcaagcagaaagcttcattaggaagggtggcttgctggagaaggg

SEQ ID NO: 120817 - DNA, 1052 bp, Homo sapiens
actttgggaggtagaggtgagaggattgcttgagcctaggagtttgagaccagcctaggcaagatggtaagacctcatctttacaaaaaaaaaaaaaaaaaaaaaaggtgggcatggtggtcccagctacatgggacactgaggcagaaggattgcttgggctcaggaggttgaggcttcagtgagctgtgttcatgccactacactccagcctaggtgacagagcaacaccgtgtctcaaaaaaaaaaaaagaagaaaaggaaaatgttattgtccataacaactagaagtgccttcttcattaagcgcacacacacaccccttagttgacttttaagatatttccaaggcagtaacacttgtagactcatatagtatgaataaagtatgcaattacagtgagtagacagaacagaatgacgaggtcggctttggatggatttttttcttcagagtcgagaagtttggaactggatttagaatgaggtgacaggtgtgaattgtcagcaagcagtcaggaggagggatgtggcctggaggatctgtgcagagcctgctgtgttcacgcacagcagcctgtatagggaagccatatgacctctgctctcgccgccctcgcacccttttcagttgcacactcttacccccgtctagaatgtcttctttcctttgtgtggctggatcctaccttctcttcatattgcagttcaaatcctacttttttttcctgctgacttgttcattttaatcttttcctatcctgaagtctttcctttttccgaaagacttgtggtctttcctcggtaataacttgttttattttgtggtctttcaaaaagtttttagcctatctcagctgggcgtggcggctcatgcctggaatcccagccctttcggaggctgaggcgggcagatcacctgaggtcaggagttcaagaccagcctggccaacatggtgaaaccccgtctctactaaaaatacaaaaattagccaggtgtggtggctcacacctataatcccagctactcaggaggctgaggcaagagaatc

SEQ ID NO: 120818 - DNA, 1050 bp, Homo sapiens
gattctcctgcctgagcctcccacgtagttgggattacaggcgtccgctaccacgcccagctaatttttgtatttttagtagagacggggtttcaccatgttggccaggcttgtcttgaactcctgacttcgtgatccacccgccttgacctcccaaagtgctggtattacaggcatgagccaccacgcctggccaaaaaaattttttttaattaaaaataataataaagttgcagggattgggagacggtcagagtaggtaatttccaagataacttttggccctgatgagctgtgatgctgtgggcgagtgaatggctcagtgagcacacgtgtgtctctggataactgacgatttggtgctctcctttccagtgtgtcccagatgcctgtggccgagggcaagagtgttcagcaaaccgtagagctccttacccggaaattggagatgcttggggcagagaagcaaggaacattttgtgtggactgtgagacttaccatacggccgcctctacccttggcagccaaggtcagtgagatgggtctgtaggatggctggaaccaggcttggagttaagagacatttgagttaattgaagtctttctgcttttctgctaaaggtggtattcttaaacatgtggcgagatgtgtttttgacgtcattaattcttggttctttatctcttagaatagggcctttgaaagctttattttattttattttatttttttgagatggagctttgctcttgttgcccaggctggagtgcaatggtgcgatctcagctcactgcaacctccacctcccaggttcaagtgattctcctgcctcagccttcccaggtagctgggattataggtatgcaccaccaagcccggctaattttgtatttttggtagatatggggtttctctgtgtgggtcaggctgatctcgaactcccgacctcaggtgatctgcccacctcggcctcccaaagtgctgggattacaggcgtgagccactgtgcccggccactttattttattttattttattttattttatt

SEQ ID NO: 120819 - DNA, 1012 bp, Homo sapiens
ttatttatttttttgagacagagttttgctgttgttgcccaggctggagtgcagtggcgcgatctcggctcacctcacctcaacctccacctcccgggttcaagcgattctcatgcctcagccttcccaagtagctgggattataggcatgcgccaccaagcccggctaattttgtatttttagtagagacggggcttctccctgttagtcaggctggtctcgaactcccaatctcatgatccacccgccttggtctcccaaaatggtgggattacaggcgtgagccaccacgcccagccaacttcatgtatttaaatggactggtggattgaaatctgaactctactgcctgaatttaaaggccctccagtctggcttcacctttcccacgtacctagcattatttcttgctattgcctaggagactcttatatccaagccttattttctctgcgtctggaacacactccttctgctcccaaactgcccatccagctcctaactgtcctcaccactcatcctttaagtgcatatgttgtctctactactcattgtggcatataatcaaacccgaatatgtgtagaatagtggtgaagaatgcagtctagacccagactacctgtcttgggcaaattacccaacttctcagtgcttcaatgtcctcatttgaaactgggtatagtaatagtatccacttcttgggtttattcttatttatttatttatttgccattgttccataagaaggtttattttattttttttaattttatatatattttttgagacggagtctcgctttgtcaccaggctggagtgcagtggcgtgaccttggctcactgcaacctccacctcctgggttcaagtgattctcctgcctcagccttccaaatagctgggactacaggcgcccaccaccacgcccagctaatttttgtatttttagtagagatggggtttcaccatgttgaccagggtggtttcgatctcttgacctcgtgatctgccc

SEQ ID NO: 120820 - DNA, 1522 bp, Homo sapiens
tccctgtagagatggtgactgaggtcaagggagtataatatgattgtgtaggtgagaaggtccctggggaataccatagtgtaagggccagcagaggggaagaaaaaaaggggaaagcatagagggagaagtaggatccttcttccaatgttttccctgcttactctaccccacctccctttcccactagtgcggccatgctgaaaattgctgagatggaatacagcggtgccaacagcatcttcctgcgactgctgctggataagaagtatgcactgccttaccgggtgctggatgccctagtcttccacttcctggggttccggacagagaagcgtgaactgcctgtgctgtggcaccagtgcctcctgactttggtccagcgctacaaggccgacttggccacagaccagaaagaggccctcttagaactgctccggctgcagccccatccacagctatcgcccgaaatcaggcgtgagcttcagagtgcagtcccccgcgatgtggaagatgttcccatcaccgtggagtgaggaaaacagtcagctgtcctggccaaaggggtttggaaggacaccaagacccccgttggtgactgaagatgacactgagctttaatggctgaagacccagatcagggcagtgacagatcacagggacatctgtggctcccagtccaggacaggaaggactgagggtctggctggttccctcttccattctaggcccttatccctgtttagttctgagagccaacttgagataccatatgctagcattcccagtccccagctggggcttggtgtgagtactttttctatggctattgtgtcaggtcactgtggataaaggcaaagacagatatttattgaacctctgtgtttggtgtagtcaatggaggtaggcattactcctgttagtatttggaggacggaggacattcttgtcctgtttatataggacccacctcccttgatctccaagcttgtttctccaggctgcactcaccttgttagcccccaggggacacatcctctgccttcccccatcacaggctacagcagccaggagcaggttgtccaaagatggtcgtgtctcagcagtggatgaaaggactacaagagaaaactccttggggaaagcagagataagagtcaagaaaggccagagaggctgggcttggtggctcacgcctgtaatcccagcactttgggaggctgaggtaggtggattacctgagttcaggagttcgagaccagcctggccaacatggtgaaaccccttctctactaaaaatacaaaaattagctgggtgtggtggcgtgtgcttgtaatcccagctacttgggaggctgaggcaggagaatcgcttcaacctgggaggtggaggttgcggtgatccaggattggggccactacactccagcctgggccacggagcaagactgtctcaaaaaaaaaaaaaaaaggccagagaataaggctgggcccaagaatggttagatcagagctagcatca

SEQ ID NO: 120821 - DNA, 1071 bp, Homo sapiens
caagaagccaaagccagttttatttcacaatcatctttattacagtaggatgatggtcctgggccaccagcctaaaccttgcagccttaggaaagacctgtgtcaacagggcttgcctccctctctagacaggggctcagccacctccagggcatccctgctgcattttccctgctggaggatggggcagagggacaatgggagaggagggcatgaccccaccccaggctatagcagctccttggccacaaagatccttttgccagtagcagaagggaggaaaacagcaaccaccagggttaccaccacttgtgggatggccaggaccccattatgtcctcttaaagttgtgctcaaagcaattaataaattaaaatgagccttcagcagcaaagctgtcaatcacacaggagaagctgagcagaaagcaaagcaaagaggaatttatagcttctctggctgaggcctaggcccctccctctaggagcagctgtcagcacggactacataggggcctccaaagtactgagaggagccatctagactattccccctcatatgtgtctatcatgcattaaattttagagggaccccaatccaaatgcaataaccctagaagggacaacacctttagaaggcactagagcattttggcagttgaaaacatgagagcccccaggggtgggggggggcgttcaaaaggaatgctggtgtatgtatccaattctgtcccatcagcctggcccacccccagctagagttgggaaaggcgctgctggtcagatgcagggaggaggagcttgactagccaccgaaatgcagacatggctggccgggccccttagtgcacactgcggggatgggtaggaccagatcccttgggctttgtgaagggggaacagacgccccttcaggcttagatgtggtgtggttcctggaggcagggaggtgggtggcagcggcccctcctctgcttagtggccactccagagggcctctccagggctacaggtgtatggctgtgacatctgtaggagtgctggtctggctgggcccttggctgctggagcc

SEQ ID NO: 120822 - DNA, 4947 bp, Homo sapiens
ctgtgtctttcgcggggttctggcggggaaggcgatgggggtggcgcgcgccctgttccggccgacagggaaatgaaaagtgcaggaggcagcggcaggagcctcctcccttcccctcgggtgtgtgcagtggtggcggtgatgggggtgaggtcccagctctctggctaccatgggtgacccttgcgtcccacttcccctcgctgtgggggaggggagtctccgtttggaatcctccgtgagcaagggctccttggctttaccactcccccgtcaaggggagaggggaggaggccgcgcagaggaagtggggggcgtcaccttggggagggcgcatcctcctcctttattggtccttgtctctctaagtagcttaccctctctgccgtttttgctccctatcccacctcacttcagcgctcccacccccccgctgctgtgttccccacgctccagacccagcagtgactgtgcgccctcccccaggtatgtgaggagcagcgctgtgaggaggaagtcttccccctggccatgaactacctggatcgctacctgtcttgcgtccccacccgaaaggcgcagttgcagctcctgggtgcggtctgcatgctgctggcctccaagctgcgcgagaccacgcccctgaccatcgaaaaactgtgcatctacaccgaccacgctgtctctccccgccagttgcgggtgcgtgtgtaactccccccacccccgacacgtattgtctccccactttccaggaaaaggaaagcttgagatatcagaggctttctgccccctggagaggaagcaaggggatcaggacctttgggaaaggaattggggtggaacaaacgatggggcattgtggtgtgatggttagtatcactcccgcccaggcttgagctgcaggcaggcattaaaccccctcctcctgacctccaggggatgccactccttcctggtctttcccccagatagcaacaagtcaaattgcatgtctacactcactagtactttgcctctgggtttacgcagccaccatgagttatttattggcagcagaagggcatgcctgcacacccccactggagtaggggagtggaatgtgcttcatgtgggggagggggttttgccttggttgagtctttatcctcatgtggactttgtgatagaaaagcctcccagagccaattaaagccaggccctgattgctttaaggaagggctgatgtatttcatcccaccttctttgcttcctcttatatcccggaagaaacagcttcttcctaatccttcctcgtcctcattctgaggaactggagcagctgctttgggcctggtggaaacagctccctcttccccccttagcccaaggcccaagctgagggacagacagggaggtgagctgcatctgcttccgatgtgataatggtgccccctcccctggcccgccctctctgaccaaggtctttcataaccctgtggggagctgctgtcactcctgtggtttgggaagtggctccctgggcctcttgctggaaacttgggctgggctcaggccgggcaggaaagtcaccggttctgtcccgcctcagaaggagcctggggaggaggcgggggagctgctggatctggaagaggttatttaggacatgcagattgtctcctagggaggctgggggagagggtgggtgagctggcaccttcctccaccttgctctgtggcgggccaagtcttctgctgaccctgagaggagtctctgggccccatctcccagggaggagggcagcaagcaggctgctgtgattggctggcagggaagccagggtactggggcccccgactgctgtgagtcgaggaacaggattcctcttcctgccaagtagctcagagatgggagtaggaggccagagttgggaatccaggaggcgccacagctctttgtgatgaatctggtagtttttggcaagtctgaaggtggagctagtttccagggccagagagcaagatgtttttggaggggttggggctggaaggtagaaggggaacttcctttttgtgaaaagatggaggtggtttgtgtgcccacgtatgagggtttttcagtacaggcaaaaagtactcttccctctgcctgagctgggggtggagtgcccaaaagacttcctagaaggtcaaggttggaagggacctctgagaactccagttggtccaaatccgtgtgcagcagaggaggctgaggcccaaggaaggagggcaaggtcctgcctcagcatcgcactgagcagatgagtgtagaacctgggtcttctagctagaccaggttgccttaaaagtcaggaatgtgatggccgctgccacctactgaagctaagcactcccaggggtgtgttctccaccagttaacactgggattctctggttgcctggatatggggaaaggtggccactttccctcaaacacaaccccttgcctccccatagggagagtcccactcccagttgccttccagatgcttccttagaagctgagtcccttctgtttactgctgagttaggagttggctcctgggacatgcactaggggtagcgttgtaatttatctgtctcacttctggctccaggccaggctattttctctggggctctgtgagggtaggggttgatttgagaggctgacacctaagctggggccaagagagagacagctgtggctggggcctggaagaggttgggtggggttgccatttctgcctcaataaggagtcaaacccacaagttccttcctgagataaaacaatgaagaaatcctcatgtgtgcaactcagaaatggggccaggtctgggaacccatgacgagtggactggggtggagctcccagccttctcccgagacctagtactggcaggtaggcttgggtaggtgaggatagggcttgatccctctggaatcatttggagccatcctgtctggcttggcctctacctatcctcctgaaagtcaagtggcatggggcactacgggttccagctaaagggggtggggtggggtgctatacctcaggacccatccctgatatcctaccaaggggatgtggcttgggttgggcaatctcccctttgaggaacctgagaaaaggctctgtggctgtcattggaggagtcatactcccttctgttgattcaagaagtgtggacttggctgggatgcagagttgcaggggaagctagtggtgatctcccctttcacaaatccttggggttgagagagtctttctgcttcatcccagaagagagcccagttcatggtgatgctgtggtatctgctgcttccgtctttcagccctggctggagaaatcctcagagccctgaatgaagtcaggagaaggcctggattattggccccttaaacataaccagacaggattaaaagggataatccatgtaaagcatgttgtcctggcacctagtaaatgatcagtaagtgctcaaagcacatgcctcctcctcttccctgccttgaactccatggtgcccggccttaaaatcagaaacagaactggggtcttgggctttaaaagtttgatgggcttccctgcctgagactttgagacttctgctttgctccctcctcttcacttctccagccactgaccccaccctttccccgctttttcaggactgggaggtgctggtcctagggaagctcaagtgggacctggctgctgtgattgcacatgatttcctggccttcattctgcaccggctctctctgccccgtgaccgacaggccttggtcaaaaagcatgcccagacctttttggccctctgtgctacaggtaagagccctatgcacatttttgccaaattggaaaaatcagaagacttataagggtgagaggtaactgaagattctggtttatactgtcaaaattcctttgtgaaaattataccccctctgagcccccagtctcaatgcagaaaagcaggttataatcagctatatgggatctcagacccctccagtttgtagtggggacactgagggtatagagagaagtgacttgcccaaggtctcacagtgaacaggttgggaacagaaccccagtctcttggccctagttgtgttcccatactagggagtgtcttgtctattcccgggacctatggaaactggcagttggttctgatctctaggaaagatactctttcctgtcttcctcccttgctgatatcttgccccacccactgctggagttttccagcatgtcctctgctctactcatgctgcctggcactttccaaggagtcggaagtccatgctggccgttatccttcaggtttccttctctcatggttccctttcctcctctccaagattatacctttgccatgtacccgccatccatgatcgccacgggcagcattggggctgcagtgcaaggcctgggtgcctgctccatgtccggggatgagctcacagagctgctggcagggatcactggcactgaagtggtgagtgctgggtagctgggcagcagcctctccattcataaagtagtgctatgccctgagcctccagtagagggaaacctccaaccccaacctggtcccaagtcctggtttcacaaccttggggctttgtggctttttatctcctgccttggtctggggaagagcaagtatcttgggtggggtgaagggcactggccctaggggttcttttcttgccaagtggtgtgctggagtgggggtggggggtttggtgtcagatgcagggctgctctcacactcccttgccacatcctcttgctagtttctgagaactaaagagcgattcctggggccgggctgtggcctaacctccccagacttccccatgtgttgggagctgtccttcccctgcacctgctgccagatgctatggggggagtgtttgctcctcactc

SEQ ID NO: 120823 - DNA, 1076 bp, Homo sapiens
tttggggagcaaaagaagcacatgtgcattcctgaagtctttgaaagactgcttgggcagccaggcgcagtggctcatgcctgtaatcccaacactttgcgaggccgaggcaggtggatcacctgaggtcaggagttcaagaccagcctggtcaacatggtgaaaccctgtctctactaaaaatataaaaattagccagggtggtggcacgcacctgtaatcccagctactggggaggctgaggcagaagaatcgcttgaacctgggaggcggaggttgcagtgagccgatatcgtgccactacactccagcctgggcgacaagagtgaaactccaactcaaaagaaaaaaagaaagactgcttgggcagttgtggggagcacaggttagagatggtaactggtggaagagaggctattgcaggagtccaagtattagatgggagcacctgagcactgagtggaaggaccagattccagagacattttggaagtattgatgacaggtcctgcttacaggttgatgtggaaactgtaggagcaggaggagctgagaaagaatgatgtcagcattttcagcttgggtgactcagcagatcactgtgaactgacacacaatacacaagagaagggacagggacaggatttgagcatcttgagtttgaggtaccgggtgtgacatccaggtggggatgtgggctgggagtttggggtggagggtagagctggagcaatgtcaaagctgaggctgaaggaatagaggaggtgtatgagcagacagggacttggcttatctagagggaggcaatgaaggagctgtggaggagcagttcggaaggctaacgtaagcgaggactgttagttgttgttgtttttgttgttgttgttttttgagacagagtctcactctgtcacccaggctggagtgcagtggcgctatctcggctcactgcaacctctgcctcctggcttcaagcgattctcccatctcagcctcacgagtagctgggattacaggcgcctgccaccatgcccagctaatttttgtatttttagtagagataaggtttcaccatg

SEQ ID NO: 120824 - DNA, 1127 bp, Homo sapiens
tggaaaaagttaaaatttccagcctttgccttctacctacacaaccttttaataaactgttttttgtatgtcaatatatagatttcttaaatgcctatgtcacattccacccatattttactcaggtcatcacactatttccatagacacttctgttttgggctaggtccatgagacacaatgcctgccttctgaagctcacaggctgattgggaccccacaacctgaccagtttccacttagtgcaatacatggcagtagtggatcttgtgctggatgcaatggaagcttgcagggtgtggggtggctggggatgcagtcaaggaagcctttgtggagacaagacatttttgcagtggatcttgaaggacaagcaagaagtcccagatgcagaggccagaggactgagtggagaactgccagcagcaatgtgactcattatcagccagctcccctggttctgtggtttgtttctgcttttcctttagagatgacagattctgtgaacaagagctccagctgtttatcaggggccctcccaggccccaagtgccaggggctcccactccctgctggagaggctgtgggcccctgattagggagacagctgaggcaggggaccatgggcactgcaggcgggagtactggcagggcacagtgagggacagaggtggagacctgcaggatgctgtgtgggggagggccagggcaagggacagaaacagaccttgtccctctgtacttccaggacgtgcccctgccctcctctgccgggtgagatgctgctgtatcaaggccccttcagacgtcactcctctgtgactccactcatttatctaacgtttccccatggcatcattcagaattaatttttctcctttgcccacttagcaggtcattatgttgtagttgagagtgtgaactttggaatcaagaatagtaatagactggttgtggtggctcacacctgtaatcccagcactttggaaggccatggtggttggataacttgaggtcaggagttcaagaccagcctagccaacatggtaaaaccctgtctctactaaaaatacaaaaattagccgggcatgatggcgggtgcctgtaatcccagctactcgggaggc

SEQ ID NO: 120825 - DNA, 1034 bp, Homo sapiens
atcccgctcctaagtgctagagctgggaacggaacccagctcatctgtctttggagcctgagctctttacccatgcctgtggacagcttcagccttcagtggcagggaggctgctggcggagggcagctgcttcccttgccaccttctgccatatcatgagcaggaaggaagatgaggcaagaaatagcagccgacagtgtggcaacggtgaccgtggtggtaagggtgtccaacccggcagaggcgatgggcagacaaaaatgagatgggcacaggaattgtctgagctggaggcagctgatagatagcacagctgtgctctccacacctcgcccagcatggccatcgccgaacccactcctctctctcccctgatgtcacctccagctctgcctctctcttcctctttatggccacagtttcctctccccagctctctcttccactccttccctggccaccctccaccagggaggtcatcaggtctcctctccagctgtgtcctccgtattcccatgcttagcatcatagtaagagcagccacgatttagtgagcacctaccacatgctaggcacagtgctagggactttacaagtttgtaatcttctctccacaaacctgtaagcaatttttacccccatttcataacgggcggccgggcgtggtgtctcacgcctgtaatcccagcactttgggaggccaaggtgggcggatcacctgaggtcgggagtttgagaccagcctgaccaacgtggaaaaaccccgtctctactaaaagtacaaaattagccgggtgtggtggcaggagcctgtaatcccagctacttgggaggctgaggcaggagaattgcttgaacccaggaggcggaggttgccgtgagctgagattgagccattgccctccagcctggacaacaagagcaaaactcttgtctcaaaaacaaacaaacaaacaaacaaaaaaaactgaggcttagagaggctaagagatctgtccagggttacacagctggtgagcagtgaggaggagat

SEQ ID NO: 120826 - DNA, 1029 bp, Homo sapiens
attgagagcctggtggctgaaataactctgacctcagtcagacttttcttttttgttgttgtttttgtttttgttttgagacagagtctcgctctgttgcccaggctggagtgcaatggcacgatctcagctcactgcaacctccacctcctaggttcaagtgattctcctacctcagcctcctaagtagctgggattacaggctcccaccaccatgcccagctaatttttgtatttttagtagagacagggtttcgtcatgttgtccaggctggtcttgaactcctgacttcaggtgatccacccgcctcagcctcccaaagtgctgggattacaggcgtgagccactgtgcccggttcagacttttcatgcacactgtgtgcaccacacacgtgtgtgtgcacatgtgtatccacctaccagggcaagtgtgagattacactgggttccctgttgagacattgtcacgtacacagtctcaggactagtagagcaggctggtaggcccctgactgcctgtgtgcgtgacatgcagggatgcacggagatgtgatggtgttgacacgaatccccccgggcaagcccagagcatcctggatcccccagtgccttctggccagtgctttaggattgtccactaagccaagaaggtggaagggagggagcaagggtgccccagccctgccacagcaggaagatcaggtgtcacacacagccccggaagcaggagtgggtggtggtgaatgtgagctctgctaggtggggctgggccctaacctatctggggagctctggttgaatcagcccaaccacagccaccccaactgcggcaatggtgcaaacaagcttttcctccagctgcccttcaatgctcattttcctttcctcgctcttgtatgagactcaggctttgggaggagtgtgcgattaggccagcagctgagagcgtaagtctggagggggtggttcagctgggtcctagtgcaggacctctcaccttggccttcaagtgacacctgagaccttca

SEQ ID NO: 120827 - DNA, 1023 bp, Homo sapiens
ttgtacatttgataaaatctgtggacccattccccaaaaaatgctttttttgtgtttaaaattcagcacagcttcagagtattcatgaaacctcctgtccaccttggaagctcattcacagagccgagcttcaaaaactccatcttagaaacctttcccctttccccaaaagactttaacgtgactcttaaatagaggttcagcttcaggcagaagaaagaaaaattgcccatcagagaataagacctttttgtgtgtgtggtagtgagatattcataaaaaaatttatcattttaaccatttttaagtgtacaattcagtggtattaagtacattcacaatgttgtgcagccatttacattatttccagaactttttcatcattctaaacagaaactctgtacccataaacaataactccccattctccctccccctccatcccctggtaacttctaatctactttccatctctagatacctcatataagtagaatctttatttgtctttttatgtctaccttatttcacttagcataatgttttcttttttcttttctttttttctgagatggagtctcgctgtgtctcccaggctggagtgcagtggtgccatctcggctcactgcaaccacctccacctcccaggttcaagcgattttcagcctcctgagtagctgggattacaggtgtgtgccacctcacctggctaattttttatatttgtggtagagttggggttttgccatgttggccaggctagtcttgaactcctgacctcaagtgatccacctgcctcagcctcccaagtgctaggattacaggcgtgagccaccacacctggccttagcataatgttttctttttcttttctttttttttttttttgagaaggagttctcactctgtcgcccaggctggagtgcaatggcacaatctctgctcactgcaacctcctccttccaggttcaagctatttctcagcctcccaagtggctaggattacaggcgcctaccaccagg

SEQ ID NO: 120828 - DNA, 1068 bp, Homo sapiens
tctatgtttaactttctgaggaactgagaataagttttatgcctttaatcccctcttagacatttcagaaattgggagaagtgccaagtcttactgtgagcacacagccaggacccagcccacactgtccgatatcgtggtcacacttgttgagatgggtgagtataccttcagtttccagttcttcgatgcaactgggagaggagtccctaggaatcaggcatgtctgctaagtgttcttggtttccctcatggttctcttgaattgctttgagcttgagagagttatcaagagagattcctctgaacacatctaagaggcctcataattccctgttagggaattctgccagagcttcttttgcgtggctgcaaggtcattgagttgagagtttaagccatttgtccatactactactattctttctgtattcaatatccagtggtctgggcagtgatttttgttttcctgtctcttaggtttcaatgtggacactctccctgcttatgcaaaacggtctcagaggatggtcatcactgctcgtaagtgactttgaactgaggtacttagcaatttttcaattaatgcttgtggaatgaagtaattgaatatggtagggattggattagtagctacttccttgttgtgggctctcttccaatgtttggggctacctacaatataatctttatttgggctagtctgattagcatgtgaaattcagtcaccaaaaggtaaaccatctttgagatattgctgtgtttcttgtgttctagccccagaagggcaaatgatgctgcttggaaaaatgaaagtttttgttcttcttagattaagggttggtaaattgtggcctatgggccaaatgcagcctgcctcctgtttttgtaaataaagtcttatcggaatgcagccatatttacttattatctgtggttgttttcatgctataatggcatagtttagttgtggtagagactgtaccacatgcaaaacctaaagtatttattatatggccctttacacaaactttgatgacctctactttaagtaaacctgggtgccat

SEQ ID NO: 120829 - DNA, 1054 bp, Homo sapiens
tttgagatggagtcttactctatcacccaggctggaatgcagtggtgtgatctcagctcactgcagtctcagcaaccctgggtccaagtgattctcctgccttggcctcccgagtagctgggactagaggcaagcgccaccatgctggctaatttttgtattttgagtagagatagggtttcgccatgttggccaggctggtcttgaactcctgacctcaagtgatccacccgcattggcctcccaaagagttgcgattacaggtgtgagccaccacgcccagctaatttttgtatttttaatagagataaggtttcgccatgttggccaggctggtcttgaactcctgacctcaagtgataacccgcctcggcctcccaaagtgctgagattacaggcgtgagccaccgcaccccaccagagactttcttaatcaatcaggctatgtggtggggcatagcagcagccagtgacttcgttcattatcacaggatttgattcctttgaaactcaagagaccagggaaagtgacaggaaggaaagggctctttgctgctgtgcttattacaaggaagactgtttgtccagcgtgtatttcaggatatctggatcccttttattgactcacaatttgtggcaccactttctcatcccagaacttcattcttatttctctcctcatctggcctcccaagtgctccgttgagctgatgaaaagttctttgtactccctcaacgtgtcggaaacaggaggccacacagcacagctttgtttggggtgggcaggagtcaggagtcttgagcagatgcatcactgtgaagaagaacgacatgtcggggctgcacctgtcctcccgtcggcatttgacgaaagctccctgaagcggggcagcactctcctcctgagagatttaccatttattgcccctgtgaggaatgtgtgcttgggaactgccaagtcttaccccttctggaagaagaggttttctctgacaagagcctagagcgtcggctctattatgctgggacttgacagaggagccatggggtttaa

SEQ ID NO: 120830 - DNA, 1083 bp, Homo sapiens
aaagcgttgtgtttcctcctctgagtcttttgtgggggctttatgggaaagggaggatgactcacttactctgaaatctgggcttccaggaagggcctctcccatccttggagcctcctcattctcctgtctctcactgtccccccacctctaccatgatgtcctcattctggaaaccccgagcagggatagtggcttgggcccttcgtctggcttttctccccacacttgctcccttctaacattttctccctcatctgacatggaaggggcaatggttaacccaggagggagggcagagaacaagggccccacatcctggctctgcctctgacaagctgtgtgaccttgggtatcagctgactcatcggagaagtgaggaggacggacttgggccgtgtctggatattaaactttgttgggtccctgacctctttgagaaactgatgcatgcttctcaagaggccgcaagtgcattttacacactatttcaggcaccccacagatcccccagattcaggctccacaggcttcatgttgaaaactccttaagtgacagtggtcaaggtacccaccaacacttatttaaccttgacagtttgcaaagttccttctctctctcgtttacctgtgacagtcctctaaaatgtgccagccgtgtaatactcctaattgcattttgttgttgaggaaatgaaggccccgggaagagacgtgagttgctcagaatggcccctctgactggaaaccctgttctttctgcgtgaatcatcacagctgcctcccttatagctgtaaccactctccccacccacttatcctctcccggttgtactccccaaactttacctctattagagtggtggagaagaggctgagtaggctaaagctaccctggtgccaaaaaaggttaatgggcatgggcggggcagatgttcctggatcagattagccacaccttggtttctgaagccgtttcactgttccctgggccagaactccaccccacctctcttgtgaagcccagcctggccgaaagcaacagctaggacaggtcccgggaaaagctgagctggaagcctg

SEQ ID NO: 120831 - DNA, 1006 bp, Homo sapiens
accagaatgggagccctgtttgtgatgtctgcggtccctccctggggtcgataagcccagggcttgtcggggcaaatacagaagtatgagcagcatcttttcctctcggtccctcggggagatgagagacgtgttggctaaccagctgcagatattcacctcacatctcttgctctcccccaggtctccctacaccaccacccgctatggaagccccatcaacacgttcaccgtgaggcctgggacccgccatcccatctcctatgtctgctcaggggcccatcggaaagccacctcctgagccaggggttctcttagctctactccaacaaactgtgtctttaaggatctgggcacttgtttcttgtggggggtgggaggtacacagcaggtgttgggcgacctgactcagacacagaggagtctttgatccccaaagaccaacgatgagaagcagtggcccaggaagaccgagagtgggcttctgtttcccaaagcgctggtgtgactgtggactgtttacacgtggggggtgggaggggaaggagggtagagagaaggaaccattaaggacctgggcgctgagtttctgctctctggtactatctgctttagcaagagttatttaaaacagttttacaagcacggcctactgagcaggttctgaaagcaaggggtggggcactgactgaactggaacccatcgagatagctgtgattgcctgtcaggcccttgcaaagggctgaggcccagctctgtctggtgggtgtgcagggcaccgaagggagatctttagcctccatcacctgccatcccaagcaagagtggacacctggggttcctagccgcattgaggtgggaccaggaatgtgtatgtataacatgtggagaaggaccatgtgtggggtggggagtgaagctcccacatgtggaatggaagccctttgcattggccaagggcagaggtgggagattgatggttcatttttccttggccctagccct

SEQ ID NO: 120832 - DNA, 1052 bp, Homo sapiens
gccagccataccacccaaggctacactttggccagccacaccacccaaggccacacttgggccagccacaccactcaaggccacatctgggccaaccacaccactcaaggccacatctggccctgccatagcatctacagccacaactctgcccaccaccacatcccaactgatggcagagaaggactcaggcccagctggccagccagagaagccagcatctcaagaagtttccactccctcccaggcaaggggagaggggtccccctcagaggccactaggctgcccacacagggagcccgctcatctgcagccttcccaccaaagacatctcctggtggaggagaggtgccatgtctctacaagccccactgccaccagagcagcctcagccgtgaggttgctgtggtgatgcccaccctggccagaggaggggctgcagggccaggggagcccgtggaggtgaaggagcccccagggctgccagccaagcctcctgcctcggcccagcccactgatgaactcctcaggcacccggtgactggggaggtggtggagcggggctcgccgatggccctgctcctggcggccaggcagagggctcagaagggaaggtctgtaggggctgccctgggtcggtcctctctgccaggaagtctccgtgaccacagccaccaagccgaggccagctctgacagcatcttccacagccagggcacgcccaactccttcactgtggtgcccaagttacccaaggaggctgagaaggactccccgctgacgaccgaaatacccaataagtgggggccgcggctgggaagagacgcagagggcacagagctgagccgcaggcacaactggacaaagccagagccccaggcccctgtggcctgggaaagagtagctccctccaacctcccccagggccacccgctgcccaagtccttctcctccccaccttctccttcgaacaagagggaggaggaggaggaggagttcaacttcgaggtcatcccaccgccgccagagttcagcaatgaccctgagcccc

SEQ ID NO: 120833 - DNA, 1019 bp, Homo sapiens
tacgctgcaggctgtggtctttctgcctttgaaagggtcagctgtacttaaagggactgtttcagctctgcctgggtgctgctctgggaccccctgctgccaacccaccactcccccaacaatcctctctttccatccatatcccccagtatggaccttccacaactcccagccataagctgaatgtttctctttaaaggatggagaaaacttctgtctgtctctggcaagaattgggggactgttgactgggattgtgggctgggcttggcttctaactgctgtgtgacccaagacagccacttctcctccctaaccttggttatgtcttggcagcacagtgagcaggtcggactaggcgaacagttttggattattgtgtttttagatgtggaattattttttgttatataaactcttatgtgtaaccccaatatagaaactagattaaaagggagtctctctggttgaaaggggagctgagtaccctctggaactggaggcacctctgaaaaaagcaaactgaaaaccagtgccctgggtcactgttactcctataagacagtttaaagtgagacctggaaaaacatttgctttaccttgaatagataggtttttatgttggtatataagaaataaaactaacctattaaacctgagactttacaggtgtgttatttcatatgatagtcatataaaatttcctttagacatcaattttaggtaaaaaataattgattagaaaaatattggccaggtgcagcagctcacacctgcaatcccaggactttgggaggccgaggcgggtggatcacctgaggtcaggggttcaagaccagcctgaccaacatggtgaaaccccatctctactaaaaatacaaaaaaaaaaaattagctgggtgcggtggcaggcgcctgtaatcccagctccttgggaggcagaggcaggaaaatcacttgaacctgggagctggaggttgcagtgagccgaaatcgtgccattgcactccaacctgggt

SEQ ID NO: 120834 - DNA, 1052 bp, Homo sapiens
cctgcgcagtccctactcttaaaaagaaaaacccaaattttatccatctttgtctgagggaaacgtctctcatagtacacacagaaaatcttatattaactatatcttataatttagtccttttgtcttcagttgttttgtgagcctgggattttatgttagattctttaggggaggccaggtgcggtagctcatgcctgtaatcctagcactttgggaggccaaggcaggcggatcacttgaggtcaggagtttgaggccagcctggccaacatgatgaaaccccgtctctactaaaaatacaaaaaaaattagctggacatggtggcacacacctgtagtcccagccactcgggggactgaagcaggagatggcttgaacccaggaggcagaggttgcagtgagctgagattgcacacactccagcccaggcaacagagtgagactccatctcaaaaaaaaaaacaaaaaaccgtgctttaacaaacagcttacatgaaacattttcatgtttgatgttttagttagaacatctaactggaagcacagcagatgtctacttggaatatattcagcgaaacttacctgaaggggttgccatggaagtaacaaaggtatagcttgaatttctgcctctttcggtggggcggtggggagtggtatctgtattgttgttttgatacattgcagcctggtcctggcccactgagtagagtttgccctaaactgtggcaaactgggagacacagttgccacagcggttgggggctacccaccccttgcaacagaatcctgccatttcagcccaagtcctccgtgaaccacctatgaagttctccctcctcaatatgagttgtctagacctggggatcccattaagtggcaatccatgaagatcattgaggatcaaatcgattatgtatgtgagagtgttttatagaccatcaagtttccttctttccatttcaaaaccctatagaaagactagggggataaaagaaaaagaagtaaagaggatttgaccaaattaataagtccgatttgtagtcaa

SEQ ID NO: 120835 - DNA, 2649 bp, Homo sapiens
actagctgggattacaggcacacaccaccatgcctggctaatttttgtattcttagtagaaatggggttttcccatgttggccaggctggtctcaaattcctggcctcaagtgatctgcctgcctcagcctcccaaagtgctgggattacaggcatgagccaccacacctggccagtactggatgtatttctatgatagtacatttaagccccagtctgcaactcacatgcctgcaggagccaggcctataagaaaaggtggcagaattggcatggtgtgccactgtctttataagcaagacagcagctacttattctagccacttgttgccctgtgggaaatcagacctagtgatgccagcctgtctaaatcttccaagctaaactgaaatccagattttcttgtgaaatcttctgatttttaatattcctaacaaattcaaagtatcttttaacaccctgtagggatcagtcagaacacatcttgaggctatattcccccttctcatccctcaacttaggacacaggctatcagtatattctgttcttccaacaaccctttttggagtaattgagagtggatatctagctttctggctagtaagtaaatctttcaggagtgaagtgatttaactctgaatcattggattagtagtataatttactggtttaacggatgaatgaaatgaaggtaattcaccttttggaagaaagtcaaaaatgtcaaacccattatttctaaggtctttaggtattagggtggaagaggttgaagttataggtatagtcagtgtcatatcatttaaattagaaatgagtaatttgtttattagggcagacaaaacatacgcgaataaaacctaataaaaaatatgaatagaactaacttggctttgtataataatgttttataattaataagcactttaatctgtgttttcttatttttttcttagagaaatactatgagcaatagcataggtttaccctctttcatatgtgaggaaactaatgtgcagtgagacgatatgatttgtccgttgtcattcagctaccattagcagagcttaatcctcaatccaagtcttctgcccaggctctttactagcagaccctggagtcctttttcattgtgaatttgaagctgaatcgttattttaagttggaaagttcctttagtaattttgtgggttgccttgaaaattcttttcatttacactgtattttaacagattctgaggctcatagtccagatctgaacatgaaagtatctagacacttcagctaacactgccgtcactcagtgtttttctcctcatttattagtaaactctgaagttgttcaattgaggctaatgttttaaatttgctagttagaaatagaagaggaactaaaactgaaacttttcttttggattttaggtaacaatctctgatgaaccagacatattatataagcgcctctcggttttggtgaaaggtcacgataaggctgtattggacagttatgaatattttgctgtgcttgctgctaaagaacttggtatctctattaaagtgtgagtatggcctttcctgacccgacctgttcgctgctgtaatatgatcaaccaggaaaatagtgctcatcccaggaaggtctgaactcttttttttttttttttttgagacagagtctcgctctgttgcccaggctggagtacagtggcacaacctcagctcactgcaacctctgcctcctgggttcaagcagttctcagcctcccgaatagctgggactacaggcgcatgccaccacgcctggctaattttttgtattttagtagagatggggtttcactgtgttgcccaggctggtctcgaactcctgagctcaggcaaattgcccgcctcagcttcccaaagtgctgggattacaggcgtgagccactgcacctggcccagtctgagctcttaaagtgggatagaaactcttggtgggtagagcttaagtttgtcatatgttatcctaatcaggatcatgccttcctgccatgtttctgggatctccatggagcagggaggtagagtaggtgaatgaacaatcgttttagaccctttggatgtgatgatttttggctaatacatccatcatttcaaatcttccctaagaaacaccacttacccagtaatttcttgcttgaacaaggtaagccttggagtcactgcagggtcaagcataactgtctcctttgtcttgtcatctgctccttctgctgttgaacgaggccccatctggggctttggcagtctggccttctgacaaaaacagaaggccacggtttcccaaaacagactatagttttgttattttgatttatctgtagattttcctaaaacaacagacatacagcaggtgttacaactatgtctaccacactggtgctgctcttcacaattaatatatttggtcaataaaagactaaagggtgtaaaagcagcaggtgtgtgtgtatgcttgcacacttgacatgccagggcttatttttgagcctgtgggaaaaagtttctattgctgtctgcagtgtttattttggcttgagttttatgatagcagttgttgttccagatgacagttttggcaaatggaagtctgtaaatggtagtta

SEQ ID NO: 120836 - DNA, 1068 bp, Homo sapiens
gagacagttcaaattcctgaattagtatttcttgactatcaacttaaagaatggacttcctagtacaatgttgcacttatttttttttctgaaataattctgcctgcatgtatgtgttgtgttttagcttctccccttaccccaccccaaagatcttttcttcctaatggttaatgtctcaactcggttactgtttactatcagatggtttttcattagtgaatttagacctctttgagaaagcttgtatataaaaagttaacagatatattttatggaaaaacccatcttattttcaaatatatttaactgctgttatattttattagaggaaggttgtaaatattttctaggagttctattgtaaagaaaagtatttttgaaaaaaattaatgtaataaaaaggaaaacatttttaaatagtggttgtgattgcttcctgttctggcttcgttatgttctattctcagcagatgaattgcatgccttccatatcaggatgtaatttattcaggtttgcactattataagttgacatcataatatctagtgtgcttaactgtattttcccggaatgcaagtcccttggtccatattaaagcactatgtatagcatattcataatttttcttttgtaacgtgtgtatttttaataaggattttatgtaacattttggcaacaagaggaccgtattttctagtgaattttataataacattttgctaaaaatgtttcttcctaggtcagtttttgttaaggtgaaccaaaagtcttattttaccaggggtttaaaaaaagtttgaagcttgaaagcaaagttatatttaaacatcatatgtaacaaataaataaagatgttttatagacttgtcctaaaaaggtgcattccttaaaaaaaaaaaaaagaaaaaaaaaggaaactggggcattctaggttgtttcccctccaagtgataagctttttttttttcttaattatcacaatgcttcttcaaaaagggaaccagggaaattttatttaacacattctaatcattagcctctcagaaagttattacagttcctat

SEQ ID NO: 120837 - DNA, 1061 bp, Homo sapiens
catgaatgcttgcacttgtgaatatgataattacgttaaaactgtacctaaaatttgttgaatgctcactgtttcccagcgatgatgctggacactttttgtgcattatcttctttaaccttcacaaaaatcctaatcagtggaggcaattatagttattcccatttgtaggtaacaaaacaggcttaggataagtaacttgccaaggtcaaggccatagctgggacttgaacccaggtgtcagagctcctaaccattatatcacactatctttttgttcaaatgggagtttgatatgtattatatcacttgctctgtagttgtattttgtaacttaactaaatgaaccagcaactaaaagcagggggaactgtgagctgttcttatgatgtttgtgttttgttgtaggttcggacaagtggacctccctagaaagaaaactgtttaacaaagcactagccacttacagcaaagactttatttttgtacagaagatggtaagcatgatttttcccattgcccccttgaaattaaatttgggaaattgtacacaaaaatatttagaaatatttggatactggtttaagatacttacaaaaaggatgtcttccacactcgctggtgaggatggtagtggagataggggtggtatggccccagtgttaggactgtggcagggagaggacaggggaaagaaggcgtagattatctggacactgcagtggcacggggttattttctatcttaataaaaatgtgtaattcataattctgtcagaataactagaactcgggttcctggtccacaatttacataatttattttatttttattttttattttttccaagacagtttcactctctcacccaggctggagtgcagtggtgtgatcttgactcactgcagcctccacctcccgggttcaagcgattctcttgcctcagtctctagagtaactgggattacaggcatgcaccaccacgcccggctaatttttgtatttttagtagaggcggggctttaccatgttggccaggctggtcttgaactcgtaacctc

SEQ ID NO: 120838 - DNA, 1045 bp, Homo sapiens
tgccaagacctgggtgacagtggacagtgcctgcacgtgtggcaaggagacgagtgcatgagaccagagagagccacagaaggtacaatcagcagccccctgcttttggaatcagtagccatgggtttagattctaccgcaccccttggccaagtcccatggtcttctgcagcctgggttttctcacctgtaaaatgagacttgtattccatccctcgtagtgtttttgtgagattagagatggtatatgtagcccaatgcctggcacatcctagtagcatttattactcatgtatccaacaattattttttgaacacttactgtgtattagggacttgctaaacactgagatgcatcagtgactatgacagacatgggcagagtcctacgtcgtgcagctcagaggctctgaggaggaggcagttattaaataatggatcacactgacaggaaagtcttcatacacgcagggttttgtatgtgaattaatgacaataccacaataagagggaagtagaagacacctatgagatttaaatggactgagaattgtgaaaagtgaaggaaataggtcggagagcctaagaagtgaccagtgacactgaggtcaacattttcatttccatgcactaactgttccttctgagggtctccacaaacctaagttggttctttattttggagggggctgaattttcagtgcctcttgatttttaatcacttgagggtttctttggtgctctgggcagaccctgcctaggcaggtgccaaatatgtgggcttggggacctagctatacgttttccaatctttagtccgggcagcccagtgagggcttctttacaaatattggcttgctttctccaccaacatttgcctcacctactgtgctcctcctctttcatgaacgagccttcctgcctgtcatcacaaggcagacctcaaagcccctcttccaagcacagtaagcccaagatgtctgcctgtaggtcactcctggaactaggccaatacagagtggacacatggaataagaaattcatc

SEQ ID NO: 120839 - DNA, 1184 bp, Homo sapiens
ttgcttatcactacattcccatctgtttgagtggaatccagctgagtgggctctttaattcccccattgctccccagggacggacatcaggaacagataccacatgttctgagaaggggacagaataatctcttcagggaagctgggaccgagacctgtgaggcaggaagtgggggttcaagcctagccaaggttcctaaggccagcgacccacaccgggctctcctgggtcactttcagcagggggggagagccttcgatgacctctaagggcccttccatgtgctcacctaaaaacggatctggttaacctcccccgtcaccacccctcactattgctcccagaactcgtagcttatttgtagcaaactcttctctgaggttggcttcctgtcaggagagttagtttattttaatggcagcggaaccaagcatagtctggaaggaggatctgccacatggatacatatatactaataagtaaacataggcacgtaaacagatgagcagggcatgccaaagccaaacagaaacagactcgggttgtgtggtagcatcagcccagaaaagtcgagagctgggtgtggctgcagaggcagtgtggttgggaggggccacggggatacctgagggaaggttctgggcagtctggggtgccctctcaggccctgcaggccaggggccagtcacagctgcaggtcctggagactcctgagcccagggtggcgcctgggtaggaagcagcagggggtgatgggaagggctggctacggtcatgtgaccatctgcctccaggccatgtgacctgccccatgggctcctctgctctgggctcctctccctccagagcttcaggctctgcccccttctgtttctccctcagcttctctgccttccatggtgccatcctggcctctaggagaggagtctagggaggcagagagtggggaaaggaggagggggcagagggtcccaggctcccggctccagagtgaggttcctaactacccccgcccccacccctcccctatccccgcgcctcacccccaggggaccctccttaggccagcgcgctcaaccgcctcttttctccaccagagggctcctcagcgcctgaggctgaggcgagagaggggctgaggagaatgggggaaggaggcctgtgccccccccaaggggagcag

SEQ ID NO: 120840 - DNA, 1048 bp, Homo sapiens
cttggatgatcttatctgttacccgggaacagagtgtatcttcagggctgctccccttggggggggcacaggcctccttcccccattctcctcagcccctctctcgcctcagcctcaggcgctgaggagccctctggtggagaaaagaggcggttgagcgcgctggcctaaggagggtcccctgggggtgaggcgcggggataggggaggggtgggggcgggggtagttaggaacctcactctggagccgggagcctgggaccctctgccccctcctcctttccccactctctgcctccctagactcctctcctagaggccaggatggcaccatggaaggcagagaagctgagggagaaacagaagggggcagagcctgaagctctggagggagaggagcccagagcagaggagcccatggggcaggtcacatggcctggaggcagatggtcacatgaccgtagccagcccttcccatcaccccctgctgcttcctacccaggcgccaccctgggctcaggagtctccaggacctgcagctgtgactggcccctggcctgcagggcctgagagggcaccccagactgcccagaaccttccctcaggtatccccgtggcccctcccaaccacactgcctctgcagccacacccagctctcgacttttctgggctgatgctaccacacaacccgagtctgtttctgtttggctttggcatgccctgctcatctgtttacgtgcctatgtttacttattagtatatatgtatccatgtggcagatcctccttccagactatgcttggttccgctgccattaaaataaactaactctcctgacaggaagccaacctcagagaagagtttgctacaaataagctacgagttctgggagcaatagtgaggggtggtgacgggggaggttaaccagatccgtttttaggtgagcacatggaagggcccttagaggtcatcgaaggctctccccccctgctgaaagtgacccaggagagcccggtgtgggtcgctggccttaggaaccttggctag

SEQ ID NO: 120841 - DNA, 1645 bp, Homo sapiens
gcccaggatcaaagcctttattgtctgtgtaggaggaaggagagaaggtcctgccgcctcagccccagccaccactgccgcctccgcctccgcctccgccgccaccacagctccctcccgaggcagaaagcctcacgcctatggtcatgcccgtgtctgtccctgtcaagcttctcccgcccaagcccagctctcaggggttcaccaacagcaccgttgccgccccctccgccagagacaagccagccagctcgatgtcggacgacgagatgcctgtgctcgtgaggatgaccctctctcccccacactcaccccaaggggctgccccccgcacgcctgctgtgagttgctgctctgccccacctgcctgggtggggacatccctttgctttcttggagatggggcggcccttccagagtcactgacctgagcttggatacggcttggtctctcagggctgaacccgtggccacattgggaaccctacccttgttcacactgcctgctccccattaaatgccaaactaatggcctaggttagattctgagagacccgaaagtgttcccaggtttaaacagagacgatcattcagctgggagtcactgagacaatcatagccattattgaaatatggaagtcctgtatcccagaaagtaagcagctgttgccccaggccctggccccttccccaggatctccagacctcccaaatccacaaccaaagaggtaaccactggcgcagcaggcttccaggcaatagccctggcatccattctgacaagcagccttaccagttgcttaatatttttgtctgcttaaataccctggagaacctaattcgttaaagttcccaaagtagttccactgagagccacccacccctaatctcaggaaagcaaagagatttgtttttctcactcactgttctcctttctccaattttaagtgcttcactcaaacagcttaatttgcctctgggaagggtttccgtctgtctgtctctctctctctctctctctctctctctctctctctctctctctctctctctctctctctctctctctctctctctctctctctctctctctctctctctctctctctctctctctctctctctctctctctcctctctctctctctctctctctctctctctctgcccctagggaatttgtgacctgtgtggttggcaatatcaaacctaccccctccccacaaagtggcatgttgggtcatatttgtccttaggaataggtagctgctgggaatccaggaggcataagggtaggctgggccagggtagagggagagaagataatgaatacaactagaaaagtacagaaaaaaacctttatggtgtaatatcaagtcctcaaaagaagagaaactgatggagaactggggggaagattctcataagccgtcaggacttgggggtcagcaacaggcagagagatgaaatgacacatccaagctccctctttgcccagggaagttcgtgctttggcaggagaaacagtgtttccttggggaaatagttcccttggggaactctcaattaagagttcatagtcacatgggggtcagagtcccaggcacaccccccccaccccttcaagatggtaagagaaagacag

SEQ ID NO: 120842 - DNA, 1010 bp, Homo sapiens
aaactgctgaagcgtgcagtacggcggctgccccaggaacttgcacaaatgtctctaagtggggaggcttttggaggagctgggctcaggctgaccctggaagggtaataagctatcgttcccaagtcaaaatccattgcctgaagccttggtatgaagaaggacattttgttcaattcttgcatgactttgagaaggccttttcccactctggagcctcagtttttcatctataaattgaactttgttctctaaagggcactggggtgatacaagtggtgccatggacaatgggatcattggatgaatgaaatgggtttgtggtgggtatgaggtcttgtggcaagtcactgtttccccttcctcaacgtatgtgtcctctccatttgactcttcccttgagcagtggccaacccaaaggagcgtttggggagcagtttgatgccaagaacaagctgacatgctccatctgcctgaaggagttcaagaacctgcctgccctgaatggccacatgcggtcccacgggggaatgagggcctcccccaacctcaaacaggttagcaggagccagttcccggtcctttctaggtcgtgtgctgcttgctttgctttgctgccgtcagacagagagtgatgtgagccccatgcgggacctggcgaggcacagtcctcccttgacaggaatgcttaggctttggcgctgggagccagccaggtcaagcagccccacttccccagctttatgatgagcaagggtcaaaatcagaggcgctagaaagccttttagggcatcccagcttctctctctgcctcctggagaagacagcaaaggaaaacatgtaaatgcaatattatttttaaacttctgctgcttgacacacccaagaccaggcccactggggccttccagattagtggtcaattgccagagaaagctaatataatcatcaggctctcagccagaattttctatttactgatgcagtggtgttcagctcaacatccaaag

SEQ ID NO: 120843 - DNA, 1075 bp, Homo sapiens
gtcccaagtgatcctccttcctcagcctcctgagcagctgggactacaggcgcatgccaccacacccagctaatttaaaaacatttttgagacgggatctccctatgttgcccaggctggtctcaaatgaacttcatgtctcagcctcccaggtagctgggattatatgtttatttttatcactggtcatggtggatatcaattgctcatcacaaaacatccaaataaatcctttcctgtcttttgcatcttgccttgcaggtgtgagcgacgtctcctcaccacagtgctgtgtggtctatacctcagccagggagaggatgtgaaaccccccgccctgcacatgagtggtacaggccaacaggaacacctggctccagccacgttcacagacatgtcagccgtggagtagtgctgacacttttctctcagcttctcagggtttcagtccttttgggtttgttttatttaccttttttatggttttgtggctggacgttcacaaccaaggcagacagcatgggtgaccagcaactgtacaagaccaaccatgtggcccatggtagtgagaaccttttctaccaacagccaccacttggcgtccacagcgggctgaaccacaactatgggaatgcagttacagggggcggaatggatgcccctcaggcctcgccaatctccccccacttccctcaagatacacgggatggtctgggcttgcctgttggctccaaaaaccttggccaaatggatacctcgaggcagggagggtggggaagtcatgcagggcctggaaaccatgtccagctacgtggaaacctggccaactcaaacatgatgtggggggcaccagcccaggctgagcccactgatggctaccaatacacctactcccaggccagcgagatccggacccagaagcttaccagcggtgtcttacacaagctggactctttcacccaggtgtttgccaaccaaaacctgcgaattcaggtcaacaatatggcccaggtgctgcacactcagtcagcagtgatggatggagcccctgacagtgctctccgccagctgctgt

SEQ ID NO: 120844 - DNA, 1122 bp, Homo sapiens
atatggtctgtggccgctttcacgctaccgtggcagcgttgtgacagaaaccatatgtatgggccccaaagctgaaaatatttactagctggccctgtatagaaaaagtgtgctgggaggtctctgtagagccttgttattatctacagcactccataaatttggtgctttagggcactatgccctcaacagaaactagtaaattctgtcccttagtccatgtcagaggcatgggacctgcagaggggaacaagccactctaggtctcctttgcctagcgcagtgttgcagttcagtgagcgtttgttgagcatctgctatgtcccagtccctgaggacaccacatgggcaggctgctgtccctacatcacagtgactgggcagccagtgtgcagacaggcacggaagtgggtcgcctgactgtgacatggtcagtgcagaggaaaagcggtcacaggctctgtgggagcgtggagtggcaccttaggttctgagtgggcatttatttgttgagcccaccctggaatcctggagtcctgctctaaggaagaaattgaccgaagaaatgggaaggtagcagttctgttaattagttcatgaatgaaaaagctcctggtacaaattacccagtagaaattgttacacataatgagcaaaacagttaccttgttagaaaaataataaagacttgaatcctgagttggtattataagaattctgtgagattgactaatccactaagaagaacagttttcaggttttaaatgatatgtttaaaatagccttttggcaagatgctaaaccacggcgtagcacgctaccatctgtataagacgggctgtgcattagtgttcttgtatgagcataaagtgtctctaggaggatatataagaacctgattgactgtcccagaaggggtactgggtggctggggatgggggtggaaggtggagggagacttttcacgcccgtatttttacaatttgcatgcttttcactttatttacaggcatttatttaggataatttttgctgttttgcatgtccattttaaccttttgaattttgaaccatgtgaatatagtacctattcaaaaaatattacatttaatgtaaaataaa

SEQ ID NO: 120845 - DNA, 1076 bp, Homo sapiens
gtgtgaatgcatttgatcctcacgttaaccttataaaagaagaagactgttactctgcagacaaagaaaccaagtcctaagggaggttaatgggatagctcggcactcggagttatctattcagtaaacgtttatggggtcctcattatggactaggctctgtgctaggatctggggatacagaagtcatcatctttgcattccagtcatcagcaaaccaacgttccaagaccagattgggtcaatgactcctctctgagaccccggacaaattgcctacacagatacctgtgctttattttacccatctgtaaaagggaattaaagggacaacccccagctcctcctctgggttggttcttgtgagatatatgggtgaaaccactttgggacatgcacagtggggcacagatgcaggatgtcactgggtatacttattctgggaccagggaacaacaagcacatccccttctcctacctggatgaaggaatggtggagaatcagccactattgacctctatcctggtggtattaagtttatcagattccccccacctcccgcccttacttgtgggcattgtataacatcagaggattcttagatgtctcaaggattctgactagaatctcaaaatcattttttggcctgctgctagaagagatactatgcttctacacctggccagtaggattatggcatttgaggcaacagtcccgtatgattggaagtggttggttatattgtttggaagaggtgaccacccaaaagtcccttgtctgttgatggcaccttttgaggaaactgttctgattcattattaggctaccagtctggctgtttaattttcaacagttccaacagctgttgttattctggaacctaatacaagagcattgttttgctttctatcatttttgccaagatcattagttaaaaacaagcttgtggtaatagatgatacattggtgcatggtggagaaacagccccatggaaagggagtcttgctccttgtcactctcctgagatgggctataaagaatggaatgatcaaagcttagagcaaagcaagccag

SEQ ID NO: 120846 - DNA, 1051 bp, Homo sapiens
ttttcgtgaaacaactggcaagtaaaggctgtgggctccatggctttggaagagggagccatgctaggggtagacctggggccttggcatcattcagacctttgctaacccactgaattgtgatagtaggccaagtctcccagaaaaagaacaggcacccatctctgaggtaaacataccttcctgggttgcattgtccaaaaccttgctctacgcctgctccctcctgttcccggggccttagactccggggcagacccatgaacagatcctcggcagaatgaaaatccttagcagacatacacacagaccacccagtgcctgtactttggtgtgattcagctgtcacagagttgaatgtgattcttgagtgttttcactatggtgataagaatgatgctcattgatatttggccagtactgaggatcttgtttgggccagaaacttcttacagttatttgtaatccttgaaacacccttgcagggcaggtattaatctacagatgagatggccgaggcttggaagagttaagtaatatgcttaacatcacacagagcggggttcaaacctagagctttctgtctgtcagtcctcttgtttcttccactccttgctccgctggtaagtgatttgaggtcatgaaaaccctgcacccaaatctggaaggatgtggggggaatccaggctgtgttctccactgtacacgggggactgttttggaacccaggaagaaatgatgggcccttggccccttagaactggcagggtccttggagtaactagttctaaacaatttcccagcacccataggcatgaagatcaccccttaaaatccaatcagctaggggtgttatggaggaaggagaaacttcctccatcagagaaagttctagaaagaaattgatcatttcagaagaatcctctgagaatgttaatttactgcgatctgagaagagttttcttttttgccgctgggtgcggtggcacacgtctgtagtcgcagctactcaggaggctgaggtgggaggatcgcttgagcctaggagttc

SEQ ID NO: 120847 - DNA, 1037 bp, Homo sapiens
ccagcttataaagatcctgcttacaggctcagagaagaacaagacaatttgtgacttttctagttttacatttctgactttgagaaatacccctatcctcatgtctgtagtagattgttgaaaaacagcaccaccacaaacacatacaaccaaaccccatacctgttatcacttgcctccttccagaagttctcttggctgcagcctcacagctcactcaggcttgtgcacatacgctctgtccttaggataacacacttcaaaggacctgtggcctgaagggggttgggaggaccagtgtctagagtcagttctcctccgaggtcagcaggctccccctacaacctcatagagcagcgcgacaccaggtataccttttgtgtagttctctgaaatggatctcagagtgcatgtcaccgtggaaaccatcttataaatggtggctacatagagttaaaataacactgttagttttatgcggcaggtacattatgagttcagaaggcttttgtgggctgacctgggagtctaaccctcattttaaatatggtttcttgtggctacatgctatcagcattttaaagaaattacttttaagcaaacctttagagcgagttgtttgtaactgggaaattggcagtctataatttatattatgttttcttaccatcttgtgggtttctcatatcccaggactctccagatggagtgtaagctcctgggaggcccagtgacagatggatggagttgtggctcaacagtaacaggctcagaaatggcatcagggtgttgatatgagtcaatgtgaggtggggcagccagatactatagcagagcatagaatccaccaggaacaaggtgactggtgtgggagccatgtgtgagtacctggccccagagaggccttggatgggtcattagattaggatggcatgccaactttaaaccaaatcatgtgagtaacagttggagaaattgggcctagaaaagagaagacttgggagcaatttaataactgtgcttcgtcacttgagggg

SEQ ID NO: 120848 - DNA, 1042 bp, Homo sapiens
cctgaggtctccgacatgaccagcatttatacatggttttgcagttgttccattacttatctacattctctcagtacagttcttggcacatattaagaggaaagtaaatatgtgttgaataattgaatgattctcacctctacaccatccttgcccacacctccactccctctccccatcaactgaaccataaattcttggaaggcatagattgtgtcttattgtgctttgtgttctgaatcttgcctaacaaactttctgccacatagtaaatgctcagtaaatcctcgttgaatgaacagattatgtgggtggagtactctcttagagcctgcctttgggagaggtgggtgggaactgaagctctaagaaggaagagggagatggagaatgaatggagatggcttcaagagctgagtgtgccaacccctccagcttcttctgatttccaagtttgttacagataaggtgcttatttctccaagagggatacatggggtcctctcccaactggatggctgataagctcgtgtctgtgaaacagtggaataaaggatagtggctgtgattctaggttttattttaagaacagcaataaagcattttattctacctgagcccctttggaaacctccatggttgagatgagaggatacaagccaggaggacagcaggaaggacacagtagtcacctccctgggttgaccacttcttcctttccattggccccaggggtgctaacgagcaatgacagttccacaaaggatgggagaaagagtacccagttatcaggcaacttcatagcatccctgaggatggtatggctgggttgaccaactcgtcctggtttgcttgggactgtcctggttttagtatgaaagtcctgagttctaggatggttggtctctttagatgccacttgctctcttttctgccccctgcaaagccatcttttgaaattccttttccctttgcaatgtccttgacttggcctctttcctcctctttctgccttctccactgcttctacctgagccttgct

SEQ ID NO: 120849 - DNA, 1055 bp, Homo sapiens
aaccatccaggtttttttttttttttttttttttttttttttaatctctccactccttcctccctgggtcagttcatcctcaggctggcttctgcaccagactggctcctgcaccaggctgtggggaggctgggggtgtgtagagttctggacactttgtcagggtaggagggaaatagaacttgggagccgcagctgacatccaccatactgtaccacccatagaagtagaataataccttactaacttggaccagtcattggggataatagtgagaggacactcaaccttaactagtaaaagtttgaatcttcaagtgttttaatgtggtatagtgtcaggcaggatcttcccaaacacatcctgttggaagcagttagcatctgtttttcagtatgtcttaaaacgtacgaccttctagtaggttaaatatatcttctgaaatcccgtttaatttctaatttgcttattcaaccttttaatagccagagtaaacactgaactcaaattctgggttggtgaagattaaattacagtaatgaggttcctcatttataagctcatctataaaatggaaataagaatagcacctactttataggtttgctgtaaggattaactgaggtgatctgagtcaagcgcttagcccagtggatagcccaataaatgttacctttattagtgtcatatattgccaaatattgtcacctttatgtttttatgtgcatgtttaactagaaaattaattctcttcgtaacaaatatattatctgctgctgattagttctgttagagaggaggtaaataaaggtattaaaatatttagtgtttatggattctttttttaccgaagttttttttttctgttagaattcattttgggggaagcctaaatacagataagtttaaggagcatacaactgaaaatagatagaacctctagaatatagggattttaaaattttatggcaatatgttcttatattcttagttgaaaaatctcttaaatagttgatggcctgtcatgacctcatgacctatcccagctgatttt

SEQ ID NO: 120850 - DNA, 1130 bp, Homo sapiens
ggatggtagttctagaagtgtttagaaggatttaaaaatgtctgggatgcagtggaggtgtagaaggccactgtgggaagctccacagagcctgccagaggcggattgctggactcaggagccttagctggccctggggcattcctcgcgtttttatcaggtctggcctcatgatcccttccattctcagtttgtccctccataaaatgggcatacagctatgattcctctgccgggcctcccacaagctgtttcaagggtcagtagtttgtgcataaatagaattttaagcttttatttcaggtgtaaaccctgatccggcaagagatggctccatcctccacacattcttggcgacagtggggaaggggggtggtatctgatttgattatttcggtgtgtgtggttttgttttcttggcatgtgccacgctttccattcctcctgtatgaggctcagaattgattgcttcggtttcttttttattgtgcctgattctgatttaattttaaagccattgtgtctcggggttccagtcggaaacacgtggctcgtgcaaatggggtaattgaagagcgtctactgaagggagtctttataaggatgcaggcagagttaagagaagccaagaagggatgctgaagcacccagggccagcagtgtcagggagctgttactgtgcctggaaggaagagggagggactggctgtcgggatgggaaacaggagctggagaggtgtccctggtagaggaatgcaatcaacctacagcagcatggccaggaaggagccaaaagaataaatatccttattgaaccccttggatctcccatctcctgatgccagtgcctcccattaggcagcctcagtcagagccagaaggcaagggaactgggtggatgctgtccacggagggcagagcctctgtggggcagagctgcctgaaggaggatggagggtggatctgcggagcgaatgggaacagtctcacagagtcaagagttgcaggtcacttggattataaggacgtttctactttagaccaaaagaggcttttgtgtatgtttgagtgaaactttgcattgtgaggtcagctacgtagatgtgccggctgtgagggatggtaggagc

SEQ ID NO: 120851 - DNA, 1063 bp, Homo sapiens
cctggtttgggcagatcctgatttcttatggggcatcttggtgacagcatccccttgaaacctgtggttttctctcagccccatgttacccagatctgcctgtctgcctggggtgatcagatggcccttgagtgttttgctgattttcacctttcccaggcatctccctcttgtggctctgggaatcccagaattgttagatggtggtccatagctggtgatcgaagtggatcagtccagctcctcatttcccaaaatagaatattctttttcctgcttctggttgcccagtcctgactgttctgccagtcaccatgagcttctccacacagctggatttctcacatttcaagctctcccttgaagaaggaagaagagagtatatctatctatgtctacaaaagcatgtgaaagggtggtaaaggaaggacaccaagaccttgaatatgcaggtgcaggaagaggagggaggagccaaacccagccatcctcctccccgttagagtggatgttaggaggtgccggactctggtgcctcctgcacaggaagaataggtatgcctcccagcttcaagaaggccctgtgtctcttcacttggccatcttggttctcctacattttctgaaaaacttctggaatcatatcacctgagcatcagaattgttctgtggatcaaataactgagacactgtgttgagcagcgggcagttgcaagcattgtcaatacacgattcattgccctcaagaagctggcagtccacatgggcacagggagctcttgcccagagaagctagatgcagtgagctcagaagagccaggagagcttggtaagctgggttggtgccacccagcagactgcaggagagggctggagctgggtggccagagggcagagctgcaggggaggaatgtgctgggtgttaggaccttgacggggtgcatggactgggcaggggattacagatggggtgagcagaggtacgcatgggaaacaagattgaagaaggagatgtgcaccatttatgaaggatcccaagggatggctgtggagcttggaatgt

SEQ ID NO: 120852 - DNA, 1083 bp, Homo sapiens
agtggaattactggtaaaagcatctctacatttgtgatactgatagacatactaagtatcctttcaaggaggttgtagcaatttacaccgaaaccatcaatgaatgagacatcctcaccaacacagtggtgaggatgtctcattcattgatgagttaccagtaagttatcagacttttttatctttgccaatctgatggatgaaaattggtatctcagttttaatttgtatttcttttatgagtatggttgaacatcttttcacaagtttaggattcatttgtattttcttttgattcatagtctgtccatgtttctgttgagttgttggtctttccaagtcttttagatttggtatctctttgacccatttctgtattttgtgtagcccactctggggactggggcagcctgtgcattcaaatgaggctttggtgagtgggatggatcaactctctggtgatgaaaacgagtccattttcttgggtgtggccattgctgcattggaggctgctgggggctccaagcttggtggtttctggtcctcacccctacaatgctcgtcggagcggggaacagtctgactcatatggagagcaagtgcctcctggtgggttgaacacgtgaggaagggttggtggggagatggacacaaatgagactaggaaagccagggttgggaggaggaagggggtgttagggggtatccagagcacggagtgtttgcatttaggcagcttcataggaaagaggcatgatagtgacactggagattttcaaatacacagtgtcccagaagtcaggagaaataggatacatttggatgtaaacagtatgtgagttacattttcaaaactatgctcaatatgtttttgtttttgtttttcaagacaaggtctcactcggtcacccaggctggagtgcagtggagtgcagtgacagaatctcagctcactgtagccttgacctcctgagctaaagcaatcctcctacctcagtctccctagtagctgggactacagctgtgcaccaccacactcagctaattgttttattttttggagagccagggtcttgctatcaa

SEQ ID NO: 120853 - DNA, 1506 bp, Homo sapiens
ttattcattcactcattcatttcttcattcatttagcaggcatcacacccctgccatgtgccaggtgctgccctggctgccaggatagacaaagccagcccctgccctcatggagcattccttccaatgagcaagacagataataagtatacgtgtacacatctactacaatgtcaggtgtcgatgaggtctgcgaagaaaatcagtcatgggaaggagatagaggctgatggggtgaagctgggcttcagctgtttggattccaactctggatgtctttctcccagttcctgagacacagcccagcctgaccctggccaagcacctggcacatacaggccttcatcacattttaagttttattttattttgggagcaaagctttactctgtggggaggattccagaagacacatcgagagctcatggtaaactcaaattaggtagaaatgtacatagaaccctccagcccactgctccatgttctgagggcccacagatgttctaggcaggtagagtaggcgggaaggctgagggtgaaggtgggggcagaagaatgagctctgtggtggccagcagatgggagagtataggctcttaggatccgaggcccacaggaccagcagcttcttagagatcgtgttcaaagggtacacgtggatgcaggaaggcatgggggtggtgggtgtgggcaggaggactccctgaggccatctgctgagactgttcaccagaggctggagcccagcttttcattccctgccctgtgacttgtgcaatatcaccctgtctcccagaattgttccccccggctgggaaataatggcagatgggtgcaacagtctagcttagggacctgttgaagggcagtccttaaccctaggcatttaagagccagagtagattatgaggacaggctactctaacccccaaaacatcttctggaagatgggacctcctggtatcagacaaaaagtattttagggttgcactctccacccaccatgcattgcagtccagtgtagctgagccaacatttattgagcacctgctccatgttcgtttgagaagatctcgaaaagccctgttctgggagatgggagaactgggatccaatacctggtctcctgtgagtaaattagctttgtgataacagctcttggtcctggtgtcctctgtaacaggaagggtctggccaaatggtgtccatgtcccccttttgttctgacctctgttctaagctggagataagacagggtcccactcacaaagcatttcagtctttcagttccttttcccagtggtgatccctccctggagtgcagggcttgggcaggtgtttggagaggccctagtaacctgcagagccggctcgtgtatttcttggtctgtgggtgtcaagtgttttttccccttgcccccagctgtaagccacttggtactaactaatggttaagtgaccattgcccacacagtgtgctccccacaaagtaaagctcgcccacaa

SEQ ID NO: 120854 - DNA, 1055 bp, Homo sapiens
tctttggagtatatggggaaagtatcagaggcctgagcacctggaccttcaccctagaggggtgtcttcctgggcgttacctcactgattctttgtagtcttctcaggctttgaaaatccagatttaaaaatctggtccgtttactgttttatggtcataaaagcaacctgttaacagaaataagttggaacatataggaaatcatagagaagaaaataaaaacatccatctttctggaagaaaccagtgtgaggatttggaagtttacatcccagtctttttttttttttttttcctgcatatatacattggagagtttgcctgcttgttcatttttacagaactggaatcatattgcacatattgttatgtaatgtgctttaaaaactctattgtgaggatttcctagttgtacactgctcttttaaaacctgactttctgtggtggcacagcattctattatgcggaagttctataacttatttaaccagctcccctatatttagtcatctaaattgccttccatttcttttgctcattcacctaatgctgcagcggatttgggaatgcagattttaatagctaggtcactgttttaggaaagaaattctctggtgaagcacactgaactaaatggttgcattagtttcaggttttgccaggccttgcacactcccgtgacctttgcactctgcagggaattcaccatctgcttaagtgctgtacctctcctgaatctctgttctgacctttacttacttctcatcgtccttcaaccacttctctgagaagccctccttctcaggggcagaggggatgatgagaggccttggctgccccagaagatactggttcaagccctgacaatgtcactcacttgcagaatgacagtgaaaaatttgtggtacttttttgaaacccagtttatttatctgcaaaatgaaggcaggaatgcctttctggccaggtggtgaggatgaaatacagtaatgacctctgatgtgctttgtaacctgaagtactacaaagatgctggttgttagcactgaccac

SEQ ID NO: 120855 - DNA, 1060 bp, Homo sapiens
ggtgttgggaggtgggtggggcatctgggctttagccatagagctgtacatttagatgggccttagcgctccttttagttagtccaccctgactttgtagaggggaagttggctgtcacaaggtcacacagccccatgtgggctgagcctggtcacggaaccaactctttgcaaagggctcttctgaggcacagcctggactccccagaagggtgccggccctgtctaccccacctgtcttgttttcctgggaacaagtgccggtgttacagatgagaattttatgacttcatttcagagaatgtggctgggtacagtttgcctggtgggtgcctaaatttaaacgaagtgggctgtggtgggcggtagtgaagaagattggcttggtgctttcattaaagcacaatgtgttggggggaggttgggtttttatttttacttcactgaatgagggttgagcgcagagctgaggtttccccctcctttccttttctttcctttaaaatgattaaatatctgtttttttttaatattctcaaatcaggactggtggtacatttcactttcagcctgagtataaatgaaaagttgaattgaaatttttttgcattagtattgctatattattattgttttgcatttcctaatggccaagtgcagttgttgggcaagcctcttaagcatctatagaccatttctggttagacttggtttttattcccaatcctggacactcgctggctgagtgagcctggatattatttctgaacttcagtctcctctctggaaagtgttggaagcaatgactaggtattagaatgaatgtgtacatctgcagtcccgtatgtgaagccctggcttactgcacagcacatggagggtgctcatgaattactggctgtgcctggcttctctgctgtgccttccaagccttgtcccccaccaaggtgggcgttgatcaggggagggtgtagacaggatagcctgctgacggaggaggcacggggatggtatggagggatgtgctgttgttagtgtgttgtggggggagagttggagt

SEQ ID NO: 120856 - DNA, 1055 bp, Homo sapiens
tccccatggtcaagttctggttacttcaaatcagcattaggcctggaacagactacagcaatgcatgtgacttttccaaagtcttaaaactggaagaacttgcttgctccagtgttttagatacaaagctacaccgggactgcattggccagggaccccagcgctgcagccgctccaaggtctgggttctttcctggttgtgtgctggcatttgggtgttggcttccattcaggaggacctcttcctttcatgcaagcagatacctgaagacacccaggtccctcgcttggtagtctggaacgatttcactgtcaggggagctctggggtggaatttagtgtggtggggtctatactttctctttgatcattttaggtttagtatgtttttgtctgtaaagggaatgataactccagctcattactataatttgactacagtattggtttaatgagaaacctatgagagggacctacttccttctgatttttgttttatttaaaaaaaattctgtacattctgtttcatttctcttccattggagttttctttttaaaagtcaccaaacaacaaaaccatttagaaaataaaatggaccctggggactatgtagcattttctctccatgctgcctgacttccttccatctggttaaatctctccctgtgttttccaggcggcaggtggtgagatggagaaactgaggcccatagaggggatgggaattgattgaggtacacactggatcagagcttgaatcaggcctacacaatgtaggttccaggccagtatttctgctgctccccagagcattggtgttacctgtgggatggtctccctagcagtgcatgatctccttgtagtttcactggcttacttaagatgagctctcactacagaattgctttgatcatgcattttacatggtgtcaggacaatcttgaatggattccttccccatacattcgtccatccaaccacccatccatccgtctatccatttattcacccgttcatccaaaatctttcttgatctgccatgcacaaggcaatg

SEQ ID NO: 120857 - DNA, 1050 bp, Homo sapiens
agcacacaaccaggaaagaacccagaccttggagcggctgcagcgctggggtccctggccaatgcagtcccggtgtagctttgtatctaaaacactggagcaagcaagttcttccagttttaagactttggaaaagtcacatgcattgctgtagtctgttccaggcctaatgctgatttgaagtaaccagaacttgaccatggggaaggagagggagtagggaggagagaacacctccagtgggtcattgagactagaactgtggcattctgaacatgtctggtagtaactgaatgctctgggaacagaggccagcttctctaccctagtttctcattcccatccatcccccatggtcagatcctctatggtgtggtagtgaatggagaaagtcacttttgttgcccaccattaatccacactctttctgttctccaagagggtcccacaggacctcaaatagatggaattcttgtattagagccatctgatattccaggagtcactgtgagactgtggaaagaacatactctttggaatcagaattgtgttagaatcctgattgtcactcaatggaacccaccccagaggaaaacctgctttcactggatccagtcgtctccaaagaggagtcacaggacctgcatcttttgtgtggagaaaaatactcctggtcccagtcacagaccataaacctaacctcagccagctacaccctaaatgcagcaccactattacacaatggagaaccaagcacaggggtctcgtacggctccatgtgatacaacccaaatgacagctgatgacagctgcgcagcccagcatgcaaacacatgccaagaaggaggagtaaggcagctagataataacaaatataactatcctgtgaggtggggcgggggcagcagtttcaccccatctcattgtgaggggctttcctttggcacaagcattcacgattgcttgacactggcttgcttattgggggtacacctggggatgcagttgcaaacaaaacacaacctttccccaaccccaatcacccaccac

SEQ ID NO: 120858 - DNA, 1032 bp, Homo sapiens
acctcatcttaactaactatgtctgcaaagaccctatttccaaataaaatcacattctaagattccaggtggccgtgaatttttgggagacaacctagcaccagcctcgtttttacctgcttttttgggccttatttccctcccactttcatggccttttttggggaagatgtccagaatctaccccagctgaggtttgctgtctctgtctcgtgagccgctccctctctgtgagcaccccagtactttcttttttgcaccccaatactttctttattgtccctgtcctaactaggctccagcttcctcagaacagggactggacctcgctcctctctctttgtcagcaacttggtggctgagagcctcaccttcagggtgccacagaagcgggtgtgagtccaggctccccacttaattaatgtgcgaccctgggtgacttccctgacctctcctagcgtcagttttctcatctgtaagatggatctattaaatgagaaaaggtatgtaaagcagctagtccggacttagaatctccatgagggcagcattcgatcttgttttgctcacctttgtgtatctggcacttagcatggtgtctgatgtagtaggtgctccgttaatatttgttgaataagtgaccacatggggagacttagcttgataagaaatgactttataagaattcagaagggtagacatttggtaataaccaaatcaacaacaataacaaaagaaatgacttataagaagtgagttctgtgtttatggatgtgacccttccttagaaaccccccttccccctgccttcagtccctaagagctgggtaattacagtttgagttgcagctagatgctgacgagtagcggtgaacaggggtctcagttttagtcaggctcacagccctgcacccggtgtttctctttcatgtggatggaacaaacttcagcttattacattagcggtacctatggtggctgcaatagatgagtcaccatttactgtaaagctttcagatgcccggcagatgc

SEQ ID NO: 120859 - DNA, 1050 bp, Homo sapiens
gggtgggcagggttagcccccatgttgctttggagtatgtttctggtttgttgcaaacctgtctgtcctctttttttgtgagtctgttggtgagaaaagatgaggccttaaaaagggcagggaggaggggtgcagtagctaggaaccaggctggctgggcgttgtcctggtaaggtttggggtggaggctatatttacttcttatagtgatgctggtaggatctttttctatgtttagaaatagtttatataacatgaaagtatgtgttcttaaaaaaaacacacacaaaaaacccagacactagaatagaataaaattttaacagaccaattaccatagaagaaatggagaaagttatcagagctattccttaaaatagtcccaggaccagatggtttcacaggtaaatgttttcaaatattgaaggtacaggtgattctaatgccatttacattgtcctaaagcagagaaagagcgcttaaattctttttatgaagctagtgtaacaaaatgtgacaaaaaaacaggtgtgcacacagagccacaaagtggtctctgttttgaatactgaagatgcgacattctaataacataattagaacccagcagcccatttaaagaactccatggtcacgggagttccagaacaggaaggtaaggataggttaactttaggatttctgttaataaaaattcattgtattaaaggatctaaggagaaaataagatgctgaaaaggtttatgaaaaattacacatccgtttctaataaaaactgctatagaaataattggatacctcctcaacatgggaaaatacatttttgtcaagcaagtagccaaaattttgcttagtattaaaatggtgaatgctagatgcattcccattaaaatcccgattaaacaccataattatataaccttgttctggtggggataagctggtgtaattagataagaggtataaaacctagaaggaaaaggcaaaactaaaagacaaacaagagaattcagtaaggtagtttggtgcatagttaatgcacaaaaatca

SEQ ID NO: 120860 - DNA, 1044 bp, Homo sapiens
cagcactttgggaggctgaggcgggtggatcacctgatgtcaggagttcgagaccagcctggccaacatggtgaaaccccatgtctactgaaaatacaaaaaattagtcaggcatggtggcatgtgcctgtaatcccagctactcaggaggctgaggtaggagaattgcttgaacccgggaggcagaggttgcagtgagccaagatcgcgccattgaactctagctggggctacaagagcgaaactccatctcggaaaaaaaaaaaaaaaaaagaaagaaagaaagagcaaaactccatctcaaaaaaaaaaaaaaaaaaaggaaagaaaaagaaagaaggagagaaagagagaaagaacgaatgaaccaacgaaccaacctctggtcccatccacagttgtgtaatcagaatctgcagttttaacaagaccttcaggtgattgggtgcacgtcaagtttgagaagtgctgggctagcacagatgccccctgaggttagagatttgtggcaatgtggtttttattgtgtagtgcagtaaaagatttaaaccctagtgctgtggtatgattccagtctgctctctgtcattagagcctggaattgtatgtgtgtgtgttcattgtcacttgtggcatcagcgcagggttgtggtttattcaccctctgcagctcaccgagttcttggcgcagctagccatttctttgaatgcaagtctggcatcatagactgttgggggggtgtgaccaaaacaccactttcttcctgttactccctggagcccacaggggctctggttgtctgctgtgtcatgtccaaacctcttgctggggctccagggcccatgtgttccaggtttatctggcccctgctctggccaggcagatgggcagatgccggtcttcagccttgccctctgtctcttgctggatgtgggtttcctggccggccagtcgttcctcctctttatacccttggaccactctctgctgcactgtttagtgcctcatcatactgggctgtttcctggggggctttttgttaa

SEQ ID NO: 120861 - DNA, 1309 bp, Homo sapiens
gtcaataaaaacttaaaactacattgttttgggatgcagattatctaagaaagccataaatgttggggggcaggttttcgaaggttcctcttatgagaaccactcccttaaatgtgtttgtgacaagctccccaagtacaatgatacagatgggatcaaggaggagtcagcttgggttttgaaggcagagtagacatttttgtcattgctttggaaacttttttttttaaataacccgaattataaaatgttagcaattggagtatgatattaggtgcatatgtgtgcattttattttatttttttcttattaccacgaatgtattttttgatcactacaaatgcagataggatatgggaaactgtggctgcatctgatatctatggtttcctgcccatgcaaggtggtgctgggagatctcagctctgaaaggctgcgtttgcagccaggtgtgtgattccttgtctcggggctgctttcaccgtaagggggacgtagatgtggctgggtgatggggccttctcggtttggttccagggttagcaagcagagctagtttagaaatgagtaagaaaggggcactttctggttttaagttttggctcaaatatgcgtactgaaactcttcctcactttcgctcttcttatttgatgagttccatggcatcctaatttgtggaaggacaaagaaggaacatgtttgtatgagagaaccagcttttcgagtagagttacggatgggctggaagaaaccaagatgagttcctctggggatggataaagcatcctgcatgaaggttcaaaaagatgcccatggctgggcacggtggctcatgcctgtaatcccagcactatgggaggcagaggcaagcagatcacctgaggtcaggagttcgagaccagcctgactaacatggagaaaccctgtctctactaaaaatacaaaattagccaggcgtggtggcgcatgcctgtaatcccagctactcgggaggctgaggcaggagaatcacttgaacccgggagatggaggttgtggtgagccaagatcgcgccattgcactccagcctgggcaacaagagcgaaactccatctcaaaaaaaaaaagatgctcacgccaggctgcttgagctgaggctgtggggctgtggagaggccatgggagaagtagggcagctgctagatgatcatggccatcctggacggcagtgatggaaggggcacagagtgcaggggaaggagttgggcagaaaggggtggagcgaagggggattgggcagccctatctcgtgaaattactgcttgag

SEQ ID NO: 120862 - DNA, 1007 bp, Homo sapiens
gaaaccccagaagacattttttttgtgtgtgtttgtttgtttgattttctttctttcttttttttttgagacagagttttgctgtttctgcccaggctggagtgcaatggtacaatctcggctcactgcaacctctgcctcctgggttcaagcgattctcctgcctcagcctcctgaagtagctgggattacaggcacccaccaccacgcccagctaacttttttgtagttttagttgagacggggtttcaccatgttggccaggctggtcttgaactcctgacctcaggtgatccgcccgccttggcctcccaaagtgctgggattacaagcatgagccaccacacccggcccattgttttatgtagacaataataatttagattaatccacatacttactctttttgctgttcttcatttccttccatataagcatgcttctctctcagcttaatttctttctacatgaataactcctattaggggtgtgtgtgtgtgtgtgtgtgtgtgtgtgtgtgtgtgtgtgtggtggagggtgtctgctggtgttccagttctcccagtttttgtttgtcggaaaatgcgttttattcaccttcatatttgggagatttttttcccctggaaaaaaatctttattcaccttcatatttgggagatttgggcttgttttattttctttcagtcctttggaaatgtcattccattgtcttctggcttccttcatttctgttaaaaagtcatctgtcagttttattgtggttcttctgaaagtaacatatctgttttttctctttggctttgtttttttttttagcaattttactatgatgtacataggtgtggttctcttcatatggatcccctgtggagtttggagtgcatctgtaaatcatggctctgtgtttttggtcagttttagaaaattcttgaagcattgtcttccaattttgcttttgctgtttaatcctctcctccctttctcaggctcctgcacatatgtta

SEQ ID NO: 120863 - DNA, 1008 bp, Homo sapiens
ggggctattcgtggatagcgctaactcttggagcctcattttccatgtcctctcagtacctttgttttactgactgaaaaggtttattttgagagtaaaatgagatttaaaaaaatgcaaaagtgctttgagaactgtgaagccatattctttactcttctgcataatcattttctgagggggtgaaactctgtgagggtgggatctcagtgccatccctgggctttgggcgcgatgggtgcgtggttcacacacgttgttagcttccagaagtgtttggggctgaatgtgctctcaggtctgccccaaattattccacatgatttgggggaatcattggtggctgggctgcaagtgggaggacctccaaccagagctggagtgcccttgtgtgtccctaggagggtcacttcaccttcctgaacctccgtttcctgaggtggtcacatctacttggttattaggaagattaactagcagaatgtgtgtaaaaatccacacttgctaagcaagatgatgatgacgtatttatggaatggaagtcatgggctctgcagtctctggatcaggctcatcagcctttcctggtcagaatgttctgcctcacatttacaccacagtctcctgcctctaaggcctggagcagacataattgaaagctttgttagtgttaagactttttcactgaaattgtataaatggtaagtgaaagtagttcatatatatatatatatatatatatatatatatatttttttttttttttgtagagggagattgcaaataattcatagtgattatagagaatttggaaaatactgacacagatgaggaagaaaataaaaaagggctttaattcctccctgttaacattttaatatatttccttccagtattttttctaggcagtaaagtctagtgattaaaaatttaagcactgcagtcagactgcctggatttgaatccaggatccttcattcactttaaataacaataggcctgggtgaa

SEQ ID NO: 120864 - DNA, 1181 bp, Homo sapiens
gacagccagcgaaacatttcccttgtccactcccactgttgttccctacgtgtagctgccttctatttggggttttcaagttctctgtgatcctttagcaaaactgctcttcttgtcggaaggctggcctcagaaatgctggctgggcagtgccagtcaatacaggttcaaattctgattccatattcagaatctgggacctgcccacccaaagggccaaataaacttggtttgctccacaaagaatcctgtgaactgggtgcaggagaaccttgaacctaccccaagaaacccgactgaggttctacagtcttagccgtcttcatttgcattcagtgtttgttttgcaaataaggattgtgctatgaagctgaatctacctaaaagcagtcattagcccttagtcttactgtgtatgctggaaagtcaattctcattttaaaaagatatccagtgcttttcactaatcgggctcctggcctctgcctaagaaggtgaagctttatttatttatttaaaaatgatctttattatgaaaaaactttaaacatacacaaaagcagagaggctagtataatgaactctcttgtactcatcacctagatttagcaattattgagattttgccacacctgtggataatggggcttcttctgtatttgtataataaatatgtgtcgttgattttgaaaaacagtggaactgatagcaatttggtttcatagagagaaggaagaaatcaacgaaaaatcagagagagaggaaatggaggccatcactgaaataactcgcattttgtagttccaaagcctctttgacatatcttatttgtgttctgcaacaaccagagaaggtagatatcctcattttatagctgaggaaactgaggctcgagaagtaaaattggaaaatataaataaatgatcaactaagagtcacctgttcagccagcatccaaagccctgatttaatgccacaatttgaatggtttccaaattttgtgcactctgaaatagataatactatacagcattaaataaaagaatgtggtacagaatatatgtaaaagatcgtggaaaccaggaagatcatctgggtgttttgggcttacaactccaatgagcttagttggaaatactcagatgatttaagcatgtttttggcatgacatttttgaaaac

SEQ ID NO: 120865 - DNA, 1026 bp, Homo sapiens
ggagtgaagggttggctgggaccacgactggagagagttgggaggggatcgtgagggaggagctgcggacagcccgtgtagtcaactctttggcaaaatttgatgatgaaaggcgaggagcagagaaacggagtgggagctggaaggatgtgcacaagggaaagaggttttttggaagtgttggtaatttgtgtgctgatgggaaagatcagtggagagggagtgactgatcaagagaaacgagttgggtcagttgagcaaaaagcccttgagaaggtctgaggggaagatctggcctttgtaagggggtgggggatacttcaggaacttgctccatcatgacagggaagaaaaactgataagggggcagatgctaaggagtgggcaggcaggggactctgtggaggaccgagatgctctgcctccccaggctgaggctgccctgtccctgggaaggagtttgggcttaggacttgataccagccagagactcaagggttaagactgcatcagaaatggtactgcatttttctgaacatttgactgcgttactgagcggcacagaggaaagagtgaattctttagcttggagaaaagagtcttcagttaaagtaatttgggcctcacattaaatttatttgaaaactatgattagaaaaagacttctgtgattttcagccctgttcagagttggtgggtactgtcataggttttgagcaagaagctcaaaagaaaaaaaagcaaaaaaaaaaaaaaagcaaaggctgcctgttgtttaggttgtctttcacaaaaaatatcccatggactaccagcctcggtggttcccagccatggggtctgcatgggaggtgggtggaaaaggagagagtcagagctggattgagatccagctctacaccaaggctctggactagtcgacctccgagcctctctacatctgtaaaaagagggctggtaccatcttcacctctcctcttcaagttgtgagagggaatcagatcatgtatggaaagtgcgatgtca

SEQ ID NO: 120866 - DNA, 1081 bp, Homo sapiens
atattcttttgtgtagatgtgttgtcagagacattatttaactttttcctttaaactttttcctgtaaaactgaaatttaataagctaattttggtgaaagcctctggttatctatggtagttttctttattagcttatttagaatatcaatagagaacagtatatatattgaaaaactattagacctagttttttgtttgctattacagaaactactttgaatattctgttgatgtttggagcagtagacctagttgaacctcataatttatggataggaaattgagaccccattgttcagtaatgttctttgtattaataggatctagttccaaattatttgtatatcttgtcttttaatcttcaatctggaatgtttcctcaatttttctgtgactttcatgatcttgacacttttgaagattacagaccagttattttgtcaatgtcccctcaatttgggtttgtctggttttcgtaattagattcaagttgcatctgtgacaggagtgccacagaaatcatgtgttttaaccctgtcaggtggtatgtatgattttgattagttctacaactggtgatattgatcacttgattaaagggatgtctgcaagacttctccactgtaatgttactcttttcccctatgtgatcaataagtgtgttgttgggaagtactttgagactattaagtatcctcttcattatcaaactttcaatttatttatttatatcagtatttgtggggtctcattattatgctcaaattgtcctagatttggtcaataggagccccttcaagctatctttgttctttttcatatctctatcatcctttgagctctttttcttttcctttccttttcccttctgttttttcttttcttcctggtacaacaagatgtcccaggcaatcttgagctttctcctgccccaaccctgaaatcaaccattttgccaaggatcctggttctttttagtggaaaatggtgtttacaaataagatggtatgtgtgcatgttgctgttggtgttataactctcaggctgtctcaatggagctttattttatacctatctg

SEQ ID NO: 120867 - DNA, 1377 bp, Homo sapiens
gaagttagagtgataaaatatcttgaagagatgcaaagactgggaatacatgcttaacaataaattgctacagcatttagggaaaacagtctagtaacgtgttaaagctttacctcacctaggaatttatctcatagaaatacaagtaccagtaagtgtgtatacagtgtgttcagtacagtactgctttttttgtagtcacagaggactggagacagagacgatgaatgcccttctctgaaggatgttttaataagtccacaccacagaatattatgcagtcattaacagaaaaaaaatcaatgaaagctaagatgcacaaaagcatgtgtagtatttgattttcataagtcaaactaacagatctttagaaatgtgtgtgtaaatatgtgtaaatggagaccatatacaaaaacttactatgttaatatatgttatagagaaaggatggagcagagagtaaaaggaggatccaaaaaaaaataaaaaggagtaaatacattcttaaaaagtgttggccaagcacatcggctcactcctgtaatcccagcattttgggaggccaaggcaggcagattgcttaaacccaagagtttgagaccagcctaagcaacatggcaaaatcccattcctacaaaaaaaaaaaataataacaaaaattagccaggcgtggtggcacacacctgcagtcccaactatttgggaagctaaggtaagaggattgcttgagcccgggaggttgaggctgcagtgagctgttatcaacaccattgcattccagcctgggcaacagagtgaaaccctgttacaaaaaaaaaaaaagaaaaaaaaagatgttgatagatttgaatagacatttctctggagcagatacacaagcagttaagataccacctcacacctattaggatggcttctgtcaaaaaaataaataaatatataaataaaaatggataggcatgcacctatagtctcagctactctggaggctgaggcaggaggattgcttgagcccaggagttcaaggctgtagtatgtgatcatggtacctgtgaatagcctctgggcaacatagcaagactccgtctctaagggaaaaaaagtgttggcaaggatatggagaaattaaaacctttgtgcactactggtaggaaggtaaaatggtatagccactgtgggaaacagtccagcaattcctcaaaacattaaaaatagaattaccatgtgatccagcaattttgcttctaggtatatatgcaaaataattgaaaacaggtttcaaagagatattttacacccccgttcaagcatcataattcacaatagccaaaaggtagcagcaacccaagtgtctgctaatgaaggaatggagaaaca

SEQ ID NO: 120868 - DNA, 1079 bp, Homo sapiens
gatatgatgcagaagtaatgaaagtctgatttcatcagaaacagtgtaatgctgctgtggtttagctccaccagcatacaatgacatcttgggagcttagtagctgttactgcctatttgggctggtaaactgccattgtgctccagaagaaagaatcgatatttatacaggattccacagtttccatagtgaatcaatatctatacaggattctattggtagaaatcattccagttattgttctcatagcagtgttatcttcttgacttcctccagcactgacttttcattataatccttaaacatttggtcattgtggattagaggtgaatctcccccttgttgtttagaattaccagcagttgcagagagattttatggaggatgatcacgagcgagcagtgtcggtgactgctctatctgtccagttcttcaccgcacctactctggtgagtagtgcttgccttttctttgtaactgatagctggcactccttgcctttttttgccttcttaatagaactatgagcgtttgcagagtgattatgtgacagatgaccacgacagagagttttcagtcgcagacctctcggttcagatattcacggttccttcacttgtaagtactgaaagactagaagaactttcttgttttccattaacagaggccttaaaataatagagaactaaagtctgtatattcctgaaaagaatagtattttattaatgggtaatcagacttcaaacaccttcactattcttttactagaatataaccttgaatatcaaagtcatctggtaggggggaagtcatttaaacttaatttatactttctcttcagagtaaaggagagggaaacaatctacaatttttcatagtacttccctgagattttgaactgattagttcacattaagccgattgatttcacaaattatccttcacgttagaattagacagcatattgtacaccgtctcacaatttgagaagtcctcctcccacctccctcccaaaaggggagatgtagctaaggcaattgaatcctgatgattggatggtcttttactgagcttcacg

SEQ ID NO: 120869 - DNA, 1008 bp, Homo sapiens
aataacaagagacctgtccttttcccacacttcagggcttttctaagaaaggtgcctttatgcaagggcatgagggaaggtccatacaaaggaatgagcagttgagaaaacctggaggagtagggtggagcattacctcttggcaaatagaggaaaaccaggacacttgaagatccttgaacctggagtgaaattgtataggtttaagagcattttatagttactttattaataaggcatattaaaaataactgaatttttcaccatattacttttatgttaaaggatatattctaatacagtggaagctgactggagtctgtttacccattaatgagctagtatgataggccaaattaaggatttttgcattttgtcttaaaaacatgagaaggcattaaagaattttaagtggtatttacataattacatttgtgattttaaaagatcatgctgtctgtaatttggagaacaaattggacgaggataaaagtgagtgtgggaaacctaatcagatgctaaagcaatgacccagggaaaaattgatggtaactcgaactgggatgctgaaagtggatatgaatcatgggggatatttttaggtggtgaaatctacagaaccggccaagtgggtttgagggttgttggacttgctgacgaactggatgtcgggtttgaagaagcataaggatgattcgcaagcatctggcttgcagctgagtagatgctgtgccacttgctgaatgattagcatttgtaaagagggaaagtgatgcttttagtttagtcagggttgagttccagaagcctctgagatgatcctgtgtgtattcatatctgtgcttccctccttcattgaaccatttccatgccagtaccacagttgtaataattatttatagcttaatatcccattttgacatcttaaatcccatttcatttgatagcttaaatctcctttcattattattttccaaaatgttttcgcttattcttaggcctttttca

SEQ ID NO: 120870 - DNA, 1027 bp, Homo sapiens
tggcaattggagtaagtaattgttatttagaaatacacagtaatgcatttatgatatatagttgtgttgaaaaaggtttaaactgaaggagctaaacaatgttggtgactttttttttagtcttcctagtacatagtttttgattaccatgcactctgataaactttgtttttaggctcgaatgctcatcacagaagaaaacttaatgagcattatcattaagacttttatggatcatttgagacatcgagatgcccagggcagatttcagtttgaacgatacactgctttacaagccttcaaatttaggagagtacagagccttattttagatctcaagtaagttttcatttaattattaaaccagttgcaatttatagaaagtcaatgtttatgttaattgccactgtcacttttatcttgttcaggtatgtgttaattagcaaaccaactgaatggtcagatgagctgaggcagaagttcctagaagggtttgatgcctttttggaattactaaaatgtatgcaggtatgtaaaaactgttacacttttctttttccttttttttttttctcttttctctttttttttttttttttaatttttctttttctttttaagagatgggggtctcactgtgttgcccagggtggagtgtagtggctagtcatagacacaaccatagtgtactatacctttgaactcctggtctctggcagttctcctgcctcagcctccaaagttgcctgggactagaggcgcaggcacgggcccaggcccagcttctttgttgttgttgttgttgttgttgttgttgttcattgaaatgaacagctttctgtctgcgcatcttttcatttcgtgcacatttccaaaagatcaatttggatggctgcaattctgaccaggaagctcctctttaattggaaattcttagaaaggtatggagcaaaggagatcccagcaaacattccggcatctactgctcttgggttttttctgtgttggttttttttgttttgttttg

SEQ ID NO: 120871 - DNA, 1014 bp, Homo sapiens
ttaaaagcttgtcacatttcttttaacaattttttctatagaccatagagctaaaaaggaaggattattgcagtgaaatattgaagtattttattgcctaaaacagatcttagatgatacctctgaaataatgtgtttattgggatttctaaatttatattttagagaatgttatataaacacataattttaaaagctattatttctcatagtacttgaagtttcctgttaaaacttataccttctatgtttttataatcaatatatatttctcctacattacttcttaggtttccatataaaagaacaactattattttcattcatatataattttttcacttccgttaagggaatggatccaattacacgtcaagtaggacaacatattgaaatggaaccagagtgggaagcagccttcacactacaaatgaaattaacacatgtcatttcaatgatgcaggactggtgtgcttcagatgtgagtttcttctgggtgcggggaataggaggaaagtggaagagggaggaataagcagaatcctaagtaaatttcaaggagatctggagaaaatagtggtgatacttagttcattaaacagcgtattttccttctccacctataaactcagtaaaattttaaaattctacagcctgaggaaaaacttgaaaaatagagaaagaaataatccagattgtctcttccctaatgtaactatctttgttttttttccataatcccttctagactttgaggatataaaaatggtagtttctaaatttattcaaaaataaagttttattattggtacatttgtcctgtgtcttaaaattattttggccttcctttggcgataaagtctagatgagagcctgtatacattatgaggttagggaggtttctgtaaggtctgaacaatctgtaaaagttaatggaacaatgagtaaatgatattcctgactgagaagacagctgcattatagtctgtgatgacagggactagggtagtccta

SEQ ID NO: 120872 - DNA, 1051 bp, Homo sapiens
tttcagtacagctttcatatttcttgattctaggtattcttttcttgctcgcacactgttgttttctttagttccgttttaactcagagaacagaaagaaattttgaaggtatttttactcattgtaaaatatgtagtttatgttaagtttgtggctcagtagcttaatgtgatgtgagggtatgttttttgttttgttttgtttttttctggaggagattgtagagagtttgtttcatttcttccttaaatgtttgacagaattcaccagtgaagtcatctcatctgatgctttaggttttggaaggttattaataattgactcaatttctttaatagatacgggcctgtttaggttatctttttctccttgtgtgagttttggtagtctgtgtctttcagggaattgatccatttcatctaagttatcagatttgtgggcctagagttgttaatattccttcattatccttttaatgtacatggggtcagtagtaatgattcctctttcattctgaaggcattttttttcattgttctgagacctatcacattatcccactgatagacccttgccatgggtatattattgaagtcatggtaatttaagataattacttactctgaggcttataaagttgttattcctagacatatgaatatcaaatggtacaatagaccattacctagaatgaaatcatgatcgtaagaagaaatctctcttatttctataacttgttcaggcccagttttgtttttataagtgttttgagcaactgaactgtcaatcctcaacacaggcaattgatggcatggtgttgtggaaaagtattggacagaaggcaagaaagtgaggcatgcgtgtggaagtagcacgcaggcgcagcgtggcatgccctgcacgtgcccttaaaaaaaaaaaaggcaagaaattgagtaatgagtcctgtctccaactgagccactgatctcttctgcctttaaaaatcagagtgagactctgtctcaaaaaaaaaaagtctaattttatgggaggaagctgatgctgata

SEQ ID NO: 120873 - DNA, 1038 bp, Homo sapiens
aattaataataataataagcctcttatgaatatagatcattttctatcttaattggtaatttgataggttcccaaagagaaaagaagttagatataaagttgagtgaatatttagggtatttttcctaaatgatttttactgatagaaatactgttttttgtttgttctttcatgcaggtttacatgtattattaagcaaaagtgaagtggcatataaatttccagagctcctacctctagtaagtggtgcttacatttaaaagtgaatacttatttattatgttctttgtatttggaatcactttgaaacacatttttagtttgggttctccagaggaacagaaccagtaaggtgtgtgtgtgtgtgtgtgtgtgtgtgtgtgtgtgtgtgtgtgtgtgtgtgtatagatacatatatagagagagagagacagagatttgttgtaaggaactggctcatgaaattgtgggggctgaaatctggcaagtctgaaatatgcaggggagcctagcagactggcagactggagagacccagggaagagttgatgctgcagtcttgagtacagtggctgtcataaaggcagaattccttcttccatgggggacgtcagtcttttctcaaggccttcaactgaactgatgaagcccacccatgtttggagggtaatctgctttactcagagtctatgatttttttttatttttatttttttgagacagagtctcactctgtcacccaggctggaatgcagtggcgcaatcttggctcactgcaacctctacctccatggtttaaggaattctcctgcctcagcctcccaagaagctggaatacaggtgcctgccaccactcccagctaatttttgtatttttagtagagacagggtttcaccatgttgcccaggctggtctggaactcgtgatctcaggtgatccacctgcctcagcctcccaaagtgctgagattacaggtgcgagctaccatgctcagccagtctatgatttaaatgttaatcatgtgtaaaaaatacct

SEQ ID NO: 120874 - DNA, 1450 bp, Homo sapiens
tctttctgaaaatgtcttgcccatcttttttgcttgttaaacattgttttctgttaactatgatgattgtccttggtggaatgaatatttaaatgtaagctttcctagtgaataacctcctattcagaggaataataaatatgttaacacagaaatagtttgtgctaagtcctctgggttgatgttatctcagatcttaagacctttctaggggaaaagatagactttcttctgtactgctgctactttcgtggctctttttatgcatttgaccttgagaatgtaaaataatagctttaaggtgtgtgttaatgaatattctttgagttaaaactatcaaaagtaacaaagagatagtttctaaagcatgttctgtaaaagaaaccaataataacaactgtattttcagcactcccacctccggtgttgcctccattctgccctctgtttgcaagcctggttaacattttgcagtcagatgtcatgttgtgcatcatgggaacaattctgcaatgggctgtggaacataatggatatgcctggtcagagtccatgctgcaaagggtaggtttgaagacatttattatttatattttagtattttatagtacaagcaaaatattcttgtctgtatctatacacaggaaaactaggccgaaatgtattgtgttttcctaacttgaatatattgttactgcttttgtgtctgacagtaaaaacaagtgccagacagatttttttataccacatggttgttattacctcagtcccactgggcagttgttctctcctagattggtccttgtctttatatatgtagtattctgatattgatataatgtgttatcttttatatatgtttctaatctaattattttccaaaacaaaaattttttttgaatcatccatatccttattttgtagttgaagaaactgacactcatagacttacggtcctatagctagttaagtggcaagtctggaaccttgtttgtgttatttttgtttttgtgtttttgagacaggatctagctttgtcacccaggaagctggagtgcagtggtgcaatcttggctcactgcaacctctgcctcctgggttcaagtgatcccgccacctcagtatcccaagtacctgggattacaggcatgcatcacaacatctgcgtaatttctgtatttttggtagaaacagttttgccatgttccccaggctggtctcaaactcccagactcaagcaatcctcccccctcggcctccccaagtattgggattacatgcgtgagccactatgcccagccccttgtttgtattttactttatagttttaatgtaagccgttcgtacactatctcattgaattcacacaacaccccatgaatagatacaacttttttctcattgttagatgaggaagccaagtttcaatgaggttccattaacttcccat

SEQ ID NO: 120875 - DNA, 1068 bp, Homo sapiens
ttttgttttgttttgttttgttttgtaatgcagaaaaatatgatccattattcatgcaccctgatctgtcttgtggaacacacactagtagctgtgggcacattatgcatgcccattgttggcaaaggtaatgtatattcttaatatttgtcaagagaagtttatctaagggctcaatattttttaaatagaggaaatttcattctagaaaaaaggaaaagaactaaaaatgttgaaaaaatccgtatcattgcctaataaataacaaaagttatttgccttgtcatagatgtaaagtgtatgtcagatatgttttttaatttagctttatatccaagtctcttctatatcttccaaagaaggaagtggatctgtatcagtctgtggatgaagaaaagggtttttacagtaggataaactctagaagggtaatgttgtctttctttgggtccagggtggacaacttttgattccatagatgttagtacttgctttgttacttcccaaaattgtaatggctccctgtgatgagatgtcctgaatttgttctaccttggtgtttcctatgcttctacaaaaccaacaaatcaataatactattattctagaactatgctcacccagttatcatgaactacccctaacaactagccaccacattgtagtcccagctacttgggaggctgagacaggagaattgcttgaatgtgggaggtggaggttgcagtgaaccaagattgtgcaactgcactccagcctgggcgacagagcaagactccatctcaaaaacaacaacaacaacaaaaaaaaaacaaatagccaccagccttggggaagtggcaagagaacaatgacaccaagaaatttttgttgctgctttgtgaatgcttttttacatggcagtctttttttttattttactcttttagaacttttaatccatttggatttttaaaatcactcaaaaatcatgttaaaaataatttagtttaagattttcatttttgaactatttgtggaaacaaattattttaaatgttgaagcttatggctgtcatttatgtaaat

SEQ ID NO: 120876 - DNA, 1029 bp, Homo sapiens
gctttttaattataaaagaatatcgtggtactgacttatctgcatttgaactgatgaagaaattaattattgttagatggaggattaactgtgtataagaagaaatcacccttgttggatttcatctgtcactttattggtccaatttttgggttttgcccatgagattcaattatggtttagtcatattcgaatacaatcataaaaagaacacaggctttggaatctgacagagccaagtttgaatgctagctttgtcccttattcggccttagtcaagttacatagctctaaacctcagtttcctcatctgtaaaatggggacaataataaaacctattacaaaatataggaatacaacctatgcaaataataatacaacctgaaacaaaatgtagggatattttgaggattaagtctaataccataagatatttacagtaaaattccttactaagtgcttgtaacataataagcacttggtagatattaatagtgatggtgattatgatacttaagaaattctagcaaattccaatactgaagagtgagatttttaatacacagtgttattaccatcatattgacaaataatatattcctttccattggccaatatcctgattttttttaatgcaacaaattttcccttatcctttttgtttttaatatttggagtgtgtctaaaatatgcctgtgatcatttaaggagtcttttgtatcttaaggaacaataataaaacactaaatactctctataatcttttctagcaggttaaatttttcagaccaaccaaatctgactcagtggattagaacaatatctcagcaaataaaagcattacagtttcttaggaaagaagaaagtactcctagtaagttctggtaacctgttttcatttttccctaaagtccgaggtcatcagaaaatgtatttccagaagaagttgtttaaaagtgaaacctcccatttaaaattttgactcattctaattttccttgtcttaataaactaaatttgactttact

SEQ ID NO: 120877 - DNA, 1007 bp, Homo sapiens
tatactattacttctattttctattactactttttttttttcttttttgagacagagtgttgttcttgtcacccaggatggagtgcagtggcacgatctcagctcactgcaacctctgccacccaggttcaagggattctcatgcctcagccttccaagtagctgggactacaggcatgcaccaccatgtcccactcattttttgtatttttagtggagacagggttttaccatgttggccaggctggtctcgaactcctgacctcaagtgattcacccaccctggcctcccaaagtgctaggattacatgctgagccaccgcacccaggcttgtaactctgttacttctgaaaactgtaagatactctctttatctcttcagtgttccgaaattttctatgatatttcttggtatatgaatctttttttattcattttgctaggcgttcagtaaacctattgaatctgaacattcatgtccttcatttctgagaattttttatgttgtttcttaaataattttctcttggattttcttctttgaggtagttctgttagctcactgttgcccctcttgaactgataacctaattttcttatgattttttttgctttctacattgtctctgttttccctgagttctgtttctctgctcctttgttttggtttatctctttgatgctttccttaaatgtttattagtccttggataactatttaagcataaggcaatgagcataaggatacctggtggacaggttggagcttgctgacttgtaagcctcacaataaggtgatcaggacacctccagtcttttgcttggtgacccccgaatgtctgtgtaaaaacaactttcccctgaggattgttcactggaaaaactaatctctgtggaagtgggtatacattgctgatgttctcaggatgggaaacagggtcaaggatctcattgtgtagtgtgtaggcttgtgcccagcaccctgttttcagccctgtgcctcacc

SEQ ID NO: 120878 - DNA, 1051 bp, Homo sapiens
actaaaggttcatcccaatgaagaggatcctcgtgttcccataatgtgttggggtagctgcgcgtacaccatccaaagcataggtaagagatttacagctgtttctctataagtcacaagcattcattgatatgaattaggcatagaatcttgtttttaaatgaaatgtttgaagtgggtaacaacgtgaagaaataataaaaagacttagaagcaagaaatgtaatgtactgacaaaatactagattgatagttcataaattaaccacagcaacagagaactcttggtggtggtggttatagcttcttgtcagttgaaggaatgtactgttcgtttttactttgtaaccaaatttaattcttgtgaaatgactttgaagattctgaaacttgacaatattgtactttctgtaggattggggtttttttaacctttttaagaaaattatattaaaatatacataacataacatttaccattttaaccatctttaatctgtagaaagaattttgagtgatgaagataaaccattgtttggtcctttaccttgcagactggtaagttctcagtttattcagttcatgatagtggggcatggaaattaggtggttctgctgcttttaatcttatggacctgcagtagttacttacaccttcacttctttcgtagtaaaaacccattttctgtaaggatattaaaaagtaatgtttgtggtttaatctttcttttaaataaacttcaggaggccgggcgcagtggcccacgcctgtaatcccagcactttgggaggccgaggcaggaggatcacctgaggtcgggagtttaagaccagcctgaccaacatggagaaacctcgtctctactaaaaacacaaaattagccaggcgtggtggcgcatgcctatagtcccagctactcaggaggcagaggcaagacaatcgcttgaacccgggaggcagaggttgcggtgagctgagattgtgccattgcactccagcctgggcaacaagagtgaaactccatctcaaaaaaaaaaaaaaaaaaaaatt

SEQ ID NO: 120879 - DNA, 1018 bp, Homo sapiens
tccgcatcttggcttgtttatttgttttttgagatagagtctcgctctgttttccaggctggagtgcagtggtgtgatctcagctcactgcaacctctgcctccagggttcaagtgattctccttcctcagcctctcgagtagctgggattacaggtgtgagccaccacacccggcctgcactggcatcttgggagtgtcccttgctttctgtcagatgcgtatattctatattcttttcttttccagagaaaaccagcaacatggtggcaaagagatagatttcatttattcagcacacacttagacatttcccattccatttatcctgtgttagaggcatgtcattgagatgtcatagatctagttccataccatctagagcagtttcattgtgcatccagctgtgctctgaactagcattcctgaaagagaactgctttgcatttttgttttttgttaattgcgttggtttattttaggatgactgtcttaggtcattgacgagatttgccgcagcacactggacagtggcatcagtttcagtggtgcaaggacatttttgtaaactttttgcatgtgagtattaatacatttataacatgttgtaatttttcatcctctgaaattttgtttttaatggtacagcttctctcagtaatgaattaaatatttagtagtactggttttcttatatataagctctagcttataaattctcatgtgtcttgcaagaagataaatttaaagcagattatatgcattttaacatgttggcatatgaaatatgctaatgtatttctctttaaatctgtagcactggtgcctaatgacagccatgaggaacttccatgcatattagatattgacatgtttcatttattggtgggtattgtgcagtttgtttggacttctacgtcatactatgtaactttaccttaggtttggtgagcagtgtagtggcagacaggaaggagttatgtgatttccttaccccttctgagtataattcttttatg

SEQ ID NO: 120880 - DNA, 1050 bp, Homo sapiens
ctgcgactacaggcacatgccaccacacccagctaatttttgtatttttagtagagaagggcttttgccatattgcccaggctggtctcaaactcctgggatcaagtaatcttcccgcctcagcctccgaaagtgcagggattacaggcatgagcacctggccaaaaaagttttatttttaatatgaatgttctagctccagataatgttagcttggcattaatacaaattaatatagactagtttttctagagtatccaaattagtaagataatgatgtttatagtcacaaattgtatatatttaagcattcttgcttttagaaaatattctcctgattttaaaagttgtaggcaaaatagtatttctacaggtttcttttgatgaagtaaatatgttaggtcaagaatattattttcctcttattggctatggaggggaaaaaattctagttctaaccctttaaaagtgttttgtgtttttccccctctgtttacattaaagttggtgccgtaacagtgaagttaaaagatatctagaaggtgaaagagatgctataaggtaagttaaagagcctcaaaaactttattgaggtgggagaaagggtggaatcaggatataagtgctatattccttcagaaactgacttctcaagcctttagtgattccaaaaggttaagatatgttgccttcatattttcttcttaatctaatgagagtctatcaaagtcagaattatgaacataaatatactacattcttggcagagaaagcaaataacaaagttatattttaggatatttgctttaaaaaatataacacgtctcctaggtttttcttagctctatttttttctatctttcattatgggaaaactctccagaagtgtgaagagtaaaataatgaggctccacatacttgtcattcaccttcaataactatcagtcaaatcatggccagtcatttcttataattattttttcttcatttctttttacattctattctgattctatagtaaagtgtgctctaccagatcctaacaagatg

SEQ ID NO: 120881 - DNA, 1011 bp, Homo sapiens
ttttactcctataattcttcttttgtgttctcctctgccctcttccctttttacacgttaccaacaaaatgggcaatgaattggtagttttagcctctcaacccagaccctccttatcccccgcaacctctattccctcacctcactctgggtaagtctggtttgtgtacctttccttcctcatttcagcacttattcccttttacctgctcttggcaaagggtcagagctgatgtttttgttaatagccacagtcacctgccagacagaaatgttgcagggagtctaaaaccaataacttgtaaccttgcctaaatcaggaagggttgggttataatagaggaataaacagaacacattctgagtgacatgtgtcttctctttctagacggggaaatcctttacatttatgcaaagagcgattcaagaagattcagaagctctggcaccaacacagtgtcacagaggaaattggacatgcacaggaagccaatcagacactggttggcattgactggcaacatttataattattgcaccaccaaaaaacacaaacttggatttttttaacccagttggctttttaagaaagaaagaagttctgctgaatttggaaataaattctttatttaaactttccttcccagttttatagtttctggttctgaggactgatgaaaatcatcttccatcagcagattttcttgcactgtttgctgtgcccctcaaatataatgtcttgggttttaagatcgagcaaggagcttctcttcctagattggatcccagcccctttgtgggggtctgactgcatagtcccagccattatgtgatatttcacgttattgatgatagtgaaccgtgggtccgaagctgactcaacggaggcagggaacaaagtctctgtggtctgttgggtcatacttcctggttccactgagtggcccaacactgggactgggttggtgtcccctctgctgacaggaccctactcctaggagcaaagtggtt

SEQ ID NO: 120882 - DNA, 1657 bp, Homo sapiens
gctgctgcttccttgctggctcacttagtgcattcctgggatggtctggcacccaggctttttattctttttgatcattgttcttactgaggtgccttcctagaacaagagccacttacaaaatagcttataattattatgtaccacacaactactattgtttgatgtatgactgctgagagcttgaatacatgcagagagtgactgaagacttagtagaggaataaattctgagcctgtctaaggtggggctaaggaacagatgagtaataagaggctcttggatttttttaaccaatgcaactgaccctttcaatcagttttctttgaattacatctacaagttttgttccactcagctaccagtcaactaggcatgctccacagtatcacaggaagaaggtcagaaatctggaactgaagctaaaagaagtgaggatgtagaagccacattcctctccaaggtagtgtgtgaaagaaccgccccctcttgacaggaggatgaccgtcgccattcttgcgtgggactgactcacccagctgagaggaggaccaatagaaagaaaattcacatttgagtccacctctctccccctttttctggccttcattcataagatctggttgtttgggctgtaggtggcataattcatgtttattttggcctctgtcacatccagtttctttagcttttaaggtaagcttcttttggctttttttcatatgttcaccaagctaaaatttaaaataataagaccaggtttctctctgtacaagtggattataaacattttcaccaaatcataacaatactccagctttccggtccgacttcctaggagcctggagttagcaaaggttgtctctggatttcattctctgagaatatcacagagcctgggagaagatgaatttacatgaaattgcaacatacacacctttttattttctggtgttaagctagttgtctttcctaccttacaaatcatgttagttttatgatttgttccgcatgttttatgtttattgtagaaatgtttatataacatacgctttccatatcagggaaaatcatatctgtttaataaattggctataactttaatatctgtggacaacttgtaaaatttggaatgtatcatatgtaaaaagtttaaagatatccaaataaatgctttaggtgttggcattacttttggttagcatatatctttctgtttcattttacacatttacctgccacagcaaggtgcccgtgtcaccttgctacaaatatagtgggatatctgtattagctttaaatttaagagggttatattattatggccactagccaaactatcttgaccttctcagagaaagtgtgatcatcatttcagctgattaagtttcatattcattagccatgacagcgtgtgacctttgtggaccattttggaactcaaatcactgggaaacagggcactccaagacctgtgtctgggtttaaactcttgttcatccttacctggtgatctcaaggtccttgtccttacacactcccctagtgtgctggctggtttttcagggctgttggaggttttttttttcttttttttatgaccacttcctgcttttgagagagagacatagaaaggcagctacactgtcttcctag

SEQ ID NO: 120883 - DNA, 1256 bp, Homo sapiens
gcaaaggaagcagtaattaatctgtcagagaagggagggctccttcctgcttccggaccatgttggatgtgagtctagatgcgagacatctattatagagataatagaagaggttagcggaaccaaggatggttcacttttcttctttagaaataccattaatgctgatcgtcttcgccgccgcctgcgtgctcgccttcgcgcccggcccggcctcgccccggtcttcgcctccgcctcggccgcagagcttgccccctccccacccgcagacaatgtccgagtccaagaacggccccgagtatgcttcgtttttcgccgtcatggcagcctcggccgccatggtcttcagcgccccgcgcgctgcctatggcacggtcaagaccggtgccggcatcgcggccatgtctgtcatgcggccggagctgatcatgaagtccatcatcccggtggtcacggctggcatcatcgccatctatggcctggtggtgacagtcctcatcgccagctccccgaatgacgacatcagcctctacaggagctgcctccagctagcgccggcctgagcgtgggcctgagcggcctggcagccggctttgccatagacatcttgggggacgccggtgtgcgagccacggcccagcagccccgactattcatgggcatgatcctgatcctcatcttccccgaggtgctcggcctgtacggtctcgtcgttgccctcatcctctccacagagtagcccctctccgagcccaccagccaccgaatatgatgtaaaaaccacccctcctcattccagaacgaagagcctgacacacacgcacgggaccgcggcccccagtagttgatcttgtacatgcgcagcgcagcgtcctagtgccggttgtctgttgccctggccttgcccccaccccaccccccacgccgccccgtgccatggacatctgggtccactcatcgcccctccaggcccccggtgccccaccccctagagtgctctgtgtattcggatgacttagagttgtcatttctcttcactggatgtttatttataaagatctggcctgttcccgcgtctgcggagaggccctggtctcccagctgtctataaccttagctagagtgtggccttgtgggctcctgttgctgagacctcctggatggagctgccctcgccaccgggcccttggccctgcacggagctctgtccaataaagttctcggatttggggggaaaaaaaagaaatgaccat

SEQ ID NO: 120884 - DNA, 1058 bp, Homo sapiens
gcctctatatctgcatccccacccctgtgggggtggcggggggtggtgggggggtcctgtctgaagtggtagggaaggagggttttgaggtttttgactatttgcttgcaagtatctaagtaagagatttgtttgcccacatttgcactctcttggctagcaacccgacaaaatattttctgatggtttttcgtgtatgtggtttttgtttttgagggagagaataattaacaccttggttaaattgtactgagatacaatggctgtttttaaaaattgctgttaactgaagggttgaagctagtataattcccaggctcagcctcttgggaggctgagtctccaatagcatagtcttcaatagactatgctgtgaattgtaatcagaaaagaaaaaaaaattagacacgagcaaaagcaattaaagtatttattctccaatattcgcatttctgcatttgtcagcagctgtggaactgtcacaagatatgctgatttggttgtggtatgtgcctgtctggggaggggaggaggaggatgaaggcagactgtaaacaaatcattattgtaaagtgatcagtgggtaatagaggcgtgtatagagtgcatagagaagggactcactcattttaagcaatgtttttcaaatggggtcacctccattagtgaatcatgaagtcctttaccaagtgcctaacagcatttgaaaaaataaagacaatatagaatgaaatacatcaagatgcatcctccatagtaggtttagatatttttttttcaaaaacctttgtttcaattatatatctactgaattacaatgtgaaatgtgtttcttgggattgagtctcaagcaaagatgtttgaaagccactgagttaggcgacgggagaaggcttcccagaggaggtggcattggagctgggccttgaagaatggtggacttgtgccacaggaaaagggaattccaggcagatgggaaaggatatgtccaaatctggatctgtttgttcaggggcagggtattctctgtaaagggaccacagggtactaggagagga

SEQ ID NO: 120885 - DNA, 1979 bp, Homo sapiens
attctggagatgggactggggtcgcgcggccttctccttccccacgcccccagacccaaaagacgaggccgccggctcggagcgggaagggctggggccagcttcttcctcctaaccacttgtttgtgatggaagaagggggctgggggtcgagcctcgcggctgatgggttccctccctgaccccgcacccccactcctcccagtcgaaattggaggtgaggcgctcctgccattttctctcctgcggtctgagagtggacgtctttgtcttctctggcccggcgtgggggcagggcattgagccttttccttaattcttcagttattgaaagtagagtccaaccaggttacaaaactaaaaaaaagagtccaggacattgtctgtctgccttccggtagcatggttctctgtgggtaccctacgcttcgtttcttagttttactctaaaacaaccctgaggagacatttactagttgtcagattacgggaaggtgatgggttccagttttttgaaactttttttgttggctttcatattacttcaaatggcagtgaattaaaacagtttcttagaactctaatctgaaaagttaaatacgctttaaaacagtctgaaactcttctaaaaagcaaaactgcattattaaaagcatccatgtaagtatctgttggtagtatctattagagatgggggaggggtttaacttttacattattattgaaaagaggaggggaaaggtctataaagctctgatctctctagaagtccacatacatggaaagtaaatagttaatttctagtgtagaaaaataacaccgtggtgccagtaggtgtgtccttgtgtttataaatatacatagtggatgttttagaccatttaatgagacctattatatattgaatacctgctgtatgccaggaactgtgcctgatgctttgtataatttctattatatcagcccagaaatagtgattttatgatctgtctaccggggaatgaactaacgttcatagaagtatagtaattgttcgaggtcttgcagttttaagtagtaaagttgccattggatcacaaaagctgtattcttccccctacacctatggtttccaaatgtgagcatcagaattaatttgggagatgtttttaaatagagatttgtaacatcacctcttccaccatcatttgctagggccaactgggtcttttaataatgtgtcaggcactccaacttcttgatgttcaatattgacattctggcccaccctgcacccgctatatccaaagatctagtattccaaagctctccaggtgattccagtgacacagacacacgtttggactgtcttgtactatgctatgcactgttctgctcttttttgaattggaacatgagaattgaggtccatgtaattttgagtttcagtagttttttgctcacattagtctcatttttgtttttcctcttgtagctgccatttatcaaatcgaaattatttcctcagagaaaaaggtttaggtatcctaagactttaaaatctcagtacgtttttttttaaagtatgttgtctcattctattgagaagttatacaacatacaggcttctaggtctagccaggccatctagtttagtcaagacagctgtgtaacaaacgtagccttgaggcctggcacggtggctcatgcctgtaatcccagcacttttgaggctgaggcgggcggattacctgaagtcaggagttagagaccagcctgtccaacgtggtgaaaccccgtctgtactaaaaatacaaaaaagctagccgagtgtggtggcaggtgcctgtaatcccagctacttgggaggctgaggcgagagaatcacttgaactggggaggcagaggttgcagtggcccgagaccccaccattgcactccagtccgggaaacaagaacgaaactcccatctcaaaaaaaaaaaaaagaattgaatccag

SEQ ID NO: 120886 - DNA, 2071 bp, Homo sapiens
cttggaggactggaagttggtctgggtgagtcagtgagtggtgaaagaatgtgaaggcctaggacactgtgcactactgtgaacttaataaacaccatacacttaggctacattaagcttataaaatatttttccttcctcaataataagcttagcttactgtaactttttttcttatgaacatttttggtttttttctgagacagtatcttggtcacccagggttgaagtccagtggcgtgatcatagctgcagcctccatctcgtgggttcaagcagccctctcacctcagcctctactgagtagctgggattacatgcatgtaccaccatgcccagctaatttttttttttttttaaatgtagagatgagttcttgctatgttgcccaagctggtctcaaactcctggcctcaagcagtcctcctgcctcagcctcccacagtgttgggattacaggtgtaagccactccgcttggcctagatttcatttaaccctgagactttttagaagtgcaaataagtatatttagaaattgatgctgagtgtggtggcttatgcttgtaatcccgcactttgggaggccgaagtaggtgaatcacttgaggtcaggaatttgagaccagcctggccaacatgaagaaaccccatctctactaaaaatacaaaaattagccaggtgtggtggcaggtacctgtaatcccagctattctggaggctgaggcacaagaattgtttgaatctgggaggcggaggttgcagtgagccaaaatcgtgccactgcactccagactgggcgacgagagtgaaactctgtcacaaagaaaaagaaaaaaaggagaaagaaattggctggctggtttattttatttattttttgagatggaatctcactctgttgcccaggctggagtgcagtggcacaatctcagctcactgcaaactccacctcccgggtttaagtgattcttgtgcctcagcctccccagtagctaggatttacaagcgcatgccaccatgcccagctaatttttttttttttttttttttttttttttttttttttttgagacagagtctcgctctgttacccagactggagtgcattggcgtgatctcagctcactgcaagctctgcctcccaggtccatgccattctcctgcctcagcctcccgagtagctgggattacagacccagctaatttttttttttttttttttttttttttttgtatttttagtagagacggggtttcactgtgttagccaggatggtctcaatctcctgacctcatgatccacccgcctcggcctcccaaagtgctgggattacaggtgtgagccaccatgcctggctgctaatttttgtatttttagtagagatggggtttcaccagttggctagtctggtctccaactcctaacttcaagtgatccaccagccttggcctcccaaagtgctgggattacaggcgtgagccaccgcgcctgaccaggttggtttattcttattttccatttgtattgtgattctccaaatctgtgagagttttaggatggagaaatctgtgaaagtcaaccccttttctctaggtgtaatcacacaacatgaaggtttacaactgggatgtttttggcgctacttctatgcgtaggcctcaagatgacttttttttttttttttttttttttgagacagggtcttgctctgttgcccgggctggagtacagtggccccatctcagctcactgaagcttcactagtagctgggactacaggtgcacaccatcatgcctggataatttttgtatttttgtagagacagggtttccccatgttgtccaggcttgtctcgaactcctggacaagatgacatttttatttttatttttatttttatttttatttttatttttaaaatgtaaaactatgttacttgtttataaatcagattaaaagaaaaaatttgagacaggggctcgctgtgttgcccaagctggtcttgaactcctgagctacagtcatcttcctgcctcagcctcccagatagcacggattacaggcatg

SEQ ID NO: 120887 - DNA, 1053 bp, Homo sapiens
aggtattttaaataaaaattaaataataatcataggtttagtagagaaacagagacatgattaacataggggttgtaattcagtaattctttttttttttttccttttgagacagggtctcactctgtcacccaggctaaagtgcagcagcacaatctcagctcactgtagcctccacctcccaggcccacacgatcctcccacctcagcctcccaagtagcggggactacagtcacacaccaccatgcctggctaattttttgtgtttttttttttttgtagagacagggttttgccatgttgtacaagctggtctccaactcctagactgaagtgatcctcctgcctcagcctcccaaagtgctgggattacaggcatgagccactgtgctcagcaagtaattatttattaaatttatttcctaataaatcccaggaggcagaagtgaataataataggaaatggcacaacatcaaaacaaaaacaagattaaaaaaaaaaaaacctactaatagttttaaaatagggagaggattttactcaggtaataaatcattttctttctactctagtaaaaattagttctaaatatagatagtatatttgtttgttgttttatctctttttttcctctcttttctagagacccacaagcattgaactattttctacatggacctagtaataaatctgtaagtaatgcatagaataccacagacatctattttgtttctgctttacagttaaagtagtaaccacctattgaatttgtatctttgcagagcaatgatgacttgactaatgcaggatattctgcagccaattcaaattcaattttcgccaactctagtgtgagtattggaaactaaatgcaatgattgaatggtttctgtctgattgatgccttgtgaactgagcctttaactgcctttgtatcatgagaatccttaccttgtctgttgtaattaatttaattttatttatttattttgagatggggcctcactctgtcgcccagactggagtgcagtggtgcgatcacagctcactg

SEQ ID NO: 120888 - DNA, 1057 bp, Homo sapiens
aaatatcagaataaggtgagcagtttagagagttatgcctgagaagcagactgtcatgctttattcatattcaaaagtaagattggccaggcgcggtggctcactcctgtaatcccagcactttgggaggccgaggcgggcagatcatgaggtcaggagattgagaccatggtgaaaccccatctctactaaaaatacaaaaaattagctgggcgcggtggcaggcgcctgtagtcccagctactggggaggctgaggcaggagaatggcgtgaacccgggaggcggagcttgcagtgagccgagatcacgccactgcactccagcctgggtgacagagcgagactccatctcaaaaaaaaaaaaaaaagtaaaagtaagattaatttttatgcatccttttcaaaggttacatatgccatgtaacatactgtttatttttttagaatgctgatcctaagtcatccctcaaaggtgtaagcaaccagcttggagaagggcccagtgatggactgccactttcaagtagcctccagtttcttgaagatgaactcgagtcttctcctcttcctgatctcactgaggaccaacctttcgacattcttcagaaatccttgcaagaggccaatatcactgaacagacattggcagaagaggcatatttggatgccagtataggttcaagccaacagtttgcacaagctcagcttcatccttcttcatcagcatcctttactcaggcttctaatgtttctaattactcaggtcagacgctgcagcctataggggtgacgcatgtgcctgttggagcatcgtttgcaagcaatacagtgggtgtacaacatggctttatgcaacatgtggggatcagtgttcccagccagcatttgtctaatagcagtcagattagtggttctggtcaaatacagttaattgggtcatttggtaatcatccttccatgatgactattaataacctagatggatctcaaatcatattaaagggcagcgggcagcaagccccatcaaatgtgagtggagggctcctggttcataga

SEQ ID NO: 120889 - DNA, 1013 bp, Homo sapiens
caaaaaaaaaaagaaaagaaatattacatagaaactacacagaggaccaggcacagtgtctcacacctgtaatcccagcactctgggaggccgaggcaggtggagcactaggtcaggagtttgagaccagcctgaccaacatggtgaaatcccatctctactaaaaatacaaaaattagctgggtgtggtggcaggcgcctgtaatctcagctactcaggagcctgaggcaagataattgcttgaacccaggaggcggaggttgcagtgagctgagattgtgccactgcactccagcctgggcaacagagcaagactccatctcaaaaaaaaaaaaaaaaaaaagaaactacacagaaagcaaataatttctgtgtttctgggtgtcccgggaatttaaatggtagctgacctaaatactactatttcaactaattgtgtacccaagggtatgttccttaattttaataaacctggggtttcacttgttcctgaaaacttatagcggaaacacacttgaacacctgaaataatgcaactgacctagttcccaatgctttttggcataaaaagtcagctgctttgaagctgctagtgtaggcttctttttacctttgaataactgaaacttttgggagtcagagagaaaaaggtatttttctcccccctccctttgaagcattatttattatatagcaaagaagaaaaggaaatgaccatgctatggatgattgcttaattaattataataaacataaagctgatcaatacatacatatataaaatgatcctcaagttctatcattaagtgaaaacgtctatggcgtgttgcaggtaagtatgtgtatgcactgtgcgtgcttgtctatgcagaggatagctctgggggaatacaaagaacttacagtgaggcttctggaaggaaactggaggttggggaaagacttgtttttcactctagactactttggaactgttttacattcttactaattaactgcacattttttgttt

SEQ ID NO: 120890 - DNA, 1007 bp, Homo sapiens
ggtgcatacctgtagtcccagctacctgggaggctgaggtgggaggatcacttgagcctgggaagcagaggttgcagtgagccgagattgtaccaccacactccagcctggacgacagagcacgaccctgtcaaaaaacatgatgatgatgatgatgatgatgatggtgcatttagagaggaggtaggcattcaggctttaaagtgcaaactgagtccctctcaggaaccgattatacacctttctgtaatcttaacacagtacaactttgtttcatggactctgtgtactggtttttttttttttatttttcagcagggcacattctgtagtcttagaatatgttcttgataggtagttgaaaatatgtgaactatagtgacctttatgtataactgtattcttttttctataaaagggaataataagaggtttgttttgtctttaggtggagagtcattcgggaggacaaaaaaggcctgctgcgaaacagctaacgaaaggagctttgtgagttactctcggaaatgacaaatcaattctgaacacttctttgggtccctagccttcaataaatataccacagaaaacaggttataataatgagtatattagcctttttaaaaatgtactttgaggcaaggcatggtgactcactcctgtaatctcagcactttgggagtcttaaggcaggaggatcacttgagcccaggagtttgagaccagcctgggcaacatggctctgcaaaaaatacaaaaattagccaggcgtggtggtacgggcctgtagtcccagctacttgggaggctgaggtgggaggatagcttgagttctgaggtggagcttgcagtgaattggagattgcgccactgcactccagcctgggtgacagagcaagaccctgtctcaaaatatatacatatatactttgaaaatctttttctatactttcttttccttttttttttttttttttttttttttgagacagagtcttgctctgtcg

SEQ ID NO: 120891 - DNA, 1018 bp, Homo sapiens
ggaggccaaggcggatggatcacctgaggtcaagagttcaaaaagatttctaagatacattattaagtagaggagaaaaaaatacagaacagtatatatagttgctactatttgggtacaaaataaagaagtatatttctttatatataaatatatttatagtacatatatattcttatgtgtgtcagaaatatctccagaagagtactgaaaactactaggcaggcagatgcctccagggagaggcactgggtgatagtgggtgcacaccagggagaggcaaagaaaggaggctcacttttcacatgccctgtagtatcttttgaattttgtaccaatgtgtaaattattttttccaaaagcaaccattttttaaaaattgtctatgaaatgactggcctctctctttttcagcgaatcaatccctctgctgagatggtgatgatcgataggatgttcaaccaggaggaaagagcttccctgtcccgagacaagcgtttggcacttgtagaccctggtaagaaacatcgcagtgaaagtagtggatagctcctgccatggttcagggaccatggggcctttggcagtctgtctgaactttgggtaagaaacttgaaggtagaacgtgaattctggggagagctgggcacggtggctcacacctgtaatcccatctacttccttctcctctttggcctgcacagccaatgtttgttggatggaatcatctttttagatttcaaggctatattccctagaactcacattttagaatttggtgaacaaattcatgttcacactatacatacatactcttcgttgttttgtagatgtcatcaaagctctatttcacttcgattatttccagcattaacactttttccactcttgtgtaacagcagtctgcctgcctccatctgtaccctcaatgttctaaatcctcatggacatttcttttttttttttttttttgagacggagtatcgctctgtcgcccaggctggagttcagtggcgga

SEQ ID NO: 120892 - DNA, 1025 bp, Homo sapiens
ctccgtctcaaaaaaaaaaaaaaataccacaattaaatgggcatggtggcgggcgcctgtaatcccagctactcgagaggctgaggcaggagaattgcttgaacccgggaggcaaagtttgcggtgagccaagatcgtaccactgcactccagtctgggcaacagagcaagactccatctcaaaaaaaataaaatgatacttagagatcaggactgagtgatgctttttgcccatcacattttcccatttgtcatcaagcatctaccttttcaaaaggtttaagctccccatcttgaagctggggctccacagccttggctgcctttacaggatgccctctcaggatcagggtcctgcttctgcatgttcctgtatgtgaagcagatggattctgtgagtggggctggctttgccctcagcacctgacccactgaagttctgctgtatagtctgtcctctcccaatcactcactaatgttctttttgttcccatttccagagggttttcaggctgatttctgttgttccttcaaacttgataaagctgctcatgagacacagtttggccggagtgaccagcatggcagtaaagcaagcagctctctgcaaccgccagccaaggcccaaggcagagaccgagccaaaaccggtgtgacggaacccatgaatcatgaccagtttcatctagtgcctaatcacatcgtggtctctgcagaaggaaacatttctaaaaaaacagaatgccttggcagagcactgaaatttgacaaagtgggcttagtgcagtaccagagcacgtctgaagagaaggccagccggagagagcctctgaaggccagtcagtgctctcccggccctgaggggcaccggaaaacctcatccagatcggatcatggtactgagagcaaactgtcaagcatcctagcagattcgcacttggagatgacgtgtaacaattccttccaggacaaaagtctgaggaattctccaaagaatgaagttttacacacagacatcatgaaag

SEQ ID NO: 120893 - DNA, 1030 bp, Homo sapiens
ttttgttttttaaaaacactgtaactcaatgagaccacagtatacttggcccttggtaaaattttgacaatcataagtcatttgaaaagaacagacttactaaaatcaaacgagacggatagaagctactttttaaagaatatcccactgcatctgcaaatttagttttgggtttttttattattattattttgagtttttttgtgtgtgttttgttgttattgttgaggggaagaccacatggttcttccccctcagccatctttgagcagtaaattgctggctgtgctgccagggacccgcagccctggtggaaaagccagtagcacatacgcagggcattgcagggcttccctattgatggttcaagtgcttttctgatgcttccggagcaaaacctcatgcttttaggcatatctatgttgaatttcacctagggaatgttctgttcttagttacagcagcaaaatttgaaataatttcaccaggctaaataaaggaaaatggaaaccagttaagaggcacagtgtacagaggaggccgggatagagccatgagggttataatattaatatgtatatatgtaaaagcatatatatgttaactattgagaaaaaacaagttttgcattttataattggatatagtcaacatataatgtatgtttttgtttgttgctggattttgtttcatttaacctctctttgcaccctctcccacaacaaataccaagcatcaaaagcactttcatttgaaaattattatgttgtaatttttcagtttaaactttaaggagactctggccttgtttatgcttcttgtctgagaacagtagtgacccctggcagcaattcattaccaaaacacagacaaaccaaaggtaaccagctagcccaccactgaaaggaaagatctgagacatgggattcccatttgagagccaaaggatatgccctgtcatggtttctgtttggcctgtgttcatattagtgagcatggcttactgctttatttatttttatttcttgtc

SEQ ID NO: 120894 - DNA, 1911 bp, Homo sapiens
cccatttctgttgttacctttattcttaatgtcattgtaaccatcacttatctcctctcattgggaaagctacatgatagtatttttatgcactcttctcccacacatacacacacgtgcatgtatctgagctgctcggatccagaggtcatttttgttacagtgtgtgcacactcactctccttcttagtgtgcatactctctcatttattctgtttatctccctggctctggaggtgcagccactggtcttcactttaatgtgttgccagaatctgcttctggctgtcgccaacatggggatgacccccattgtcatcatgttgggcatttcttttccagattggcctgtgatggaaaggaaggcttctaattagaaaacacagcaacagaagacctataccccggtgcccctgtgtcccactacacacagaaaaccctgtgagatggccagtcttcataatagcaacgtaccttcaccccagccacatgccccagccaatacaaattggaaaatctggcccattttagggttaccattttttccttatttgtgccaatgtccaagttgcagatttcccctttttcctgtattgtaacatattagataagttggtgtcgccagttggtactttctgtttgggtagtcctagggtaacaccctgccctaaactccatgatttcataggcttttcttcccttggggctcatgctcccctaattcctagcaagatgatccttcctaatcaaattcttctcattgcagaactttatccctggaagccttcatgtgggctgctagtgagttacattaattactgcaaatcagtggaattctcaagagacaagataagcttcatgtacatttgtcacctctctttcttccctatcctgccctgctgtcccaatcctagcttttctatataccatcctaaagggtttttaagccctaacacttgtctagcaaatggagagcctaatttaccaaaatgaaacttgtaaatttttgtgtcattgtatgtaagtttactttttatggaggaaggattctagataatgacaaatgaagattatgacatgtatttcactcctgtgattaggttctacgcacatgggtcataactcgcatgtcgagccccctctagtgaagggtaggagagctcagcctcggatggccaacattcagttgttcaggttcattcgtcaaagttaagttttagaactatttgtactcagtaacaaaaatcattttctttttttttttttttttctgttgtggaaaagcgtgaatttgttattaagcatttgattttctgtgtccttaagtacttcctgaagatgaagcaaaattttaatctggcaattatgaaaaagaaatattttagctctgaaggatttagtagattctgttagattagggaggccttacagactgactttacttaaagaggacgcgtcactcgctgtcagtgtggtgtgggctttatttgcttaaataccttcatttgtatagtacgtctcacttgaaattgctttgtatacattttgtaaaaatatttataaaatgttttgtaaaaaaaaaaaaactataacaaattgcagtttattttgttatgttggataaatactgttaaaagaaaccagtcagtaactatattgttaatccatggttaggaaatgtttagttggagattacaaattgaaacaaccattgcaatacagccaaagatttgggaaaatgtgcaactgtgattgtcttgattttgcaaataggaatggctacttttcccagaagaaaagggtaagtgttcaatgggaattctattttaatagatttaccaataccaaaatcaatttaccccagtcagggaagggataggattttaattgattggcctttccaaacagtta

SEQ ID NO: 120895 - DNA, 1698 bp, Homo sapiens
gctagaacagacgtctctatggtcaagtaaacagagcgtgtgctgtcttccccatgtggtggggttgcgcatgatcagtagctgcaccactagaaagatggcggagcaagagtgagtgtttggggctttgaatatctggagtggggtcttgagtatccggtgccatccacggtgtttatgccttggtggcggattcctgtgggctctaggaatagaaaaggccacagtttacaaagggtgggggtgaggaggagtagcgctgtggcggaggagggaggggaccgcggtcaagttcgggttatctggagaggcgaggattgacttcaggcagcgggctggagtgccacagttgaattcacccagcccgacaagtgttaactctgcagataggcctgcccccgccccaaccccatagattcgtcgctgctagtgcctatgaagaactgtggccgtgaaaaccctgttaacttatacgaacccagaggctaaaggattcattattttccgaggctttggggatgagtgactattagggatggatttatgaggcctggagtcagaaaccgcaggtttcaggggaatctttcttcagatacttgaaaacagtaatgttccctaaagcccaggatattgaattggtttggaaatccattgaatgttcgttttcttttttgttgttgtttttgttttgagacggagtcttgctctgtcccccaggctggagcgcagtgtcgggatctcggctcggtgcaacctccgcctcccgggttcaagcgattctcctgcctcagtctcccgagtagctgggattacaggcgtgcgccaccacgcccagctgattttttatttttagtagaaacgggggtttcaccatgttggtcaggctggtctcgaactcctgacctcaggtaatccacccacctcggcctcccagagtgctgggattacaggcttgagccaccgagcccggccaagtgttcttttctaaatgttatctctgatctcaattttctgcatcaggcaaagaaaaatccctttggttccagaaaatctcctgaaaaagaggaaggcttatcaagccctcaaagccacccaggcaaagcaggcacttttggcaaagaaggaggtaatggtggggaaccaagagaaagtaattagaatttttatttggtgagttttatcccgcatgtgttggactacatttggtattgacgagctccccccaacggtttgacagaccaggtatagttgtctctcagtgtccttaaggggttggttccaggactcccacagatgcctaaatctcagactgctgaagtcccttatataaaatggttgtagtaggccgggcgcggtggctcacgcctgtaatccctgcactttgggaggccgaggcgggcgtatcacgaggtcaggagatcgagaccatcctggctaacacggtgaaaccccgtctctactaaaaatataaaaaattagccgggcatggtggcaggctcctgtagtcccagctactcgggaggccgaggcaggagaatggcgtgaactcgggaggtggaggttgcagtgagccaagttcgtgccactgtactccagcctgggcgacagagcgagacactctctcaaaaaataaataaataaataaataactggttgtagtatttgcatataatctatactccttccgcctatgtagtt

SEQ ID NO: 120896 - DNA, 1971 bp, Homo sapiens
tttttgttcgttatttttcccaataattcccaagtttcctcaactccacctttactttggtttctcatttttcctttatatgaaaatagagaatgttgctttgcttcgcattgtggaacacggggaaataagctatatcagttgtcacttatgaattactgttctaaaagtaaaaatgtatggaggcacaagatgatgatgatggtctgtcttctctgtagcagaagaaaggaaaagggctcaggtttaagcgactggaatcattcctacatgattcctggcggcagaaacgtgacaaggtgcgtctcagacgactagaagtgaaacctcatgccttggaattgccagataaacattccttggcctttgttgtacgcatcgaaaggtaaggaactggtgtctttctaattgcatgaggctggggcaaagtgttgcttaagctttagacccctttctagggagataatatgccccaagccactcaggcaaattgtgctaggatgtcagggttgagcacaatttagtctgcaatatttggaagaccttagacagataggcttgaaaataagtgctatgagggtaaagtgctcactagggagaggggttgaggacaccctctctaaagcaggaacttcaacctgagacctgaaagatgtgaaaggcgttcaccagtgttgggagatttttcaggcatacgtgctgaagtcctgaggtagggaaagcaaggcatcattctaggaactgaaacaaggctgagtggatgaagcatattcagtgaaggggagacatttttcctcatttagtggaactttcccaaccccctgcccaccccatgtacaactctacttcttgctgtttcccctacccaatcacccaaaccagaaacctgtggattttgcatgtttatgagctctgtcctttgtagccctctaccactgctcatatttttcctgaactattgtattaaccttcctcctggatttccttgcctctagtgtcatactgtgatctgtcccatacactgcccttggtgattgtcagaaagaaatctggtctggtctcttctgcttaaaatcttcagtagcttttactgcccatagaagcacatccagcttccttagctggacatgtgtagacctacataccaccactccgcctacccctgaaacacacacaagttcaatttccatagcattccaggcactgctccacattatgaaaaggatctgttttcataaccgcctcccactaaactgagctctttaaggcatagtctctgtgtcttattccagattacccagtgtagtgacctcgcatgttgtgcttgctggactgacataaactggagggagtctgtctgacttctgttgctgttcatttcaggattgacggcgtgagtttactggtgcagagaaccattgcaagacttcgcctaaagaaaatttttagtggtgtctttgtaaaagtcaccccccagaatctaaaaatgctgcgtatagtggaaccttatgtgacctgggggtaagtaaggttttccatgtgaattcacattagatttctatttgagtgtgtcagggtgcaccgggtattgctttccagggctcatgttgctgtagaagggacattttgctgtgaccacagtcaacctgaaatcagtgggtagctgtaataaccatgggacacagggtagggaggggtctgaacaataccatagtagggctggttcagtcataggctaaggctgggtcaaggaaagcttggttcttgaaagtcttaaagcagagctaaaggcagtgcatgtgtaagagtagtattcctggccggacacactggctcatgcctgtaatcccaacactttgggaggccgaggcgggtggatcacacggtcaggagtggatcacagggtcaggagattgagaccatcctggccaacatggtgaaacccctgtctctactaaaatacaaaaaaaa

SEQ ID NO: 120897 - DNA, 2829 bp, Homo sapiens
cggagcttgcagtgagtcgagatcgtgccactgcactccagcctgggagactgagcaagactccgtctcaaaaaaaaaaaaagagtagtattcctcaaacattgaaacccaacaaaaacttggattttatttccaactcttgcaccatcttgagtagagggtcacctaaggccagagtcgtagcccctaaggtaagctaggacatggtttctgttttgtttttgttggcaatattttccctggtgaacatttacatccataaatttaaatttctaattatgtaagtggggtcacttcagttctttatcaggagtatttccaagcatttcagctggaatgtgattgcagaacacttgctcgttgggagaagtgagtgtgtgggagaacctctccaacctctcagccaggctgcaggactggtatgtagtgtgccaggtgctggtgaaaaccgtgctttattttcctacatagatttccaaatctgaagtctgtccgagaactcattttgaaacgtggacaagccaaggtcaagaataagaccatccctctgacagacaatacagtgattgaggagcacctgggtgagtgctacagcttagggatcagctggggcagaaagccagggtctttgaagctttgatgtgagattcaggttgtattcttcttggggccccaagagtctgccagagtggccagcttagtatatgctggatacatgttaaataaaggaatctgtgcttttgtgtttcttagggaagtttggcgtcatttgcttggaagacctcattcatgaaattgccttcccagggaagcatttccaggagatctcatggttcttgtgccctttccacctctcagtggcccgtcatgctaccaaaaatagagtgggcttcctcaaggagatgggcacacctggctatcggggtgaacgcatcaatcagctcatccgtcagctgaactagacccaggtgaggcagggctgaaaactgcccttgggctgacttttgataggccatgccttgccactttacaagttctttttgcatttactagtatttaagagtaaccttgagattgggaggaatagaggaggctggtacaaatagatggagacctgctgggatcagtgaatgcctgattaggacatggggctatgcatagcctaagagttataggcttaaagatgtcgagtaactaaaaactgtattgctggccgggcgcggtggctcacgcctgtaatcccagcactttgggaggccaaggcgggcagaccatgaggtcaggagattgagaccatcctggccaacatggtgaaaccctgtctctactaaaaatacaaaaatgagctgggtgtggtggcgcgtgcctgtagtcccagctactcgagaggctaaggcaggaaaatcgcttgaacccaggaggcagagattgcagtgagccaagattgcaccagtgcactccagctgggcgacagagcgagactccatctcggaaaaaaaaaaaaaaaaactattgctgcagtcattcagatggaaatgaggaaagaataatattaataactgatttcaaaaaggacttgaagatgtgaatcatctattttgctgaagaaatcttaactctttgaaattactttttattgctgttgtcatactcttaggtgccaaactgcggtaaattttttatcagtgaagtggaagcatgtgttttgttttggaaatttttatcaagtatcttcagagaagattatttcctgctttatcttcagaaactggaaagggtcaaagaaaagacagtagctggccggtcgtggtggctcatgcctgtaatcccaacacttagggaggctgaggtgggcagatcacctgaggttgggagttcgagaccagcctgaccaacatggagaaatgccatctctactaaaaatacaaaaattagccgggcatggtggcacgtgcctgtaatcccagctactcaggaggctgaggcaggagaatcgcttgaacctgggaggtggaagttgcagtgagctgagatcacgccattgcactccagcctgggcaacaagcgaaactctgtctcaaaaaaaaagaaaagacagtagcatatgttcatgtcaagcacctctcatcacagtcgagttccaaggaaaaattccagtgttttctgcattgggtgctgtgtcatctgaaatcggcacattccatggaggaaggagtcctgctttgttgcatgtatcctagggtttaatgttggtaaatgagtcactctagcatttgtagaaggctccctgagactcctgcagcagtcgaccaagcccaaggacataattgaatctggagagtcctggggccttgttttgaaaaagacttgaaatacacataggaagaaaggcataaaaataaatgttcacttgtctctgctgtgagtatgtgttccaacttttcagtgatggctttgagaattctcaaacttgactggctctaagtgtatctggtggcttttgtatcgtaacctgaaactggcttagtactttttcctaaaagctcaggatttgagaatgaggaccccttcgccaggaaaacatgtatacactcaaaattttgcttgcagttctagggtgtttagacccttctcagatacctgtgcatcttatgggttttgtttttctctttgagacagtctcaccctgttgcccaggctggagcgcagtggcatgatctcagctcattgcagcctccacctcctgggttcaagtgattctgcctcagccccttgatcagctgggattacatgcatgtaccaccacacccagctaattcttgtattttt

SEQ ID NO: 120898 - DNA, 1219 bp, Homo sapiens
gatatccattatgaacacagatatctctttgagactttccttctttctttcttttttttttttttttttttttgagacggagtttcgctcttgttgcccaggctagagtgcaatggcacgatcttggctcaccacaacctccgcctcccgggttcaagagattctcctgcctcagcctcccaagtagctgggattacagtcaccgccaccatgcccagctaatttcgtatttttagtagagatggggtttctccatgttggtcaggctggtcttgaacccccgacctcaggtgatccgcccgcctcggcctcccaaagtgctgggattacaggcgtgaggcaccgcgcctggccttgaaacttctttagtctggtgccagcctcactcgatttccgtctggatggctattttaataatcctgtggatggcgctctcctgacggtcctgagggaacactctgcctccagggctgcgctcccggcccttgctttcccagggctgcctggaggccgcggtccccgcgcgttcccaggcacagcccgcgcccaggtgcgcgccgtcgcggtgggttcccccccgggagggggagggagcggggcaggtgtccctaacgactctcccaccctccagcccagggaggagctggctcgggctcggttaccacattacagatggggaaagagctctcctgcctctttcagattgcaggatcttcccaagaaccggaaggaggaagaccccctccacccccgcccccgagccagccgcctctatctgcagtagctgacccttccgcctgtccgctccggctcccgcggggctcaggcgtccctggccaccgcagcctggaagcgttccttgcctgctcctcacattggtctcctcttgctgagatccccgagtctccctcggaccccatagtcttgctggccctgaagacgccttgccctgggcggacggccttttaactggacttgggcgaacctatcattcgctggccaggactcgttcccagatatctaatttaatcctcacaaccatcccaccaggtgttaccggctaaggaaacgggcccagaaaaactaagttgaaacggcgaagataccctagcaggccagtggtggagccagctggaggcggcagttcagcagagggatgtgtttacagggctgtctcttccaaagctcattcacaaggctgccggggcagagaaatgaa

SEQ ID NO: 120899 - DNA, 1117 bp, Homo sapiens
acaagatgaaacctgtctctactaaaaatacagaattagccgtgcatggtggtgcatgcctgtaatcccagctacttgggaggctgaggcaggagaatcgcttgaacccaggagctgagatctcatcattgtactctagcctgggcaacaagagcgaaactccatctcaaaaaaaaaaaaggaatacgaagaacaattgcttaagggcaggatttacagtaagtacatgctcttacacaagaaacagtagataaaatagaaatcctagaggcattcctgaaactggggttaatcagaagtcaacatggcacattagcatccaagatggagttgctttagcctccacaggttctaactccttccctgccttgagtgctgattttggtcctccagtctaggaaaggatgcccacctggatctgttttgctgggagctggcctcccattagactcatgtgcactcagtgggctgtgctacctccctcccccagtgtgtaaatatgttgctgtggagctgaagtcagcctttgaggaaaccggcaagaccaaggaggtgattggcacgggctatggcatcctggaccagaaggcctctggagtcaaatacaccaagtcgtaagtgaatggggactcactggcctggcctgcgttgctgctggaggcttcaggggtttggagttcccttctcctagctaggcaaaccccctacaagggcatcatttgtaaccaagacctgagtttgcccactgattctgtccccagctaattgggtgacgtgcataaatctcttaacttctttatgcttcagcagatttctcatctctaaaagcaagactgttggactatatcattgattctcagacgcttggatttcacagagcaatgcaagtttttttttgcgacggagtttcactcttgttgcccaggctggagtgcaatggcatgatctttgctcactgcaacctctgcctcccgggttcaagagattttcctgcctcagcctcccaagtagctgggattacaggcatgtgccatcacgcccagctaattttctgtatttttttagtagagatggagtttcaccatgttggttaggctggtctcgaactcctgacctg

SEQ ID NO: 120900 - DNA, 1142 bp, Homo sapiens
cctgaggcacttctgttgagggtctctctcctccacaccctaggttgcctggcagagcagtggtccggcaagaagggagacacagctgccctgggagggaagaagtccaagaagaagagcagcagggccaaggcagcaggcggcaggagtagcagcagcaaacaaaggaaggagctgggtggccttgagggagaccccagccccgaggaggatgagggcatccagaaggcatcccctctcacacacagcccccctgatgagctctgagcccacccagcatcctctgtcctgagacccctgattttgaagctgaggagtcaggggcatggctctggcaggccgggatggccccgcagccttcagcccctccttgccttggctgtgccctcttctgccaaggaaagacacaagccccaggaagaactcagagccgtcatgggtagcccacgccgtcctttcccctccccaagtgtttctctcctgacccagggttcaggcaggccttgtggtttcaggactgcaaggactccagtgtgaactcaggaggggcaggtgtcagaactgggcaccaggactggagccccctccggagaccaaactcaccatccctcagtcctccccaacagggtactaggactgcagccccctgtagctcctctctgcttacccctcctgtggacaccttgcactctgcctggcccttcccagagcccaaagagtaaaaatgttctggttctgatttctgagtcctctgcagccctcagaggtgccctggagcctcttgttctttcctgcccctcgccttccagcccgtggggctgaggaggggaaggctaaaacccacccactctcgggagcagcaagtgctgggaaggcccagggttgtcttggggtgaggggaggcatgggcataggatgaggcccagggcagtgcactgaccttacgctgctccctcgtgtcctggacacctggctgccgttccctccctccctctctcctgctgctcctcttcccaaggcctcccatttgttgtgtaaaatgcagtgtttacctggccagctcccgcccctgttcctacttccacctggccttgactgttggtcctgaaccttgttttctgatgaccacacttgatcactct

SEQ ID NO: 120901 - DNA, 1102 bp, Homo sapiens
cagggttccttctcccttgatccctcttttctcctccccctaactgaacggggagcttgtgtgtcttaagaagaaacccaggcaggactgcacttggtggaggtggctgctactggtaccatcgtgcctccctgattcctctttctcttcctgacccctagtcatcgaagaagccaactggatgactctggacaaagatgtgccccagtcagcagagggtggctttgatgctgtcatctgccttggaaacagtttcgctcacttgccagactgcaaaggtaagagagggtgtggccttgggcatggcccccgccttgaggcccccttccacagacatctggcacctgctctcctgccaaagcagactctctgccttggctctggcacccctggggaggggagagatgggagggagactggtgctgggggccctgagcagatggagtctttctgcccgtgcctggagctcaggggaccagagtgagcaccggctggcgctgaaaaacattgcgagcatggtgcgggcagggggcctactggtcattgatcatcgcaactacgaccacatcctcagtacaggctgtgcacccccagggaagaacatctactataaggtggggccctctggggtgggggtgggggtgggggtgggggtggggtggagggagggtccagtggccccaaggtgggttacagaggctaatgccggctgccccaccacctacagagtgacttgaccaaggacgtcacaacatcagtgctgatagtgaacaacaaggcccacatggtgaccctggactatacggtgcaggtgccgggggctggccaggatggctctcctggcttgaggtaccacttggcttagtgggggtgaggcggtagttgggggagctgaggtcaccagtcctcatggttgctggggcctctgttacagtaagttccggctctcctactacccacactgtctggcatccttcacggagctgctccaagcagccttcggaggtaagtgccagcacagcgtcctgggcgacttcaagccttacaagccaggccaaacctacattccctgctacttcatccacgtgctcaagaggacaga

SEQ ID NO: 120902 - DNA, 1005 bp, Homo sapiens
ataatcgcttgaacccgggtggaagttgcggtgagccgagatcgcgccattgcactccagcctgagcaacaagagcaaaactccgtctcaaaaaaaaaaaaaaaaaaaaaacaacaaacctaaggcatcaacagagggcctctgctctagctgggggacggtccctgaaggttcctgcctactgtgccctgctcatgtgtcctttcctgtggttccctagggctttgtggtaggggatctctatgcccttctgacccacagcagccgggcagcctgcaccaggatcaagaactcagggtaagaggacgtgggcaccggaaaggcggaaagaggaaatggatgtagatgggtgggtggtgaggaagggagaagggaatgggacgctgatggtgaggaggcttccctgtgttcctctttgcagtttggcaggtggcttgactgaggaggatgagggggagctgtgtgctgccggctttcctctcctggctgaggactttgggcaggcactggagcaactgcagacagctcactcccaggccgttggagcccccaaggtggagaccaagtccttggaggtgggacaggagcccctccaagagcatatcccaaccacgcactttccatctcctagatcccctcagtgtcctggcatgatgtgggtgggctgcaggaggtgaagaaggagatcctggagaccattcagctccccctggagcaccctgagctactgagcctgggcctgagacgctcaggccttctgctccatgggccccctggcaccggcaagacccttctggccaaggcagtagccactgagtgcagccttaccttcctcaggtggccagggggcctggaagggatggtgggtggatcaggggctgcagcaggctggggagcaggaggggctgcccaagaggtcaattgtgtgtatgtgcatctgacggctctcaccttctcacatcctctcactcagcgtgaaggggccagagctcattaacatgtatg

SEQ ID NO: 120903 - DNA, 1046 bp, Homo sapiens
tgtaatcccagctactagggaggctgaggcaggagaatcgcttgaacccaagagccggaggatgcagtgagccgatattgcaccattgcaacccagactaggcaacaagagcgaaactccgtctcaaaaaaaaaaaaaaatacaaaaattagccgggcgtagtggtggcgcacctgtaatcccagctactggggaggctgaggctggagaattgcttgaacccaggaggcggaggttgcagtgagaggagatcgtgccattgcactccagcctcggtgacaagagggaaactctgtctcaaaaaacaaaaaacaaacaaaaaaagaaatacattctctctcagctctggaggccaaaagttgtaaaattagtgtcggcagggccatgtccttctgaggttctaaggaagaatctgttccacatctctctcctagattctggtggcttttgacaatctttggcattccttgtagatgcatcactttaatctctgcctctgtcttcacacagcattctcctccatgtgtctctgtctctgtccaaattttcctcttctaaggacaccagtcatattggacttaggtttcaccccaatccagtatgatctcattttaacttgattacatctgcaaagaccctgtttccaagtaaggtcacattcacagattctaggtggacatgaatttggtgaggggagggggtaggggactggatactgtgcaacactatgtaccaggcactgtgctaagtactttgcatacattgtctcatttaaccttcacaatactcccctgagattcctttattattattattcccatttcacagatgaaactgaggcttagaaatgttaactgggcacagtggctcacgcctgtaatcccagcactttgggaggccgaggagggcagaccacctgaggtcaggagttcgagactagcctggccaacatggtgaaacgctgtctctactaaaaatacaaaaattagcctggcatggtccagctacttgggagactgaggcaggagaattgcttgaacctggga

SEQ ID NO: 120904 - DNA, 1968 bp, Homo sapiens
atgtttgtatttttagtagagatggggtttcaccatgttggcctggctggtcttgaactcttgacctcaggtgatctgccctcctcggcctcccaaagtgctgggattacaagtgtgagccactgcgcccggcctcttctaccttttgattggagactgtcatacattcagtaaaggatcttaagtgtactgctcaataaattttaggtatgtatctgccatgcaccaccttgcaggtccagtcaagatacaggatgtttacattactcagaaggctcctcatgtctcttcttattcctcatgtgtcttcttattcatcatgtgtcttcttagcaatacccaccccatttcccctggcaacgtaatcacttttttgacttctgtcaccatcaatctatcaattagctttacctgttcatgaactggaatgaacgttttaaaggctcttgatgcacaagcagtgggcatctctttgggtgatgtgacttcttgactgctccctgccagggctacagcacagttatctctgtaaccctggccttagctccttcggggcaggagacagctgctcactgcccaggcctgtgcaggcataaacagacttggggatggccaggcccagggtgggaggcatatcttgggaagtggatttcaacaggtgacttgtttgaccaggcccagccgcagccccagccccagccccagccccaagcccagtctcagccaccgtcatccaacaagcgtcccagcaatagcacgccgccccccacgcagctcagcaaaatcaagtactcaggggggccccagattgtcaagaaggagcgacggcaaagctcctcccgcttcaacctcagcaagaatcgggagctgcagaagcttcctgccctgaaaggtacttggcaattggtcacaggggctgttttaccagttctagtgggcatcgggagttggtggaatggaagttttggggtattttgcggggaagggagttccagagaatgcgggaagggggtgccagggagcaggatggtggcagggtggggtaagggaaagcccttgaaggcaagcagggcatcgcagtgaaggactacagaggagaacctgactgctggggcccccacagattcgccaacccaggagcgggaggagctgtttatccagaagctacgccagtgctgtgtcctctttgacttcgtgtcagacccactcagtgacctcaaattcaaggaggtgaagcgggcaggactcaacgagatggtggagtacatcacccatagccgtgatgttgtcactgaggccatttaccctgaggctgtcaccatggtgggcacagggaaaggacacaggggggactggtgaggggctctggagaagcccaggtggagctctaactggccctacccctcagttttcagtgaacctcttccggacgctgccaccttcatcgaatcccacaggggctgagtttgacccagaggaagatgagcccaccctggaagctgcttggccacatctccaggtaccagggcaagggggcagattggccgtggctgcagggagtggggcacttggaggcctgcaagtccttgggaacatcccctcagtggcgtgccttttcccctatagctcgtgtatgagttcttcttacgtttccttgagtctcctgatttccagccaaacatagccaagaagtacatcgaccagaagtttgtacttgctgtgagtccccgagttcctgtccttgccctctctttccattccatgcccccttcatctgtgtcccagtggctctttccccttaagctgaatatattgggtttcatccatgtctggtacgaggaggctataaagggtaaaaaacaaaacaaaacaaaaccctactctggccttaagaaactaacaacataatggtaggaaacaaaaaagcaacagagtacctctctcaggtcaatagtgaggcatcacttt

SEQ ID NO: 120905 - DNA, 1870 bp, Homo sapiens
gactgatctataatgccctgaagttgtttatggaaatgaatcagaagctgtttgatgactgcacacaacaatacaaggcagagaagcagaagtgagtatctctctccccgggagactttcatcttctaccaccagctcactgtgtttctctcaagcccaaccccaatcctacttttgctcctcaggggccggttccgaatgaaggaaagggaagagatgtggcaaaaaatcgaggagctggcccggcttaatccccaggtgaggttttcctgccactgttgtgaactgaggggccagcccatcttgagctgggggagagtttgttgggggaggaatatggggcacacaggcccccaagcctctgaagtggctcttaacgcttgtccatgtctcctcactcagtatcccatgttccgagcccctccaccactgccccctgtgtactcgatggagacagagacccccacagctgaggacatccagcttctgaagaggactgtggagactgaggctgttcaggtgggagggcaatgtagggggatggagcagaaataatagctctggaagggagaggagacagaaacagcagagccaaagaataaggggacggaacaatagaattcactgggaattggtcaccattcctcaccttgtccctattcacacacagatgctaaaagacatcaagaaggagaaagtgctgctgcggaggaagtcggagctgccccaggacgtgtacaccatcaaggcactggaggcgcacaagcgggcggaagagttcctaactgccagccaggaggctctctgacccctcacgttcctaccacagggccacagcccacacagccctgggacactgccctggccctccatactctgctccctactggctgtcttgggggaaggcagcgcctctctagctactcaagggagggggatgtgggcacttgaagcagggacacccacagaatggtccctcttctccccaaaaggtgttcatgcctccctgtggctagtacaggctgagcactaagatgcttagtgctcagacaacctggggatgcctgtcccctacctgctcctcacccacagctacctgaggctgctctgagaagtacacacaggaatacatacgctcctctattcttcccttcatcctcatttgaacgccaggtatctcccctcctctctctcccctgcagaggcatgtagggaacagcaggagattattctcaccaaagttatgtcaagccccattggtcccagagtagctgaagggaagccaacccccctgcagcacaaataggccccccagtcccagccgtgtgctggcagatagggttgtattatttcttcttaccccatgcctgaccaagggaggtcaaaaggagaaaagtataggctgtggacaataactgatgaatatagggcccagatggaccaagtggggccggggagggatgaataaacaccctaccccgtgccctgtctttggtgagcagcagccctggggtcacagacatggaagggaccaccctggggctgactgcttttctgtgctgttggttcccaaaactagaaagaaggaagcagggagcggtgccccaagcatggctcctgccaacacctatttatttccttgtttgtgctatgctgggcaggccttctcttgtcccttataggtaccttggaggggccaggggctgaggaaggccggacccaggttccaggggcgcaggcagtgcggcttttggctgtgtacatagggtgctttattctccacagagtgatacatgctaaggtgggttgggcttggaccgatgtccccatatgtacagaactgaataaagtgggtctctgagaagtctga

SEQ ID NO: 120906 - DNA, 1119 bp, Homo sapiens
ggatgggggcgggtgggggacgctgcagctggggccatttgaggggagcccatggggcctgaaaggcatctgtcaggcggtacagagggggtcctctaggagaggggagaagggggcgggtacgccgacctgtttaggggagtctgatgacccagagttcccaagtcgcgggggaggcgtggcgcggggagccggggttctggaaggggtgtcttttaggaggtggcagggcctccggttgggcgtttaactaggaagtggcggagcaagttggtggggcctggttcaagataagaaccccgacttaggagggggaggaacgagaggctggaattggggcggaggggtggaggatgcaggagcctcggggaggagctggttttttgcacgcaggagactacaaggagatgatgagaggatgaagatgggcctggtttcatccgatccctgtcctaccgcctccctgttcttgcagcccctgcccggatggcaacagtagttctaggaggagacaccatgggccctgagcgtatcttccccaatcagactgaggaactgggacatcagggcccttcagaaggcactggggattggagcagtgaggagcctgaggaagagcaggaggaaacggggtcgggcccagctggctactcctaccagcccctgaaccaagatcctgaacaagaggaggtggaactggcaccagtgggggatggagatgtagttgctgacatccaggatcgaatccaggtagggtggaggagggatggttcctgaacaggtgaagctgggctccctgaaagcctagacccaaacggtcttctgtggctctgcaggccctggggcttcatttgccagacccaccattagagagtgaagatgaagatgaggagggagctacagcgttgaacaaccacagctctattcccatggacccaggtaaaagatcattctttcattctggaataattactaaggaaatgaactggcatgagtcagtagaaggaagtttcagaggaagaccctatcctaaaaagatagtttgtaaactaagattttgtagacttcagagtccaagtgaaatgctcttttgctagctttggggatgggcaggcttgc

SEQ ID NO: 120907 - DNA, 2826 bp, Homo sapiens
gactgcacgtgcgcgcacagctgcccgccggaagaaccgagcttggctgtgtttatctcgttggggactaaggcgtcggttggcgcgcaacgggttctaggctgcaggcagctcgaggacccgcggccccgccccggctcggcctggcaggtagcctgggatgggtagaagggcaagggagaattagggggcttaggacgtgctgtctggagctggagtggcgggggaggggcctgagagtgatgaggtgggggtggggagggagctagggggatgatgggaaaggagagtgttaatggggaaagcagggctaggggaggatggcgaggagatgggtaggagagacctggtgtctggaggaagcaatgaaggaaatgggaaggaagactgggccatgaaaacagggaagctgagcataatggaaggggaggggtgtctggcgtggtgggctaggggaggccggaatgtctggaagaagacagggatagagtcatatgcagagaggggtatcgtggtcagtgcatgctaatttttctttccttagtggaggtgggaaaatggagggctgttgggtggagcttggaatggtaggagaaggaaaaatgagaaaactgcaaagctctcacgagatcaagaagggcgagaaatggggaataaaaaatgcaagagaccaggcgggtagatacattaagggaatagaagaagtttgaaaatgcttggtggtgatggaggactggggagacccagggataagaggagcccctgagcgcctgggggcttgttctccttgaatttgagttgtttatatggcagagaaactaaaattttttttctccacctttggctggaattgcttatctcctctcctgtgcatattttactttaccttgacatatctgaagggaagaatagagaatataagggaggatggaagacttccattcttaagcccatcgacctcctaacagtctccacaagcccagacccaagatattttggagagcgggagtaatgaagtgagagtagcttcctgctggggctatttcaggatgggtcccatggctatttaaagcttagggtgtggagttgggggaggttgggtgggtgggactagcaagccagctgaaagccatgtctctttcctgcaaggggcctcccttatttgagctgttttagtgcctgaggttttgcctggccctttcctctgccagggcttcttaaacagggagcagatgatgatacacccaaactcaggagatgcttgccagcaaaagcattgtcagttgcaaggatttgcctgaaaaaacctcagatgtacccaggtgtacgtgccactaggttgacaggttgtgtttaagagaccatgaccagctgggcatggtggctcacgcctgtaatcccagcacttcaggagaccgaggacggtggatcacctgaggtcaggagtttgagaccagcctggccaacatagtgagaccccatctctactaaaaatacaaaaattagctgggcatggtggcaggcgcctgtaatcccagctacttgggaggctgaggcaggagaatcgcttgaacccgggagggaggcagagtttgcagtgagctgagattgcaccattgcgctccagcctgggggcaagagcgagacttcatctaaaaaaaaaaaaaaaaaaaaagaccatgacttctcatgctggatctttctcttgtcctgcccaagggcattttttgcctcccttcccctttttttttgttttgagacagagtctcgctctgtcgccagactggagtgcagtggtgtgatctcggctcactccaacctccgccacccgagtgcaagcaattctcctgcctcagcctcctgagtagctgggactacaggtgcgcgccaccgtgcccagctaatttttgtatttttagtagagacgggtttcaccatgttggccaggatggtctccgtctcttgatctcgtgatccacctgcctcggcctctcagggtgctgggattacaggtgtgagccactgtgcccagccccttcccctttgcattgcacactcccacctctatccgcctttcaggaacccaagttgtggaagagcttgttctctcttttctactggaaatggcttgttctctaccacagtagcagggatggggaagtggcaggaggagaaaacccctccctctatcaccatcccccaagcctaagcatacacatacctttctggcttaagtcctggcagcataccaggcacagctgtcaaaggaactccttgtgcctgtggggggccctgggtgaccccaatgacaacaactcagcttgacaggagctccctgtgaggggctaaccaaccgcggtaacatggaggtccctgtcctggatcagtcccgccctatcttgggtagggggattgttccactctaaaagcctgaaagcttttctgctttgaggcactcatgccagctttcaatggactgtttgaggctggctgggctattaatagctgtgagtattttgagatccctttccccacctcaaagaacacagattcttagagaggtggcagtaagcagagcagagacaagagaatataccgtttgggaagggggcttcaagtttgtgccaagccagggacagagtggagcctccacgagtaggttgtgaccatgatatgcagattctgagctggcaatcaggtgggggtggccccacccttcactgttggagaacactgggcccaggctgctccctgacctcggcagctcccttggggcagggccagccacctgagctgagactagtgcccctgtggaggggtagtgtg

SEQ ID NO: 120908 - DNA, 2328 bp, Homo sapiens
gtgcacattttcaatgcaggtaagccaatgctggggctgtccctgggtccccacatcagggtgggaacgggctgctgatgaggtttggctgtggtctctgggaccaaggggattggggacaaacatctggtttgggaaaagtggacagcctggagggaggttcccagggctgagcagagctgtgcccacagtgtccttgcgttggacaaagctgcccccggtgaagtctgccatccgtgggcaagctcctgtggtaccctacatgcgctatggacactcaaccgtcctcatcgacgacacagtcctcctttggggcgggcggaatgacaccgaaggggcctgcaatgtgctctatgcctttgacgtcagtgagtatggatctcagagaggctatgtccttccagatgttgcctcagttgcccaagaaaggtttgggttgggggtcttggggagtagagtaccccagagctgaggagggactgtcatagagggtgcttagttgagccattttctcatctccttcagatacgcacaagtggttcacaccccgagtgtcagggacagttcctggggcccgggatggacattcagcctgtgtcctaggcaagatcatgtacatttttgggggctacgagcagcaggtaggtctgggaataaaataagaggtttagggtgggactgagaaagaggggaagggcaatttaggatggtgaaatgggaggctttggcttgtttgcaggttttgaggggagggatggagggtcagagagtgaccattggctccctcttttcttcctccttttctcttcctactcaggcggactgtttttccaatgacattcacaagctagataccagcaccatgacatggactcttatctgtacaaaggtctgctctttcttttttttcccaaatccccaccctctgttgaagcaatgataggaagctcagtcagaggagatcctcttccagtctttgtgctgacccctccaccatctctctgcctctgcccagggcagccctgcacgctggagggacttccactcagccacaatgctgggaagtcacatgtatgtctttgggggccgtgccgaccgctttgggccattccattccaacaatgagatttactgcaaccgcattcgagtctttgacaccagaactgaggcttggctggactgtcccccgactccagtgctgcctgaggggcgccggagccactcggcctgtgagtgtttgttacttccctgtggagttcccttcctgccctcttcacactcctgacacttcctctctccttccagttggctacaatggggagctgtacatctttggtggttataatgcaaggctgaaccggcacttccatgacctctggaagtttaatcctggtaaagagcactgcatttagggcaggaacaaggagcaattgaggtgggaggaaaagaaaataatcctgaggcggtgagggatgggggtggggaagatacctggactaggcaggtattgaacttccatataaatttctcttcagtgtcctttacctggaaaaagattgaaccgaaggggaaggggccatgtccccgccggcgccagtgctgctgtattgttggtgacaagattgtcctctttgggggtaccaggttagaaggagagagggaaggggctcagggaagtcactaatgggagagtgggaggtatttgaaaagggggtttcgtgggtagtttttgtcctactttcatctctcttttgatcccgacagtccatctcctgaggaaggcctgggagatgaatttgaccttatagatcattctgacttacacattttggactttagtaagtatagttattcctgaattgctcctgccatcaaggtccctgtctttgggtggtgatatccaggactggatcctttcctcacctttgaccatctcctttccacaacttctcccttaaaggccctagtctgaagactctgtgcaaactggccgtgattcagtataacctagaccagtcctgtttgcctcatgatatcaggtacagcgagtggttggaagggagggattgagtgagggtgagtgagcagcacaggtgtgacctgattagcttggtttcagtatggaggagacagacatttttgttctgctggagatgtagtgtacttgtgggaaatgagatggaaggaggtgaattgacagccatcatataaaactgtcagcagaataaattatatgaaaaaaaaatacagctcggcagcatcactttctgagacctaagcttatacagttatttttgtgaccatgctgagaacaactgattaaatctt

SEQ ID NO: 120909 - DNA, 1001 bp, Homo sapiens
ctctaagcaaagcaggaaaggcaggttgggatgttgactgacatgtatacacagatctcaggtgcctggacactgcaatatacatacatacataaacataaaccggaaatccatatgagcttggaggtagaggagtgggtggtgttggatttggtggtgggtgggttctgattgttcaacctagtaggtctcttaagtaagaggtggctgtgggtggttgacctttaggaagttggagagactggtgtgtttttagcttggttcaaacatcccttagcttgggctgagggccccctcttctttctgtctcttattgttggccttccaggtgggagctgaatgccatgaccaccaacagcaatatcagtcgccccatcgtctcctcccatgggtaggaggaagtttctgccacctcccctcctgagcctgctgtcatcttcactgcccctgcccatctgtcacccacctgctcctttgacccctggacttggtatacctccatgtggagttgttgggcgagaggtgttctctgtgctgtgaattcagtggggagctgtagcggggtgggggctaggttcctccccccttgggccgagggccccttccccttggtgctctgtccccatccacctcctttcagctgctcctgggcctcagctctgcccagggccagccaggttctgctgggaagggaagggaatggggagaagggagaagcaagcagtgtctgagcctcaggagcttccccctccccctttgcctatcccctcccctctgcttgagccttgagccttgactgggagctgaaaggagttgcagctgttggcatgagacctccttctccccgtcttggggaggtggggaccagcagataaatcccacccttccttgagctgtcgctgtactctgaagttcagccagctcagattttataaaaattaattaaaatctccaaacgtgttgtgtgtttttgtggaatatggtggagaaggctggagttt

SEQ ID NO: 120910 - DNA, 1001 bp, Homo sapiens
gtaggagtaacatgatctgaagtttatgtgtgggagtgataagatctgattttattttcgatgcctctctcaggctgaattgaggcgcatagctttgagaggagtgaggctggtggttgggagactaggaggctagagcactgattgaggtgagagatgctgagcatgtggaccaggacactggcaatggtaactgagcaagggaggcagatgcccttctggggaaacctgtgaatgagtaaaagagagagtaaaagaatgagtaaaagagaaaaagaagggactatggtttggtgcacctttgaccttacatatacaccttccttagcaagatgaggccccaggttgctgaaatagttggagagtttaacactatcacagcctctgctgcctaggacttctaataatgattggtctgatggggtattaggattagctagctaaggaatggggatgggaagatgtcttttctgcagtgggacatgctgagctgagttgtatgtccctccccacttccacaggcacatctaacatgtcatttgaggagctgttggaattgcagagccaagtggggactaagacgtacaaacaattggtagctggaaatagtcctaagaaacaagcttctagaccacctatccaaaatgcatgtgttgcagataagcacaggtaagcaaggcttgccctagaagttggaagataactgggaccttgaataggtatgttgtcttgggtgacaggtgggaagcctttgaccaacactggagtcctcttgacttggcttttaatttctccataggcctctggaaatgtcagccaagatccgagtaccatttttacgtcaggttgttcccattagtaaaaaggtaaggaagaaggccaggcactgtggctcacgcctgtaatcccagcactttgggagcccgaggtgggcgatcacctgagatcaggagttccaagaccagcatggccaacatggtgaaaccctgtctctactaaaa

SEQ ID NO: 120911 - DNA, 1049 bp, Homo sapiens
aaaaaatagaggccgggcgcagtggctcatgtctgtaatcccagcactttggaaggccaaggtgggcgaatcacgaggtcaggagattgagaccatcctagctaacacagtgaaaccccgtctctactaaaaatacaaaaaaaaatagccgggcgtggtggcgggtgcctgtagtcctagctactcaggaggctgaggcaggagaatggtgtgaacttgggaggcacagcttgcagtgagccgagattgcaccactgcactccagcctgggcgacagagcgagactgtgtctcaaaaagcaaaaaaaaagaaagatgaggaagagacaggaagcactttttctcagtgaaaggagattgaacagttgtgttttatattctctctcttctctccaaaggtagcccgggaccctcgctttgatgatctgtcaggggaatataatcctgaggtgtttgacaaaacataccaattcttgaatgacatccgagcgaaagagaaagaggtatacagcttgagactggtttatggggaattttgtggggtggaaaatgagggcacaggttagagagttgggcagggggagtgggaagtatagtggtgggcagatttaactctctccaattcagttcatattcaaatcctggctcatcagtttactagctgtgtgattattggcatgttacttaatctctctatgctttagttttctaatcataaaaaaataaaataataattactgtcttggaggccgggtgtggtggctcacgcctgtaagtaatcccagcacttggggagactgaggtgagcacatcatttgaggccagcagttccaagaccagcctggccaacatggtgaaaccccatctctactaaaaatagaaaaattagccaagtgtggtgttgcatgcctatagtcccagctactcaagaggctgaggcatgggaattgctggtgccctggagacaaaggttgcagtgagacaagatcgtgtcactgcactccaacctgggcagcagggcaagactgtctccaaacaaacagttactgt

SEQ ID NO: 120912 - DNA, 1187 bp, Homo sapiens
ggaggctgaggcaggagaatcacttgaatctagaagacggaggttgcagtgagccgagatcgcgtcactgcactccagcctgggtaacagagcaggactccgtctcagaaaaaagatagaggggcaccagtgagctttaaagaactcatgtatccagcataatggcttggagttactgacctggtttgggaaagaataggggcttccttctttgttcaccaactttcattctccctgtcatttagctgagcagcgccagttggcactagctgagaagttcaaggagctgaaacgcagcaagaaattggagaacttcttgagtcgaaagaggcgacgaaatgcaggcaaggacaggagacatctccctttgagcaaagagtaataaggaactatcctctgctctgccactgccccagggagacatggatctgtgaggacagatttggccacggctggtttccgttcaagggcaaggatcacagctgcccttgaatctcattgcctcagagaagactagagggctcttggactatccctagggctacacaagaatagttcagccttctgccatgccacacagcctcagcttgaatctggttcattgcgtcctcgtgttcttctctcatccttgccttaaaccagggattctgataccgaagaagaggggccaatgaaaaccatggagtctgttcgtgactcccagggctgggacattatgtaggagccacttcataaacattctctttactcatctttttattctgttttttgtggccttctttttgtgtttcccccccgaaacagagtctcgctctgtcacccaggctagagtacagtggtgcaatctcgcctcactgcaacctccacctcccaggttcaagtgattcttgtgcctcagcctcccgagtagctgacatccgccaccaagcccagctaatttctttcgtatttttagtagagatagagttttgccatgttggctagtttgatcttaaactcttggcctcaagtgatctgcctgcctcagactcccaaagtgctgggattacaggcgttgagccaccgttccggccttaaggcctctgcttttatgtgggatttgtgggtagcctagaactactttttagtgggccacatattgggataggcaataaagcctaaggcatctacaactgggaagtcagatc

SEQ ID NO: 120913 - DNA, 1033 bp, Homo sapiens
agagtgagcacaagaatattgggcctgggccaataaaagcctataatctctggtaccaaggtgaagaggcactaagtgaccagctgcagcaaccccagtgtacctgggcccactgtgctgggcccccagcctgctgctgctgcctgtctggactctgccccaaagggcagctgtcactcagcaggctggcccctgctgtgagagctaccgacaccatgggaccaacactgcaaagcaagcactacggagcccctctgccctctgtattatagcctcatcctgagcagcctgactctcccacaagccatggccttttttcccctagactccaaatctcagtcctggtggcactcagttctctctgtctggcttctgtgccctcctttaccacctgactcttcctcatcccccttccccctccttccatagctttttctgtcacctctgggctacgagcctcgggatgcctgggtcatccctcctttcctcctccccagtagccctgccaagacacagagctgcacctttggcacaggatcccctggcctgacctgagctgccctgcttcagcaggggtggtgccaatggagccaattatagtagcacaagcaaacctccccaacagcagcagggcagaggctcacctatgggggtagttaggggtaggagtttttgcctttctgaaatagagagagggtctatgtcacctaggcaggagtgcagtggatattcacaggcacgatcccactactgatcaatcagcatgggagttttgagctgctctctttctgacctgggccagttcactcatttatttatttatttatttatttatttatttatttttgagacggagtcttgctctgttgccaggctggagtgcagcggagagatctcggctcactgcaacctccgcctgccgggttcaaacaattctcctgcctcagcctcccaagtagctgggactacaggcgtgcaccaccacacccggctaatttttgtatttttagtagagatggggtttcaccatgtt

SEQ ID NO: 120914 - DNA, 1087 bp, Homo sapiens
tcagaagattccgtctcttctccaagttctggccgtcttcaccctcagcttgcaggtacgtctgaggtgggatgagccgcacaatgtcccatctcgacctgggttccttgctgccatctcgaatcttgaggacccctgaaataaatgctgatcactcactcagtggagagcccacgaggagcctggccctgcctcagagcagaggcccctctggccctaagtgcatacctcctggtatatccttttgctcgtgaaggtccagggggcctcttgaagaggtgaggggcccaatcgcctgattgagcatgtctgcggagagccctgagaacgccagcagactctccacagagaccgccttcagagaacagatgggagacattcagggcctccccaaggagtggagagaagaggatggagggaagaagcagagggagtcaaggttttgggaagagaggcaagggacaaagtgggagacaggagagaggtgcagcggggctgggccaccttcaggtcgttgagatacagcagtagccacatctgcacggtggacacatgcagggtctggttcccaaactgcagctcagcccagcccagccacgtccactgcagtcgcctctgtgagcctcgctcaagggcagggtggctctgacctggaccaggaagggggagggagacaaagagcaggtgaaaggagggagttggtgttggagggagggtgcacgctggtcacgctctgtttatctctgcaaggcgtgtgaccccagcatttatggacactggggcttctggtctgagcttccagatctcagccttctctgggcctgcctctatggcaagcctcaggatctgggagctatcctatgcctagcctggtgccaagcaggttctcatcagtgccttcgaggattgccccatgtgtttttagggagacaaaaccatgaagggaggaaggactggggctcttatcaagctggaatattatgacaggaaacaatgtctcccctattaggaggcgccctgaccacaggtctgagcctcttccccctcctgtgttgctgccagctcagggatcagcccccgatgggga

SEQ ID NO: 120915 - DNA, 1101 bp, Homo sapiens
cctgaggccaccagatatgagtaggtgtctggctcttttctggtcagtcacctgtcatcctaaactccccatcgggggctgatccctgagctggcagcaacacaggagggggaagaggctcagacctgtggtcagggcgcctcctaataggggagacattgtttcctgtcataatattccagcttgataagagccccagtccttcctcccttcatggttttgtctccctaaaaacacatggggcaatcctcgaaggcactgatgagaacctgcttggcaccaggctaggcataggatagctcccagatcctgaggcttgccatagaggcaggcccagagaaggctgagatctggaagctcagaccagaagccccagtgtccataaatgctggggtcacacgccttgcagagataaacagagcgtgaccagcgtgcaccctccctccaacaccaactccctcctttcacctgctctttgtctccctcccccttcctggtccaggtcagagccaccctgcccttgagcgaggctcacagaggcgactgcagtggacgtggctgggctgggctgagctgcagtttgggaaccagaccctgcatgtgtccaccgtgcagatgtggctactgctgtatctcaacgacctgaaggtggcccagccccgctgcacctctctcctgtctcccactttgtcccttgcctctcttcccaaaaccttgactccctctgcttcttccctccatcctcttctctccactccttggggaggccctgaatgtctcccatctgttctctgaaggcggtctctgtggagagtctgctggcgttctcagggctctccgcagacatgctcaatcaggcgattgggcccctcacctcttcaagaggccccctggaccttcacgagcaaaaggatataccaggaggtatgcacttagggccagaggggcctctgctctgaggcagggccaggctcctcgtgggctctccactgagtgagtgatcagcatttatttcaggggtcctcaagattcgagatggcagcaaggaacccaggtcgagatgggacattgtgcggctcatcccacctcagacgtacctgc

SEQ ID NO: 120916 - DNA, 1084 bp, Homo sapiens
agctgtcttacaatgacattcagagattagatccccaaacctaacttttagggggattaaaaaatttaaaacattttttaggagaaattagagaaaaagattgagagttatgaatctatttctgagccttcacattactaacaatggccaactcctgtgactgtccccttcctgtagcaaaagaacccccatctcagagtcccaacactcccctgcagcgtctggtggagggttatggtccagctgggaaaatcctcctggatctagagcaagccctcagctcagaggggacccaggagaacaaggtcaagccactcctgctgcagctgcagcggcagccgcagcccttcctggcactgatgcagagcctggacactccggagactaacaggaccctgcacctgactgtgctgaggtgagagcatggtgacaggtgggatctctgagggcaaagggggtccatgaggctggctacacatttctctgcccccagaatcctgaagcagctggtggacttccccgaggcactgctgctcccctggcacgaggccgtggatgcctgcatggcctgcctgcggtccccaaacactgatcgagaggtacccctgccctgctctggggagaggctgggggagaggataaaggcagccactggcaaggcacacctgctgggcaaggctctggagggcgtgatagagcctttgagctcttggtttgagttttgcttttaaaattgaattttattttttttaaataggtaatacattcacatggttcacaaatcaaaacgctctaacaaggtatacactgagaattcttgctctcacccaaatctctgttcccccagggtcccccacacaccccttactggtaactacttgtattaatttatgtatctttcccgtgttcccttatgcaaatataagcaaacccaaatgtgtgatcttgccactctcttttttacacaaaaggatatggagatattattacataaaacattaagagcttcaatagctccatttttggctgggcctgtgggagaaagggggatgaaggaggcagagcgcccatcacataccagagt

SEQ ID NO: 120917 - DNA, 1241 bp, Homo sapiens
agctggaggagtgtgtgggcactatccctcctgctcctctacttcacactgtccacgtgctcagcgcctatgccagcattgagcccctcactggagtattcaaggacccaagggtcctggacttgctcatgcacatgttgagtagtcctgattatcagattcgctggagtgcaggccggatgatacaagccctgtcctcccatgacgctggtgaggggcagtgtggggaggaagggaaagcaggagaagggctgggtcggctcagggactcacaggacactgtggcaggagcctctgatctcatcagtacgtaaatgattctgttgcccttctcttagagttggaagaaaaggaggtgggcatgggagtgagggtgggggttatctgccaaaagaggaaagactatcttcaagaacctcatattaattagttgctttttatgcaaaggaagaatttagagtttagactattgtagatcgtgtttatgtgcgtgtgtgtgtgtatgtgtataagttagcaaattttagcttttgaagcaaatcagttctttctcattgtgtggtggcaaaaggattggattgaaagagtagagggtctaagatttctaggaagggtgagattagggagaagttaccaactggggtgtgggttacagggacccggactcagatccttctgtcactgagccaacaagaagccattgagaaacacctggattttgacagccgctgtgctctgctagcactgtttgcacaggccacgctctctgaacaccccatgtctttcgagggcattcagctaccacaggtaacctttgggggtgtaaggtggggggaacttgtgaacaagatctagggtccaggcctttgcacctatctgcagaggatggtatggagagaggggcttaaactgggacaaggtggatataggccaaaggttgtatcccacaggtcccaggaagggtgctcttctccctggtgaagcggtatttgcatgtcacctcgctcctggatcagctgaacgacagtgctgcggagccaggagcccagaacacctctgctcctgaggagttgagtggggagaggggtcaactggagctggagttcagtatggccatgggcaccctgatctcggagctggtgcaagccatgcgctgggaccaggcctcagacagaccaaggagctcagcacggtcccccggttccatcttccagcctcagctggcagatgtgagcccaggg

SEQ ID NO: 120918 - DNA, 1022 bp, Homo sapiens
ttatttttgtagagatgggatctcattatgttgcccaggctggtcttgaacttctgagctcaagtgatcctccagccttggcctcccaaagtgctgggattactggcgtgagctctttgttttcaactacttagttcctactgtaggaccttcacttagtgtcagccatcttatgcttttccttttccctcgcccttctctccttgagtctaagaagccccccaagggtgtgctctcaacattgtcaagctctttcccccccattgtacagaatctccatctgttttctctgtcaggtgctggaaacgtgcgtagcaacagtaggccgagtatccaacgttgatcataacaaacgggtcattggcaaggcaggtcgcaaccgctggctgggcaagaggcctaacagtgggcggtggcaccgcaaggggggctgggctggccgaaagattcggccactaccccccatgaagagttacgtgaagctgccttctgcttctgcccaaagctgatatccctgtactctaataaaatgccccccccccccgttttaatctgttactgtggttttgttttgggtgttttttgttttttttgttgttgttttttttttgcgggggaggggatggtacagactaaacgtggggaaaagaagtaaaaagtgtggaagagaaagtacaggacactgggtctgtccccaccccaattcccttacaagtaatggagccggggatggaaataaatgacgtccaaggtcttttccagttctgactttgggaaacggggagggcacttccgcaggagggaggactaaaggaagaggaaagggcggcgcaaagaaggaggtgctgcgtcgccaaggtggcatcctcggctccgccccggcgctctcccagggcccctagctttccgctgggtcgggcggaaatgagccgtggcttttggctggcggagccgctggcagggaccgggccccaccctgccccagtggctgccgactcacgcgggtgcagctctgttccgcg

SEQ ID NO: 120919 - DNA, 1415 bp, Homo sapiens
aaatttataacagttgaaattatttaagtatgatttacatggctctcagtaaacttactgatttcagtaatttgaaaatattttggctgggcgcagtggctcacgcctgtaatcccagcactttgggaggccaaggtgggcggatcacaaggtcaagagattgaaaccatcctggctaacacagtgaaacccgtctctactaaaaatacaaaaacttagctgggcgtggtggtgggcacctgtagtcccagctactcgggagactgaggcaggagaatggcgtgaacccgggaggcggagcttgcagtgagccgagatcgcaccactgcgctccagcctgggcaacagagtgagactctgtctcagaagaaaaaaagaaaatattttatctggaagttttatacaatttcaataatcatataatgtttttttcaccaagcttcatgttggtgttgcccctccttactccagtgtgctgtgcaaatttttatcatttctgcttgtgccacaatgctaagcactgctctctggcagagaatgggccagttcccagtgctggaaactaaactactctgacctgaatcatatcccccaactgtcctaaaccacaggccgaatccgggtgcatggtattggcgggggccacaagcaacgttatcgaatgattgactttctgcgtttccggcctgaggagaccaagtcaggaccctttgaggagaaggttatccaagtccgctatgatccctgtaggcaagtttgggatgtgggatgatgatggaatggtctgaataactccatagcttctcagaagatgtggggctgcctagacggtctgcttacctgtccctcaccctgattaggtcagcagacatagctctggttgctgggggcagccggaaacgctggatcatcgccacagaaaacatgcaggctggagatacaatcttgaactctaaccacataggccgaatggcaggtgagagatggctaccagatgtgtgggctggaggcagcaaaagttctagagctaatgaaatcctgtcttttagttgctgctcgggaaggggatgcgcatcctcttggggctctgcctgtggggaccctcatcaacaacgtggaaagtgagccaggccggggtgcccaatatatccgagctgcaggtatggggaaaggagttgcctgggtcctatagtttggaaaggcaaggagagtctgaacccatggttccacatctggtactggcagagaaaattaaggaaaaaacaaacatgaggatgaagatatgcatgtgtttttacctaaaacatagcatgcgtccttctttgtgtatctgctcctaaagagcaaagcaagggcagcatgtggggtatgtcccctgtgtaagtccctctgcacccccctgttttgtggagggt

SEQ ID NO: 120920 - DNA, 1025 bp, Homo sapiens
agttttgtaaggttggttggagggggtttgttcatctttctggtagtgcgagaataagagatggcagagaccttaaccttcagccccaggataccctcaaagactcacctgcaatctgccggtgtggctgccgctcttgccggtactgcccctttaaatccatgatggctgccgctcgaggcaattgttttgacgggtctgggggggcggggcctgtttcctagtcacgcgacattagagctgcccgcggattggctctcacggcgttcaggtaggaaaggaggtgtgtatccagcttgggctccagttttctgcccgcctccttttacgttattgcggagcgacggcgccggacagtcaacgtcatctaggagcaccgagcagcttggctaaaagtaagggtgtcgtgctgatggccctgtgcgcactgacccgcgctctgcgctctctgaacctggcgcccccgaccgtcgccgcccctgccccgagtctgttccccgccgcccaggtaatccatcttacccgggaagaaggctgcttccattcgggctgccggagatggggtctgcgggcatgcgaggcgggagttgcgagtctggtcaggagtcatgcaggtccgtgaccttggataaggcacacttagcctcagctttttcctctacaagtgttgctttctcatagggcgaaattcttcagacgagatacttaaggtgaaagtgctttgcagatcaccggttgtgcaggtttcagtaataacgtttcgagtgcctatgataagccaggtataggtaatagacgtttcaaataaatgaactcctttcaaatactctataaggcagttactattcccattttatagatgaggaaaataaggagtccaaggtcacacaccaactatcagagctaaacagtctgtctttcagagcctgtgctcttaaccattatgatatgatgcctgcaaggatgagttactgctgatattagagaatgcagggcaagataccaagaacagtggcctcagggga

SEQ ID NO: 120921 - DNA, 1009 bp, Homo sapiens
cttcttcccttccaggaggagaaagaaggcgatgccaccaaggattccctggatgacctctttcctaatgaggaggaagaggaccccagcaatggctgtgagtctgcctctggaatgggagggtgaaaaggggcagcaggaggctggccctagctgtggcccaccctgtacacaggacagtcaccatctagaaataggttctccactttctctggagacagggcaggggctgggctagtacttcgatttcctcagcctccccattgaacgaacatgtattaagcactgaatatgtgccaggtactgtgctaggcactaggagtactgagatggaaatggcataggtcttaccagtaaggagttcacagtctagtgggagaataaacctgagacagggagaccatgagccccccaagggaaagaaccaggtctttcttacctttgtactcctggaacatcccttggttcatacttattaaataaatgtttgttgaatgcatgaattactgggtgaacaactgaggttgtgatgggcataggtcaagggagtggataaaagaatagcacttgaggcaggtctaatattgagagtccaggttggggtgggcacaagtatggaacaagacatgcaatggggagtggaagggcagacagcaaaggggagaggaagagtcctttgtttatgttctgtgatggtttagtgtcccgtggtcaaggtgctacagcagctcagcagggtggatatgagatcccagcaaggttgcggacgttgcacaacctggtgatccagtacgcagcccaaggtcgctatgaggtggccgtgccactctgtaagcaggcactagaggacctggagcgcacatcaggccgtggccaccctgatgtcgccaccatgctcaacatccttgctttggtgtatcggtgaggacttccctcctccagtgcccagatcttcccccacattcccaccttggtcctcctttggctttcatttttcctctttacaggg

SEQ ID NO: 120922 - DNA, 1054 bp, Homo sapiens
ctgaagctgtcctatctctcctgccagaaggtagacactgtagaacttctggactgtcattcttgcgacaccatccatatttttgcccctattgggttttgttttaatttactgaggggctctcccatagagtttagtacagtacttatttataatgggttcttatgtaggtggtttttttgtttgttgtttgtttgtttttgttttttttgaaatggagtctgcctgtgtctcccaggctggaggcattggcacgatcttggttcactgcaacctctacctcccaggttcaagtgattctcctacctcagcctcctgagtacctgggtttacaggtgtgtgccactgcacccagctaatttttgtatttttaatagagacggggtttccccatgttggccaggctggtctcgaactcctgacctcaggtgatctgcccacttcagcctcccaaagtgctgggattacaggcgtgagccactgcacccagccgatataacaggtcctcatataggtttatttaaaaagtgaatgaaccatttgggtgcagggcagaatgatcaagggtggagttaaatatccccttgcatcctaggcatggggagtcttttgcaccctccccagcttctttgagttggggttgcctgttcctccttgcgcctgctctacggtgaccaaattaaggatcagaccttccttccctgatcctgggctggctggttttggtggtggtttttctcagttttgatgtggtgggtcttctagctttctccaagttctgtgcgtgggtaagcaccgctacgtatgaagctgactgcaacttaaaaactggtgctaaagttgcttcctcagagaactgggtaggggcctagagtatctataactgtgctacttgaagaaagacccagggccacgtggcatcagcattcctgggagcatgaatcagaatcgcaatctgcaatttatttatttattctttttgagatggagtctcactctgtcgcccaggctgaagtgcagtggcacgatcttggctcactgcaacctccacctc

SEQ ID NO: 120923 - DNA, 1051 bp, Homo sapiens
tattgatgaaaagtttagtttcctgggccttactgcagacctgcccatcagaattattgagggagaggccagaaaatgcattttatttatttgttagattatgttgctgtttttgaatagctgatccagttacataggccagatttcaaaaggaaactgcattttaatttttatttatttatttttgagacagggtctcactctgtcacccaggttggagtacagtggtgcaatcacagctcactgcagccttgtcctgttgggctcaagtgattctcccgcctccgcctcccaagtagctgggaccacaggtgcatgccaccatacctggctagttttttaaatttattttttatttttaatagaggcgaggtcttgctgtgttgcccaggctggtgttgaactcctgggctcaagctatccttctgcctctgcttgccaaagtgttgggattacaggcgtaagccatcacgcccagcctggaaactgcatttataaagagcttcctggagattcttacctacgcttaagtgtgagaaccactgggtagccataaggagaatttatcagtctgaagcggaggtgtggtgttgagaaaaagggtgatattaatagtggggggcttaggagggagttcattcaaagtgcttcagtgtcttctatgggtgaagctgtctgaggaggcatggaatgcaggaagaagacaagatggagaaacgtgaatcagatgaagtatgaaagacaccatttggtaaagtgctaagtagaatagaagaacattctagaatgtgtgggatggtaagtctgagatgtaggagcaaatagggggtgggagggcttcagagaggagagaagaccctacattgctgaatagatgtagtcagtgacggcctcagaatgatgaatagatgtagtcagtgacggcctcagaatgatgtaaagtcatcggaccaggattctgaaaacctgggtggtactgttctaatatcacatggcagccacaagtgatgaagtaatagaagagacatctatagacctgtgacaccagttt

SEQ ID NO: 120924 - DNA, 2411 bp, Homo sapiens
ttgtgccaggtgtatctctctttggctgaaccgttgaccactcttggtgattccactgagtttgttcttctgctttggaggttctcagactccagtgtgggaacctatgttctgtcaatgaaggatgcaaagggacaactctagtgatctgattccattgtagctcatctgtttacaaagctgggctgtttcccacctagaagaagagggagaaggctctgtcaggccaacagatccttagagagtgctaggatggcatttgagatccaaacctaatttccagccacctgaaaaacaaaacaaatcacaaagaaaacattgtcttacagcctcaggggggagaaaaaaaggaaatgctgtcgatctcttaatagttccagcacaaagaacaaagcattctatcagtttagttcctttagcagattaaaccagttgttaaactgaccaattaaaaaaatgcccagctacgcagcagcttttctgcccacgatctgagctcctcctctaccccagggatccaggcctcttaccggaggagtactgaggggagggggctaggctgggtcctggaacagccctggagacctgtaggaaggtctctctctctcctatcccccctcccctttagcaaaacttcttagaacaaaaggctgttatttaataaacacctgcaccctgttttgatggagtgtcctgagctgtgccatggactgggaaaaacagggtggggaccttgtcctttgttactgcctatgtaagaggctggggtgctctcaggggttgtacagcctcctgtgtctttccttaccctctttacctttgcctgaagggcctttgaacatggcttgagagatcctgcggaagccaccaagccagcttgctctgtctccagacagcaattttaggcgagtctctacttgggcctttccaagagactcccttttccaggcactgcacagctgccgctggtgacccagaaaggggtaggagagcgtgggctcagcctagccttggtgcaggtggcaccgctctctgccccttcccactctgcctggatcaaaggagcctcctcagggagcaggaaaatacttctcccaatagccccaccagtgagtaaacagccggggcctcttgcagcttttgaagctggtgcttcaggcctggaggaatgcagaacatttcattttaggggtggacttaggtttccactgctgtcggtatttgcaaatttgaaacaaatgccctcatttagcagcaggcaggctgagcagtaaactggggctgtttaagggcgtttatgatggtcacaggtatttgtggagagagggaccccagcaggtttgggaaaagatagagggtttatggttaggtgggttgtacaaagaccctagccaggtctccagtggaggttgttgttaggtgggctttgtcatacaaagcattgctgcctcctgctcccccaggaagtatctccttctggcagacaaaggtttgggatggtgtttatcctcaggctctgatgctcagggccttgtccctcccgcttggttgccaaagtatcagatttccaatgaatccttccttcttctactcccaggacctgaaaggctcgttaaatgtgctttatatataacaagttggctgagaggttcccccctcacttccagccagttttgtaaggaaggagctagggaaacctgttttctttttttttgttgttgtttctggaagtaggacctgtgaaggtgcacttgaagaaagaccctgattttagggatcagccaagtcagggttatttgcctctgatgggtcagcctaaccaagaaggatctgtctgaagcctggctgccccctccttgctccccgcttcccagggaaattcagaaatctgttcaggaactgacttctggctccacagcttactggctgagagaccttagtttacttcacttctctgagcttcggtttcctcttttttttttttttttttgttttggagatggggtctcactctgtcgcccaagctggagtacagtgacgtgatcttggctcactgcaatctctgtctcctgggttcaagtgaccctcctggctcagcctcccaactagctgggactacaggcccacaccaccatggctggctaattttgtatatttttgttttagtagaaatggggtttcaccatgttggccagtctggtctccaactcctgacctcaggtgatccacccacctcggcctctcgaagtgttgggattacaggcgtgagccactgcgcctggccggtttcctcttttgtaagataggaataataataccagtctcgttagagttcttgcaagagttgagtgagatggtactgcatttcattaactcttagatgttttttcttttcacatttgcacatcttt

SEQ ID NO: 120925 - DNA, 1034 bp, Homo sapiens
gaaaccggctgcacaaagacggatttcacttcaggctaagtgttttgttgctgaatcatttgcattcattaaaagtagtgaagggtgagtgatatttaaggcaacatgaccagtttgctgggggcctggaggccgctgccttagaacctcattaagaattcttggggccgtggagagcaagggagcagctcattcaaagcttgcttaacttttgactgccttgggcataggccagctactaaaatatgaaaaatgtttgcccagcagcccccagagcttggccagactgccctggccaaagaaaacacacacttacaattcattatttagcctcctcctgcgcggttgcttgcatttcttcctctccagggaccttgctgagttgggggcaccaggttgggtggggggcaggaaggcccctgcatcttttaaagggaagctaaacctgaagccggtgctgtctgtactccctcaccccatcctgcccccacttccctggtttatttcaccagtgccctactggtggacttcaggtttgtttcagagggtttcctattttaaacaatgccaccacaaatatccttgtacctgtctttgtccttgtgcttgtatatctgtaggacaaattcctggaagtggagttgctctgtcaaaggatatgaacgtgtcaaaattacatagacgattttgtatttgttatttttgtggagagggagattatagctttcatcagattcttaacaggtctatgaccaaaaaagtttctgaatcactgctctgcagtgggcctgtgaaatttgcacaggataatctataaatattggtaaacatagttcaaatgcggggcattgctgggttgaccagataatttgtcatccaaacatccccacctccatgattactaaatatgccgagatggccagataacccagggttgttcaggtaactggcagtgtgggagcccagtgcccactggaaatcttatccctgatctctgagactgtgttctctgttcaccaccagttagcgctgaa

SEQ ID NO: 120926 - DNA, 1021 bp, Homo sapiens
aaaaaaaagcaacttgcagaatagcagatattagagggtgaattgtgtcctcccaaaatacatgttgaagtcctaagcctcagtacctgtgaatatgactttatttggaattagggtctctgtagatataatcaaggtaagatcaattcattaaggtgaatgacgaatcctgtatgactggtggcgccccatgtgaagagaaaaggcccagagacagaagtacaccacaggaagacggcttgtgatagcgaaggctgaggttggagtgatgtggctacaagccaaggagcaccagggattgctgacagccaccaggagcaaggacagaggcgtggaacagactctccctctgtgccctccagaaggatccaacctcaccaacactttgattttgcactctggcctccagagctgcgagaggataaatttctgttattttaagccacccagttgtggtaatttgttatggcagccctgggaaactgatagagcaggtatggcattatcccgtagccgtgccttctgtgactgcgcctgccattctctccatgacaaagagcttcttcagtccatttcctaccctagcaaccacctccttggaaacagggactcattgtggttgtgatttttttttgttgttgggggacagcctgagcagggtgggtttgcatttcacctcctttgcctccttgccccaaagtggagttctaatggcctcttggtgggcttccttctcctcatccttttaaccctgagcattctgaattactcagagttctctgatcatgcctggtctttgtgcttctgacttgttctatttgccaagtcccgttcctttttttgtttttgtttgtttgttttttgagacagggtcttgctcgattacctaggctggagtgccctggcacaatcacagctcaccgcagccttgacctcctggactcaagggatcctcctgttgcagcctcccaggtggctgggactacaggcttgcaccaccatgcctagataatggggtctt

SEQ ID NO: 120927 - DNA, 1005 bp, Homo sapiens
gagggcagatttgttaacttgcacagcaggtggaatagctcacccagagaaccatcagtgccacgctgagaagtaatgggctgcttggagctgcttccagctccatgactgggttttgtgtcaggagatgtgggctggcacctatgagcatgttgggagacggaccaacaccaggggcagcccctcatctggacccagcctgggggatcctggaattgtcttgacactgactttatgaggagactgattctcatgccataaagaacagaaccccacctccagggacttggaaggggctctgtaggccaagattagtttccagtggtttgggaagggatggaaaagactccgttagtacctttctgcccttgcccagccagtttggctcaaggcagagcctgctgcttcgtgtagcagttccaggtggcccatttcttcttccgggggcggggggatcagggagtcctcttctgtgttcaaggcccagtggctccaggcctctgcaagtcgcccacgcgggctaggaacaaagtccagtgtgttgctcctgccgccgccgtaaccatgccacccacctgcccggctctgccctccgcctccctaaacccatctgccatacagtgtaggcttcttcctctttcctttgttcccactgactgcagttccacctttggttgcggggaccctgtggccagagctgaactataatggtgcaggaaggggaatgacttcaagtggaactctggaaccacatggctctcctcttaacacagagaagctgaccttggccacagatggattttcagggataaagaacaggacatggggccgggtgcggtggctcacgcctgtaatcccagcactttgggaggccgaggcgggcggatcacgaggtcaggagatcgagaccatcctggctaacaccgtcaaaccccatctctactaaaaatacaaaaaattagccaggcgtggtggcgggcacctgtagtcccagctactcgggag

SEQ ID NO: 120928 - DNA, 1027 bp, Homo sapiens
ggatgaagagggttattccggacagggatgtctccccaaatcttggactctatgcggatgttacctcgctccattctgtgaccactcgttccaccaccacagtgctcttcaccctgccctcccccagatattgccctatgccggcccctggtggcctgaagagtgagccacattgtgtgtagagctgggagatctaatatcaacttgattctgcccctgaatcagaattactgtgtgcccttttgcaagtcccttcccttcctcaggccgtttctccatgtataaactgaaaggtctagccctgaccctctgatactgtatcctctccactggccactgagtacccctccccaccactgctgactgtgtctgccctgcaggcccacctaccaatggttccgagatgggacccccctttctgatggtcagagcaaccacacagtcagcagcaaggagcggaacctgacgctccggccagctggtcctgagcatagtgggctgtattcctgctgcgcccacagtgcttttggccaggcttgcagcagccagaacttcaccttgagcattgctggtgagcctggggtgggggcggaagggatgaggtgagcacaggagggcctcaccacccaggctgcatgctcccccatctttccctctccagatgaaagctttgccagggtggtgctggcaccccaggacgtggtagtagcgaggtatgaggaggccatgttccattgccagttctcagcccagccacccccgagcctgcagtggctctttgaggatgagactcccatcactaaccgcagtcggtaaggcatctggctgggagcattccagtaccatgtaccacacacatgcattctgtagaagggggtgcgatttgtatcacagacatcacagatttgtacatgtattatttcaaatttccaagagacacagttgaatgttttgcttttacaagatgagtctgacacagggaagagtctctgggaagagcccttttccagtttgcacaaaggcactc

SEQ ID NO: 120929 - DNA, 1179 bp, Homo sapiens
atttgcctcattgcttcccgagctgatctcctgtagttggaacacacacctgcacgtgcacctgagcaagtgtatgcaggcacacacaccagtctggagtgtcagcttccttctctctgccctgttcctggtcgattccttactacatttccgactttgcaggaaaggggttcccttgcattcctttccagaactaggcctattggccactttctccaaattgcactctcccctctgcagccccccacacctccgcagagccacagtgtttgccaacgggtctctgctgctgacccaggtccggccacgcaatgcagggatctaccgctgcattggccaggggcagaggggcccacccatcatcctggaagccacacttcacctagcaggtgagtctctgggtctggggtgctgatgtgggaggctgcctttaacatttttggcacatagagatttaggcttctgtttttactcagccgcttggagggcaggggaagaaaaggatgctgggagtaggaagaggatatgcagagggctgcaggggagggtttgtgctgggaaagggcctaggcttgctgtgggagaacatcatgtaccctgagacccacaataattgggccattcctcctacttatgtccttgcagagattgaagacatgccgctatttgagccacgggtgtttacagctggcagcgaggagcgtgtgacctgccttccccccaagggtctgccagagcccagcgtgtggtgggagcacgcgggagtccggctgcccacccatggcagggtctaccagaagggccacgagctggtgttggccaatattgctgaaagtgatgctggtgtctacacctgccacgcggccaacctggctggtcagcggagacaggatgtcaacatcactgtggccagtgagcacctttgccctgaaggtcaaggagaggtggaggggaacacaggtctgggtgtgatggacagaggcttccctggtactcacctgaggtcctctcagttctgggccctgcaggcttgggaatcagttcactactgggagtcggtgtagacagtagagagccaggcacaggggttagggtgggtgctccagaggaaatagtgacagccctcacagaaaaatggtcctctgggtacagaggaaagagcaatagactaggaatcta

SEQ ID NO: 120930 - DNA, 1081 bp, Homo sapiens
atccgtgtcgcctgtcttggcttccgatgcaaagccagcttgggaacccctggcctcatctccttcagagtcttcgtttgaccttggtggggcatgaggacctgctggcccttgttaaagccagtgaaggtggtgaccctcccgggccatctgttaagttgccctgttgatggggttgggaggagttagtagagaagcagggcttcttttgcttagcagcccctgcccagacccatctgtgtgtctctcagacaagcctgtgccggaggagtcggagggccctggcagccctcccccctacaagatgatccagaccattgggttgtcggtgggtgccgctgtggcctacatcattgccgtgctgggcctcatgttctactgcaagaagcgctgcaaagccaagcggctgcagaagcagcccgagggcgaggagccagagatggaatgcctcaacggtgaggggccctggacggggaggtggtgcccgtgtgcgggagctgagcgccctcccgcggccacggaggggagagcgccagcactctggaaaccgagcggctgttgctgggtcctggagctgggactgccccacccctagcgggaagcctggagttggattcccagggcctcgtcttctgagcaacctggcttgagacttcttcattggagccccttggaccagcttcctatgattccctgctgtttcctcctcccagcacaaaaccacagatatcattagtatatgtacacacgttgctgttgcatgtcttgtctccctctatgagtctaagagctcccccaggggcagtctttctgtttacttcccttctcctatccccacttcctggactgggagctccttgaggtcattgctgggtctctcctatcagctcaggtgttcaggagcagaggttgggtctccattattgtgattttccctttgtgcctgtttagggctttgcccaataggaggccccatgaaagcaaaaatccttatgtgtagctatggtattaaggaccagtgattcagattagatgtctgcagttggcttcatctcagaggtcataatcagctgcatcacta

SEQ ID NO: 120931 - DNA, 1015 bp, Homo sapiens
agaccagcctgggcaacatagcaagactctgtctctacaaaaaaattaaaaacaaacaaacaagtacttatgaatgctttatgtatgtttctgctgctggcgttctcctttgtttgtttagattagattgtaaagctctggaggacaggggtttcctctcaggaatctttgagggcagagggtaggggactgttttcctcttggctcactgaagatgggggctctgttgccccacctgtctggaggttccccttggggtagaaatgccaattctcctcctttctaactgagacagcctctaggaggcgtctcctatatatttttaaagttctgcactcccagtgaacttccccctgggaaaggggcccaggctagcttaggccttctcactgcctccccaggcaggaattctgcgagcacctgcttggtctgaggctttacagccaatggctgtgcactgacctgagcgagatgcctggcttttcccttagggagacctcaagcagttcctgaggatttccaagagcaaggatgaaaaattgaagtcacagcccctcagcaccaagcagaaggtgaggacagggagtgaaggagggagggagagggtgcccaggggtgggccaggagcaacagaggcaccatttattgagggctctctatgggccaggccctatggtaagaacttcacatgtgttactgtaattatcacggtagtcgtctgaaatatatactactatccccattttgtggatgaagacattgaggcttaggaggttgtctgacctgtcccaggtcatgtagcctggaagtggctttgcattgccatgctggcttcacggagaagagctaccctcggaccttgcctctgggcaggagcttgcattggagcaggacgcctgcccacctgcaatgagctctgagctggagaagcagcaagcagtcctagtgcaggggcctgctgggctagctgtgggcctgagcgtgtttcttcagctctgagtggagaagactcttc

SEQ ID NO: 120932 - DNA, 1030 bp, Homo sapiens
aggattgcttgagcccaggagtttagaggctgcagtgagctgtgatcatgtcactgcactctagcctgggtgacagagcaagaccctgtcacttgaaaataaaaaatatcagctatgatttctgcccacttatttttcactggacaagtggttactatgtatgtgcccttaggcccatgtgccactcacttaatctggcacttgctgtgtgtcagcatggtgtcaggcactttagtttgcttagttcagtcttctaacaacccaggaaggcaggtactgttattatccccattttacagagaaggaagctgaggctgttgtgcttctgggcttcctacgcagcacaccaatagtgttgaaacgctaccaagggttgtgttgagggtggtcatcttgatgcctattcctgggctgctctaacaggcccctttatctctccaggtggccctatgcacccaggtagccctgggcatggagcacctgtccaacaaccgctttgtgcataaggacttggctgcgcgtaactgcctggtcagtgcccagagacaagtgaaggtgtctgccctgggcctcagcaaggatgtgtacaacaggtagaagggcatgcgtggggtgggggctccccattttttcccagagggtgaggggcagaggacagatagtttggggggtgtgggaaagggtttagtgcctgcttagtccaaagctggagggcctgggatagggaagagctttctcatcctttttccaagggtgcagcaggcttcccacccagtgcacacccttggtggttgtaaaatgtctctagcgattaaataaataaataaaccttttttaaaaaataggcaaatttgataaggatttatatataatctatttatatggctctctctgtaacttcctgaattcagtcattattattttgaagtctgagacttatgcctcagcacccatgccagagcttgctctagacagcctacgagggctctgcagcgctgccgggaacatcaccctgagtccctctggttcc

SEQ ID NO: 120933 - DNA, 1401 bp, Homo sapiens
cccacctgccgctggccagcattgccccagaggcatccttgggtggctgcttgtataaactgcaaggtccacaaagtgttgaacaagttgttgaatgttttggccaacactgcacctgctgtcttccctacagatttgcaggctgggaaggctagacttcctcagcccgagggctgcccttccaaactctatcggctgatgcagcgctgctgggccctcagccccaaggaccggccctccttcagtgagattgccagcgccctgggagacagcaccgtggacagcaagccgtgaggagggagcccgctcaggatggcctgggcaggggaggacatctctagagggaagctcacagcatgatgggcaagatccctgtcctcctgggccctgaggcccctgccctagtgcaacaggcattgctgaggtctgagcagggcctggcctttcctcctcttcctcaccctcatcctttgggaggctgacttggacccaaactgggcgactagggctttgagctgggcagttttccctgccacctcttcctctatcagggacagtgtgggtgccacaggtaaccccaatttctggccttcaacttctccccttgaccgggtccaactctgccactcatctgccaactttgcctggggagggctaggcttgggatgagctgggtttgtggggagttccttaatattctcaagttctgggcacacagggttaatgagtctcttggcccactggtcccacttgggggtctagaccaggattatagaggacacagcaagtgagtcctccccactctgggcttgtgcacactgacccagacccacgtcttccccacccttctctcctttcctcatcctaagtgcctggcagatgaaggagttttcaggagcttttgacactatataaaccgccctttttgtatgcaccacgggcggcttttatatgtaattgcagcgtggggtgggtgggcatgggaggtaggggtgggccctggagatgaggagggtgggccatccttaccccacacttttattgttgtcgttttttgtttgttttgtttttttgtttttgtttttgtttttacactcgctgctctcaataaataagccttttttacaacctgtttctgagattcattccctgctcttgctcgtggaagatgttcctttttcccccgctgatgagaaggggccgtgtgcaggccgggtgcagtggctcatgcctgtaatcccagcactttgggaggctgaggccagtggatcacctgaggtcaggagttcgagaccagcctggccaaaaaggtgaaacccctgtctctactgaaaatataaaaattagctggacatggtggcaggcgcctgtaatcccagctacttgggaggctgaggcagg

SEQ ID NO: 120934 - DNA, 2859 bp, Homo sapiens
ggtgaggagcggtgatgggaggctacgaggctgccggggaggtggataatgagaacccgggatcagtaggtccagtgcactccggtgttcggacgagggcgccggaaaagcagggagcaaacgagaaggtatggaggtgaggaggctggagctgcatgacaacaatgagcgaacatgtgtgggaggaagtgggcaccacgagagtagtgctggttggaaggacaggcagggttagggaccaggtaagggagcggggcaggagaactggtgctgccctgagcagcaggaacctagtcctgcgccggccgtgagtcttccatggcatccactgggaaccacatgctcctggcaggacccgctgcagaatctcctgccgttaggacaagtggggtttccagccctagggagaatctatgcttggatggggtttgggggaagtcagggaggcttgcagaggtacctaggaattcctcttctgccagccagtgaaaagtgttgaggaaaggagtcattttggggtgtagacgataagggaagagatgaaagcagaggaactgggagacaaggagctggatccttgggaacactggctggtgtttatttctgtcccatgtagaaaccagagctgcttccaaggtggtttgcagaactttgttgggagagtatggcatctatggggccatccttgaaggtccccttcctgggctcatggcaggatgtttagtgctaatctaggtctcgtctcccatcactccagacactgttgtatcagtgtcccttgtcacttgatcatcagtggagaagattgtggggggaggtaattaaggaaaactctcttctctccttccataaccttcttcccaagacaaaggagtaagggcagtaaagtattacagggcaaaaggagaaactaggctgtggcaacaagttggagcctgtgcagtttctggaaagaaacatgggacagttggagcttaaatggtccattatcactaatgtcttgtacaaattccagtgtgataggtagggatccatcctggtccctgtgacagtgagaaggggtgaggctctgggacattccaggcactaagctgtgttggggagcagctagctgggtccttcgtatcccctgaagttatatgttccatcactgggggctgttactgtttgcttggggtatcttcaggtcaatggggctgctcctcaaaggaggagcatgggtagttttgctgcttccagagatcctgataggacaccctgccctcagagtcattagagacgaaggtcattatgggaatgggggaatgacatcactgtataattctttttccaacttctcaaggaaggtagagataaaaagtttgctgacctgcccatctccctcctcacccctcaggcctatgagctgtccacgctgacagggacacaggtgctgttgctggtggccagtgagacaggccatgtgtatacctttgccacccgaaaactgcagcccatgatcaccagtgagaccggcaaggcactgattcagacctgcctcaactcgccagactctccaccccgttcagaccccacaacagaccagagaatgagtgccactggctttgaagagacagatctcacctaccaggtgtcggagtctgacagcagtggggagaccaaggtgtgtttgggttgcctatgtgagaggagggaagggagtggggtccctctccctttctggcccaggacaggtggataggtgcccaccgatgtggagtggagccggattaacgaccctcgtcctaggggacaggtgtccatcctcactttcctgatagaagaccgcccccctagataagcgggcggcctccgtgcccatataaggccggcttgggctccacgccggcctcccgcccgcagcccgcctgcctggcagggcctttgcattcctcccgccagctgtctccccgctaggggcgggggtgtagtttagcccggccctccgggctgggtcgccagggagtagaaagggagcactccggtcccggggtcctgggaatccagcactcttggcaggcgggctggttgactgggccggggactaccttacaagccagccgctgccctttcagggtgttgggggcctgggcagttagggagcgcatttgcctgctgctagggatgcctgcgctgttactcctcccccttccttttcccggtaaggagagggggtggggcttcctcccttgctgtctggggagctccaccttccgggtggcacttaactgactggccaatgggaggaagcggcactgtttgccttagcaacgcctctgccaatcaagggtcttgggcccagctgctttgcaaacgtctcgtgctgacccaccccgcagcctttgagcctctggttgactcatttcgggtctgggcttggtggcttggttctcagtttccttcttccccttctaagaacgaagtcttccttaggggagagtcagtgctgtaggctacctcctctcttagtggcatatcatctgtaataatttttaaacttttataacagtagggctcatttattcccaggaaattttgttggatgagtacattcttttggtagtttacatcttgggtgtttgacatatagtgtgtcattgccagattctcaagatctctctcaaactcttaagttccctgagaaactcagttcctatctcagaagcctgacaaattagagctggaagaactctttgaaagaaaacgtagtagcccagccccctcatgcttatagaagaggaaaaccgaggttcagaaaaggggactggttatttcagggtcacttagatggtcattaccagagctaggaacagaccttgg

SEQ ID NO: 120935 - DNA, 1027 bp, Homo sapiens
cagtggggaccagtgccgagctgacacatgtctgtgtttgccagtgacgctgcccgccaccatcatgacgtcatccgtgcccacaactgtgggtggccacatgatgtaccctagcccgcatgcggtgatgtatgcccccacctcgggcctgggtgatggcagcctcaccgtgctgaatgccttctcccaggcaccatccaccatgcaggtgtcacacagccaggtccaggagccaggtgagtagaggagcagggctaaggaaaggaggaccgtttccttctttatacacacacacacacacacatacacacacatatgcactgatgcctacaaatatttctacccaaatacaacacagacttggatgctcacacacacatttggacaccccacttggacactcacacccgcatgcaccctcagacacactggcaccctttcccttgggctcttacatctgagactgccccagtcacttgtgcatttgacaccactcctccaatatctggaagtttcaacaaacaatttgagtatctcctgtggttttccaatgtaggtggcgtcccccaggtgttcctgacagcatcatctgggacagtgcagatccctgtttcagcagttcagctccaccaggtaggtagggatatctttcaccccatcccagatagccacttctttgtcttgaccttaggggatcctgttaccagttcatcaaagccaaaatccctagcctggaagcccatctgcttttctgctcaggcctgtggttggcaggcagggaagccaggggagcctgaactggctggccagtccctgcccctcctcatacatccccttccctccagatggctgtgatagggcagcaggccgggagcagcagcaacctcaccgagctacaggtggtgaacctggacaccgcccacagcaccaagagtgaatgatccgcccgccgccctggacagatggcccaagggatggcaccacttatttattgttgccttttcacgttttctttacacacacgttg

SEQ ID NO: 120936 - DNA, 1380 bp, Homo sapiens
aatgactttatttttctaagtgtaacctcagtatttatgtaatttgtacaggggccatgccccacccccctcctccccctttggggtagaccttgagggtgggccagcataggggggagggtcttttaccctgtgtcagagcctaccttcaccacctatatccagaaggggagctttttcagaaacagggcagcagtggggtgaaattttcttaacccctaagactgccttcagtaggaacaagctggcttctgtgattaggtgaagggatgggggaagattttatgcacagcctagttatcaaggggatgatttgccgacatgtttgagaaccccctaacctctaaccctcattgctgtcttgccccagtttggggtgccaagatggaagtcacctttctgggctttctcctggagatagctggggcttatgggtggctttcaaggctggggcatggcaaatcaggggccagagagcaggggagcttgggactcaggtctgtaactgcccagccccttttctctgctcttgtttcactccaccatcactcactcactccccactcccccacccatggggaggagacctttgatgaattcttcctctccttcccacaaaagacagacccagtgagtgaatcaggcaaagtgcttataatgtgtgttgtgtgagcgtggccttgggaggacatgcgtgtgtcagggatgagttgaggtgatatttttatgtgcagcgacccttggtgtttcccttcctcggtggctctggggtatgtgtgtgtgggtgtgtgcgcctgagtgagtgtgtgtgcttgaatgtgagtgtgtatgtcagtggtttctacttcccctgggatgctgacccaggaatagtggacatggtcacagtcctatgtacagagctttcttttgtattaaaaaaaaatactctttcaataaatgtatcatttttgtgcacagactgtggggtctttggttctgtttttctacttagggagggatgggggtatgaacgcgaggcaaactcctaaaattgctgctctgagtagcgatccgggctgcttgatgagaacggtaatgctaaggtgtgctttgggctgtttaattctatacgatttaatttaaggaaagttttgcggggccgaggaccttctccctgtgcgtggcttcgctaggtgttaaggccaacgcagaggagcaaattttaattaacaggaaaagtgacacaactaatccaaagcattgctgaagggtttgggaaactcatgggcacctgacctactgaaaagtcaaaaagggcagccttaaggtgggaatgtgggttaccatgtttcgtcagcatgatcgctgtgatgggagagggaggattaggagggccga

SEQ ID NO: 120937 - DNA, 1048 bp, Homo sapiens
acgcccctcttccagtgcagccgcccgcggtagcacgcatgctccactcgcgcgctgttccgccacgctcggcgtgggccgcggtgggacccgtaggtgcccggccgtgcgtgcactcgccgtgtgacccggaagggagctctgaggaggcggggccaggacggcgggaccggccgctgggtcccagcgagggctgagccgggcggtgggaggtgagaggagagttctgcgccgacccaatccctccccttctcctgtcccctccccggtcctttagccactgtccatggggctgacgaagggaaccaggtcttgctctctgagattcactggatcttttcagcttttttggaccgcgcccccaaccatccttccccctccccccaaacccgttccctctgcggtgctggcctcctccacctccccacggctctgcaagcttgggcttgaccttgctatctgctggtctcatccatgcgtccagagctcacccccacacctcagtttattgttgctcttctaggccgacgttacacctcctacctcctcctatccgattcttttacttccccctgctgctaatcagttgcccgctggcacatcgctggctaccatccaggcttgccccccatcctaagtggacccctacctccattgaggtccacatccatctttctccctcctcttcacctctactctcatcttctgtccctgtaccccaacatgacccctgccctgaccactatatcttcatctgggtttaccttcttccattcttattctcactattccctgttgcccctgcactgcttcatatcacgcatatctttcctgattattccactcccatttataatcggtcttaataactttgcatttatttgatgactcccctaccttctccatctaagaataataacagattatgtttactgaacactctttatgtgctagatgctgttccaagtgctttacatacatgatcctactaaattcatgaagtaactatgaatattactaccatcttgcagaagaggaaacaagctca

SEQ ID NO: 120938 - DNA, 1051 bp, Homo sapiens
gggctgggtatgactaaggagactatcagggcaggagcagaggccacagcatcaacagcggtacatctgggcccttggcattcctggcacacccctgcccagaggcaggagtccctgaccagccagcttcctccatagcatgacctgtgccaaatgtaaccatggattctgctggcgctgcctcaagtcctggaagccaaatcacaaagactattacaactgctctgccatggtaaggcgctgggcactaggggagggcagaggcccagagccgtcggggaggggtgctgctaccaggtcctgggcagacagggctccttgtgcagtgcagcattctagctgttgggatagaggctcactgtggggaagacagagccacctgggcctgcagatgctggaaagtctgttcacagggaccttcagctccagaacaggacttctcataccgaggtggctacagaaaggctggggagggctgggcactctcagaaggcagcagggcagagcaggaaagagcagggaccctgcatttagagcctggctctgctgcttagcatgtggctttgagcaagttcatttacttctccaagcctcaacagcctctgcaaaaggggtgaataatatgacctactccacacagtcatgaggactgaatgaagataatcgggggaggtgtagaaaggcctccgtgaatgttggcttttccacttattaactccctcctgtccaaacaaaacacccaatagccctcccaacgtatccttgctaggtaagcaaggcagctcgccaggagaagcggtttcaggactataatgagaggtgcactttccatcaccaggcgcgggtgagtcgggaggaaacagcgggtagatgcctgcagaagcaggttggggtggtggggtggaggggggtgggctgaaggtctgaccgggcaggtggtgctgcgccacctgtgctggtactgatacaccttcctccacacaggagtttgctgtgaacttgcggaaccgggtgtctgccatccatgaagtgcccccgcccagatccttca

SEQ ID NO: 120939 - DNA, 1040 bp, Homo sapiens
ccagccaggggaggtggtcagggtgaagagttagacttggtggcagggttgagaggtggctgaggtgagggcatggtgggtgacgttcttggtggtctcccttctgcagcctcggaatgtggccgggtttcgaggaacggttcgctatgcctcagtcaatgcccacaagaaccgggtgagtggcaaagcccgggatgcaggatgtggaggtgggaggggcaaggtcggggtgcagtgtgctgctggggaggggtggggagaggagagtggggcaggggctgcaatctgccaccccagagaccctgggctggaggaaggcccctctgtggcagactcagtgtccccttcctcatttgtttcggaaaccccatcctctctgttctcactacagacccctgtccggtgaggaagcacacacggtagttttggctgtgggactctgtgggtgttggagggttggggatggagctgtggcctcagggagaccccagttctgtccttaggggcctgggtgtcaggcctccctgacagatgcccctcagagaagggtcagccgcccattcccagggaaggacctgagagctgcaggtgactccctccccccacctccaggagatgggccgccacgacgacctgtggtccctcttctacatgctggtggagtttgcagtgggccagctgccctggaggaagatcaaggacaaggtgagccccaggcagctgggtctgaggtggcagaaggagtgtcagggcagctgggactccatctccctgtggcctcttgcctccaggaacaggtagggatgatcaaggagaagtatgagcaccggatgctgctgaagcacatgccgtcagagttccacctcttcctggaccacattgccagcctcgactacttcaccaagcccgactaccaggtgggagcctgctaccctgcccccgctccctcgacaccactctgtgagtgactgtcccccagcagacctcgctcctgctgaggctccacagccctgccttgtccccaagcctctccccttggt

SEQ ID NO: 120940 - DNA, 1035 bp, Homo sapiens
gggcccgtgagtcctcacccagagaggccctagctggcctgagttggaggagcagccctggcagacctggcagtcaagtgggctggcaccattgcgttgtaactagccattgctcccaccacacccagcaccaggcagcaggagagggagcaaaatgtgtttggggtccttgctccgctcccgtttattcatccacactcactgagtatttactgtgtgccatgtaccacaggcatcagaggtgacttgcacaataggttgtacccgtaggaagtgcagagtctagggagggtgacagacagtgtcaagagagagccgagaattaaagtcaggagactgaggtctggacctggctctgccgttcccttcccagtgactgagggccagtcagtgtccctttctgggtctccaggtgagggagctgaggttcttccgaggttcatctctaaagtttttcttacctgcagattcctacctgtgtcctgggactcatcctcactttggggaattctggccaagcgggtggggagagagagatttggtggggtggggaagcacaggccgattctgtaatcagtctcgggctcgggtcctgcttgtgacagggactggcactacctatgtcagcaagagatgagttgtgtgtgtctttgggggtgaggtgtttgtgggcctcgggttccccacagtgtatagaatcgaggttggttagcactctgcccctgtgcatgtgcgtttgtgtcagcggagctcgagctgtgcactggtggatggatgtgtccacatgtatgtgcctgcatgtgggtgcacacattattgcatttgtgtagaatatgcagcaggtctgcaagtgtgtacagaaccacagatgcctagaatgtcaaagcatttctattgatggtaacaattggagtaataattctaataatgacaacaatagttagcactgtcctaagcactttcatgtttacatgtatattcttcacaacaacactgtgaacagggaatcctgattttaaaagtaagaaaactaag

SEQ ID NO: 120941 - DNA, 1032 bp, Homo sapiens
accacttgagcctgggaggttgaggcttcagtgagctgtgattgtgccactgtactccagcgacagagcaagaccttatctcaaaaataataaaaataaaaataaaacacctcttcccacacttccttgcccaggcccaggtcctccatagcctgggagtcccttattcaactgaattgtccttaccctcaagaccagctcccagcaccagccactcacttctcccatgggtggcaggagggaatgagatgaaggagggacagacatgtagacatatccagaagggtcatccaaggccaagtcatctttaggaggcaatgtagtgcccaccctgcctgtcctcccactctccggcctgagctccccacccccatgctggccctgcccctatccccaactctccaaggggccagcctcaatttatgtttggctctgtctttatctctgactctctgtatcttgttctctgtttctcacttttccttgccatcttctttctgttgatctctgtctctctgtctctttttctctgtgtctctttctgtctcttggtcacttcgtttctctttcccttcatctctcaatctctctatcctcaaatctcaggctctgattaatctcatctttcacttcctgtatctcccgctccccagctgcctgcagtcctcaccagaggctgaggatgcctggggcacaaggcagggtgacagctagcagaagccatcgccagtcccgtatcaggtacccaaccagtgccagcagcatcacgccccctgtccagaaggtgctgctcaggactccagccacggtgcggtgctccacatccagccactccagctctgggccaggacaggagacaggaagatggttagtgaggaccagatgggctcagcctcactctgacaactgccttcttccagccctctaggtcctgcctgtttcttgcctgcctcacccagtggcatcacgatgatggtaaaaccagccagggctgagccagtaagggtgcgggtgatggcaaacattacatag

SEQ ID NO: 120942 - DNA, 1025 bp, Homo sapiens
tgagactcctttcaggttcggagtgaacttctcctattacggcctgagtctggatgtgtcggggctggggctgaacgtgtaccagacacagctgttgttcggggctgtggaactgccctccaagctgctggtctacttgtcggtgcgctacgcaggacgccgcctcacgcaagctgggacactgctgggcacggccctggcgttcggcactagactgctagtgtcctccggtgagcccagtcccataggttctgcccaccccagaagccgggccaggaaccctgcccactccccggagaccccacctcctggccaagaacccactcctcccccagatccctgctcttacccagtgagctcagactctccaccacttaagtttggcccactctggagactccgcaccctatccagaacacccctggctctcctccaaggccctctcactacctgaacccgcttccctccagatatgaagtcctggagcactgtcctggcagtgatggggaaagctttttctgaagctgccttcaccactgcctacctgttcacttcagagttgtaccctacggtgctcaggtgaggaagcctgcaactgatctgggggtatggggcttgttagtcacgtgtcttaaccaacacttctacatacacgcaccacaacctggtctctcactcattttttttttaattttaatttttggtagagacggggtcttgctatattacccagactggtctcaaactcctggtctcaagcgatcctcccgcctcagcctccaaaagtgctcgtattacaggcactattacaggcatgagccaccgcacccagcctctcactcgttctccacactacacccagaatacagagctaatcagggccctctgtgtttgccctagtcttggagaaggcagagcatcttatcttctgtactatgtgaccctgagccacgtcagacatcctctctgggcctccttaagaaaacaaccccaaggccgggcactgtggctcacgcctgtaatcc

SEQ ID NO: 120943 - DNA, 1149 bp, Homo sapiens
gtgaacaccatctgcctccctcatcctctttctctgaacagacagacagggatggggctgactgcactggtgggccggctggggggctctttggccccactggcggccttgctggatggagtgtggctgtcactgcccaagcttacttatggggggatcgccctgctggctgccggcaccgccctcctgctgccagagacgaggcaggcacagctgccagagaccatccaggacgtggagagaaagaggtgtgtgcacaggactgtgtctgtgtacgtgtgataacatgcatatggatgcaggtgctcagatacctgacaccttaggattcagacaggaaactatatctgcacatgtgtacttggtgcatgtatgtgtgcgtgcacaggtgagtgtttcagggtgcatgattgggggcatgtaaactgcaagcataaatgtgtacatgagtgtatgaacacaaatacataaggttgttcaggaagatgtgtatgtgtgcacactcaagtatgcctacacatcaggggtgtgtacaagcatgtgtgtgagtcacttgtacaggcgtttgtataccaggaactggggtgagccctgggacagccctgatggggcaggctggggtggtaggctcggggattaaaccccaccattgctcacaactccttcctccctagtgccccaaccagtcttcaggaggaagagatgcccatgaagcaggtccagaactaagtgggagtggaggcaggccctccacagaagctctgcagcaggggctgggagagcagaagggcaggccctgcaactcaggctgggagtatcgaaccctctgcctagggccggagttgctgccagtacccgctccctctgctcatccatccttgattatttggcttctaggaacagttgacttcccagaatgcagtgggctgctgggcacccctctcacggttggggaggattctgtaaataaaggtgccccttgggttggggcagtggtgacgagctgtgggaagagccctggataggaagccactgagtctgccctgggctctgataaaaccttcaccattaacttgctgtgtgaccttgggcatgtggctttccctctctgggcctcagtctgttcatctcccaaatggataatgaagc

SEQ ID NO: 120944 - DNA, 1048 bp, Homo sapiens
atgtacatgccatacttcaggcatgtacatgccatcccagtgtctgggatggggctgcccacctttggggccaaacaggtagccgtagcaggggacgtggcagtaggggactccatcatgctgagacacagagagaaagagagctgtctcagcctggttctcttcccatctccagcctcctcccaacataaccactcattcctgccctgctcacctcagcatgactcccagcagtcagggtcttgtggcaacgctggcacctcagacacggtcggtgccaatttctgcctaatgacatcaccttctcagctggtggtggaaagaagtggtaatgcttccattctaggggtagagtagggagacctacctgccttggatcacctccctcccccttgctgcccaccctgtatccccctccccaagttttccactgttacttaccaaaatagacgggctccccacagccagggcacagcgaggtctccccagtgaatgtcttcatatggggagggcctttaaaggggaagaggccctggctatgtctgaggtggagatgcccaccagcacctgcctgcatatggtgctgtcctctttcaaaagccatgctcattccagagtgccccacccaggcgcccaagagtctgccttctacaggcccagagctgagccccctctgactccacctcctgccccatccctatgtgtattagggactatctgcttccttctcctgcttccttttcatcctcccaggggctcacgtacccaccatcccaaccctgttagcaactcaatcctcaggaaacttgagctgatataggagctggccacagcacgggtgtcaggtgttggggagcacagtgtcattgcctacttcagggaatggagggaaagaacagggaccagaggagaaaagttgaagaatatgagaggctggccttatcccaatgactcctctcctttagatcattccttccatggccctggcctgggacagacctaagttcctggccagctttgcctctgactagctttgtggatggacagt

SEQ ID NO: 120945 - DNA, 1159 bp, Homo sapiens
gtattttggctttgactctgccatttctgaaatgtgggggaggatggaggcagctgacctctccagttgctgtgttgtattcctacccaatttcctgggcagttgatgcatctctgggaaaaacaccagaaagcttgctgaaatggaaaacttggaagaattgttcatctcttaggcttccatttggatgggcctgccttaacattgtttgaaatgcagcgtgagtagctcttttgtttactgtttacaccccttattggcatgtcaactcctgtacttcccttactctgttgcctttcttgagatgcattgtcctgctaacccacaaacctgtttggaaataaacatggaagaatatctggcaggcttacttttagaagacgacaaatcggtaaggcttattcatggttcattgccaggagcagatatgcttttgagatcacttttatttttgaaatggcctttgttcattgtattgtgatccaataacactttgtattaaattgtttagcagccatttgtgttgtgaaggggtagaagatctctgaaacttgtcttgagattgaactcattccctgttccacaaacccatatgtatcctttcctctacctcctcctttcccaattaatttcaaccatagtacgatgtttggggttgtatattttgttaaaaagattaaagaatttatgagttggcttggacaagtttaactttatttttaatgtgttaattacttggaataaatgcattaatctcatgtttccttctggatttttgttttgaaatcacacacatttgaactccaaaggaaaactagaacagtgaatccctgctgccctattgtctatccgcacccgcaaccatgctttcctcacttgtcagaactacttcatgccagaatgttaggatatatagtctgccccagcgcagcctgggtgggtagtgagtaggcaacagttgtctggtattggtatcttcctgttgtgaagctttttatatacctttgtgttgactctccgtaggattttctgggaactgagctcccctaggacaatcaggttcttgctcttgggaattagggagctcagtcctcagattttctctgtcccagtttcctcttgtatccctgttgtcagcagtttataacctgactcaaca

SEQ ID NO: 120946 - DNA, 1992 bp, Homo sapiens
ctgaaaagcccattgcaaaaactctggtggccctagggaaatggtcagttgtagaacatgtaggcccaaaaagcacaggcagcacctatggcttcctacagcctctgacaaggttgtgccaaagcaggccttatgaaacaattaccccaaagacagacactttggccatatggacctctagttccttccagagtgacactagtagggatatatctccagagaagagtgagcttgacctgggagagccaggaccacctggtgtagaaccacctcctcaactgttagatatacagtgcaaagaatctcagaagttggtagaaatccacctcagagaatctgttaaccaggataaggaaagccaagagctccgtaaatctgaggattgtagagaaagtgagatagagacaaacactgaactaaaagaaagggtaaaggagctgtctgaggggatagttgatgagggagtaagtaccagcattggaccccacagcatagatgattctaatttgaaccatggaaacagatacatgtgggagggagaagtaaaacagcccaacttgctaatgattgacaaagaggctgaacagtccaataaattgatgacaggaagtgaaactccaagtaaagtagtgatcaaattgagtccacaggcttgctctttcacaaaggcaaaattagactcatttttatcagaagctaggtctttactcaacccacaagatacacctgtgaaaatttctgccccagagttgctgcttcattccccagccagatcagctatgtgtttaacaggtagtccacaagagcaaggagtttcagttgttagtgaggaggggctagagaattcagctccagaatcagcttctagaacttctaggtacagaagtctcaaactcaagagagaaagatcaaaagactttcaagttaaaaagatctatgagttggctgtttgggatgaaaacaagaagaggccagagacctgggagagcccagagaaaccaaaaacagaagcactggagctacaagatgtccatccagagttaacagtgacaatagaaagcaaggccctagaagactttgaagctacagacttaaaggtagaggagcttactgccctggggaatctgggggatatgcctgttgatttctgcactactcgggtaagcccagcacatagatccccaactgtcttgtgtcagaaagtgtgtgaagaaaattctgtatcacctatagggtgtaattcctccgatcccgctgacttcgaaccaatcccatctttttctgggtttccgttagattctcccaaaaccttggtgcttgactttgagacagagggtgaacgaaactcacctaatcccaggagtgttaggatcccttctcctaacattttgaaaactggacttacagaaaatgttgaccgtggcttggggggcctagagggaacacaccaggcccttgacctgttagcaggaggaatgatgcctgaggaagtaaaagaatcttcccaattagacaaacaagagtcactcggattggaattaaaaacaattaattctgcaggccttgggccatctccttgccttccagaccttgttgactttgtcacacggacctctggagttcaaaaagataaactgtgttctccactctctgagccaggtgacccttctaaatgtagttccctggagttggggccattacagctagaaatatcgaatgcatccaccacagaggtggcaattctgcaagtagatgatgacagtggcgaccctctgaatttggttaaagctccagtgtcaaggtcccctccaagggagcaggtaattgaagacaatatggtccctcagggaatgcctgaacaggaaactacagttggtgccatccaggaccacacagaatccagtgttcacaactaagaataaatacctagagctacttgtgagtgaatcattggcttctagaaatcagatgcccagatgatccaagactagt

SEQ ID NO: 120947 - DNA, 2296 bp, Homo sapiens
ttaaacttctcaatttcttttttttttttttttttcctctgagatggggtctctctctgttgcccaggctggagtgcagtggtgctatctctgctcactgcaagccccgcctcccgggttcaccccattctcctgcctcagcctcccaagtagctgggactacaggcgcctgccaccatgccttgtattttttgtatttttagtagagacggggtttcactgtgttagccaggatggtctcgatctcctgacctcgtgatctgcccacctctgcctcccaaagtgctgggattacaggcatgagccactgtgctcagcccataaacttttcaatttcttaccttcacaagtagctagtgctgctactatacccttgagatttacagaagatagtttcctcagtaattaataccaacatgagagatcatcataaaatggtaatgggctatttgggagtatagtttttatatttcctgagatgcttggtgctagttagggtttgaggagactcagcaacaggaattaatctggcacaggaaactcctaaattaaccagtataatgttcccaagaggtagaagaaatagaggactgtagttcaagccttaggttggaaagactgtgccattgggattcatctaaatactgcttctgacttcaaagtgggtaaggccctctatactgtaaccattttactgcaaaggggtggtgggatttccattggttgctgtcattctgggtggaatcgacttatttccttgacttttttctacttcttccaggctctgagtttctggttcccatcagtggattttattgccagctctgtgaggaatttttgggggatccaatttctggggagcaacatgtgaagggtcaccaacacaatgagaaatacaaggttggtctttgtagtaggctgtggagtttccaacttttctgaagtaattattttgactttgtcaaatggcgtccgagccagaaaaagccattgacacttcaaattccatataacctctaagttctcctcaatcctagtgggagatgctcagcagatagcatcccgtatgtccttgaggaagataattctggggatttctactaaatgaattctaacagtagcggggccaagatttttttctcttgtattttcaccagtttttgagtctttatcttttttcttcccagaaatatgtggatgaaaacccattatatgaggagcggcggaatctggaccgccaagctggcttggctgtggtcctagagacagaacggcgacggcagagtgagctaaagcgcaaacttagtgagaaaccaaaggaggagaagaaagaaaaaaaggcaaaggctgtgaaagaagtaaaggaggatgacaaggtctctgagaaattagaagaccaactctctgagggtaggaactcccctgaaaaagctgaaaataaaaggaacactggcatcaaactccagttaaaagaagaggtaaagaaggaatcaccaacatcatcttcttttgggaaattcagctggaagaagccagaaaaagaagaggagaaaagttcattggtgaccccaagtatctctaaagaagagattctagaaagtagtaaggacaaagaggatggcaaaactgaagctgggaaggcaaagcctatcaaaatcaagctctctgggaaaactgttgttgcacataccagcccttggatgcctgttgtgacaacttccacacagactaagatccgacccaacctgcctattccatccacagtactccgcaagtcatgttcagccacaatgagcaagccagctcctcttaacacctttctgtctattaagtcctctggaaccactgctaaacctctgccagtggttaaagagtcttcagctgatctcctcttacctccagacatcatctccaaagcatttggaggggaagaggtgattctaaaagggtctccagaggaaaaagtggtgttggctgaaaagagtgagccatctcatttacctgaacaaatactaccacctcctccaccacccccacctccaccacctccaccaccccccgttatacctcatccagctgccccgtctgctgctcaagcaaatgctatcttggctccagtaaaatcaaacccagttgtatctcagactctcagccctggcttcgtgggtcctaacattttgaacccagtgttgcctgtagccatcatggcctcagcacagccagctgccattccttctgatgagacagctcctggggtgagtgagagtgaccgagaccagaccctgttctctgtgtt

SEQ ID NO: 120948 - DNA, 1090 bp, Homo sapiens
aagaggagctggcttgctcattgtggctgaacatgacttgcggagtactgtggatggaataggcaggttgggtcggatcttagtctgtgtggaagttgtcacaacaggcatccaagggctggtatgtgcaacaacagttttcccagagagcttgattttgataggctttgccttcccagcttcagttttgccatcctctttgtccttactactttctagaatctcttctttagagatacttggggtcaccaatgaacttttctcctcttctttttctggcttcttccagctgaatttcccaaaagaagatgatgttggtgattccttctttacctcttcttttaactggagtttgatgccagtgttccttttattttcagctttttcaggggagttcctaccctcagagagttggtcttctaatttctcagagaccttgtcatcctcctttacttctttcacagcctttgcctttttttctttcttctcctcctttggtttctcactaagtttgcgctttagctcactctgccgtcgccgttctgtctctaggaccacagccaagccagcttggcggtccagattccgccgctcctcatataatgggttttcatccacatatttctgggaagaaaaaagataaagactcaaaaactggtgaaaatacaagagaaaaaaatcttggccccgctactgttagaattcatttagtagaaatccccagaattatcttcctcaaggacatacgggatgctatctgctgagcatctcccactaggattgaggagaacttagaggttatatggaatttgaagtgtcaatggctttttctggctcggacgccatttgacaaagtcaaaataattacttcagaaaagttggaaactccacagcctactacaaagaccaaccttgtatttctcattgtgttggtgacccttcacatgttgctccccagaaattggatcccccaaaaattcctcacagagctggcaataaaatccactgatgggaaccagaaactcagagcctggaagaagtagaaaaaagtcaaggaaataagtcgattccacccagaatgacagcaacc

SEQ ID NO: 120949 - DNA, 1104 bp, Homo sapiens
atcgacgttcctcagatccccacagactagagagcagggaggcacatcatagcaatacccactctccagaggtgtcccatccacacccaccttctcctgtggatccttacctgctcacaaaaaacagccctccattcctaaagtctgaccatccagtgggtcatatttcaggaccagaggtggttggtagtgggtttcagtcatctgttgcagtcaggtgcatgttgccatcagccccatctgccccaattagacttccacacactgctgctttatctcagtttcacatgccaagggcctctcagtttgctgcagctcggatacctccgaactaccagggacctgccattccccctgcctcttttgatgcctataggcactacatggcatatgcagcctccagatggcccatgtatcccacctctcaaccgtcaaaccaccctgtacctgaaccacacaggataatgccaataaccaaacaagctactcgtagccgtcccaatcttcgtgtgatccccactgtgactcctgataagcctaagcagaaagagtctctgcgaggctcaattcctgcggcccaagtgcctgtccaggtgtccattccatcactcataagatataatccagagaagatctctgatgagaagaaccgtgcttcccagaagcaaaaggtgaatattagctttgggtatcctgtgcctgagttttctgttttgccataaatttgtatatgttttttagaaggggctgaaaatttgtaaggctctttcacttgaagtcgtctggaggctgctgtcatcatcctaagaagtgtatattgttcctctgtttttcacacatgttttatcattaggactaaacaaaagtctggccttgggtcctattgtgattgtcagccttttttaagtttaattctatccaagttaatggtcttcaaacactgtagataggaactgggagccttgaagtcttcaatatgatttcgtagtggagtagggaaccaaaattgggtgtggtgaaggagaatcagtaaacctgtttgatcccagtgaattctgtattcttaccctgtaatgattatgagttaaagttaataactagttg

SEQ ID NO: 120950 - DNA, 1002 bp, Homo sapiens
aagaggttcccaagcaaaggaatgctgatgagttagcgttccagagtttcctctccccacttcagccaaagcagctttttttttccttttcttttggggatccatagaaaagaaaacaagctaggggatctctaaaattcttttgaattcaaattccttttaacaaatagataaaggtgaggattccatccagtttgcctcacttcctgtttctcctcaacagtagaaacatctggagataaggggattcacattttgaatctggctaaggatacttttcctcccttttatccatacttgtatctcacctgttaattcaggaagaccaaagtatttaagtatttatctcaattactaatgttctgagattctgcataagactaaatcagttgtgtttgtctttgcagcttgagagtttttccagcagtaccagctccagccaggatcaccctctctactctgggcacccatcccttccactaagtggtgctattgctgcttttgcctcagagattgaaaacaaggggactatggtagagactgccttgaaggaacctcagggcaacctctaccaatggggtccccttcctgggattcccaaagacaacagtcctctcagagaaaaatttggaagttttctatgccacaaggataatttggatttgaaggctgagggacctgagcgacacacagacttcctgctgccccatgagagagctagccaggatggcagtggtttttcccgcattctgagcatgttggctgattctaccagtacacaggaaaaaaggcgacgtagctttcccgacattgaagatgaggagaaatttctctatggggatgaagaagaggatttaaaggcagaatccgtaccaaagccccttgggagctctgagagtgaagttatgaggcagaaggcaagctccctgccgtcttcagctccagctgtaaagctagaatcactagaagagaccaatccagaatatgcgaagatccatgact

SEQ ID NO: 120951 - DNA, 1405 bp, Homo sapiens
tctgcatgccctaagtctagtcggagaaattacccaagagatctatctagatatgttggtaatattacctcttggttagaggctaaagctgcttgttcccctggggaaagggagaggaaatgttcttggacttcatgattatagtcttttgccctaagcattttatagcccccttgacaaacaccagtctcttagccttgtctgctcttattctttccaagtccatttgttcaatgatgcttctctttttcctcagggatgacctgactgatgattctgtcttcactcgaagctcccagtgctctcggggtcttgagcgatatatttcccaggaggaagggcctctcagtcccttcttgggacaacttgatgaggactaccgaacaaaagaaactttcctgcatcgatctgattatagtccccatatcagttgtcatgatgagctgttgcggggaacagaacggaatcgagaaaaactcaaaggctactccatacgatctgaagaaaggagccgggaggccaaaagaccccgttatgatgacacagtgaagataaacagcatgggaggggatcacccaagttttacatcaggaactcgcaactatcgacagcgtagaagaagcccaagtcctaggtttctcgaccctgagtttcgagaactggatcttgccagacgaaagcgagaggaagaggaggagcgaagtaggagcttgagtcaggagctggttggagttgatggtggtggtactggctgttccatccctggattgtcaggtgtcctaacagcatcggagccaggatattctttgcatcggcctgaggaagtatctgtgatgcccaagaaatccattttgaagaagcggattgaggtggacataatggagccctccatgcaggtctctgctgcatttcttgtagggcctcttgctagtctccctaatatcttaaagcctgcttactttcctgtgggctatgttcctaatggtatctttgtaatatgtgctggaccgacattgtgagctacaccttctaggactctccaaacgaaactgtaggccttttaatgcatcagtagagggttctattgctgtatattaggctttatattaataaatagatattttggagagtactgtaagtttttttacttaaattggattatcctttggcaatctttgagtatgggtttgttggaaatgaaccttgaagggcaaggggaggaggtgatctcaattttctcatctctctttagagagaagacaagatgtatgagttgtaggacactggactagaaatcagatgattctgattttggacccacttctgccaccaacttactgtgatttttagacaagtcacctcaccattctgagccttgatatttttccctgacctgtgaaaggat

SEQ ID NO: 120952 - DNA, 1044 bp, Homo sapiens
cttggaccggatccagcttttcctcgaccttccaaaccacaacccccaggcctactacagcccaggtaatgggaagctagtgggcagaacctggcacagggtgaggagggaagtggagccacttgggtgctgcgcatagatgtcaccaagagggcttagagagagcggaatccaaaacagactcatttagctttgggcaggtagatatggggctggcaagtgaattacatgatttaccctccccaaacagattgtggtagattaggagcccaaatcaagtggcttctctgttcagatccccctgcagagccatctacagtattggagctgcatggagccttgttctcctgggacccagttggaaccagcctggagaccttcatcagtcatctcgaagtgaaaaaggtttgttggacagacaccctgggagagtcctcagactaacgagagagatgggaactcatgtcagagaagcagtgaccgagccaatcatagctgatggctctgcagctctaattgctgcaggagggataggcatttggtgagcaggttctaatcatgaggagatgacacctcacatctgaatctcagaatagttgcacctctctctggtctttaggcagcttgtatccatccagtccagaccaatgggtgtgcttgtctctccatgtccctcagaagctgcagcattcagaacaggccctggggtttatgtagcatctcccccagattggggatctgggggagaggcccagcaagtgcttccaagaaatattttgcaaatggggatcctctgtttaggctggtgaaaagcaatcacaccctgtgactcatgctacagcatacaaagaacttaaaatggggcattcctggcaataagccaactcctgttcacctcctgttctgagttttcactctctcctgacctttgtccaaccctgtgccccacagctcaacccggcattctctggtggtggctgaattgcctccaccacatttggctcacgtttctggcttgggctgtatgttttgtttttcctctta

SEQ ID NO: 120953 - DNA, 1084 bp, Homo sapiens
ggtaaggtggcttccagtgacaggtttctggctggcatgctccctgggaggaggatgcatgggcttagagtgatgccaagaaacatttggtctgaaaagggctcacttttatagagtttgtcctttgtctgaggtccttaagttagtgtttggcgtagattgcaggctgacttttgagagttggtgtagaattaagccttgtgtgccttcacctatgcaagtaaacctggacagaggcctagagaccaggccgaaggatgttaacacatccctgtcacaagcagtttcctacatgctcattgtttctgcttcaatatccccatcacttcttcactttggcgtcctgcctggaagtggagatttgtgggtgacagatggtggggagtcacgagaaaacaaattctgatcgtgttcactgaccatttaggtacctgctgtcactgactcctgaattcattctcgctgtgtgtctacttttgcttttttggtaagaagggctcattagtgttcctctggggatgtggattttggtgggggtatcagaggtgagggaaaggcaggttgggattagagagaaaaaatgtagatcagtttctggtaagagatcaagtggactgatgtaaagctctgggaatgtttagcaccgcactgcctatccttgagacccctaatatttgagagctactttacagttggacaagtgtggtgatgcaaagaaaggatcatggaacttgctcttttcttttctggtagtttttttctctcctttgtaatcttcccatcaaaccacttttgaaaaatatcagtctcagtagccaaactaagcatggcctgagaggtagtggatttggtgttggagagaaaggaaagggactggagccagagaacacagtgaatgtggccttcacttcctttggtgagtgttttgccctagccagagttgggagtagccttcttattgaagcctgcttcaggatcagcatcgcttcatggtggactaggatggtttgatctagaactcttcatttactgtctgctctgtacctgtccccccaatcaaaggcttactccaaacagaacaacc

SEQ ID NO: 120954 - DNA, 1038 bp, Homo sapiens
ctccatccatctcaagaaaaaaagcgtctccaaaaaaaaaaagtctgtttgactttgccatttgtagctctgtgacctttattaatggcatagctttgtatgcctcagttttcttatcaatcaaatgtgggtagtaagagtatctatcgcatagggttgttgtgaaggtaaattagttaatacattaatatgcttactcagtgcctgacagtaagttttagttatactagtcagatctcagcactaatttctgtttcatggttgaacctgctgtctctttatatagatagcatctgcattggtttgggctgctagcctgatgttaaagagatgaagcagagcttttggataatacagatttttttgtcgtgagaatatcctcattaggctatttaaggcaatgttaaaatgccagtgatttcctgtttgaagctgtgaggctacacaattatctttgcagttgagtaatgatgataataataacaataatggtgcttattgagcacattctgtgcgtaggactgttgtaagggcttttcatgtattaactaatttaatttttgactttttttttttgagacgaagtctcgttcttgtcgcccaggccggagtgcaatggtgctctcctcactgcaaccgccgcctcccaggttgaagtgattctcctgcctcagcctcccaggtagctgggattacaggtgcccacaaccatgcctggctaatttttgtatttttagtagaaacgggggtttcaccgcattggtcatgctggtgtcaaactcctgacctcaggcgatctgcctacttctgcctcccaaagtgctaggattacaggtgtgagccaccgtgcctggccaattaatttaattttcataatcatatgaagtagataacttattatccctgtcttacagatgagaaaatggaggcagagtggttaagtaatttgcttaagatcacccagctagtaagtgacagagctggtatttgaacctaggcattctagcttcagcagttgagctttttttttctttaggt

SEQ ID NO: 120955 - DNA, 1634 bp, Homo sapiens
aaaaaaaaacttaacagtcaatgtctttcctgaataaaattaataaaatttgaaacaataaataataaaaataggaagtagcaaactacacagaaaaaaaaaaaaagaagtggcattttaaatagcttcgtcccctcagctgaatgggaaaatagaaaacaaatgtgctgctgaagcctatgttgtttgaagaaggccctggcagcggtgctcagtctctccctttagccaggcaggaggcccagtgtagccttgaggtagaggtgtgcccaaggtttcattgactggctttcctttgccctgtatttaagactcactctcctcctccttctgagtcatgtcctgtctatttaacacaccttcagggcccttctttttcttcaacaaatgactctctaccctgccattgaagtaggcatgtgtctgccatctaattagatttcaggggaattgcgggctcaggactttgggctttccctgggaactctgcactggccctctgatgacctttcctatttgtttggcacatgtgattttgagaagcagacggtatctgtcagacgtatcgctccccacttcatgaacttgggagccatatatcttaggatagtgtattttatcttgcattgcgtggcagtcagcgtgctgaaacgtgttatctctaaagagtatacctttgtactttggtagacgtcctcaaattttctggattcgggtcacattttagtaaactatggagttgcaaggtgaaggatgatggattttgagctgattcttcccctttattgttttctttgttgtgtaaatcaattctcagggtgccccttattcagatatttatgaagccaatcccttcacttccttctcaccaccatattttgaatgccaacgacctctgggtgaaggaaccttcatttctcacctggattcaggctcttaaatagctctccaaactgacctcattctagcctctagatctttgcatacactggtgctactcctttgcctacctttttgtccttcaggtctcagtttaaacgtcacttcctttagtatctcacccctgcccccttgagtgcccttcttctgtgcttctgtccgatacttatgctgtgtcataattgcctgtttacttgtctgattctcataagactaagtgccctgagaacagagactatgtcttattcactactgtgtttgtagcatttaggacagtgctgggccttaataggtgctttatgatgccgtggtgcatgtagaatgaataaaatgtggtcagcagtctcttctcacaccagtctatcttccatggtgctgtcaaaattatttgcctataaaatagtcttcctggctgggcgtggtggctcacgcctgtaatcccagcactttgggaggctgaggtaggtgaatcacgagatcaggagttcgagaccagcctgatgaacatgatgaaaccctgtctctactaaaaatacaaaaattagttgggcgtggtggtgcgtacctgcaatcccagctactcaggaggttgaggcaggagaatcacttgaacccaggaggtggaggtttcagtgaaccaagatcgtgccattgcactccaaactgggcaacagagcaagactccatctcaataa

SEQ ID NO: 120956 - DNA, 1274 bp, Homo sapiens
caggtgcctgccactgtgcctggctaatttttttgtatttttagtggaggcggggttttaccaagttggccaggctggtcttgaactcctggcctcaggtgatccacccacctgggcctcccaaagtgccaggattacaggcgtgagccaccacgcccagcctccccatctcttgttttgtgatgactcctttgatgatcgtgatatgctggccttctccagttctggtgaggttggtggtggtggattcgtaatgtaattaaggctggggatagacagaaagctgctcacagtggatgactggatggagagtttcaatatccatgtttccccatattttatggattgaaaaatgggtgaatctgatggaacacatccaggcattgaggaagccagacttcttggccccacttttcttagggctttaatggtcttcctgtgccacagaacaggcttaacttggatgcttcccacaagtggggctgatagctgcatcatgatccattctttgcttttttgtttctagtgtagttgatgggggtagtccttagagccccaattgctaacaaacaccaaatgaatttctttccagaattaagtgtataatgccagggatactccagtgcgagtttacaatcagatgaggaagatatgtctgagttctctggatggcagccttgtctggtccttaaacccttgtcccagctaggtacctctcctctgtgctctcaaagcactcaaccacactgtactggaagtgactgttaacctgtctctctcccactaggagtaagatcttctgtctctgaagcttcttaggggcaagcttttttactgaaggccaagcatttaggcactatagagtaagtgctgagcaatgttggttactgtgtgacccaactcagtccttcctcagtgggattaaagaagatggaatctatctggcaaaaccttttgcaccctcaggaaggaaggtcctgcataaacaaaaggtgatagtgttaacaatagcattactaattattttccaggattgcattcatgtggttaaatcatcttccaggtgcttggcttcagctgtctcccttttagcctttttatgttttttttttttttctttttttgagacagagtcttgctctgttgctcagggtggagtgcagtggcgcgatcttggctcactgcaacctccgcctcctgggttcaagcaatgctcagcctcccgagtagctgggactacaggcatgtgccaccacgcgcagctaacttttgta

SEQ ID NO: 120957 - DNA, 1016 bp, Homo sapiens
tcctccatccttccccgcagcctggctgcctccctccttagcttatatcacgccatctcctctgctctcttgttcttactactgcgtccctctattttcccagtctccctttgctgtgggtggggatgtgcccccttcacggccacctgcccatcaccagcctgctgctgggctccactgaccaccccccaccgtcacccttccccgagtcagcagcgtgctcttcacttctcccttcatacagaattggttcgagtttctgttgaatctgtgcttttagcacagagtttgagaagatccctcaattaccatgctgctgctgcttctcatgcctcagagacagatgaactagagtgggaagggacttttctcctagatcagatcatttcctccctttatcaagaagggaaggttggatagtgtccctgttactctcaccctaggataagaagttaggatcagctgcaaggttctctttaggattggggaggtagaggaaaaccttgacctggttctggggaattccctgggcagaaaagtgaagctacttaaactgaatgctggggccccaaaccagggacccatgtgagatgtcactcccattggtgaccgttgctctgggaggtgaagtttgtcccccccacctcttttcacatccggagtttctggtggactttagccatgaaaagctgggaagggtgcctcagtagagtgggggcaggacctggcttcggattccacactgggctcagaaaaagtcctggcctcagactgggagatgggtgcgtgcagcctggcttggagaagctcccacgcagtcccttctccctccaggcttgggaaggagaggcgggtctggagatcatgagaaagttgattgcctgttgtttcctggtgttccacacaggtcactctagatagactgtggcttcggcttccggaggcagtgtggtgctagggaggctggacagggggagcttgagaacagaaggctgcctaagtggattctgttcccc

SEQ ID NO: 120958 - DNA, 1491 bp, Homo sapiens
ttgattcattgacagctgagagcagaaaggcttcgtagtaggttcagaaattatctgaacccagataaactgatggggccacaattacctgaagtaggtattggtgatgtggagagtagggaggtagttgctctctagggcaagctagctgctccaggatcaggagagttgtggagtgaggtagtagtgcagaacgtggggagctggagatgtttggtggggaaggctgaagttggaaaagccaaagaaccatatccagtctggattcctgtctccctctcctgggctggtgttgaagggatggcctcagcctcagctgggagaaggatggatgcttgaacctcctttcctcttctgcatctctgactttgcctgagctttaggcagaaccccggaaaggatggcagaagggaagtgggacggcatctttggctcttgggctggaaactttttgctgttgctcctatgggtgcttgctgggaacggtaagatagtatattggggagcagcaggattctgaagagatttctctctcataccactctgtctctagcaacagcaatcttccaccacggtggaagcccctgatcaaatatgcgtacccacaaaagggagcaggtataagtcccacctcctggttaaagagtgatgcttggcaaatttttttccttttattaaaggacactgctcagccagcttctggtacagatcatgccttacacctattctgtctacactctgctcagctgttcagagggttcacagtgcagctctgctgtgcgtgccgagtcccatttctaatgaaagtagactttgttctctgaaggcagctaatcatgccccatgggctgtaatcagggagaaggtatttaatacagggcaggcggcaacaggcggcctgcaccgactggcaaattgcaacatggcaattaggaagctatcacccctctctccaccccagcagatatgaagtagagtctttcctttgaactgatttttgagtaagcaaagaatgaatgctatgcagagcatggcagaagctggggttggatggggtaggatgcagcaggggcagggagggttgaggagagtcccttttccttctcacttcaccttcatgggatggggaagggttgctgctactctgggtgtctccctcaacactgcctgcaggtccagcccaagaagccccaggccacgctaggtcagcgagaggttttaacctaggcctcaacctttctcccagggcatagctgttcttacagaacagacccagcacgttatctggtagtccaacatcctgagtcatctgccctcagttcctcaaggcttaggtttagtttggggtgggggtgggagtgggattcttccttgttgatttcctttttttttttttttttttttgagacggagtctctgtctcccaggctggagtgtagtggcgcgatctggactcactgcaatctccacctcctgggttcaatttttgta

SEQ ID NO: 120959 - DNA, 1022 bp, Homo sapiens
cccgacagtgggaacacatgctttagcccgcaaggcttccctcaacctccagctctgtttaggttgatgggggcgggaagagattgttttttctgcccagaaggccacctgaggttactgcctgatcactggtggctgctgcccccgtgctgcaacccagctaattacaggtgggggccagggaggggtgtgcacccatctctgaacctcaggaggccggaggggctctcacaggtcactcagtccagccacctctgtgtagataaggaactgagctatccagtgaggaagggcattacacagggccccacagtgtcagtgctgagcctggagcccaggtgtctccaactcccccgactggggttttcttcacgagtgttcctcagccttggcactctggatattttctattgggaatcatttgtggtgggagttgccctatggttgtgggatgaccaaagcatccccggcttctacccactaggtgccagtggcactccttccctccaggtttcgacaaccaaaaatgtctccagacacttgccagacgtccctggggaaggagagtgggcgccagacgtccctggggaaggagggtggacagagttgcctggttgagagctactgctctgtgttgctcccttttcagatttcttctcctagccctatgcctcctcattgcaaaggccggtgaccatcattatacaccaaatagccttgggcctccttctggaaatgctaggtgctctctttccatcattttctctatcttcttggatctctgtgaggctttttcctggtgttctcatttgtaacccatgttccccaaatctcttagttgtttccaaactctgagaggcttgggagatgaggaccgatgtggagtagggacaggacggaaccggacctattccagaattgggcaatgtgctgagaccatgaacacacagacacatgtatctcatctgggcctgtgacagtactgtcatggagaaaggcaggaacccagtgcttccagtcat

SEQ ID NO: 120960 - DNA, 1824 bp, Homo sapiens
gtcaatggacaaaggaagccacctacctccattttctgccagaggctgctcttctgaagcagtcagttccacatagaataggccccttgatgtttccctctcgcgatagcaggggcctactctgctttgtggttggctgaacttgactcttgagccatgactgccataggggtttggggaagatggggcaggaggttaaaagacagacaaggcacttcctccccttagtcaggattagtcctcttctcccatgcacttgttcttcctgagcctctgcaagagcctgattctgcctttgtcttcatctcaaggctgagggctttgtcagagctcagaactcgtgtgtatagttcagcctgacttttctggaaggtctctgccatacctctgtggatacaggacccaccaggagccgagtgaacagctgagaggctgtctgcccctggggagaggtagcttgggtgccaggacttatttgaaaatggctttaggattggattaagggtgaaggttggaagaggttcttgaatcttctggttggcatgggagagggtagtcgaggcttgtcccagcattactgaattgcttccatccgtagagagccctgcagccctcttctgctataagagtctttgggcttcacacctgagccttcttgtggctatttggagggtgagccagccgggggtccagtggtccagagctgagcctcaagcctctcttttttgcctaggaacccctgactgatgcagaaaggatgaagtgagtatctgctacctgagatactgccctgcctcaactctgtccctcttagctccaggctagactgttggtacagttggactttcccttggattaggtagaaataaaggttgggatgggttgttttagggactctgggaggagtgttgatgttgtggatattttttctggaaaatgggattttattgttccatgggcttcaagagagcgtagaatcaggaggcgaatggctctgagggccctgctcttcttgctaaggagcccttccccagctcctggctcctgtaccagctgccacccttacagccctttagccacatgaggcctctggagaggagggcagtgctgggctggatttccaagagatgaataatggagaagcctgattgtgcagtggggaaactggagctgggggcttggtggccagctgacatgggctgtaaccagagacaggctgggagccatatccctacccccaattctttatttctattctccgatagtgaagggaggctggactgtcccctaccatcccctcttcctcccctgaccctccaacccaggctgtgttcccagggccagcaggcctatgaaatatgctgccttagactcagactaagactccaggagtttccctgtcctgtttgcctgtcctcatgtcatcccttccttcctgagcccactctggagctccagggcatgcccttctatctctcatacccctctgcccttgatcccacaacaccctgccaggctcttacaggaggagaatgaagagcttcgccggcgcctggcctccgccaccagacgcactgaggccctggaacgtgagctggaaattgggcaggactgcctggagctggagctgggccagagccgcgaggagctggacaaatttaaggataagttccgcaggtgtgggaatgaggggccagacacacacacacacacacacacacacacacacacacacacacacacacacactctctctgtctctctctctctctgtgtctctgtctctctcctttcataggaggttagctggaagatgccttagag

SEQ ID NO: 120961 - DNA, 1815 bp, Homo sapiens
gttagctggaagatgccttagagatcatctaattcctattagaaaactgaagttcttgagggagaatgacatgttcaagatcccctatcggggaggctgaacagagcctgaagaacaggatcttgacccagggatgtgccttgtattatcccttttcaggctgcagaacagctacacggcttcccagcggaccaaccaggagttggaggacaagctgcacacactggtaatctgtctgggagggcagcttggtgggcactgtgctcatagcatagcagggggccaggatttgccaggggaatgccactctgccctggggcttgagggagatggtgggatggggcagtggtgggggtactgcagtgtgctctgcaagtcaagactgtcttaatgctcacactgtttctcttctttcctcgtctccccctcatgctgccaccgttgctgctgcactctcctctcaggcctctcttagccacagctggatttttgcagttgcgtctgagtttgtgtgtcttctcccttgccctggccttctcctcagctgagatctgggattgtgggccctggctgttaccctgtgccccttgagtacacccgctcctttctcttccctgtatgaggcccgtttaactgtcaatgcctccctcccaggagagaggtggggagcctagcctgctctgcccttggctctggtagaggtactgattgatgtctccactgaacacccaaagcttcttggctccagtggcagcaagcccaggctgtgggagtggggaggggaggctgcagatccagtccctgaactggagatcagaaggctacttttgagcctgcagcttgctccctgctcaacaaggtgccctggctgccaccgcgccctgcttcctcttccctctcctagcctgatgctggaaacagctgcacacataggaggcttcagccccctggtttgcagttactgccgttgaggtaccagctgccttgcctggtgcccagagcccctggaacctcaggggatggacagctcttatactgcctgtgtcctgggcccaggtggcaggaagtcatgctaagaaagcccccaccccacagccagtccagagagcgggagagatgcccagtctccttctgtctgtccgtcatttgtctctgctctgtccgccttggctgccctagcacctgtggcctcttgtgtctccaggatgggaggaggtggagggagaggaagggctggctagagtgtgggctgggttaacctcaagtctgtgcttcagatcaagaaggctgagatggataggaagacgctggactgggagattgtggagctgaccaacaagctgctggatgccaagaacaccatcaacaagctggaagagctcaatgtatgtgcgcttcactactcgggccttcctcacctggggctagctttgtcctggctcggccctgcttccttggagagggctgggctgggctctgaaacaggtctgtgtctgtaggagcggtaccggctggactgcaacctggctgtacagctcctcaagtgcaacaagtcccacttccgaaaccacaagtttgccgatgtgagtagaactcaccccctccctgcccacatagaccattccggccactgtaggactcctctaactccagtttctgcacctctctctgtcctcctcttcccactttgccctcctcttgcctccatgtcacctctcaagccagtcaactctgccactggttggtgtcccgtgtactgtccagggcccatcactagttctggggggccagccctgttggtttctgtaacagaga

SEQ ID NO: 120962 - DNA, 1008 bp, Homo sapiens
tgccaggcctgtcagctgcgttgactgactgcagcagcttgcctcatggttttccctttttcttagaatatttattcttcagaggtaacatgcagttgggtctcaagacctttcctccaatcagcccaacccagcccagactgggcttttctggggagctgaggagtttatcagtattcatcttccatcctttcatagtcacaagttttgttattttgtttttttttgggggtgatggtgtaattgttaacctcatttccgtttcctacctgtttgcttccccccccagtcctccgcatgagctgttgccctccaggggcctggcacagctggccttggggacgagggagaggactgattcagggccccctcagctgtctcctccctccctctggaaaggagggtggggctcaggggcctcaagctgggctctgtgtgaggcctggcccccactcccaaccttggctctagactgttactcttaagctttgagaaattttcacattgatgactattttaaaatcaaataaaactattttactggtatggcctaacttgtcttaatgacctcccctctcccacttttctccccattcataagtattcccagtcctagtctcatcctagtcggctagtgactccccctcgccccactctgcctagggtttccctaggcacagagcatcagggagcgggaaagggggcaccttaagtaaccttagcagggttcctgagtcttccctcggaggcagggaccatatctttatggggctagtgtaaggtgttgcctcagaggcctgggttctaggcctggccaggcctattttgagatcctggaccaggtcacgcagcttagagcttgggctgtgcgatgctactgccccctagtggtgcttactggtagttccaattcctcccctactgccggccccaagtgactacagccacacgacaggttgtggagttcataaaatcttttccgagccagcgggttgcagccagagctgc

SEQ ID NO: 120963 - DNA, 2290 bp, Homo sapiens
ggcagagggtgggaccaccaggcaaatcctgggaagccataaacagatgagctgttgtaccctccagcctgaatgaattggtatattgacagaaaattgcaggtgaactctatggacctctcatgctggtcttcactctggttgctatcctactccatgggatgaagacgtctgacactattatcgtaagcaggacagacaactttgggggggtggctgcactaggttgaaagctgcctgaggatacaatggtggagtgagacaggaacagcccctgcggaaggccctaggtgaggctgagatcagaggcctcctaggactaaatagagccttcaccccacagcgggagggcaccctgatgggcacagccattggcacctgcttcggctactggctgggagtctcatccttcatttacttccttgcctacctgtgcaacgcccagatcaccatgctgcagatgttggcactgctggtaaggagccaggtgtggtgggcaagagtgatgttaaaaagagtagccaggccttggtcggcatctgtcctggggccccaaagcctggaatgggaggagtaggccaatggaccatgtgtttcccagggtccccatgaggggccagaaagcagcccaacctgaatgattttcctctccaccatcctccttcccagggctatggcctctttgggcattgcattgtcctgttcatcacctataatatccacctccacgccctcttctacctcttctggctgttggtgggtggactgtccacactgcgcatggtaagctgggcaagaggcttccaggggtgggctgtcctcccagggagttggggaagacagcctggagctgtccatctcacaaagagccctaaatgggagggaagagcccaaagatggttctgccctgggtgggggtgtcttgtccccactcctcactttggagccaggccctttgagctgtattctcatggtcctaggtagcagtgttggtgtctcggaccgtgggccccacacagcggctgctcctctgtggcaccctggctgccctacacatgctcttcctgctctatctgcattttgcctaccacaaagtggtagagggtaagtggcaggaaggtctgggtgggggagaatgggaaagcagctgcctagagcaagaagctagatatgatggctggtgggctgggcccatctgatcctcgctcaccttccatcttccttccagggatcctggacacactggagggccccaacatcccgcccatccagagggtccccagagacatccctgccatgctccctgctgctcggcttcccaccaccgtcctcaacgccacagccaaagctgttgcggtgaccctgcagtcacactgaccccacctgaaattcttggccagtcctctttcccgcagctgcagagaggaggaagactattaaaggacagtcctgatgacatgtttcgtagatggggtttgcagctgccactgagctgtagctgcgtaagtacctccttgatgcctgtcggcacttctgaaaggcacaaggccaagaactcctggccaggactgcaaggctctgcagccaatgcagaaaatgggtcagctcctttgagaacccctccccacctaccccttccttcctctttatctctcccacattgtcttgctaaatatagacttggtaattaaaatgttgattgaagtctggaactgcagcggctgatccagtggtcctccctgtcatcccgcttcctatatactttcctactcagtcaacagtggtaatgtcatatgttcccttcttcatatcctcacccaggcaagataaaggtgggacaggccagactacatagaaggcagtgattgaatatcacacctgacccatgaagcggcagggaggcctcaagcacaaaagccataagcctgatggaacactgcagccagcttgagtctgggctcagctgctctcttgggaagccaaggaagcagtgacaattgaacaaaacatcccgacttaaaccccgtgtcaaaacaaggatcttctgcacctgggcattgtgttgataattttcctgtggagctcttaattgaagccaaatttggctttgccttggtggtactggggccagctccttttagtttttctgtctttcctcttaaaaccaaccaccactcctaacatagcaccatccacccccaccacctctttaatatgctccacttaataagttaattcaggtggctaagagtgggaatagggcctttgacctcccttcactatattgaat

SEQ ID NO: 120964 - DNA, 1457 bp, Homo sapiens
ctgaaaacatactatgtgtatagttttgtttggggcttaggaaagaaggaaatgggcactttttcagccttttagtctttgataggtaacataggagaaagacatgaatggaagactagtaggtttcccaggctagaaaagatagccaaagctagaaaccaggcgttctgagagcatatgagggggaatggagtggcatgatctgtagtgattccaagccgtatcctcagcagtggaagaacaaagccctaaaccctgggatgagcagaggacttaatggatggaacagaaaagtcctgcactctaggagccattgtcttcacagggcggaggctcagctgtgattgacatggagaacatggatgatacctcaggctctagcttcgaggatatgggtgagctgcatcagcgcctgcgcgaggaagaagtagacgctgatgcagctgatgcagctgctgctgaagaggaggatggagagttcctgggcatgaagggctttaagggacagctgagccggcaggtggcagatcaggtaagcaagattgaatcctctgcaggtagaaaagtagacctaggtatgtcccgtgttctggaattggtgttggtgatgttcgccccaggttgtccagttagaaccatgtagaaatcaaacggaaaataggcaacaggatctagaaccaacagtaccacaatacctatgcccatcttccttacttcagatgtggcaggctgggaaaagacaagcctccagggccttcagcttgtacgccaacatcgacatcctcagaccctactttgatgtggagcctgctcaggtgcgaagcaggtgaggagccttctcttgaagaagcttccctcctaacacctagaccttcatgcacactacagtcagatttcaagccctgggctctgatgggctccccgtcttcatgaccccatcacctctcatcactgcacctgtcactgaaacaagtaataatagcacaccatcttcctcttcttttccatctaactgactactcatcttccctcaaaacctacctcagatgtcacttcctctgttccacattcctcaatcccatccccagtttgttctctcctggtgttcctatagaactctgtgcttgccagccgggcatggtggctcacgcctggaatcccagcactttgggaggccgaggcgggcggatcacaaggtcaggagatcgagaccatcctggctaacacggtgaaaccctgtctctactaaaaatgcaaaaaaaattagacaggcgggtgcccgtagtcccagctactcgggaggctgaggcaggagaatggcatgaacctgggaggcggaggcggagcttgcagtgagccgagatcgtgccactgcacttcagcctgagcaacaaagtgagactccatctcaaaaaaaaaaaaaaaagaactctgcgcttgcctctaatagacagcac

SEQ ID NO: 120965 - DNA, 1035 bp, Homo sapiens
tgtcccttgagggctcccgtcgctgaaacccgcgctagccccgcgcgcggagtgggcaagatgtgggcctccggaaggtagacgtccagggtcgaggagaggtgggatcggccggaacacaaaaaggagaagcccggatgtttggacaaaagcaacttccggaagctggggacgtggacgggggcggggaaaaatctcgcgatatttaagattccaggaggcggtgcgttgccacggagacggagcagggctactaggacgcacgcgcgagatagaacctctagtctcgtggagagattgaagatggcggcttctcaggcggtggaggaaatgcggagccgcgtggttctgggggagtttggggttcgcaatgtaagccttgtggccttgagctcgggcgggaggaatgagagcggaacagggatgggtcttgggattggcgtggggatagctgtgggctcactgtcccttcgtggacaaattcgtccctttgctctaggtccatactactgactttcccggtaactattccggttatgatgatgcctgggaccaggaccgcttcgagaaggtaagtggggccggagttgtctggggagggttatgaaggccagaccttgtggtctgagcagcctgtgtctgtctcagaagctgctcttgggggtcgctccgtttgtaagtttgttgagcaatgtgctagacgctccgtttacaggccaaattagacacggtttctacccagttctgcaaagatgttcagtcttgttgaggaatggtgtgtataaacagtgaatctagtgtaatatggtgaaggtggttgatagcgatgaagacggcagggttggggtggggagcattacgctgagaccaggaagaggggcggagaggtacttaacatttcaagaggagggtacatctcaattgagccttgaatggtaagtaaaaaagaacaggagttaaattatgaagggtttgtttcaagtcagtgaagttcaggatatacaggttttgtgtgtatttagtcttttgtattgt

SEQ ID NO: 120966 - DNA, 1611 bp, Homo sapiens
cctctggaggttggggttacggggataggtagggggtctgttgggtttttgcagataagtggttatttttccttgggcaggtgccaactatggctgtggagaaggtcctggtgtacaataatacatccattgttcaggatgagattcttgctcaccgtctggggctcattcccattcatgctgatccccgtctttttgagtatcggaaccaaggtgagaaaatgaaattttgggagaagtggactatctgggttcaaatcctggttgactgtgatgttgggtaagttacttatctttgtacatcagtgtctttcatctgtgagaacacttgccttgtctcccaagtttgccataattaaatgggaaacacgtaaagcattcagcatagtgctggcactcagacgtttactagttcttaggagctccctccatttgtgcaggagatgaagaaggcacagagatagatactctacagtttcgtctccaggtcagatgcactcggaacccccatgctgctaaagattcctctgaccccaacgaactgtacgtgaaccacaaaggtgagtagtggtagggtgaggaagaggccccacctgtgggtagctgctagttttagggactgagatcttctgacatgtttttcctccagtgtataccaggcatatgacatggatccccctggggaaccaggctgatctctttccagagggcactatccgaccagtgcatgatgatatcctcatcgctcagctgcggcctggccaagaaattgacctgctcatgcactgtgtcaagggcattggtgagaaccctgtgtgccttcctgggaagggggatagttcggttgcagtggggcaagctgactagggaactcagctgagacattcccggcaggtagaaagccaagagggttgtgcttttgctgttagtagcttaggaggagtattcttcctaaccctagaagggtttcctataggcacgttccctcttcctctccaggcaaagatcatgccaagttttcaccagtggcaacagccagttacaggctcctgccagacatcaccctgcttgagcccgtggaaggggaggcagctgaggagttgagcaggtgcttctcacctggtgttattgaggtgcaggaagtccaaggtatggtatttgggatgctgttcaagttaggacctaaattatattttctttcaaggtgacagaaataaaaaccctgggctcctaaaagtataacctggtttgctaccaagtggcaaattagaaaaaggaataaaaaaacatggtttgttctcattaggtaaaaaggtggccagagttgccaacccccggctggataccttcagcagagaaatcttccggaatgagaagctaaagaaggttgtgaggcttgcccgggttcgagatcattatatctgtgagtatgaagtggtgagatgagtgggcagtgctctttggtgctgcagcttccttccagtctagatgtgaagtttatgagtaagttttacaggcaagccctgcctagactaaagtgtctctttggtccccagtctctgttgagtcaacgggggtgttgccaccagatgtgctggtgagtgaagccat

SEQ ID NO: 120967 - DNA, 1142 bp, Homo sapiens
cttttaggagcccagggtttttatttctgtcaccttgaaagaaaatataatttaggtcctaacttgaacagcatcccaaataccataccttggacttcctgcacctcaataacaccaggtgagaagcacctgctcaactcctcagctgcctccccttccacgggctcaagcagggtgatgtctggcaggagcctgtaactggctgttgccactggtgaaaacttggcatgatctttgcctggagaggaagagggaacgtgcctataggaaacccttctagggttaggaagaatactcctcctaagctactaacagcaaaagcacaaccctcttggctttctacctgccgggaatgtctcagctgagttccctagtcagcttgccccactgcaaccgaactatcccccttcccaggaaggcacacagggttctcaccaatgcccttgacacagtgcatgagcaggtcaatttcttggccaggccgcagctgagcgatgaggatatcatcatgcactggtcggatagtgccctctggaaagagatcagcctggttccccagggggatccatgtcatatgcctggtatacactggaggaaaaacatgtcagaagatctcagtccctaaaactagcagctacccacaggtggggcctcttcctcaccctaccactactcacctttgtggttcacgtacagttcgttggggtcagaggaatctttagcagcatgggggttccgagtgcatctgacctggagacgaaactgtagagtatctatctctgtgccttcttcatctcctgcacaaatggagggagctcctaagaactagtaaacgtctgagtgccagcactatgctgaatgctttacgtgtttcccatttaattatggcaaacttgggagacaaggcaagtgttctcacagatgaaagacactgatgtacaaagataagtaacttacccaacatcacagtcaaccaggatttgaacccagatagtccacttctcccaaaatttcattttctcaccttggttccgatactcaaaaagacggggatcagcatgaatgggaatgagccccagacggtgagcaagaatctcatcctgaacaatggatgtattattgtacaccaggaccttctccac

SEQ ID NO: 120968 - DNA, 1025 bp, Homo sapiens
ctggagtgcagtggcgtgatctcggctcactgcaagcttcgcctcccaggttcacaccattctcttgccttagcttctcgagtagctgggactacaggcgctcgcccccatgcccgactaattttttttttttttttttttttttttagtagagacggggtttcaccatgttagccaggatggtctcgctctcttgaccccgtgatccactcgccttggcctcccaaagtgctgggattacaggtgtgagccaccgcagccagcaaatctttcttacctgaaattataaggagaatggtgaaggagagtttgttacaaggatgtcctccttcctatttttttattcctactttttgggccagtgaccataatgtgcagcctgacggaaatgcagctaaactaagagtataatggaattcaatatcagtgccatttaggattttaggaaaagaactttaagattttttcactgttaacacaggatatttttgacatctggcaaatcctttagggattgattctgcccaggggtgcaacccaccacctggcaggtgagagatgtgtgcctatgcactaaaatttcttaacttgttgcagcacgtgtctttgtaaagcctctggtgctcttctgtcccccagagcactatgaagccctggtatcccccatcctcggacctcttttcacctacctccatatggtaagagataagtcaggaacaggaagcaaagagtactattaaggcctctggccatttctgagctttgcaagtcaggagctcctagaagtgttgtctactagccctgccagactggctgggcagagcttctaccccagctgactatccttgctgtaggatcgagcagcccccaaagaactaaactgatttaattgccacaagacagcttcagttgcagattctgctcctaacctcctgttaactgaggagaggtaaaaagaggaatgcttgctcacagacccttgccaggaatgctgggtctgttatccttactctagaattaagcag

SEQ ID NO: 120969 - DNA, 1491 bp, Homo sapiens
aggatccgcctgcctcggcctcccaaactgctgagatcacaagcgtgaggcaccacgctaagcctaatttagtgactaagagatatcttaaatatatataaaccttgtgtggataaacagaaaaaaggaaaacattcggtgatatttgaatactgattgtatactggatattgaattactggtagtattttgagatataacaatggaaatgtggttatattaaaagacttattactagctccatattgcttttgatttgggattttcgtctctatgtttacaagtgatttaggcctataattttcctctttggtactgttaatgtctggttttggtatcaaaataaataagcctcataaaatgagttatggagcactacatttttctttttttttttcccacgcttaattcactttatttttcttgtataaaaaccctatgttgtagccacagctggagcctgggtctgctgcacagagactctggtgtgggtcttgacgaggtggtcagtgaattcctgatagggagacttggtaaatacagtctccttccagaggtcgggggtcaggtagctgtaggtcttagaaatggcatcaaaggtggccttggcgaagttgcccagggtggcagtgcagccctgggctgaggtgtagcagtcatcgataccagccatcatgagcagcttcttgggcacaggtgcggagacaatgccagtgcccctgggtgcagggatgaggcgcaccagcacagagccacggcggcctgtcaccttgcaggggacggtgtggggcttgccgatcttgttcccctagtagcctctgtgcacggggacaatggagagcttggccaggatgatggccccacgggtggcggtggccacctccttggagcacttaacacccagaccgacgtggccactgtagtccccgatagcaacaaacgccttgaacctggtgcgctggccagcacgggtctgcttctgcactggcataatcttcaaaacctcatccttgagagaggcccccaggaaaaagtcaatgatctctgattccttaatgggcagggagaagagatagatctcctccagggacttgatcttcatgtccttgaccaagcggcccagcttggtgacgggcatccactccttatctttggccttgcctccgcgagctccgcggcctcagccccggcccggtccacggctgcgaccccggccccggatgccactggcgaaacctctgcggaagccaccgcggttccccatcccagggccaccagggcctccaggcccccccactgcaccggcgtcatccgccatttggtgttttctcggagaagaagctacatttttctattcttgggaatagtttgtctaagagataaattatctgttccttgaaggtctgggagaactcccatgtaaaatcatttaggcctggagttttttggtctaatttaactactaccaatataattaatatgaagttatat

SEQ ID NO: 120970 - DNA, 1156 bp, Homo sapiens
cggggctgaggccgcggagctcgcggaggcaaggccaaagataaggagtggatgcccgtcaccaagctgggccgcttggtcaaggacatgaagatcaagtccctggaggagatctatctcttctccctgcccattaaggaatcagagatcattgactttttcctgggggcctctctcaaggatgaggttttgaagattatgccagtgcagaagcagacccgtgctggccagcgcaccaggttcaaggcgtttgttgctatcggggactacagtggccacgtcggtctgggtgttaagtgctccaaggaggtggccaccgccacccgtggggccatcatcctggccaagctctccattgtccccgtgcacagaggctactaggggaacaagatcggcaagccccacaccgtcccctgcaaggtgacaggccgccgtggctctgtgctggtgcgcctcatccctgcacccaggggcactggcattgtctccgcacctgtgcccaagaagctgctcatgatggctggtatcgatgactgctacacctcagcccagggctgcactgccaccctgggcaacttcgccaaggccacctttgatgccatttctaagacctacagctacctgacccccgacctctggaaggagactgtatttaccaagtctccctatcaggaattcactgaccacctcgtcaagacccacaccagagtctctgtgcagcagacccaggctccagctgtggctacaacatagggtttttatacaagaaaaataaagtgaattaagcgtgggaaaaaaaaaaagaaaaatgtagtgctccataactcattttatgaggcttatttattttgataccaaaaccagacattaacagtaccaaagaggaaaattataggcctaaatcacttgtaaacatagagacgaaaatcccaaatcaaaagcaatatggagctagtaataagtcttttaatataaccacatttccattgttatatctcaaaatactaccagtaattcaatatccagtatacaatcagtattcaaatatcaccgaatgttttccttttttctgtttatccacacaaggtttatatatatttaagatatctcttagtcactaaattaggcttagcgtggtgcctcacgcttgtgatct

SEQ ID NO: 120971 - DNA, 1032 bp, Homo sapiens
gatatctgaagttctctaaaagcagtcttttgtaatttaatctctggttcaattagattgtgggtggggagggcacagagtgagactcctgtggtgtctgcattgcagcaccagcacatttagaaaaatgagaacagctaggaagggccatacaaccacacagacacttatctgtgctcacacagtagagaaattattttctttatattttgaagattatattcttgtttaattcttaaattgttactaataatatttgggagtgggaagggaaatttaaaccttcaaatgacaactgacaattagtatgattatactcctctcactataaaaactgctcttaagggccaaataatgatagcctgttaactcctgtggaagaaactgtccttgtttaaagtcatgatgtaacttgtttttccccctccaaccttcagagtgctgtcagatgttgatgctttcattgcgtatgtgggtacagatcagaagagctgtgacccaggcctggaggatccgtgtggcttaaaccgtgcacgagtaagactttcctgggaatgggaagtggcattggccatgggtaggagtagggtgttgtcttttgtcaagtttctcatagatttgttttttctatactggtgagaaacgtgggagtctccacttccctaagcttctcctttcttttcttctttagtcttgaattcttgagttagttcccacagcagagcagatggtcttttctatgaagtcattattttggctttaaggatctctaaatagctctgaagactgaaggtgtaatgaggaagtaggtcagaacttggtcagcagggtgagtcctccctgccattgctctctggcatgtaaagtcttaagtgatggcttaacttgcaaacctgagatttttcagtgctttgctatttaaataagcattgttcctggctccattatggcacaagtcccattaattaacctggcaagtagtaggttgattcagagtaccgtgaggggggattaggacactagctgtcaagg

SEQ ID NO: 120972 - DNA, 1115 bp, Homo sapiens
aagggcacgcacagctgagtacggtggttcacacttgtaatcccaacactttgggaggccaagatgggaggaatgcttgaacccaggagtttgagaccagcctggacaatatagtgagacctcatctctactaaaaatttaaaaaattagccaggcatggtggtgcgtgccagtagtcccacctacttgggaggctgaggccgtaggatcacttgaaaccaggagtttgagaccagcctggtcgacataacaacacttctacaacatctctacaaaaattttagaaagtatccaggcatggtggtgcccgcctgtagtcctagctactcaggaggctaaggcaggaggatcccttgagctcaagagtttgaggttacagtgagtgatgattgtgccactgtgcactccagcctaggtgacagaatgagaccctgtctctttaaaagatgaaaataaaatgtagccaaaatggttatttctaagtggaggcagccattgtcaacctgttttatgtctttgttacaggaaattcctgttaatgatggaatagagctattgcagatggttctgaactttgataccaaggatcccctcatcctgtcctgcgtccttactaatgtctctgcactctttccatttgtcacctacagaccagagttcctgccccaggtcttctctaaggtataaagcccatctcctttgtaaattttattttgacatttctaagttaatttttatttattttatttttttggagacaggatcttgctacattgcccaggctggactcaaattactagtctcaagggatcctcacacctcacccttctgagtagctgagactacaagcatgcacaaccatgcctggcctaggctaattatttttgtaactatttttaaaattatgtgaggcaaactaataaacacagctatttattcatttattaaatatctactcagtacttactgtggatcaggtaccatgctagtgcctcactctttaggaacactctgggaagaaaggcacaaaaacagttaatgttacctatatggcattgcaatgaagacttgtataaaggagagtattagagtgtgctgtcgggcagggaggggat

SEQ ID NO: 120973 - DNA, 1018 bp, Homo sapiens
gatgaggttggcatgtcgtttggatcccaaaactagcttccagatggctggggagtggctaaagtatcaactatcaacttttcttgatgctggttctgtgaattgtaagtttttttcattactgaatgttagtgaaatgttaggacagtatcaaaactatatataggaaatgagcctgagctatacacacatcagaacgatatacttatactattcaaaaatagctttgctcatcctggagagggagcgttttcattggctgacacaaagaaagcagatgacacattttaaatttgttttaaattagggtaaaaccatgtccttatcagttttgccatcattttccatttctaacagaatcaaccaattatttattgttgattttatttgcttcacttcaggcaccagcttaacaaatttcatgcgtagacctaactttaaaacttttcagccaaagtcttgcatagcactattcctgaaatcagaaaggatctcctgttagacataacaggaataatacagggacttctcatatcactcagccactccaaagcttttgtgaaattatactttacataaattcagaataatccccctctaccgaatgcctcagccagttaacttctctgtactccaaatgttttgtctctcatcttaatgcatgctatatgtgtgtgacagtattaataaagcaaaaaggctggatgcagtgactcacgcttgtaatcccagcactttgggagcccaaggcgggcagatcacctgaggtcgagagtttgacaccagcctgaccaccttggagaaaccctgtctctactaaaaacacaaaaaattagctgccgtggtggcgcatgcctgtgatcccagctacttgggaggctgaggtaggagaatcgcttgaacccaggaggtgtaggttgcggttagccgagatggcgccattgtactccagcctgggcaacgagagcaaaactccatctcaaaaaaaaaaaaaaaaaaaagtgaattaactagtgca

SEQ ID NO: 120974 - DNA, 1062 bp, Homo sapiens
gagaattattggctcttcttcctgagccaaacagtgcacttgtctaggtcagcagcttttccctttaggtaatattctgattgtactcagtcacatgtgaggtgtgtcccaggtggtttagtactaaagttataaagatttttgaaacaaaagtctgattaattgtattataaaattaatttcactctgttcaaaattgtccttctaatatcactctgagattccagtatccttttttgcaaagaagagaaagtagtaaaattcagctcacattccaggtaatttccttgatccacagcctgtcttactaacatgtggtccatagtgggtggtcattactgataaattgcagtagagacagcttcaaagtattgtacagatttatttctatgaaaaaatgtagttgataactgctaagtaataatctgggttatatagaatccaaatcctttgacgttttcttttttttttctctttagtttctacgctcttcaactcagatgacttggggagccctcttcaggcatgaaatcctgtcccgtgatcctttgctattagcaataataccaaaatatcttcgtgcttccatgactaacttggtcaaggtatataatgggaatctaaacatgtggaatgtaggtgaatacacataataagactttgaggctgggtgcggtggctcacgcctataatcccagctctatggaaggctgaggcgggaggatcgcttgagcccaggagttggagaccagcctgtgcgacatggcaaaacctcgtctctactaaaaatacaaaaaaattagcagggcatgttggtatgcacctgtagacccagctactggggaggcttaaggtgggaggatcacctgagcttgggaagttgaagctgcattgagctgagatcgcagcactgcactccagcctaggcaatgagagtgagaccctgtctcgggggaaacataaaaaagactgattggcattattaacagcccttcttcatcactaagattcctttactggacatattttcttattccttaggaagaaatcagtccttactgg

SEQ ID NO: 120975 - DNA, 1139 bp, Homo sapiens
ggcttcaagtgagccttacctcaacctcatgagtagctgggactatagatgcacaccatcatgcctggctaatttttgtatttttttggttagggtattttttttattttattttattttttgtttttttggtagacactagttttgccatgttgcccaggctgttgttttaactcctgggctcagttgattcacccaccttggcctcccaaagtgctggtattgcaggtgtgtgccactgcacccagccttgggaagtaaaatgataagatttggggttttgtgaaaaagataaaatggccacacatgccagtatggtcttgttgttggatgttgagaatgtcattgtttgagaagtgattgtgttccctacctgtgactgttacatgagtatattcttaaaaaataattttcttagaattagaaaatgggagttcagttataaccactgattccttacctgttaccgaggacttcatggtccaaagttacttcttttctggtaggcgcaagcaaactgtcgagtaggagttgcagcactgaatactctagcaggctatattgactgggtgtctatgagtcacatcactgctgaaaactgtaaactcctggagatactgtgtttgctgttgaatgaacaggaacttcagttgggagccgctgagtgtcttctcattgcagtcagcagaaaagtaagttaccacttcaaactgacttatcctcagtctctgaagtaggctgtgtatgtgtttaattgcatgttgtggcagaaagtcatttaaaggtttgggtttttttccttggggccaacttactgcctgcttccaacccccttggacaggagtttgccaatattcaagggatcctttggcagaatgtggagatttatcaggctgcatggttcttgaaatagccatgatacttggcaatttacagttaacagataaaagtaaatgtttaagtttaaagctcacttaatgaatgtcaaggaatcttggatggtggctacagtaggtttatatctgtcttttttttttttttttttttttaattgaaacagtcttgctctgtcacccaggctggagtgcagtggcgtgatgttggctcactgcaacgtccgccttccgggttcaagcgat

SEQ ID NO: 120976 - DNA, 1149 bp, Homo sapiens
ttttttttgagacggagtttcacttttgttgcccaggctggagtgcagtagtgcaatcttggttcactgcaacctctgcctcccgggttcgagtgattcttctgcctcagcttcccaagtagctgggattacaggcatgcgccagcacaccggctaatttttgtaattttagtagagatggggtttcaccatgttggccagactggtctcaaactcctgacctcaggtgatccacctgccttggcctcccagactgctgggattacaggcgtgagccaccacgcctggccaacatccagtatttttgagtacatggttttcatatacttaggctatacatacatgttcatgaattgtattcatttaattatgcttctgactttacttgttctccctaggggaatatcagttatgcgtgcttagtaaagttgtgttattttccaagatgaaaaattgcatatatttaagaatcattattcaagggcattgatttgtggggggtagaaagttattatgtggccttttgctcattaaaaacactggatctttatacttcctttcagaagacagatacttctcaggagtcaaaggtaagagctctttataaagtttgaaggagacctttgaacctttcaggtgaggggatacgtgcccctagtggatggtgacctcagccttgcttgtgttgtattgttttggagacaggtcttactgttgcccaggctggagtgcagttgtgtggtctcagctcactgcagccatgacctccccagctcaagtgatcctctcacctcaacttcatgagtagctgggaatataggtgcgcaccaccatgcccagctaatactttctatagaaacagggtctcagtgtgttgcctaggccggtgtcaaacccctggcttcaagtgatcctccagcctcgacctcctgaagtgactgtgggccactgcatctgtcgtttgttttttttgtttgtttttgtttttgtttttgagacggagtctcgctcacttgcccaggctggagtgcagtggcgcgatctcggctcactgcaagctctgcctcctgggttcacgccattctcctgcctggcctcccgagtagctgggactacaggtgcccgccaccacacccagctaattttttg

SEQ ID NO: 120977 - DNA, 1445 bp, Homo sapiens
gactttaaacatgttcaaaattgtagccttttttctttcttggttttttttaaataacagacatgagagatgggatcttctaatacttctgcgtcttctagtgttagaactattggtaaaatattcatttgccccttcatacccttccattttaccagctactcactatactccttatttctatactcttcctccctggccttctgcaaactgaaacaatcaatatgagaatcttttcattttgtaaagaataatgatgtcatcctagctctcgatatgacagccttttaggtgatgcaaccctcacttaagctttaagcggaagagtgattagcaagaatgcaggacaagtgactcaggctgaagaacaggttcatttgttctgtttggtttaaaagtaggcctgctgataaattttttacaactctacagcccagcttttttctggaagtctggaatccagtcttgcatatctcttaatatctcttgttctttttcagggaacattgaacattttggaagaggagaaccatattaaagatgctctgtctcgaattgtagtggaaatgatcaagcgagagtggccacagcattggcctgacatgctaatagaattggacactctttccaaacaaggggtatgaaacacagctatatcagtttggtatacttttccttggaacaaacttcagggtttgttgtttgattttgtttgtgggtttttttttttggcaacagaaaatagcctttggatatacataaaatgaaaagatattttagtttttaactagcttatttctattggtgtaggaaacacagacagaattggtgatgtttatccttttgcgactggcagaggatgtagtgacttttcagacacttccccctcaaagaagaagggacatccagcaaacattaacccagaacatggaaaggatcttcagttttctgcttaacacacttcaagaaaatgtaaacaagtatcagcaagtggtaagggatacccctacctataacatttctattttccaatatgagtgtttttgattaatcttacagtaaggaactagggtgtctaggtcagcaaaatgaaatcctattttataagcaaaaaaataaaaaactaggaaatgacagaaaaactggagctcattttctttcttttttttttttttttttttttgagacggaggctcgctctgtcacctaggctggagtgcagtggtgtgatcccggctcactgcaacctctgcctcccaggttcaagcgattctcctgcctcaacctcccaagtagctgggactacaggcgcccgccaccaggcccggctgattttttgtatttctagtagagacggggtttcactatgttagccaggaaggtcttgatctcctgacctcatgatccgcccgcctcccaaagtgctgggattataggtgtgagcc

SEQ ID NO: 120978 - DNA, 1068 bp, Homo sapiens
caaagcaggattgtatgagaataactgaaaacccatcctaacttgattgtcctaccctcaacacctatcagaagaggtagcctttaagacttagccatagtttttccagaattgttttgtaagccagcacagaaaatgactgatgtcaaaactgcattttctgaaaagcaagtacattgttgcagttgacctagatgtatattcacttttggcccatcaataaaatcatgaggcaaagctgacgtgtggtacaaatcttgtgcggattccagttaatggaccactgcatatataaaaccttttcccaagaatttttgtgttagtattttggttaaatgtagatcatttttgcccattcattgacaggtacaaaatcaaaagtataatttcttaatgaaatctccagtgtaatcaaatgtagaaatccatgctattctcttgtaaagacaagacttctaaagtggttctattgactttatgcattttggtggtcaggtttcggtggaacggcatgtctcgattggagaaggtgtatctgaagaacagtgtcatggagctgattgcaaatgtaaggaatgggtggttgggagacatgtttccaaggtagtttaggcaaagcgtgacttcttcaatagggagtttgtgtaaaaattcactgcttctaaataggtcagacagcacaagaaatcataatttaggccaggcacagtgactcacacctgtaattctagcgctttgggaagccaaggtaagaggatcacctgcatctaagaattcgagagcagcttgggcaatgcagtgagaccccatctctaccaaaaatgcaaaaattagctgagcgtggtggcgcatgcctgtggcccagctactcaggaggctgaggtgggaggattttctgagcccaggaggtccaggctgcagtgagctgtgatggtgccatggcactccagcctgtgcaacagagcaagaccctatctcaaaaacaaaacaaaacaaaagcagaaagcataattcagcatatgtctcttactaggtttaattaatcatgcttatgtattgacttctatt

SEQ ID NO: 120979 - DNA, 1046 bp, Homo sapiens
aggcacctgccaccatgcccggctaatttaaaaaaatatttttagtgggccgggcacagtggctcacgcctgtaatcccagcactttgggaggccaaggcaggtgggtcacctgaggtcaggagttcaagaccagcctggtcaacatgatgaaaccttgtttctactaaaaatacaaaaattagctgggtgtggtggcgtgcacttgtagtcccagctacatgggctcaggaggctgaggcaggagaactgcttgaacctgggaagcagaggttgcagtgagccgagatcatgccattgcattccagcctgggcgacagagtgagactccgtctcaaaaaaaaaaaaaaaaaatatatatatatatatatatttaatagagatggggtttcgccatgttgcctaggctagtctcagactcctagactcaagtagtccacccatctcagcctcccagagtgctgggacaggtgtgagccaccgcacccggccctggttggagtttcttaagatgaaattcttttagtccctattctctcagccctcgaaaggaaacactaacttttcttctttcagttttgtgaggagtttaaagaaaagtgtcctatctgtgtcccctgtggcttgaggttggctgagaaaacacaagttgccatcgtcagacattttggccttcagatcctggaacacgttgtcaagtaaggagctcttggacattaccactgaagtctgagagaacagatctttatatcttatataacctatagagatgctgtttaggtgagtagagaagagcaatctccaagaagagaggaatgatcccctagatgttatcagaacctcacaggagctctcattcaagatttaacctttcttttcttcagtttcttcatccatgtaaagtgtgtggtacatattacccattcaacaaatattacctgccatttagccaatacttactgagctctgactatatgtcattagccctcgaagcctttttagagtaatgcaatgtataggtcaatgaatctctgattaggcactgtg

SEQ ID NO: 120980 - DNA, 1128 bp, Homo sapiens
agagccagaagagctgcttattaaagtttgaatagaagacatacgatgagattggtatgtataccctgaggaaggttgtctgcctgcccagacacatcaccacattctaggtgcttatcttcaacttgatcatttgaatattagtatatccgtaaatggttggttaaggcatgtgtgtgtatgtggtgatgaccagttcacatgttaaccaaactcaccgttgactgaagtataaaatccatatgccagtttgttaatttatggtgagaaatactatcctggggaagaccatatactctggttcactgatcagtgcagtgttgcatgtaaattaccctttttttgaagacaaaattagaagcagaagatttcttggtggatatatgaaaataaaaggaataggtgatcatagtaatacacaaatttgaggcatttctttattttttagagagttccttgtcatatagacgtgttcatagtctgaatgctttctgccttggtagttctggcattgtgctaaaaatgtttgcctccgtgattcttccttttccatgcttctattattgaccatctgcctgccgattgaccctttcagttactattgtctagtctctgttaagccacatgtctcttgattacgtgtattattgttcattatggcagggtgggagtggagcagacaatctcaaggttgcctctgtttattgcctgcatgaatgatccttatacttcttaggtaccgggaagccagtgttgaagtgatggagataatgtctcgttttgctgtgattgaacgtgccagcattgatgaggcttacgtagatctgaccagtgctgtacaagagagactacaaaagctacaaggtcagcctatctcggcagacttgttgccaagcacttacattgaagggttgccccaaggccctacaacggcagaagagactgttcagaaaggtacttccatagcatcatactgcttctgcttcctgcctttggaacctgctttgcttggtcatgctgattctccttggaataattgaaaggaaacttaaactacagcctgaatgaatcacaaggactcacatggaaggatatacaaattttcttatctttccaggtatatggctg

SEQ ID NO: 120981 - DNA, 1018 bp, Homo sapiens
ctaagaaagcaaccacgtctctggaatcattcttccaaaaagctgcagaaaggcagaaagttaaagaagcttcgctttcatctcttactgctcccactcaggctcccatgagcaattcaccatccaagccctcattaccttttcaaaccagtcaaagtacaggaactgagcccttctttaagcagaaaagtctgcttctaaagcagaaacagcttaataattcttcagtttcttccccccaacaaaacccatggtccaactgtaaagcattaccaaactctttaccaacagagtatccagggtgtgtccctgtttgtgaaggggtgtcgaagctagaagaatcctctaaagcaactcctgcagagatggatttggcccacaacagccaaagcatgcacgcctcttcagcttccaaatctgtgctggaggtgactcagaaagcaaccccaaatccaagtcttctagctgctgaggaccaagtgccctgtgagaagtgtggctccctggtaccggtatgggatatgccagaacacatggactatcattttgcattggagttgcagaaatcctttttgcagccccactcttcaaacccccaggttgtttctgccgtatctcatcaaggcaaaagaaatcccaagagccctttggcctgcactaataaacgccccaggcctgagggcatgcaaacattggaatcattttttaagccattaacacattagtgctgccctcaggcttgcctgtaggatttaatattttttatctttacagatctttatctttaatattttatctttacagatttccctgagaaagggaattatgaaatttttaatacaaaaaataatccatttaggtgctgagttacggtcccatctcttcacaggcatggattctaatcccactgctgacagagatgtaaaaattcatcctaccagagtttttaatctttagcatttagggaggcagtgtcataaagtaaaaagtgtgtgggccttggagtctaagagacgtg

SEQ ID NO: 120982 - DNA, 1026 bp, Homo sapiens
ggcctcgaggctctaaattccccccaagtcctagaaaaagaacatagcgcgaggactggaagtcagactacagctcccttaagcctttgcgcgccaaggcgcgctccttccccacgcctccgacgactcccgcggccacttgcgccgcgatgcctcctgggagttgtagggcggcgacgtgtcatttaagtgaattcccaggcctggggactctatatcccgtggtgccccgcggctgtttctgacgcgacccggaggccagggaggtggggggcgtagcttgtgcagagccccaccccactctgctcaggccggccggacacggcagtggcagtaagggcggcggcgacggcggcggcggtcgggggaggggccgggcggggggctggcggcagcggcggatggactcgcgggtatcggagctgttcggcggctgctgccggcccggagggggcccggccgtgggcggaaccctcaaggctaggggggccggcagcagcagcggctgcggggggccaaagggaaagaagaagaacggaaggaacagagggggcaaagccaacaaccccccgtatttgccccccgaggtgagcacctgagaagtggtagggcgggaagaagccactctttccggcccaggactctagggaggcgggacccagataattaatctccccttccggtgtcgagaccccagggaggaggggcacgggaggagaacacctctttcaggtcccgggaccccagggaggaagggcagagactggactctcaggtgacaggacctcagggaggaagagtggagagggaggactcccccttctgatctagattaccccaggagagaagtagagaaaggggatcccaggaagagcaccccgaccaactgcgtgtgccgccatagggcaagagagactgcatcctgggacgagaggcagacagtaaccaccacttcttctaaacttgttccacagggagaaggggagtacccgggaaaagagcaatatgttccacacggacacacac

SEQ ID NO: 120983 - DNA, 1044 bp, Homo sapiens
ctcattcactggggtgccactggaatagtgttagttcagtgctatatcttacattgtaaactcttcagagcagaaaccattcttatctgattctctttgtgcaggaacacacaccgcctgcgtacttttgaaggtcttttagataccactaccccaccctcttttattgctagccaccgtaggacaggatctgaccaattcctttggatagaaccaagataaatctttgcatagaaaggcaaaaacagtgcggaactccttaatcccataccagagaggtgatgctacctgggtatcctgggcttgcccccaccccgcctcaagggcatagagccttggcactagtggggtgaaccctgcatgctttctgttctaggtggagaccatgagagagtacagatggaaggctgcttttttccagatgtgtagaatttgagctgttatttgaaactctctgttccttattaaatggctgacctaatgtttccccctttatctccgtagtggtggagacccaagaagggaagacaactatagtaagtatcgttgagttggccatgtataacctctttaacgcttggagctgcctggccgctcctctgagggagggaggggcccaaactggacgcccagctccaggatcagctccctcaatgaccataaatcccacagcctactatttttcaagctgtgtgctatagtgtggttaatcaggaacagttgctgtgcctgggctgaggtatctgctatttgatgaaagtggccttttgtgtagcaaggtctcagaggcctttgctgataagctctttggcgggtgttgaatcattttcccaaaggggaaactaaggcattgttgcacgcctagagagccagagtaagttgacccagagccaagagcctggacctcagttcctttcttttctgcctagaatggctaaactgctccttaaatgatgcatttaaaaagtgacattctcccggccctggcctcactagctggcgccctggtttgtctgttggtaagaaagttggaacaatacttca

SEQ ID NO: 120984 - DNA, 1178 bp, Homo sapiens
agggaacggctctcaggccctgtccgcacgtaacctcactttcctgctccctcctcgccaatgccccgcgggcgcgtgtctctggacagagtttccgggggcggatgggtaattttcaggctgtgaaccttggtgggggtcgagcttccccttcattgcggcgggctgcgggccaggcttcactgagcgtccgcagagcccgggcccgagccgcgtgtggaagggctgaggctcgcctgtccccgccccccggggcgggccgggggcggggtcccggcggggcggagccatgcgccccccccttttttttttaaaagtcggctggtagcggggaggatcgcggaggcttggggcagccgggtagctcggaggtcgtggcgctgggggctagcaccagcgctctgtcgggaggcgcagcggttaggtggaccggtcagcggactcaccggccagggcgctcggtgctggaatttgatattcattgatccgggttttatccctcttcttttttcttaaacatttttttttaaaactgtattgtttctcgttttaatttatttttgcttgccattccccacttgaatcgggccgacggcttggggagattgctctacttccccaaatcactgtggattttggaaaccagcagaaagaggaaagaggtagcaagagctccagagagaagtcgaggaagagagagacggggtcagagagagcgcgcgggcgtgcgagcagcgaaagcgacaggggcaaagtgagtgacctgcttttgggggtgaccgccggagcgcggcgtgagccctcccccttgggatcccgcagctgaccagtcgcgctgacggacagacagacagacaccgcccccagccccagctaccacctcctccccggccggcggcggacagtggacgcggcggcgagccgcgggcaggggccggagcccgcgcccggaggcggggtggagggggtcggggctcgcggcgtcgcactgaaacttttcgtccaacttctgggctgttctcgcttcggaggagccgtggtccgcgcgggggaagccgagccgagcggagccgcgagaagtgctagctcgggccgggaggagccgcagccggaggagggggaggaggaagaagagaaggaagaggagagggggccgcagtggcgactcggcgctcgga

SEQ ID NO: 120985 - DNA, 1048 bp, Homo sapiens
gagcctcggctgcccgaatggggagcccagagtggcgagcggcacccctccccccgccagccctccgcgggaaggtgacctctcgaggtagccccagcccggggatccagagaaccatccctaccccttcctactgtctccagaccctacctctgcccagtgctaggaggaatttcctgacgccccttctcttcacccatttcctttttagcctggagagaagcccctgtcaccccgcttattttcatttctctctgcggagaagatccatctaacccctttctggccccagagtccagggaaaggatgatcactgtcagaagtcgtggcgcgggagcccactgggcgctttgtcacattccaccgaaagtcccgacttggtgacagtgtgcttcccttccctcgccaacagttccgagtgagctgtgctttagctctcgtgggggtgggtcaagggaggatttgaagagtcattgccccactttacccttttggagaaatggcttgaaatttgctgtgacacgggcagcatgggaatagtccttcctgaaccctggaaaggagctcctgccagccttgcacacactttgtcctggtgaaaggcagccctggagcaggtgtttttttggaactccaaacctgcccacccaacttgcttctgaaagggactctaaagggtccctttccgctcctctctgacgccttccctcagccagaattcccttggagaggaggcaagaggaaagccatggacaggggtcgctgctaacaccgcaagttcctcagaccctggcacaaaggccttggctacaggcctccaagtagggaggagggggaggagtggctgcctggccacagtgtgaccttcagaggcccccagagaaggacacctggcccctgcctgcctagaaccgcccctcctgtgctccctggccttggaaggggtatgaaatttccgtcccctttcctccttggggcccaggaggagtggagggtcccgggagaatattgtcagggggaaggcagggggtgtcatgggaatgggtga

SEQ ID NO: 120986 - DNA, 1021 bp, Homo sapiens
ccttccctggtccctggtggcatttgaaggtgcccaggtgagaggggcttggcacctcctcaccctgggagggagaagaaaccagggaacaggtaggagtgggagacaggtgaggctttggaaatctattgaggctctggagagatttgtgtagagaggaaaatgtggttctcccccagggtctcctcctgggtttttaccctctaagcaacctgtgggcatgctgggttattcctaaggactagaagagcttggatgggggagggtggttggtgcccttcggtcctcggcacccccctccgtctccaacaccagctcaccctggtatttgtcatgtcagcaggagaaggtcaccatgttgtttttctcgcccctagtccttccttcctgccccagtccaaatttgtcctcctatttgaccttaatacttaccatggctttggaccagggaactagggggatagtgagagcagggagagggaagtgtggggaaggtacaggggacctcgacagtgaagcattctggggttttcctcctgcatttcgagctccccagcccccaacatctggttagtctttaacttcctcgggttcataaccatagcagtccaggagtggtgggcatattctgtgcccgtggggacccccggttgtgtcctgttcgactcagaagacttggagaagccagaggctgttggtgggagggaagtgaggagggaggaggggctgggtggctgggcctgtgcaccccagcccctgcccatgcccatgccttgctctctttctgtcctcagtggtcccaggctgcacccatggcagaaggaggagggcagaatcatcacgaaggtgagtccccctggctgttggatggggttccctgtcctctcaggggatgggtggatggcctaattcctttttcttcagaactgtggggaggaaggggaaggggcacaggaatataaggatcaagaaagaaagagctgggcaccacgaggttcaccctcagtttcgtgaggactct

SEQ ID NO: 120987 - DNA, 3209 bp, Homo sapiens
ggcattacagagctgggtggagagaggggctagccatcttttgtgtcgcccaccgggctcatgtgtcatcgcctctcatgcagtggtgaagttcatggatgtctatcagcgcagctactgccatccaatcgagaccctggtggacatcttccaggagtaccctgatgagatcgagtacatcttcaagccatcctgtgtgcccctgatgcgatgcgggggctgctgcaatgacgagggcctggagtgtgtgcccactgaggagtccaacatcaccatgcaggtgggcatctttgggaagtggggcaagggggggatagggaggggggtaacactttgggaacaggtggtcccaggtcgtttcctggctagatttgccttgtctggctcctgcccctgagttgcacaggggaggtatggtggggtcttgccttctgtggagaagatgcttcattcccagcccaggttcccagcaagccccaaccatctccttctccctgatggttgcccatgggctcaggaggggacagatggatgcctgtgtcaggagcccctctctccctctcttggagagagtcctgagtgcccccccttcttgggggctttgtttgggaagctggatgagcctggtccatggagagtttaaaaagtcttttggtgttacctggtaatggggcacatctcagcccagatagggtgggagggagctgtgaaacacagggagggggttgctttcgggtatctactaggagtcagggtgaagcctagagaggatgaaagaaggggaggggatggggagtggtaagaacctaggatttgaattcccagcctggccaacccttgcagccatgtcttggcctcaagtggaacaagggctccttgaggccagcagggttgggggagttggggtgggcctgagcctctttcctgctagagctcttggtcctccctgcctccaccacccatccctgctctgcagaacccctgggtgctgagtggcaggagccccagggttgtcccatctgggtatggctggctgggtcactaacctctgtgatctgcttccttcctttccagattatgcggatcaaacctcaccaaggccagcacataggagagatgagcttcctacagcacaacaaatgtgaatgcaggtgaggatgtagtcacggattcattatcagcaagtggctgcagggtgcctgatctgtgccagggttaagcatgctgtactttttggcccccgtccagcttcccgctatgtgacctttggcattttacttcaatgtgcctcagtttctacatctgtaaaatgggcacaatagtagtatacttcatagcattgttataatgattaaacaagttatatatgaaaagattaaaacagtgttgctccataataaatgctgtttttactgtgattattattgttgttatccctatcattatcatcaccatcttaacccttccctgttttgctcttttctctctccctacccattgcagaccaaagaaagatagagcaagacaagaaaagtaagtggccctgactttagcacttctccctctccatggccggttgtcttggtttggggctcttggctacctctgttgggggctcccatagcctccctgggtcagggacttggtcttgtgggggacttgtggtggcagcaacaatgggatggagccaactccaggatgatggctctagggctagtgagaaaacatagccaggagcctggcacttcctttggaagggacaatgccttctgggtctccagatcattcctgaccaggacttgctgtttcggtgtgtcagggggcactgtggacactggctcactggcttgctctaggacacccacagtggggagagggagtgggtggcagagaggccagcttttgtgtgtcagaggaaatggcctcttttggtggctgctgtgacggtgcagttggatgcgaggccggctggagggtggtttctcagtgcatgccctcctgtaggcggcaggcggcagacacacagccctcttggccagggagaaaaagttgaatgttggtcattttcagaggcttgtgagtgctccgtgttaaggggcaggtaggatggggtgggggacaaggtctggcggcagtaacccttcaagacagggtgggcggctggcatcagcaagagcttgcagggaaagagagactgagagagagcacctgtgccctgccctttcccccacaccatcttgtctgcctccagtgctgtgcggacattgaagcccccaccaggcctcaaccccttgcctcttccctcagctcccagcttccagagcgaggggatgcggaaaccttccttccaccctttggtgctttctcctaagggggacagacttgccctctctggtcccttctccccctcctttcttccctgtgacagacatcctgaggtgtgttctcttgggcttggcaggcatggagagctctggttctcttgaaggggacaggctacagcctgccccccttcctgtttccccaaatgactgctctgccatggggagagtagggggctcgcctgggctcggaagagtgtctggtgagatggtgtagcaggctttgacaggctggggagagaactccctgccaagtaccgcccaagcctctcctccccagacctccttaactcccaccccatcctgctgcctgcccagggctccaggacacccagccctgcctcccagtccaggtcgtgctgagcaggctggtgttgctcttggttccgtgccagctcccaaggtagccgcttcccccacaccgggattcccagaggttctgtcgcagttgcaaatgaaggcacaaggcctgatacacagccctccctcccactcctgctccccatccaggcaggtctctgaccttctccccaaagtctggcctaccttttatcacccccggaccttcagggtcagacttggacagggctgctgggcaaagagccttccctcaggctttgccccctgccggggactgggagccactgtgagtgtggagacctttgggtcctgtgccctccacccagtctcggcttcccaccaaagccttgtcaggggctgggtttgccatcccatggtgggcagcgtgaggagaagaaagagccatcgagtgcttgctgcccagacacgcctgtgtgcgcccgcgcatgcctccccagagaccacctg

SEQ ID NO: 120988 - DNA, 1789 bp, Homo sapiens
aaagggaaaggggcaaaaacgaaagcgcaagaaatcccggtataagtcctggagcgtgtacgttggtgcccgctgctgtctaatgccctggagcctccctggcccccagtacaacctccgcctgccattccctgtaaccctgcctccctcccctggtccttccctggctctcatcctcctggcccgtgtctctctctcactctctcactccactaattggcaccaacgggtagatttggtggtggcattgctggtccagggttggggtgaatgggggtgccgacttggcctggaggattaagggaggggaccctggcttggctgggcaccgattttctctcacccactgggcactggtggcgggcccatgttggcacaggtgcctgctcacccaactggtttccattgctctaggcttctgcactcgtctggaagctgagggtggtggggagggcagacatggcccaagaagggctgtgaatgactggaggcagcttgctgaatgactccttggctgaaggaggagcttgggtgggatcagacaccatgtggcggcctcccttcatctggtggaagtgccctggctcctcacggaggtggggcctctggaggggagccccctattccggcccaacccatggcacccacagaggcctccttgcagggcagcctcttcctctgggtcggaggctgtggtgggccctgccctgggccctctggccaccagcggcctggcctggggacaccgcctccgggcttagcctcccatcacaccctactttagcccaccttggtggaagggcctggacatgagccttgcacggggagaaggtggcccctgattgccatccccagcaggtgaagagtcaaggcgtgctccgatgggggcaacagcagttgggtccctgtggcctgagactcacccttgtctcccagagacacagcattgccccttatggcagcctctccctgcactctctgcccgtctgtgcccgcctcttcctgcggcaggtgtcctagccagtgctgcctctttccgccgctctctctgtcttttgctgtagcgctcggatccttccagggcctgggggctgaccggctgggtgggggtgcagctgcggacatgttagggggtgttgcatggtgattttttttctctctctctgctgatgctctagcttagatgtctttccttttgcctttttgcagtccctgtgggccttgctcagagcggagaaagcatttgtttgtacaagatccgcagacgtgtaaatgttcctgcaaaaacacagactcgcgttgcaaggcgaggcagcttgagttaaacgaacgtacttgcaggttggttcccagagggcaagcaagtcagagaggggcatcacacagagatggggagagagagagagaaagagagtgagcgagcgagcgagcgggagagcgcctgagaggggccagctgcttgctcagtttctagctgcctgcctggtgactgctgccttctctgcttttaaggcccctgtggtgggctgcaggcactggtccagcctggcggggcctgttccgaggttgccctggttgcctgagtggtaggctggtgtggcttagtgtagtggtgtggacgcaagctgtgtgttgtgtcctgtggtccttctgctcatagtggctgttggtcctgatgttattactacctctggtagtaatgctgagaagctgaaagccgattccaggtgtggacaatgtcaacaaagcacagatgctctcgctggggccttgcctcggccctttgaag

SEQ ID NO: 120989 - DNA, 1086 bp, Homo sapiens
ccccagcctttgttttccatttccctcagatgtgacaagccgaggcggtgagccgggcaggaggaaggagcctccctcagggtttcgggaaccagatctctcaccaggaaagactgatacagaacgatcgatacagaaaccacgctgccgccaccacaccatcaccatcgacagaacagtccttaatccagaaacctgaaatgaaggaagaggagactctgcgcagagcactttgggtccggagggcgagactccggcggaagcattcccgggcgggtgacccagcacggtccctcttggaattggattcgccattttatttttcttgctgctaaatcaccgagcccggaagattagagagttttatttctgggattcctgtagacacacccacccacatacatacatttatatatatatatattatatatatataaaaataaatatctctattttatatatataaaatatatatattctttttttaaattaacagtgctaatgttattggtgtcttcactggatgtatttgactgctgtggacttgagttgggaggggaatgttcccactcagatcctgacagggaagaggaggagatgagagactctggcatgatcttttttttgtcccacttggtggggccagggtcctctcccctgcccaggaatgtgcaaggccagggcatgggggcaaatatgacccagttttgggaacaccgacaaacccagccctggcgctgagcctctctaccccaggtcagacggacagaaagacagatcacaggtacagggatgaggacaccggctctgaccaggagtttggggagcttcaggacattgctgtgctttggggattccctccacatgctgcacgcgcatctcgcccccaggggcactgcctggaagattcaggagcctgggcggccttcgcttactctcacctgcttctgagttgcccaggagaccactggcagatgtcccggcgaagagaagagacacattgttggaagaagcagcccatgacagctccccttcctgggactcgccctcatcctcttcctgctccccttcctggggtgcagccta

SEQ ID NO: 120990 - DNA, 1043 bp, Homo sapiens
atccctttttaattagaaattaaaacagttaatttaattaaagagtagggttttttttcagtattcttggttaatatttaatttcaactatttatgagatgtatcttttgctctctcttgctctcttatttgtaccggtttttgtatataaaattcatgtttccaatctctctctccctgatcggtgacagtcactagcttatcttgaacagatatttaattttgctaacactcagctctgccctccccgatcccctggctccccagcacacattcctttgaaataaggtttcaatatacatctacatactatatatatatttggcaacttgtatttgtgtgtatatatatatatatatgtttatgtatatatgtgattctgataaaatagacattgctattctgttttttatatgtaaaaacaaaacaagaaaaaatagagaattctacatactaaatctctctccttttttaattttaatatttgttatcatttatttattggtgctactgtttatccgtaataattgtggggaaaagatattaacatcacgtctttgtctctagtgcagtttttcgagatattccgtagtacatatttatttttaaacaacgacaaagaaatacagatatatcttaaaaaaaaaaaagcattttgtattaaagaatttaattctgatctcaaagctcctcttggtttctccttctccattgaatccttgctctagacttcctcccgccccctttccctcttcctctggggaacatggcatttgtcttgggtctgggaaaggtacgtctaatgtgtaggatatggggtgacccaccttgttgtgctgggggcaaagtccttccattttggctgagctggtcctgggggaacccatccatcctgtcttgatatagaaggtgggaagctctgggaatgggtggagggggagaaacagcttaggagccaagggcccttgcaattggtagtgctgccttcaggaattagatgatccaggcccctgtcccttagccagggaaagaactggccatgt

SEQ ID NO: 120991 - DNA, 1861 bp, Homo sapiens
aagaacccccttggacatcattcaagttctctccaagtatagcagagtcttagagacctgcgttcaaattctagctctactattcttcagctgtgtgaccttgacaagttacttaacctgtctgaacctcagttttcattaaaaagtgtttatgcctataattccagcactttgggagactgaggcggacagatcacttgaggtcaggagttcgagaccagcctggccaacatggtgaaaccccatcgctactaaaaatacaaaaattagccgggcatggtggcacacacctgtaatcccagctactcaggaggctgaggcaggagaatggcttaaacctgggaggcggaggttgcagtgagccgagattgtggcacttcactccagcctgggtgacagagcaagactgtctcaaaaaaaaaaaaaaaaagaaagaaaagaaaaagaaaaaaagtgtggttactaccacctccttacaagttttatcatgggaatcaaacaaggtaacagaagtaaagagcttggcatccttcctggtaattgatcaataatgggttatcatctctgaacttctgacccataactctcccatgcctccacctcccaggctaccacagatggatggggtatgttcaaagagtgagaatattccctgtcactcagtggcagagtccctaacacagtgtaaacccttaggtctaaataagaagcccaacctgactgaggggctctgttatatttctatcatgttacattctgtgtttttatcttatttttgtttttaccaattttctttctctaaaccaaccccttttattccataccttattaataacaataactaattcctagagcccattatatgccttgaactatattaagagctttacataagtcatcttgtttaatccccagaacaacaacacaactggattattgtcccattttacaaatgaagaaactgaggcccagggtgactaagtaattttcccaggttagaagcctggtctgtcacatcctagagtctgtgcttttaaccaccagactatggtgcctgtcccctatgcctgcctcagaacctgaaatcacaaacccaaggcctgagtggagggaagctacaagcaagaggaaaggcaagcaggtagaaatagggtatggcatttctccagtgtggtaactgactgcctccggctccctggtggaagtggctcttgtttgcagataactctgcaaagtgcagtggttaagagcatacactcgagccaggcagcctgggtccttatctgggtctaccacagactggctgtgtgaccttgagcagctcatatactctctctgtatctcagtgtcctcctggggttgtgatggggagcaaatgagttacatttgtaaagtgcttagaacagtgcttggcacaaaagaagagttaaataaacatttaatactattattttactacttttttttctttttctgtttttcttttttctttcctttttttttttagacacggtctctgtctgtcgcccaggatggagtgcagtggcatgatcttggttcactgcagcctggaactccctgggctcaggtgatcttcgcacctcagcttccggagtagctgggactacagacatgcaccagcatgcccagctaaattttggtggtggggggtatcttttgtagagacggggttttgctatgttgcccaagctggtctcgaactcctgggctgacgtgattctcccaccacagcctcccaaagtgctgggattacaggtgtgagccaccatgcctggcttttttttttttttcccctcgagacaaggttttgctctcttgcccaggctggagtgcagtggca

SEQ ID NO: 120992 - DNA, 1153 bp, Homo sapiens
ccaaaacctcaatatcagactagagaaactgggatatagctggtgcaggcacctcgtggagtggaagaactgccacctcccatccccaaggtattctgcctcaatgtcttccctcttctcagttgctcagcccagtgctggctttgagagcagctgcccttgatgaaactcaacccagcaaccccacccccacaattaaaagcttggagcagccctgtcaactggcagagctgccagcccaggctccaccccttacctgtcctgtcactgtgcaagttgcttcccctactgggttcctgcttcctccctgtaaaatggggatagtgatctgagtgtgccctgccttcctcccatgcaggtgggaagattaatgctgttgtggaggggagagtactttgtgaccccaaggaggcggacagcagaggagcatggtgatttcagttactaaccatctagctagatcctgtccaccctgctggggccacttcatgtagaagcttccaaaatgctctacctttctttggtgtggagaagacaggagttgataggaatggtactctggggcttgttctcatttcattctgatctgatggagccttggaattcagagagagaaacaggcaaggggtgggaatagagtgttgagattgctggagtacattggagttgagaattgagaaagggggactagttagagtccccccaacccaagatacctatacctacctttaacctcccatagtgccccagggttctgtgcatcttatgtttacatacccgggctcccagacacacccatgttcacacccccacttcgaagccaacaactcccttcatttccgtggactgccatgcagtcacctagctcctcctggacacaggtccacacatcaacacacatttacatacctggacacacacatttccacagcacccacaggttctctggcctgagaacatttaatgagcatttataaagcttccatggtctgccgagtcctgttctaggaacatcagaaaagcaccgtggtgccctgaaaatcattctagctttagaaagaaggtgagctaggtttgagtcctaggtccctcattttattagcagtgtgaccttgggaaagttacttaacctctgaggccctgtgcccccacc

SEQ ID NO: 120993 - DNA, 1061 bp, Homo sapiens
tgtcttcccaggctcagctccgccccctgccctaagacagagagaatgagagtgtgggggtggcggcggcaggggggatttagatagatgttagaaaatcacagataccttccagcttaatgaaaccagcctccccagtccaggcctggcatctagactgagttccccagacccagggtggggtcatagccagagagccagtgaaggtaaatccatgtgactcaactctcccctccctaggcccttatctccagaggccagagcttccatccacccaggcagcctggtgatctgtcctcactgccccctccccacgcccaccctactgggccatgaaggggatgggggcaagcccagctgactgctccaccctctgcccaggaggaccatgcggcagtagcagccatgctgccctttctgctggccacactgggcaccacagccctcaacaacagcaaccccaaggactactgctacagcgcccgcatccgcagcactgtcctgcagggcctgccctttgggggcgtccccaccgtgctggctctcgacttcatgtgcttccttgtaagtgcctgctgccaccccttaccttggcatccatgccctgtacacacctggcaaacacttccagctctaaccactctcccacctgccccggtttcccaggcttaagcaggaggagtccccatcatccagcccaagcctcgcctttgaccattcacccaagccagggtcatccccttctaagacaagattttggaccctctgcttctgccccctagtccagcaggtggacagacagcctctgcacttgccaactgccccctcttccctcaggcactgctgttcttattctctatcctccggaaggtggcctgggactatgggcggctggccttggtgacagatgcagacaggtaagggtctgggaccctccctctagctctccacacacacatcttgttccacactcctcaggaataggaaggagccagccctctctcattcccctttgctggggggatgagaagggactagccccaatgtgggcatgggggcat

SEQ ID NO: 120994 - DNA, 1053 bp, Homo sapiens
gttgtggggaatacacagaaacagccgtgctgtgcccagcacttgggaaaatagcagtggctgatcctaggatagtaatattccttccccttctacatgcactcaccaagccagaaccggacacctactccatgccagccactgtgctgggttctcagggtctaaggagctgaaagtagtacccccttctgcctctataacccctcaagagcatgggacggcgtggctcttttgttaggctcactgcctgatttctgttggaaacactcccctgctttccctgggacctggcttatccataactaaggcctcctcccaccccatctgttcccctctgctcacctacttctctacccactcaaaacaaagcctctttctctagtgccccccacccctcacatcccctggctccactggggtcaagcctcagaaggcaaacccactcccctgtcacccaggtgaagcggaccctcttcatcaatggaatctccaaatatgcagagtcagaaaagatcaagaagcattttgagtgagtaagccacgcttccccctaccctcaagccctgctgcagagccttctctgcctttgaactctaagaacatccttataccctagcctggagctctgccgtgggtgggatagagattagatccaggaagaaatgtccgattccagggtggtttagcacttgggtcgggtgataggcccctttaagaacaggaaaaataagacaaaaacctgaagagtgagtcattcaaaccccctaacccccaaacctcctcctggctcagactgggtcataggttgttgacccaggtccattggagtacatatcttcttcaaaattaaaagcagcattctggagtttgtgtgcagccatgacagggagaagctccttggtttccagtggattccaaggagtccaggagaacttgaactgtgtattctctgaggctttttcagctctagaattatgttttggggtgggtagagcagacctatggccagaaactagagaaaagggaggtggtataatgaggcaaagagggaac

SEQ ID NO: 120995 - DNA, 1009 bp, Homo sapiens
cttggggaactctcagttttgtagactaagaaaaaggcagcttgaattggagatgtgggtttttttgtctttttttttgagatggagtctcgctctgtcgcccagtctggagtgcagtggcgcgatcttggctcactgcaacctccacctcccgggttcgagcaattcttctgcctcagcctcctgagtagctgggactacaggcacgtgccaccatgcccagctaatttttgtatttttagtagagacagggtttcaccatgttggccaggctggtttcgaactcctgacctcaggtgatcctcccgcttcggccccccaaagtgctgggattacagatgtgagccaccacgtccagccagagatgtgtttcttgaaggtgatggggtcatggatgaaagtcaggggcaggtgggtggggtccctgcacaagatgatacatgaactgtgtttcagggaagcctaccccaactgcacagttctcgaagcccgcccgtgttacaacgtggctcgcctaatgttcctcgatgcagagaggtaagggactgggggcagaggagggtgacaccaagggccccctgccattgtggaggacatcttggctaccacacaggctccccttctagattttttcctagggcatttgattttaattcaactcgttggtgtgcctgttaattcagctctggaaagagcaaggcctggaggttagagtttgttgtgaggggaaggggggcccatggtccccactgcatctgaggacatgcccttctttggctacagtatgagaaatttaggtcagcctgcaggaagaacttctggccctctagggatgggtggggagaccttgggatgtggccacatctgaaacatgtatcctaaacaagaacaagacagctcctgtccttggggagtgagctagatgacccccaagctgagccagccccagccccagatgtaggtgaccaggcatctgggtcccacaggaagaaggccgagcggggaaagc

SEQ ID NO: 120996 - DNA, 1086 bp, Homo sapiens
ttgggaggctgaggtgggagggtcactttagcctgggagcttgaggctccagtgagctgagattccaccactacactccagcctgggcatcagagcgagacgctgtttccaaaaaaaaaaaaatgcttagaggagcagtgcctggcttgtaggaagccccaagtcagcgtgggctggatgctgcaggccccagcctggctttccaactagaggccctgtccctaaccctcccacaaaggtggaggccattgagtactacacaaagctggagcagaagctgaaggaagactacaagcgggagaaggagaaggtgaatgagaagcctcttggcatggcctttgtcaccttccacaatgagactatcaccgccatgtgagtccccaactcggccctcggccctgagcagccctccagggctccctgacccctgtgctcatggccttctgccagcagtgtggcctccaggtgggcctgtggtaaccagtgcccatctttctagcatcctgaaggacttcaacgtgtgtaaatgccagggctgcacctgccgtggggagccacgcccctcatcctgcagcgagtccctgcacatctccaactggaccgtgtcctatgcccctgaccctcagaacatctactggtgagcaaacaggtgtcagggcaggctttccagggcctgggatgggctcagtaggtaggcggaggagagggagtgtcttggtgtcactgggggccaatcctgcccttggttcctggactgaccggttccccaccttgccagggagcacctctccatccgaggcttcatctggtggctgcgctgcctggtcatcaatgtcgtcctcttcatcctcctcttcttcctcaccactccagccatcatcatcaccaccatggacaagttcaacgtcaccaagcctgtggagtacctcaacgtgaggcctcatgcccctgtcactttccacgctgggtcacaacacacagataccaggccctgatccctcttccacttgcccagcccagcccgttctgcttgttccaaccccgtgccaccaaccagctcccaaaaacccctgtgtgcacttccct

SEQ ID NO: 120997 - DNA, 4957 bp, Homo sapiens
ggatgttctgggcttccaacatgggagccctgagagttgtgaggccaagggcccagctggggaggaggcacataagcaaagccacctgggccccctagactgccctgcctgacgcccccctgtgccctgctgcagaaccccatcatcacccagttcttccccaccctgctgctgtggtgcttctcggccctccttcccaccatcgtctactactcagccttctttgaagcccactggacacggtaaggtgcctccactcacaccacacctcgctgtggcctgccctcaatgacccatcctctctgggcagcactttgcccttcaggctcctggccctgggcagtcccacagctggtagggaaggggtagtgcccagcaccctcaccttgggaggcccacccttcccaggggacactccttggacattgtccttgttgggggagcaagtctggggcctgggctcacttgacctgtaccgttccctgctcccctccctccagctctggggagaacaggacaaccatgcacaagtgctacactttcctcatcttcatggtgctgctcctaccctcgctgggactgagcaggtgagttgagaaggatggggcaggagccagggtagggggacagcaggatagggagaggagagcagttcagcctccctacctcccctacaaagcaaggggcccaagatgggaagcctggccacccccaggcctcctgagctacccaccccatgtctgggagtctccccagtggctcacagaggagggacttcccctcccctggtgttctgtaccactccagctcccaccccatctctcctctgcttccctccagcctggacctcttcttccgctggctctttgataagaaattcttggctgaggcagctattcggtttgagtgagtgactggggcccctagggaaagagaccagacagcaggggtgggtatgcttgagagacattgccagccccatgggagggtgcaacaaagcttccaactcctggagggggcagaagagagaggatctggcggggttaccccaaaggcacccacaaggtgtcttgggtgtgtatacatggtagaagtccctggggtctgtgttggtgttcactctctggtaacctgtttggatgctaagatcatcctcaaggtatatttggggcttggggctccacattctggtagtttctatgggggtgtcttgtgcccatattctgggactaactgtgggcgtctctggagttccacttgggaggtttggggaaccatctctagggaggtcttggtgatacttagggagtgtcttggaggctactaggggtatccctgaaggtctctagagcccatatttttgggtatgtgtaggaggctcttgaccttataactctgggggtgtctgtgggcggggaggctaaaggactcacactttgggatgtttagcagtacaagttctgggaacatctctaaaatttcaggcttttattcagagatgtaactgtggagttctgtatgggcatcttctctgggaatcatgtgaggatatattgaaggtcatgcaccatggctgtgggcacaaactctaggggttttgctgtaggccatctgtggtgatctttgagtcacacttggggcatctcaggcactgataaaggttcctgggctcccccagagatgttgcgggaagggtctcaaagcttgtttgtggaggtatctgaggctcatgtcacactctgggggtaactcgagttatggtctaagtgggggaatcttctgggtgttcctggggctgtcagcctttgggttctttgagggtctcattgggttgtctttgggggtcctggacagttctcccctgaacattctagcagccttaggtggtcttgagcactctctccatgggtctttatggggcacaagttcttggagctgtctgttgccactctgtatgtctctggggggaacagggcacaggtgcttggggcgctaagctgggggtgtccacatggaagaagcatgttggtggtggaggtgttgggtgctgtagttctggcagtgggcgggcggccaccgggtcaccccaagggtgcagtgctggagcacctggtgcccgcaggtgtgtgttcctgcccgacaacggcgccttcttcgtgaactacgtcattgcctcagcctttatcggcaacgccatggacctgctgcgcatcccaggcctgctcatgtacatgatccggctctgcctggcgcgctcggccgccgagaggcgcaacgtgaagcgggtacggccgcctggggcagcagcggcccgcacagcgccccctggtggcccaacaagaaacagcagccatcgcgctagggttgaggggcacaggagggctgagacttggggagtacagttgactcacggtggatccgggccatccccttcccatatctggggccttcgtattctgccatgggtggacataggtaaccctgaaggcccctgccagttctgacagtagcattctatgatgggagttggggagatctgggtccctagcgctagggtccctctgtcttaataagagggctctgggcatcccactctcaagtccacccaactcttgccccctacctgccaggccccgacccttgaaggcccctctccgtgccccatcactgcaaccgccctgaccctcctctcggccatagcccctctctccatctgctctgccctaccctaccctagacattaggtcctgttccccatggcttcttttccggccccagaggtcctggctcccttccccctccctccttccctgcccctctggtcagtccctgcctccctgagccatcctcctgcccgtctcccccccagcatcaggcctacgagttccagtttggcgcagcctacgcctggatgatgtgcgtcttcacggtggtcatgacctacagtatcacctgccccatcatcgtgcccttcggtaggcaccgccgcgccgggacctgggccctgctcggggggacccaggacttcaccctctccactctaggaatgcaggccaccccgagtggacagggcccggctgggagaccggcccctcggggctcccgcccggtccctggctcagtctggggcctggcctgtggggaggagggggagagccatcagctcaggccagacccagctggcatgtgggccccagggcaaagtcacaccaacatggccatacttacccacacctgtgccttccctcagcgggatgtgcttggacacagatcacatacgtgctgacatgttcacacacacactcccacacaggcatccatgtgcacacttttacaccaccctgtaaactcaggaaagacttggattccagggtgggatgggtccttgccactcatggagatagtctgctgtatctgagctatgtgacttggccaggtctctcttcctttttgaagtttagcaaagtttctctttaaccatcacccccactggtagcctctactttcctccctaataacatcctaactccttaaccaaccctccctggttattgaaggctccaagttcccaaactaacttccttgtcctcattagaaactccctatccctcagcctctggggaaatagaacttgtcccttaatttatacgtatctgtttagggacagggttagagaaaaatgatacgggttttaagaagatgcttgttgattcaaatgactagatttccaatagtagaattcctgatgaggagagtagaatgaggggttgtagcggaggaagctgaagttctgtgatcacgctggggcacggggcactatcccgtcctggggcccgggcaggaggagggggccaacccttcagcactctcaggaccagaacaacctgtgacagacacacaaaaggttcggcagcactggttccgaggtcagggcccatgtggcttcccttagggctcatgtacatgctgctgaagcacctggtagacaggtacaatctctactacgcctacctgccggccaagctggacaagaagatccactcgggggctgtgaaccaggtggtggccgcgcccatcctctgcctcttctggctgctcttcttttccaccatgcgcacgggtgagggatccctacccagggaacggggggtggcgagcagagtggattccagccagagcaggccacaggagaagccgcatggctgggggtggcaggcaaggggcctgggagaggctggggccagtctgtagcacctgggagagtgaggactgcattcagagggtatcagaagctggggtggggaggcccacaggagatagcaaccccattctttgccccccaacaccagggttcctagctcccacgtctatgttcacatttgtggtcctggtcatcaccatcgtcatctgtctctgccacgtctgctttggacacttcaaatacctcagtgcccacaactacaaggtgtggggcaagggtggcaggcggatggctgcgggcaggagctcaaggggaggaatgcagagggccacagggctggcgagggctgagggcagcgccaacagggccaagcgggcgtggggtcatgatcagggctgaggacatgcccccacttcctgactcattctgggcccctcaagattgagcacacggagacagatactgtggaccccagaagcaatggacggccccccactgctgctgctgtccccaaatctgcggtgagtgccctcaagggttgggaggggcctctgacagactcagcctcaaagcccagtgttcccttagtcctgcagaaaggggaacctgtgccagaccccatgggggcgggaagagagctggtctccctggagggctgcccccgccccccagggccctgcccactctgctgtcctacatgccctggtgttcccgcaatccatgaggggcagctgttcaccttgcccccatttcctc

SEQ ID NO: 120998 - DNA, 1145 bp, Homo sapiens
ttaaaaaaaaaaaattataacataatactttactgaccattaccttgcctcattcactcaaatattcaaatatttaggtcttcttttttggtttctccataaaaaatttgtttctccactggggtcttgcctagttttttttattttattttattttttatttttagacagagtcttgctctgtcacccaggttggagtgcagtggcacgatctgggctcactgcaacttctacctcccgggttcaagcaattctcctgtctcagcctcccaagtagctgggactacaggcgcctgccaccacacctggctaatttttgcatttttagtagagatggtgttttaccttgttggtcaggctggtctcaaattcctgacctcaggtgatccatctgcctcagcctcccaaagtgctgggattacaggcgtgagccatcgcgcctggccatcaggtttttattagatttttttccctgtggcattgtggtttttgctgctctccctccccacatcagatatgctaggcatgtccttccttaccttctcctcaagctcctctgtccaccctcatccctctcactgtccaggaaacagctgtctcctgccccaacaactgactgttccctctgaggcattgccagagagggtagggcccccacctcccaccctcagggtcctgtcagctgagtggggggtggggggcagtgggcaacagctgttgcagtggggacaatggctgtattctatacaagctcctttcctgggccacctcctcctccctggctagaacaactgttcttgtggattggggagtcccatctgtctgtgctagctactctttcaggcaacctccaactccctggcccattttgctcatgtcttacaggcatatccagtgtgtgtcccactgcccggtcgcctgtgcatgggtctatcattgcctggaattggtgggcagaggaatgatggtcatggataagggaccatccctccaaagcgcatcacctcttctttcagtggtcacattcaggccctagctcctcactcaggtaggtggtttctggcctgttgtcccaggcagaaaggcactgtgattatgacagggctgagctcccagttcctgggctagaactccgcccattcccc

SEQ ID NO: 120999 - DNA, 1095 bp, Homo sapiens
gcctggagaagaactcctgctagactgagggagaagggttagggaactccaggggcattgaggctgtgcaagaggagggggtgactagaggaagggaggggccagggagcagtaggaatgcctggagctgggaacggcaagctgtaggtcttggtttactcttgccttggttcagtctccccatctgtgctatggtgagaaccttcctgcctcagctgccttgccaagagaaagggcttcatgaaagcaaaaatgacctacaaattgaggtcaggagcaggaaggtgtaaactgaagggagggggaactcctgcccaccccatgtccttgccaggtgaggcagaaccaggacatgcaagcctaaagtctgtgttgtcttcccaggcactgactcactggccctgccatgcccacgccactgctcccgctgctgcttcgattgctgctgtcctgcctgctgctgcctgctgcccgcctggcccgccaatacctcctgcccctgctgcgccgattggcccgccgcctgggctcccaggacatgcgagaggctttgctgggctgtctgctgttcattctcagccagcgacactcgccagacgctggggaggcctcaagagtggaccgcctggagaggagggagaggttaggcccccaaaagtgaggccacaagtcctggcagcagctgtatccacaaaatgctttcttttggagtaggataatcctggcaccagcactgaccgaagcctgcccagtggacagaagatatagtgagggttgtgcatgagagggatctgccacagacatgcctctccactcccaacagaaatgtctttctggaagaatgccttgcatctagcacaaaactgattattgcccctctgtcctccagcagttcctcccaaagaccactcctaatcacctctggcctcaggcgggaggggaactaacacccacccacccctgccctccctgcaaatgggaacatcaaggttcccagtgcttaactgagggacaagtgacaatttagcagagaggcaagatttgaatccagactgtcttccagactcaggacctaccttaaaataatatctgagt

SEQ ID NO: 121000 - DNA, 1043 bp, Homo sapiens
cgggtgcccaaaggcgccggccgccagtcccaggcccgaagggcccctcccactgagtcggctctggtctccccgcccctgagccgcgaggactggacgcagctggctgcggagctctgggcgggcgctggggtcgcctgttgcagcctctcttccgcccggcggcccacaccggtcaggcccggcgcgggctgcgctctccagctgtggctatggccccagccccgagatgaggagggagagaactaggggcccgcaggcctgggaatttccgtcccccaccaagtccggatgctcactccaaagtctcagcaggtgcgcggggcggggccggggggcctggcggggcggggtggggtgggggcgaggtctgcgccgttctcacgctgccgggcgggacagggggccagtagggggacccgctgggctacagtgtctcaggggagtcagaatctttggtttctggatgcggggccacttttctgggccttcgaaggccattattagatgactgcctccccaaactccccagccacttacagatgtcccaggaacatagggtagggggaagaggtctggaaaattagcctagaagaccagcccagacctaactgaacaaagaatttagtcttctcgaaccccgagccagtacccacactgtgaacacacctgtctttacttaaaaaatcttgatgttttattcatcatggagtctttaaaaaaaaacaaaaaccgagtctcgctctgttgttcaggctggagggcagtggtgcgatcacagcctactgcagcctcgacctcatggactcaagccatcctcccacctcagcctcccaaaatgccaggaccacaggcatgcgtcaacatgctcagctaatttttttttttttttttttttaagagacagagtctccctgtgttgaccaggctggtcttgaactcctaagctcaagtgattcttctaccttggcctcccaaagtgctgggatgacagatgtgagccactgcacttggcatcatggagtcttgatttgtagacattg

SEQ ID NO: 121001 - DNA, 1029 bp, Homo sapiens
agccctgtcacaaggccatggagatacagtcacaaacacaactgagaacacagacagtcatgagacatgtgctggttaccaacccccaggccaagcaaacacacttccagcaaacacacatgacttgttggtgacagctgagaggacacatgcctggggagagagaggactgtgtgtgaggtggtgaggcatgcatggggcctgccaagttggggagggagtctgggccaagccacggtcccatatagggtggtgaataaggtgtagagtagaggtgcagcaggaccaacccttcccaccccaccccttcgacagggacctgagggagctcagggagggagagaagccagaagaccaggcagagactgaagagagctggcaaggcctggctagaaaaactccaggcaaggcctgtgtaagttggggctcccaggctgtccagcagggggccctggcacccagcaacctctgcttgggaggtggctacagaggggtgtgggtgttggctaggggcccagcaggatggatgccagacggacttctctccaacaataacagccctggctgttgccatccaccgagctggcagggccccagtttgggtggggagaggaaccagcctttcccagtctggcctgagaccctcaccacttccctccagttttcttccacctccagccccctctgtacacaactgcagccactggccaccagccttgccatgcctggcagatcttctgaccactagccctgccacccccacagacccagagaccaggaaaggagggtggggagcgaggaagggggccaaggcagagggcagaggagggctaggagaggaagagagagagactggacaaacatgagggcaggaattagggggttgtggacagacatgaagccactctcaagtcatggggctgtgcctggaaaaataccacctaaacccatcttcctgccctctggttagggctggcggggatgtgggggatgggggtggggtgggggagggttgggaaggaatatgtg

SEQ ID NO: 121002 - DNA, 1030 bp, Homo sapiens
gtcacgttgacctccgcaaggggcaggcgagtggacgggtgatccccatcgatctggtcggtatcagggaggggccgtgccgctgactgcgctggcggaggggtatggggatggggatggggatggaggctcgcgagcggaggtgcaggctcgcgagcggaggtgcggggctgtctctttaaccccggtcttttactggctaaactcgtatccctggcgtctccttcctgcgcacgtcttcatttactgatttactgtgagggtatatgagagggtgaagacaaacagtcctcggctttgcttaccaggagagagcagtcgtaggtcaaggctggctccaaccctgccctcacacctctaggggtctctctgcagccctgtggtagtccctttgcctactcctctcggtggcctccagaccctccaactttcctcctgcttgtgtaagctccccatgccaggatgtgtgtgatggggcggggctgagctgcctgacactcaagtcaggctgggaatgatcttggtctccacctcatttttccctttagttgaatcagagttccccccacctcccagtctacagggctaactgagaagcagcttttatacctctctccattccaaaaggagcttgaacatttaatatggattctagctcctccactcaccagctctgtgacttcaggcaagtgactcaacccctctgaacctcagctggccccatctattcagtgctagtactagcttatgggtggttgtgaagaaaagacaagagatctgcaggtagtggctagccccatatgaaatcctgggagtggagaattgcaggagaggtgttgggagtctggaggcagggaggtactcaatttggtggctactttcaggggcccacctcagcaggccaaggcatagttggagggacaccagatgctctgagctggtatcagatccctgtttgccgctgggcaaaggcagacaaaagcaaaacacgaaggctggccagctgaatgttaggatatgggcaggagga

SEQ ID NO: 121003 - DNA, 8535 bp, Homo sapiens
gctgcacctgcgagagctcccctgctgagactccctgttctcttatctcccgagcgacaggggtggctttttatctcctgggtgtgcttctgcttctttgcttgcaaggcttctcagaatggggccccatgaagcctgagggactctctcctgataacaccctgtgccacctttttcattctggatccgcacccaggagcccgtggacaaggcccactgcctgagcctgaactaggagcacctcctagggactgcccaggcttgctctgctctgacccttctgctggccagtctgggcacctggtgagtgcccagaaagggagggaagggaagctgtcctttcaccccaaacagcaaggcctgggcccagctaggcctgagtgtggggaatgtgtcagtgcacatctgcctggcttcccatgccacccaatgggaaagctgtttaatctgctggtgccagggggtctccccctacacaaatggggagcaggagagggacgctgaggcagaaggataggtgctttgggatccacccctccaatcttcttttcaaggtcactcttagaaaggggaagcggacaggagcctgtgacagagaggaactaagggaggactaggtgaccctggggtcgggaggggggagggggaagggctgtgcccccacatccattatgaaatattttcttggaaaaccggccagcaactaggaagcccctgggcagtggctggaaagaaaggttaaggtgccaacagcagagagactggaatctgggttgccttcaggagaggacagccccactctagccatgaatccaggggctccccagggagggtggagagaccagacttgcagagaggggcctggggagcctctggtttgacctcagtcatcatcgatgttgtcgcagctgctgcagatctgcctgttccgtgtccttcctcctcctcccccgacctctttgctgtgtctcctccatttgtctccctccttcccttgtcatcactgtccctgacccctctcgtcctcttgcctgccttctttgactgtctttccctccctcccatcatctttcctcctccttccctcctgctctccaccctcctgtttcccagcttataaactgcttcggctgctggataaaaatagcggtggcagcggccaggccgggagccaggtagagtctgagcaggcaggggggccgcgcaggactggcctgctgggccagggggctgggtgggggtcaagttgagtcgtcctgaggggcagggtgcagagggggtcttactggactcctccactggcctgttctgtcagccctgccccctctccccctaagagcctgaggaggcctatggcagggccaagacagggcctcacactgttcctgcccccagcaggcccctgagggagggagctgtcagccagggaaaaccgagaacaccatcaccatgacaaccagtcaccagcctcaggacaggtaaggggtaaggggctgggctgtggatccagggaatgggttttcagggagctgggtgtggtgtcctttggaattgggggttgccattgctggctggccttccagccaggtagctatgagtcaggtctgcatcaggggtggggaccccgtgtgccttggctgggtgctggctggggtgtctgcgggaagggcagggtgcgtgggcagcagtccttccctggcctgtctgtgtttccactgttgctctccagccagttagcggctttcggctcctcccgccaccactgtggggagatacttggctgcacccctccttccaatgcacatctggcagaactgccctggggcctctgccttagatgacctggcccaccctggttcttgatctgatcttcctctcaattccctgcctctggagcctgtgaactcccagtcaagttagacttgcagttatgactgtgaatatgtattttggaagaagaggctgtagcttaattcaatttctcaaagggatctgggacccaagaaggctgaggaagtgatccctgagatccaaagctccttcaaagcgtcaggctctgtcctgccctccaactcaggccccagaaacccatcacgtctgccctacccaccccatctccctcctgtgccaaaggctatgaaactaggccacttttgcctgtgggggctttgagcatgtagcttaatctctctgggactgtttttccacctgtaaaataagctaaaagtatctacttcccaggaagtggatctagaagtaagggaatttaaggaggcatggcaataagtccaggccccaggttgcttccctgcctcctgtgctccattcccaggctgcctgcccattctgtccccacctccgctctcctgtgggcagttccctgaaggcctcgccggctccatttgccttattgcacagctcagtcatttcccagcgtactccccccaaccccgatcctctgtcctatgtgactttgggagtttttccttctgctctgggcctccgaaccaagcctttagcttctccaagggaagcatgtatgtgagggggttgggggggctgcagttgcattaactcggacctgctcacgtggtgtgctcaccacgccatccctgtatgaggcctgccagcggtccaggctcctgcactctggccaggcctgtcttctcactgccttgggctttatccctgccatctctgaagagagctggtgttggctctggggagggtgtgcaaacccaactggagatctacatgggccgggctggggttactcagctttcaggcaaggcctatctgggagaagctggcgtgacccggaagggccttgaggtatagggcttggggcattgccctggccaaaggtggacagtccttatttacaccctgaggcccagatggcctccagtggccccatacctcctggcctgccctgggtggtatgaactacaaagttctatttggccaggaagaaaatggctctaaggccctctcttcacagcggccctgaggcaccctgcccacctgccctgtaggtccagaatagtatgggagtttcttaacttcagaatcctctctggggagtaacacagtccctgaccagacagcataattacttccagcctgcctggtgggagtggaagacacttgctgcttgctttctcactcatccacccaccccctgcccttcggcaggatttccaaaaccatctccggatgtgtgggtcacactggttcccagcctgcagagtcccccgagccttccagggctgataaccatggtcctgtcagccatgccattcagtcctatgaccctgaccccatccccaccccaaattccaacgagcaatgtacccttttctccccccacacccataagaggacacatgcaaacggacacaaacacagacgccctgtgccctgggacctagagagactgacaacggacaggggctttcctggggctcattgtggagtggggcaggatggtgcgtcatttggcccatctttcctcctccattgcagatacaaagctgtctggcttatcttcttcatgctgggtctgggaacgctgctcccgtggaattttttcatgacggccactcaggtgaggctggagggactgggctccatggggcagtgcccactgtgcttgcaggatctgactctgtgctggtaggcacagggaaagagatttcaacactcctctctgcaacccctgcagtatttcacaaaccgcctggacatgtcccagaatgtgtccttggtcactgctgaactgagcaaggacgcccaggcgtcagccgcccctgcagcacccttgcctgagcggaactctctcagtgccatcttcaacaatgtcatgaccctatgtgccatgctgcccctgctgttattcacctacctcaactccttcctgcatcagaggtgagtgcccaccccctccccagcccccagcctgaccctcactgtgtcctgcacccccttggctgagccccagctttgcccacttgtctctgccacccttggcctctcccggcaggatcccccagtccgtacggatcctgggcagcctggtggccatcctgctggtgtttctgatcactgccatcctggtgaaggtgcagctggatgctctgcccttctttgtcatcaccatgatcaagatcgtgctcattaattgtaagctgggccaggagggggcctatgggaggaggcatgcccaactacccccactcttttttcagacccagcgttagccagagagaagcccagcctccgcctggagggagtggatgctgtgagcagctgggattcagaggcctgagtgggcctggaccagggctgggagggggcagagagaagggcagctcagcctcaaggctcaccaagagtaaagtaggaatgacagggatctgtcttcttgggcacccccaaccaccagccctagctcccctgctcatgcccgccctgtttccccagcatttggtgccatcctgcagggcagcctgtttggtctggctggccttctgcctgccagctacacggcccccatcatgagtggccagggcctagcaggcttctttgcctccgtggccatgatctgcgctattgccagtaagtccggctatctacctgcccagtgccctggtgtggtggggagaggggatggggcctgtctctgatcactgacaccaccccaggtggctcggagctatcagaaagtgccttcggctactttatcacagcctgtgctgttatcattttgaccatcatctgttacctgggcctgccccgcctggtgagtaaatggagggagctggggtttggggtataggggtctggggttccagaccacgggtgttctgaggacaaaacctgaaggaggccgggattctggagattctgcctctaaatccacctcccccgtctcccttacttgataggaattctaccgctactaccagcagctcaagcttgaaggacccggggagcaggagaccaagttggacctcattagcaaaggtccgaagagcctgaggaagctggggtggaggatggtataccaggcgggggatagcatgagcaaagagaacaaagatgagtgccctgtgttagctagcagccctgagccagaggaggactgaaggactacagcagggagagggggacaataggaaataagggccggcaatgataaaatgggggcagatcctggatgaccttgaatgcctgaggtgtttggactaaaggcagtgggaagcaatttcagattcttgagtgaggagtaacatgacctgaggctcctgggagaggccaggcccccgggtcttgagttgtagggatttggaggcgaggtctgggttagggttagagtacggctgggactggttaaggaggcgtctactttcaagtaatcccagccgttttggggaatgtttatgttgtcttctgttgctctgtcttccccacaacttggagatttcttccatcccgcaggagaggagccaagagcaggcaaagaggaatctggagtttcagtctccaactctcagcccaccaatgaaagccactctatcaaagccatcctgaaaaatgtacgtaggggaggttatcctatcttctaccccttgtcctctttctctcctccttttgctccctccccctgccacccatctcctccctttctgacctgagagtggtcactcctggattcttttgtgtgtgcgtgcgtgcccatgcgtgcgtgccgggggtggggattcgtggttccttttttttgagacagagtttcacacttgttgcccaggctggagtgcaatggtgcaatctccactcgctgcaacctccatctcctgggttcaagtgattctcctgcctcagcctcccaagtagctgagattacaggcatatgccaccatgcccggctaattttttgtatttagtagagatggggtttcaccaggtcaagctggtctcaaactcctgacctcaggtgatccacccacctcggcctcccaaagtgctgagattacaggcgtgagccaccacgcctggcctggattcgtggttctttaatgcacagccaccatgaagacacaggcatttgggtgactctaccccttctatctagatctcagtcctggctttctctgtctgcttcatcttcactatcaccattgggatgtttccagccgtgactgttgaggtcaagtccagcatcgcaggcagcagcacctggggtgaggatgccacaggtttccaggatgggaacagacaggatcttgagttgggctggaagtggggaagggagggagcctgggtcaccttctccccgtttcctgggtccatttgcccttccctgggctggaagcatcttctccattttactgttggggaagctgaggcccagtgaaggttaggcttgctatacctgcctctgtgagcctgataaccacccgttcatctcctcttccagaacgttacttcattcctgtgtcctgtttcttgactttcaatatctttgactggttgggccggagcctcacagctgtattcatgtgggtaagtggaggaagagggccccaggcccctgtgggaagtaagagtccagcctggacccagagagggaacccaagaaagtatggtagtaaggggaccatttgttttaaagtcgaggcataatttatgtatagttaagtacaagtcttaagtgtacaacttaatgaatatatgtatatacacatacctgcccagatcgagatgtagaatatttccagcactccagaaggctccaccatgcccctttcaagagtaaccccctaaggagaaccaggctttgaggtttcagttcagatcctgaggggccccagatggatccttgggggcctggctgtgccctggggtggcggcctgggctgaggccctgcctggtgcccacagcctgggaaggacagccgctggctgccaagcctggtgctggcccggctggtgtttgtgccactgctgctgctgtgcaacattaagccccgccgctacctgactgtggtcttcgagcacgatgcctggttcatcttcttcatggctgcctttgccttctccaacggctacctcgccagcctctgcatgtgcttcgggcccaagtgagtagggctggcagggaacttggtggcatcagacaggatctagagttccagtgggggacactcagtagagggagggcaaaaggagagtccctgctcccagagctgagaggagagatggctcaggaggggctcccaggctgaggggatagtgactgtagtggaggggggcgccaagcttacttgggtggaggtggagacaggtttgcaggaaggagtgaaagacaaccccaccatacacgttccctcaaggaggagaagccaggttggggttaggcagccaggatgggttgatcaacagaatgaggttcgacagtcaagttgctccaccccacccctccttccacccagaggctctgggctggggtacagccattctgaggtagccttgcccttccttccccgcttaggaaagtgaagccagctgaggcagagaccgcaggagccatcatggccttcttcctgtgtctgggtctggcactgggggctgttttctccttcctgttccgggcaattgtgtgacaaaggatggacagaaggactgcctgcctccctccctgtctgcctcctgccccttccttctgccaggggtgatcctgagtggtctggcggttttttcttctaactgacttctgctttccacggcgtgtgctgggcccggatctccaggccctggggagggagcctctggacggacagtggggacattgtgggtttggggctcagagtcgagggacggggtgtagcctcggcatttgcttgagtttctccactcttggctctgactgatccctgcttgtgcaggccagtggaggctcttgggcttggagaacacgtgtgtctctgtgtatgtgtctgtgtgtctgcgtccgtgtctgtcagactgtctgcctgtcctggggtggctaggagctgggtctgaccgttgtatggtttgacctgatatactccattctcccctgcgcctcctcctctgtgttctctccatgtccccctcccaactccccatgcccagttcttacccatcatgcaccctgtacagttgccacgttactgccttttttaaaaatatatttgacagaaaccaggtgccttcagaggctctctgatttaaataaacctttcttgtttttttctccatggctccctgtgtcctccagccgtggcttcatgccctggagtgggtagagggctggcagcctgagtctgggagatgagcatgacccagctgggccctggccaggactggacctgggtccaagggggaggaggggggagtagtcctcttggcctcagaggggctgcaatgccccctgctggggccacaggggagggacaggcctggaaccagaacaccaagactgttagccaagactaagaacgggtttttctt

SEQ ID NO: 121004 - DNA, 1001 bp, Homo sapiens
agtccctctgtcgggacgcgagatgtgtagggcagatgctaggaagaagattgggtctgggagcggtggtccgcgtggttagctgcctccgctctttttcggtgtcccccccagtcccgcccttgggtgtggggacgcctgccccacaagtgtttagggaggtcagtgggttcctcgcccgtagagacaccgtttatgccaaatgagcactcctcatccccgctcttgatggagtcatgtcctagacgtgaaactatggggctgtgatcacaagcaaatgtgtgggcggatccgttgcttgggttcttccccgccccctctttttttcggaccatgacgtcaaggtgggctggtggcggcaggtgcggggttgacaatcatactcctttaaggcggagggatctacaggagggcggctgtactgtgcttcgccttatatagggcgacttggggcacgcagtagctctctcgagtcactccggcgcagtgttgggactgtctgggtatcggaaagcaagcctacgttgctcactattacgtataatccttttcttttcaaggtaaggctgagatctccgctaggcttctttccctttagtgctgtattcgtgttgtttttgtttttttctgtcctttagggagccttagtctagatgtcggggtggcttgtggataacgctctggatttttatagggtgagggtagtggtgggtgaggttttttgagtcctcctcggttttctctagtgtgtttggggggtggggctttctctcggcgcctgctggccgtagcgaggtgggctgtggggttggggcagtgggcggctggcagctgcacgtggtggccgcgcggcccgggacgctgccatttttgcccctccacttccggacgcggctacggggcgtcggagggggaccgcagggtggcgggggtgcccgctcgggtgactcagcacggccttgtgggactggctttgtcacctctcttatcggacgcgttgt

SEQ ID NO: 121005 - DNA, 6081 bp, Homo sapiens
ataaagaactgtaggtagtgattttcacatttaaatttgtgtaaggattacttgggatctctagatacctgggttggaccaacattatgatttttctgccatactaccagatgatgctgaggctgctggtcaccattctttaagtaggtgggttctgtgacatttggttgaagaatatttagcttattttctttttccttctgaattttcaggcctcccacttagtgtgtagtctgagatctttaagagaatgcatttttagtcttgggaagggatagtactccggttaaaccagtctgaactcactgtctaaggtcctaacaaatgatatgacctttaggatttttaaacatggggccttagtgttcttttgtaattaatgagatttttattttagatgcctgaggaagtgcaccatggagaggaggaggtggagacttttgcctttcaggcagaaattgcccaactcatgtccctcatcatcaataccttctattccaacaaggagattttccttcgggagttgatctctaatgcttctgatgtaggtgctctggtttccacatttggcatggtttttttttttgatactctagaaggaggggaaaggagtggtttggcctttgttggggactactattgaagggggtaaacttgcagctattccaaaaagatgggttttactctggccatcttgaacttggaagggactatgtccagaataagtgggctcatggaactaactggttctaaagcctcaagatagggggcaatcagatttgaggctgagagaggtaaaccaagattttctttgaagatacgggctttaagaaagcaaaagtggctgagcgtgttggctcacacctgtaatgccaaggcaggaggatcacttgagcctaggatttcgagggcagcctgggcaaccgcgagaccttgtctctgcaaaaaattaaatattagttgggcacggtggcatgtgcctgtagtcccagctacttgggaagctggggttgggaggatggctcgaacctgggaggtcaaggctgcagtgagctgtcatccttgccactgcactgtagcttgggcaacagagcaagagtctgtcttggaaagagcaaaagtaagttgctgtttgtatttccaggccttggacaagattcgctatgagagcctgacagacccttcgaagttggacagtggtaaagagctgaaaattgacatcatccccaaccctcaggaacgtaccctgactttggtagacacaggcattggcatgaccaaagctgatctcataaataatttgggaaccattgccaagtctggtactaaagcattcatggaggctcttcaggtattgcagttctgtaggcattcatacttatctgtgttctttggttttttgcttctttaaaacttgtgattgactttaaacttgttggcaggctggtgcagacatctccatgattgggcagtttggtgttggcttttattctgcctacttggtggcagagaaagtggttgtgatcacaaagcacaacgatgatgaacagtatgcttgggagtcttctgctggaggttccttcactgtgcgtgctgaccatggtaagttagcttttctgttacaaggtagttgggttaggattttctgggctcacaccagtagcagaaattttgggcatcctgtctgtaaagcagttcttcacagcagttctgctgatacttactaattgctggtctcaactgcatatactttttaccctgttacacgcttgtaattgactcttctaggtgagcccattggcaggggtaccaaagtgatcctccatcttaaagaagatcagacagagtacctagaagagaggcgggtcaaagaagtagtgaagaagcattctcagttcataggctatcccatcaccctttatgtgagtatggacttttaaatcttttacacttaacgtgcaggatgtttcctgttctggagaatctcattgtccctggcttttgctttccctggtagtgttttgtactccaaggctaacttctgtttttgttacttagttggagaaggaacgagagaaggaaattagtgatgatgaggcagaggaagagaaaggtgagaaagaagaggaagataaagatgatgaagaaaaacccaagatcgaagatgtgggttcagatgaggaggatgacagcggtaaggataagaagaagaaaactaagaagatcaaagagaaatacattgatcaggaagaactaaacaagaccaagcctatttggaccagaaaccctgatgacatcacccaagaggagtatggagaattctacaagagcctcactaatgactgggaagaccacttggcagtcaaggtgtgagaagcctttgcatgttggctcaacatgcacatatggagaggaatgagttaggtggaagagtgttgggtaatagacacacggaacttgtccaactgataacagaaatgtgatagccatgtgatttcacttactgattaccctgtcatagtgaagtgccatcatttctaatgacctcactttctcttcttatggaaatctgggtaatgtctattggcagccttacacatccagggttctgatcagaggggactgttttctacatacagctagtacccatctagatcgtggagggcattaaggctcagttttctcaggagctgcttgttgtgtgtgctctatcccttaggcttagggaggatcattgttccacttttagataatttggtgttggggctaaaaggtcctcttttgaaatgtaccacttatttttggtttctttcagcacttttctgtagaaggtcagttggaattcagggcattgctatttattcctcgtcgggctccctttgacctttttgagaacaagaagaaaaagaacaacatcaaactctatgtccgccgtgtgttcatcatggacagctgtgatgagttgataccagagtatctcagtgagtatctccttggcctaatttagttgggtgaagtcttgggaggttttaggcattctgctaggatattctaaggtaacagttttctgcaatacatagtaggtgtaagggttcaggaggctattagagccttctgtttgaatctggggaccaggtctggtctagctgttttttactgagctttctcaccctggttgatggcagattttatccgtggtgtggttgactctgaggatctgcccctgaacatctcccgagaaatgctccagcagagcaaaatcttgaaagtcattcgcaaaaacattgttaagaagtgccttgagctcttctctgagctggcagaagacaaggagaattacaagaaattctatgaggcattctctaaaaatctcaaggtaaaaaggcaaataatgcttattccctttaccactttcttagtaataacaataaattattccattcacattgaaagtgaagttattgtagttaagctggattgtttttcctcttcccacccttcaagcttggaatccacgaagactccactaaccgccgccgcctgtctgagctgctgcgctatcatacctcccagtctggagatgagatgacatctctgtcagagtatgtttctcgcatgaaggagacacagaagtccatctattacatcactggtgcgttgactctgattgaagcctttttggaggagtggggagcacaattagggcttcctgggaactggcagtatgaggcattttagtcactgagttcatttaattaccctacaggtgagagcaaagagcaggtggccaactcagcttttgtggagcgagtgcggaaacggggcttcgaggtggtatatatgaccgagcccattgacgagtactgtgtgcagcagctcaaggaatttgatgggaagagcctggtctcagttaccaaggagggtctggagctgcctgaggatgaggaggagaagaagaagatggaagagagcaaggcaaagtttgagaacctctgcaagctcatgaaagaaatcttagataagaaggttgagaaggtaagccattctggggctaggatatattttgtaacatcttcgaggtgggctccctcacaagcatgtttctatacaattagtggtttgaggcagcctatttactgtttcatgccttcttgcctcttgttctcttctctagtcaggtttaaggctattttaataaaatttggcacagattaggcattgcttcagttaacttctgagagtagataaaataccatcattttcttttttttttctttttttgagatggggtctcgctctgtcacccaggctggagtgcagtggcacgatctctgctcattgcaagctccgcctcctgggttcacgccattctcctgccttagcctcctgagtagctgccactacaggcgcccgccaccacaccccggctaattttttgtatttttagtagagatggggtttcatcgcgttagccaggatggtctccatctcctgaccttgtgattcgcccacctcggcctcccaaagtgctgggattaacaggcgcaagccaccatgcctggccgattttttttttttttggactggatctcgctcactgcaaactcaagtctcctgagtggctgggattacagatgtgtgctaccacacccggttaattttttgtagacagggttttgccatgttggccagcatggtctcaaactcaagtggtctgtccacctcctccccctgctggaattaggcttgacaatgcctgttttctctttcaaagtggtaatgtcaatctaaggcttttgtgatcgtccacaggtgacaatctccaatagacttgtgtcttcaccttgctgcattgtgaccagcacctacggctggacagccaatatggagcggatcatgaaagcccaggcacttcgggacaactccaccatgggctatatgatggccaaaaagcacctggagatcaaccctgaccaccccattgtggagacgctgcggcagaaggctgaggccgacaagaatgataaggcagttaaggacctggtggtgctgctgtttgaaaccgccctgctatcttctggcttttcccttgaggatccccagacccactccaaccgcatctatcgcatgatcaagctaggtctaggtaagtagctttggtacttggtgtggcaaggagtttgtgcaactcgtctcctctatggatttgacttaatgctatttggtcaagtctcacatggcttaattttacttcaggtattgatgaagatgaagtggcagcagaggaacccaatgctgcagttcctgatgagatcccccctctcgagggcgatgaggatgcgtctcgcatggaagaagtcgattaggttaggagttcatagttggaaaacttgtgcccttgtatagtgtccccatgggctcccactgcagcctcgagtgcccctgtcccacctggctccccctgctggtgtctagtgtttttttccctctcctgtccttgtgttgaaggcagtaaactaagggtgtcaagccccattccctctctactcttgacagcaggattggatgttgtgtattgtggtttattttattttcttcattttgttctgaaattaaagtatgcaaaataaagaatatgccgtttttatacagttctgctttcccttgtgaagtggatgttatccttccctagcttcttcatccctccagctcttgctgttttcatgagcacagcaagttgagctggttttgtagtgaaaataacagaataccagtgagtcttaagagttcacacactgaagctaaaggcagtttggaaaaactaccatataataatgccctttcagtcaaccaaaacacaggaccaagtccactgcagtaatttaatttaataaaataaaattataagagcaaaaagttacatttctaaagtaccaaaacctgcaacaggctcatggaacagagcctagggatccaggagcataggaggtggtggtgctgggcagggctctgcatcccctttcctcagcacagcaccatcttcaccctcctgggaaagcagcattggagcctacaccgctt

SEQ ID NO: 121006 - DNA, 1872 bp, Homo sapiens
tacagaggaaccaaaaagtgtatattttcctttgaatcacttaggcataatcctgaagagagagaggtcaatttttgtctaccttttcattatcttgcttattgtctcctttgtctctaccttccccaacaggtgtcttatctgacttggggtgtgctgcaggaaagagtgatgacccgcagctatggggccacagccacatcaccgggtgagcgctttacggactcgcagttcctggtgctaatgaaccgagtgctggcactgattgtggctggcctctcctgtgttctctgcaagcagccccggcatggggcacccatgtaccggtactcctttgccagcctgtccaatgtgcttagcagctggtgccaatacgaagctcttaagttcgtcagcttccccacccaggtgctggccaaggcctctaaggtgatccctgtcatgctgatgggaaagcttgtgtctcggcgcagctacgaacactgggagtacctgacagccaccctcatctccattggggtcagcatgtttctgctatccagcggaccagagccccgcagctccccagccaccacactctcaggcctcatcttactggcaggttatattgcttttgacagcttcacctcaaactggcaggatgccctgtttgcctataagatgtcatcggtgcagatgatgtttggggtcaatttcttctcctgcctcttcacagtgggctcactgctagaacagggggccctactggagggaacccgcttcatggggcgacacagtgagtttgctgcccatgccctgctactctccatctgctccgcatgtggccagctcttcatcttttacaccattgggcagtttggggctgccgtcttcaccatcatcatgaccctccgccaggcctttgccatccttctttcctgccttctctatggccacactgtcactgtggtgggagggctgggggtggctgtggtctttgctgccctcctgctcagagtctacgcgcggggccgtctaaagcaacggggaaagaaggctgtgcctgttgagtctcctgtgcagaaggtttgagggtggaaagggcctgaggggtgaagtgaaataggaccctcccaccatccccttctgctgtaacctctgagggagctggctgaaagggcaaaatgcaggtgttttctcagtatcacagaccagctctgcagcaggggattggggagcccaggaggcagccttcccttttgccttaagtcacccatcttccagtaagcagtttattctgagccccgggggtagacagtcctcagtgaggggttttggggagtttggggtcaagagagcataggtaggttccagttactcttcccacaagttcccttaagtcttgccctagctgtgctctgccaccttccagactcactcccctctgcaaatacctgcatttcttaccctggtgagaaaagcacaagcggtgtaggctccaatgctgctttcccaggagggtgaagatggtgctgtgctgaggaaaggggatgcagagccctgcccagcaccaccacctcctatgctcctggatccctaggctctgttccatgagcctgttgcaggttttggtactttagaaatgtaactttttgctcttataattttattttattaaattaaattactgcagtggacttggtcctgtgttttggttgactgaaagggcattattatatggtagtttttccaaactgcctttagcttcagtgtgtgaactcttaagactcactggtattctgttattttcactacaaaaccagctcaacttgctgtgctcatgaaaacagcaagagctggagggatgaagaagctagggaaggataacatcca

SEQ ID NO: 121007 - DNA, 1043 bp, Homo sapiens
cagtgtggtcccctctggagggcggaggggatgaggagctgcgccctaatccttatgtccgctttccttacagatggtgggcagtggtggtgctggctgcgttcccctccctaggggcaggtggggagactcccgaagcccctccggagtcatggacccagctatggttcttccgatttgtggtgaatgctgctggctatgccagctttatggtacctggctacctcctggtgcagtacttcaggcggaagaactacctggagaccggtgtgtgaagaaagggcggggaagtgagctaggtcgggaaagagggtatttggccagcagtccaaacgggatatgacttggagagggcgggaggtcggtaggccggacagcagggcaggctggctgctctggggaagatgaagtgctatggagaagatttggggcttgactttgtgtgctttcttcaggtaggggcctctgctttcccctggtgaaagcttgtgtgtttggcaatgagcccaaggcctctgatgaggttcccctggcgccccgaacagaggcggcagagaccaccccgatgtggcaggccctgaagctgctcttctgtgccacagggctccaggtgggtaggtgggctcagcctctcttcctgggttggatgccggtgggcagggattctgtgaaggtttccattttaccagtcccagagctttgctggctggtgtgtttcgtgtcctcctcccaggggcacactgcacctccatctttgaggtgtttgggggaaatgcccttttgtttcttccttttctcctctccagcactggtactgaaagttcatgctgttatttcaagatgtctagtgcagaagagaggactcctcttgccctattctctgtgatttctactgtgccgttattatacttccttcctgcactggtgtctcacatactgtaaacccactgataaaattgtgggggagccattcagccttcccccagtactgcatgtgagagagtgctaacatgctgaccccatggcattttgcagtgggtact

SEQ ID NO: 121008 - DNA, 1037 bp, Homo sapiens
aggagagtccagggagaaaggaacattgggaagaggtcaggggtggatatgaggcatggggctggcccagagctccctcctctgcccaccttggtgagtctcagcgagccccttgtgcatgggctaggtatcctgcttaccagggaacatatctgaaggccccagggtcctcagagtccgatcaatgatccgcctaccccgctccagggaggccaggaaggctgcctcgtcctctgacaccaggttggcgatctgaaccaggcagagaagaagtggagctgggtctccttggaaggagggtctctctccacaactctcccatcaacccctttctctcccactggaatccagtacctgggctgagttcctttgcagttctggataagcatctccctgggggaggtggagagggctgaggaggtgtgaaaggcaaccaacccacccccacctccccaccctgggcctccctgaggacacctgccctggaggctcagacacattgaggggctgggagagggactcaaatggggaactggtttccctgtagggtggcagaagggggtcctgaggtcaagggctgagcagtttggaaaaggagcctcctcaagttctcctgcttcttgtaagcaaggacagctttcttagcttgctgataggatgctgggctcgatatttagggtggggacctctgggcacccaggctgggggcactgtctaggctcagtggtaggctccccaaagtgcccagggaggcccagagtgaaaaagaagctctgtccttaccagtgtctccaccactacaggtaccaggctgcctaggaagccaggtggtgcctttaagatctccatggagaaacgcacagctcgacgcaggatccgacgaagaaccagcctaaaggggttcagagcccagacatgaatccccagcggctcatggtcagcaatatggggagtgggaaggacgaggtccagtgtgtgctcccacctcaaagctctccctctccccattcctcctactggctcaaccagacccacct

SEQ ID NO: 121009 - DNA, 1125 bp, Homo sapiens
ctttgggaggccgaggcaggcgaatcacctgaggtccggagttcgagaccagcctgaccaacatggagaaatccgtctctactaaaaatacaaaattaaccgggtgtggtggtgcatgcctataatcccatctactccggaggctgaggcaggcgaatggcttgaacccgggaggcggaggttgctgtgagccaagatcgcgccattgcactccagcctgggcaacaagagcgaaactccgtctcaaaaaaaaaaaaagtgcaaggtgcaggactcctcacggatttccatatcaatgaccactctcccagctcatttagtatggctttctacgtatttttctacccaaataaataaaagcctcaattctcaaaactatttgtctctgttgtgagtttaagtctattttaaaactcaaaaatgagaacagtctacttctttctctttgtattcctgctacagcaatcctatttatttctggagcaatggttgcctcctacacagagatttatatagaaaaatgtgtcataaatggtcagttggtactcagcaacttttgagggtctttcggtaagtctattatgagtaggttggggcaaagaactcactgagctacaaaccaaggagatatagatacacaggtagatatatattcatttcaatagcctttaattaaatcagcaataaaataaaaacatgcacttcaggctgaggtttatgggatgttttccttgtggagaatataaagtacaatttaaatgtgtatgccaggcagcatctaattggaacataaattcttttcttcagacttcaatggaggtttctattaataagtatctgagagaacttatctgatgacttaaatgtcacatttgcattttatgaaattcagagaaaaaagaaaatgtggattagcatctgctgtgagctctttgccaaaacgtgcagcctgcaaactgtccccttcacttttctgtcttcctggctgcactaggggaacatggtgactctacagggctgcccccagctacagaatgcagggcctatagaatcacgactcgagagtttttcggggactgcacagtcaagacccagaaggaaacatcaccgtatttctttctccca

SEQ ID NO: 121010 - DNA, 1054 bp, Homo sapiens
tttaacattcttaaatttccaagcacaattactacactatttaaagatatgaacaactttgatgacagtaatggagcagtacaaaactgattcatcaaataacttgggaaaaaacctacaatttttattaatagatgatagataataacatttctattcatagataataattccagccataatgaagtagcggggatcagatttactctcctgacttaaacaagtagaaaactggacaaaatgtatgaaataacaattttcagaatgagacaacaggcagcacaggattgtgatcctaaagaaaaggaaagcaaatgaagagattcctgtaatcacccagctttgcctggaggcacattcaagaccacagcgtaggatgagcaaccccacacagagcatggcattctctatgagtttgaggagccgaagatccaagttcagagagtcttggaggactggaagctgcagggcagagttctggggaagaaggaactttacaaaaaaatgaaagtaagaaatttacacagcacttcctttgagtctttgctgaatattaagacacacatgtgtagggtagaactccaaaagatcagacaatagagtgactgggaactgaatgggctcacaaagggctaaaaatcattttagttcccaccaactaaagtgaagactcctcactgatcactcaaggtattctgcagagactctaaaagggccacatcttacttagtaatggagttaaactatccctaaagactgctttagacacgccctaacaaagcttgaaaacaagcctcaaaccaaactgcaagtgacttaactgcctgctacagcaaagaccagcactctttaaaagaagaccacaaggcctgttgcggtggctcacgcctgtaatcccagcactttgggagcccaaggcaggtggatcacgaagtcaagagattgaaaccagcctggtcaacatagtgaaaccctgtctctactaaaaatacaaaaattagctgggtgtggtggcacgtgcctgtaatcccagccactcgggaggctgaggcag

SEQ ID NO: 121011 - DNA, 1049 bp, Homo sapiens
ctaatccccaaggtgatggtattaggaggtaaggccattgggaggcgattaggtcatgagaccagagccctcatgaatgagattagtgcccttgtaaaagagaccccagaggactagctcaccctttctatcatatgaggacacagcaagaaggtactatctatgagccagaaggctggccctcagcagacactgaacctgccagcaccctgcgcttggacttcccagcctccagaactgtaagaaatgaattcctattgtttataagccattctgtttatggcgttttgttatagcagcctgaacaggctaagacactcacatcatgtctgtattttatgattgatttgagggcatccttagaaaactaaatataattgactaaaattgaatgtggactaaatgttaataatattttatcagtgttaaattctgtgagtttggtatttgtgttgtggttgttagacaacatccttgaccttagaagatacatgctgaggtatgtaggtatacaggtgtaaagggttacaatatctgccactcactctcaaagagttcagcaaaatggtaactgtaatattgtgagagagagaaagtttgaacaaatattaacaatgatagaatctatgtgaaggatatgcaggtgtttgttgtacaattcttgcaacttttatgtaaatgtgaaagttttcaaaatataaagttttaaaaaagcaaagcacaacacttcctcataagggtcaaacactggatttagaacagtcacatgacaaaaaacatcaactggaaaagggtcgccagagtgcagtcagcacatgttttgtgggcctgtttatgctcaggattgtcttggaaagtccaaagcacctgtggatagaggcatggagttacaggttttcttccattacaaaactaacaattctcaatcaatacactcgacccccaatgcttggctatgacatctgcccatgagaccacctcgggacagaagacacatccactccaggagatactttgcctgccctcctttccactgtgaagcctctcaa

SEQ ID NO: 121012 - DNA, 1013 bp, Homo sapiens
caagcgcgaccttctgctttgaagatctgcgcaagcgcaaggtgggagggggcgcagaatagcaagtctcgcgagatattgggtggctgaaagggaaaaagtgtcttgtggaagctcagctgcaggaagactaacacaaaaccatcaaaccactctggccaaagcgccttacgccccgcgcatgtccaaaacagaatggaagaaactacggctctcgcgagatagcggcggtagcgcttggctgggaacttagtggtgggattgatcgtgacgtcaccgagtggcagagggtgggaacgtcacgcgtacggaatttcagcacagttgctccgaagaaggctttgttaatttattaatctagccctttcaagtatttcagtaataggaatttattcacagaatactcaggaaaatccagtagtttatttaaggctcagtttcctaacctgtaaaatagagatcatagtaatgccaacctcacaggattgtcgtaagggctaaatgagatcatagacccagcacagtatctgatccataataactgctgcaaaacaatagcagctattactgcaaggagggcaacgccaacttcaccccgtccccaggtgatccaggcttcttccagaaacctgcagaaacgtcacgtcagagtttttaattcatcgcccagtctggattaataatgccattggtacgcactggtattagacaaagtcgagttgggttgaaatattgtgaaatcttggctttctcataagtttgggtaataaccttactgaatctcagtatcctcatctgaaaagtggagctaacaatacccgcctcgtaaatgaggaggcagattaactgaaacataactaaaacccagtgaggtagggattggcaaactctctgctaccccaccccaattactcatgcagtctccttcatccttccagaacatctctggctccatccctggaaaatatcaaaatatttagtgggttgggaaatgccctatttatagtacttag

SEQ ID NO: 121013 - DNA, 1565 bp, Homo sapiens
cttcgggaggccaaggctgggatcacctgaggtcaggagtttgagaccagcctggccaacatggtgaaaaccccgtctcttctaaaagtacaaaaattagccaggcgtggtggctacttgggaggctgaggtgggaggatcggttgaacccaggaggtggaggttgtagtgagctgagatgctgccactgcactccagcctgggcgacagagtgaggctttttgaatgtagaaattggctgttaagaggaagatgatttttaggctgaagaagtcgttctgatttctgtttgtcttagtggtaccagttcctgctgtcatatttggtaggacttaagtcctgtttgcctgcctgtcatccagctaagtagactggatggaaaaggtgggctgggtggggaattaggaaagacagagggaatgtcatagtagttttacttaaattttaaaacatatcaaatgaaaggttacggtgaatttagtgagtgtaagtcaaatgcttaaagaaataagccatggtgtgagaatcaaagcatgagaaaatagtatgaaaactggaaacactgtaagaaacgtgattttgtattgtcttccaaatatttcaaaatttctagaaaagcgtaaataaataaaaacatgatagatgagaaagaaggcttatgatcatgattcagtgaagtaaccttttttaaccattactaatcttgcataattaaaataaaatagaatgtgatgagatggggaatattgactggggtaagtgtaaccacacagcaaatattctgttgtcaaaaagaacagtttttgtaattgaaggatgagagcacaagtcagtgtatccattgtgcaaattggatatttatgccaggtaactgattaatatataaaatgatctatgtttaataggtatgaatggctggatccaagcattaagaagacagaatggtccagagaagaagaggaaaaactcttgcacttggccaagttgatgccaactcagtggaggaccattgctccaatcattggaagaacagcggcccagtgcttagaacactatgaatttcttctgtaagtgagtcttcagaaagagcatagaatatatgtatatgttctgaaagaggctgaataaactttgagtattttctgtctttaaacttttaattatggatgtgagtaaacccaaagctaaagccattggataatattttccatatctcagatggttgatcaaaattatgccttctgtcatatacttcctaaaataataatttaaaagaattatacaagtcatgcatgttcatcatagaaaatctggggaaaaaatagtaaaagagcaaataaaagtcacccataatcacactgctaagaattaactactggaacattttggttctttactaatagtttttttttttttttttttttttttaaatttgtatggctgtaccgcatttgtgattaggatctgtttgggttctattttagagtgattgaaaccagtcactgaaatcagcaaattttaatatcatttctttcagatgaagtgatagtaaaaaggctttatgt

SEQ ID NO: 121014 - DNA, 1149 bp, Homo sapiens
agctgtttgaccttagacaagtcataaaatctctctgagctttgattccctttcttgcgagatggggaatactaatacctgctttaccttagcagggttgttgtgaagcactcagtgaatatttgttaagtttctaaaatgtaaagtttgaacatagtggttcccaaaggcaggctgtggctaggctggctgcatcattatcacagggggagcatttaaaaatagaaatatcagggcttctcctgtatatactgagtcagtacatctggggtggtgtgggaggcacgggaagagcagtgatcttggaatctgagtattttacaagttcccatgtgatttagttggacagccttgcataggaattgttctaaggcatcaatagtggcatgtattattccattctatagagccacgaaaaatgtattggatgagagaaattgttctgaggggaaaaaaaagtatctaatgatagttgttctctcataattaaatagtttttaccctatttcacaatttgtgctgtgccagttagttgataataatgaaggatacaataattgtagccactgtttaatgaatgcttgcgagatgctttacatatttcgttttacttagcccttctcaaaatccttgtgaaataggaattgttattcgaattttatagggaaaccatgcttagggagggtaagtaagtgactaaggtcacatagctagcaagtggtgggcctggtttttaacctaggttctttgacttcaaaactcaagctgtttccattatgctacaccataaaatcagtatttttatgtttttttctcattttgagcaatagagtgtctcttacataccttgcttctagagtatgtaagaactaagaaaatacttagtttttcttcttttaatttttgcagatgaacttgagatgctttctgaagccagagcccgcttggctaatactcagggaaagaaggccaagaggaaagcaagagagaaacaattggaagaagcaaggtatgtgtggatataggaataaaaagcaaagtgtttttctcacataacaatcaacacagaatacttctgtgaccagatatgtggtttttttttttttttcccctctccaccagcaatcaggcaatcaattctgcagtgga

SEQ ID NO: 121015 - DNA, 1125 bp, Homo sapiens
acttttccaccattcttggccacctctctattctgtatactcttcagagttaagtactgtgagtaaggttgaaaaaaaatcacttttccatttttatccatggttgtaggggaccaaatttttagagccctttaaccgtgtggattgggccagggacacagcaaatgcatatgtgaaaaatctccaagtgtggctagcattgattgctttaaataaaatttgcagattttaatttaccctgtaatttcttgtaggcattcttgtagaatctacacatctttgtaagttatattctaacaggctggaatggcctctatgcaaagtgcagggcagggctatttgcttttaaatgttaaattacaaatctaccttgtaacttaaagcagttttttattgattataaaagtaacacatttttccttctagtattgttaatgttctcattttgggacataggtaatataatgctatatggcttggttatattcatttagcattattgtgtaaaggttttctaatgtggattgaagtccttatttccattatttaaagaatgaaattactttaaaatttgaaatacatttttctaaacttttctctctctcaacatagatgtgcatttatgtgtatatatgtacactaacgtttatacaaagttggatcatactgtacggttttaatgagaagtcagctgtaaatcttactgagatttccttgtaagtgttgaatcatttttgtcatactgcttttaatgttaattttaattttttttaagagagggtctttctctgttgcctaggctttagtgcagagttcactgcagccctgcacacctgggctcaagcagtcctctgccttagccccctgagtagctggatctacagatgcacaccaccattcccacctaattaaaattttttttgttgagacggagtctcgctatgttgcccaggctggtcttgaactcctgacctcaagctatcctcctttcttggcctcccaaagtgctgggattgcaggtgtgagccactgtgactggcctgtcttactggttttaaatcttctcgtctttggctttcaacatttttaatatgatgtgtctgtagatttctttttgtttatctt

SEQ ID NO: 121016 - DNA, 2029 bp, Homo sapiens
ggatggctgggtcaaatggtatttctagttctagatccctgaggaatcgccacactgacttccacaatggttgaactagtttacagtcccaccaacagtgtaaaagtgttcctatttctccacatcctctccagcacctgttgtttcctgactttttaatgatttaaatattatattcttgtgtttcttaccgagttaaagtagattttcttgatttaatgtttatatatttgctgtatctgcttcagatcctcttcagagactttaattggttgtttttaaaatatatgtaattttcaccattctccctgggtagtgagtttatggagttcctcatgctgtcatgctggaagttactcatagatactgttttgtaacttgttttccatctttcatattgtgaatagcttttcttatcacgaaatcattacagttatagcaacataggaagatgcaaagaaaaaaagtaaaaattaaatggaattccaccctccaatgactatcgttattaatattttgatggacatccttcatatctcctcaggcacatattcattgatagatatgcatacagttcttatgtgttgccctgtaacatgtaaactttctaacattttttacacagtggtatgtcttgggcctctttccatatcagagtagatttatagccttttaaaagtttatgtaaatgtctgtataatatcttataaattcatttaatttcttactgatagttgtttagattgtatccagctatctactatcataaacagtgcttagtgaacagctttgtaattaagtccttgttcatggtgtaacttatttcctcaggctaaaggctaaggagtgaaattgctgctcaaaaaatatgaaaatctttagactatgaatgtgtatttctaacttctctttgggaagagatgcaccaatatactttttcattaccagtgcagcagactgtccattttttgcagccttgccgttaaaacaaaacaaaaaactgaatggtgttaattagatatgcacaaatggtacttgttaatttaatttgtgattctttaattgttaaataaaacttttgtcattttagttacctgcattttttgctttgtgaattgtttccttttgctctttttacaccctttgagtgcattaaaaaaaaaaaaaaactttgcttagactgtttatatttaaccatcatactagttgcaaatattttttcctactatttgccttttaatttcatttataaattttcatagtgttacagttagaagttttatatctcaaagctattcaatgtatagatgagtggattaaaaggaaaaaaaagctgttgatttttttcatttgccatttatttaatttatatttagtaagtacatttccatccagagataagatatgtatttacttgtagttccttttggtttttctttttgccttattatgtgtatgtgtgtgtgcacctttaaattaaaactaggatttgttttggtgaatggtgtgaggtaaggatttaaataactatttcttccccaaataaatagatactttttttttaactgtatgggataatttatccctgtcacatggcatatgattttcaaagtgattttgcattcttttcagacgtcttgctgccctccaaaaaagaagagaacttcgagcagctggcatagaaattcagaagaaaagaaaaaggaagagaggagttgattataatgccgaaatcccatttgaaaaaaagcctgcccttggtttttatgatacttctgaggaaaactaccaagctcttgacgcagatttcaggaaattaagacaacaggatcttgatggggagctaagatcgtaagttgcctttctgattttggaaatggaaaggaatagtaggaggagtcttacgaagggccaagtattatccttgtcagagccagatttttattatttatttattttacattttttaaaatcaattttttttttgagacagggtcttgctgtgttgcccaggctggagtacagtggc

SEQ ID NO: 121017 - DNA, 1100 bp, Homo sapiens
tcctatgtttagtcggctctctgtatctgaggattccacatctgtgaattcaaccaactgtggataaaaaatattccaaaaaactcaaacagtacaacaataacaaataacacaaataaaaatacaatgtaccaactatttatatagcatttacattgtattaggtattataagtaacctagagatgatttaaagtacatgggaggatgtgcatacgttatatgcaaatacgatgccgttttatatcagggagttgagtatctgcagggagttgagtattggtcctggaaccaatccccggtggatacttagggacaactgtatgtcttgtctctcacctagattgtaaaatccttgggggtgggaaccatgtcttatgtgataacaccttacctatcaggaatagctgtctggcagcatcaccgttctgcaacacaccaatatacaggaaataggcaaccaggaaaaaaaaagactttgaataattaaaatataggttgctgcaaaatctgtggatcttattcctaggagaatctcttaggcctcactcaggaacttactcatgtttagatgtgatttcaaaagtgtggtgtttggtttccaaacaaaatgtaaaaggaggaactatttaataaagtgtgtacatttgtaataatgacagtgatagtgatgtgagaaccaacagcttgatagggagggaggagacaaatatacacaaaactcaaagagtcatctggggtcattgagtgtggtggcccacctccctgcccactgcatgttcttagtcgccctaatgtgccaagaaaaggttgaaataatgtttagtggacgtagtttaggaaggcaagaaaatatcaaatgtagtgattattgtaagtcagtaaaataaaaataccatgctagctagaccaaacattgattttaacctagagatcctaacaaaaccagctggacagaattttgaaatctttattcttttttttttctatatttcctgtgaaataatttatgtgaaaaacatttgaaagcacaatccaaatgtaagtggcacttctgttaattgggattcctgtctttctaggactccttctaatggagct

SEQ ID NO: 121018 - DNA, 1003 bp, Homo sapiens
atctttaaaatgtttcagtagtaccagaaagaatttagaaggaaaaaaatggaaattgcttttgaaaatgtaaaaccgctgtttaattcatgctgtaacaggtaataacattaatatattatagtgatatgtttggtaattgtatttgttttaaaattttaggtaaatgaaactattctaagacccttaaatgtagaaccgcctttaacagatttacagaaaagtgaagaactaatcaaaaaagaaatgatcacaatgcttcattatgaccttctacatcacccttatgaaccatctggaaataaaaaaggcaaaactgtagggtttggtaccaataattcagagcacattacctatctggaacataatccttatgaaaagttctccaaagaagagctgaaaaaggtatgattgagctggaatatttcttcttgagatttaggtagttgttaggtgctgtgtatcatggacaaataatgaacttatttttccctgttggtattcataaacaactgaaatgtatgattaggagatgcatgtttagattaagtgttatgaaaaggacatgctttaaatacctccatcccccgtgttcagtgtgatagacctttagcaaataaacaccgccagggtgtttttggttcatgggtattaatggcttcgttgacagttgttacagttgccgttttctgtattcagctctgctatctctgaataaaaattagatgcctttagtacttaaacatcacttatttagaataatatgaagaggtgagagagactaatataaaaatgtttatagattaaaccttttagctattgaaaggaaggaagtattttttttactgaatatattcccctcacatgatttccccctactcttttggataaggacatgaagaaatgatttcttatatgaagtctgtatctggtcttttcttctacatgcattttattccttctgttttgacagagcaaacaactgtgattgtaaatagaaatc

SEQ ID NO: 121019 - DNA, 1867 bp, Homo sapiens
catcagtggttaaattgtaagttacatttttttgttgtgtaggcttcatttcttataaatggtagttagcagtgtaattgtgatctaatatcagcatcatcactgattgaaaagctatttggaaagcttctttgtattatttatatataaatacttaggtttcttacttagtatgaaaatcttctcatttgaggtgggtaaactctttttgccgcaaatggcaagaacattttgtgcttttttaaatggtagaaaatttttttctccctaaatctcatttactttgttgaggtactaactttcatgacagcaaataaatgtgtcacacagtgagtggtgccataaagtacagtaatttttatttctgtgttgaattggtcttatgaattttaaagggaaaaatacagaaagagccactcctgttcttttggagatttatttgggtcgtttatgagcaaccattaaaaacatgtggttctctttgttcagttcagtaccaggaactgaaatcttccgttgaactatttttgttgaaggattggtgattttggagaatattcataaagcagtctgaagtcatttttcttttcttgactcttggataacttactttattgtttacccagctagttacttttaaagaatacttaatcaagtcctttaatttggtaaactgtgcttatttcaaatgaaagttcatgaaatcttttaaaaaaagaaaagcagctcaaagacttgaataaacaaacccccattttatttgtatccatcactaattcagaactaggtttcttttagcttgttttagtttttgaagacacagttctattggtttgaaatacataaatattttatttcaattgtggtaattctttcatttcagttgattgctaaattataaacattattcaaagtttgttgtggggaaggaactccagttatattgtataaactaaatgctatacttaaattatcctttccactcttaggttcaggagataagcccttctctgtaagcactgtatgccatggctgccagtgtgtttgatttttgctgccatgaactttggaaccgtgaatctaaattatggccctatcactgcctatcaagcaagatgaagtccagctttgtcgtggctggtgtctcctgaatggattaaaaaaaaaaaatgccctgaggtttatattggaggtagtctttgagccattcattactcatgattaatatttgaaacttagcacttaagtgaaaatccttaagatactcatttaaaactaatagaaccatctcagattttatgtagaatgtggtagaggatgtgtgtgtgcaaggagtttgttaaataaatagaatcagaatgcagttacaggtcagaaataagtggaaaagacttctgaattgtaaccaagtccatgtattttattctgctttggaggcagaattgagtttagaaccttgccagacttttgtgtgtaaaataagacagcaagagcaaacacagcaatgacagttaatataaggaaaggaaaagttatgagagcataccatgctgtgtccatttttacatggtggcaaaaagcccagtgtattttaatagctttaaagacactaagatacattgcaggggagtaaagtgattgctatttatagtggtatcccaaattaataagaaaaactttatttcttttcagtgtcatgtttttttaaaagggcgggatggctataattcagtgtaggaaacattttcacaaatggttaaaaataaaagagctttagtacttttatttattcacacattcagtaattattactgcctatctaccacgtactggatactgttctaggtcctggggataacagcaagga

SEQ ID NO: 121020 - DNA, 1554 bp, Homo sapiens
aaaagtgaaatgagaagtctgaatttaggcatgccgttaaatttaatagtatttgaaatagtatctaaactgctgtgttgaggaagtttggctgaaaagtggattttgtcacgttagctgtaaaaatggaaaggctttccttagagatagaaaataggtccagaagtaatactacttctccctgtaatttactggcacagtcaactgtagtcaagaaatattatataacatagacttcttagaagtaaagtaacttaaagaacacagataacacacttaaaatccttctcagtgtacttgtagctcttatgaggacccctgacttgtctgaaggttatatttctgcaaaattggctgcacagtagatctcattttctcagtgattttcattataaagtcagatatttttacacaggaaaaaatttccttaatactttaaagagggaaaacttagggcaaggatttagttagtagacagttctgggtagagtgctatatgttgtcagatatcagcaggtttatgcttatgttgccttgtgtagaggtgggggaagtgacttgtggtacaggagaggaattcacagtactttggaatactctctctttcccaaattctgttctttgctatgacccttataggcactgacagatttcgtagttgtctctggtaagaactttatgagctggaacagacatcctgatacaaccaggttgcttctgttatgcctcaacatgaattgaatttgttttatgcagtttacgtatttcacttcctaatgtatgcagatgtacagtgctcttgtattgctttgttcatgtattactgtccttataaaggtttttagtaaggttttgccttcctggttagcatgcttttcagggatgcaatctgatggttgctaactcatagatgcaaacaataattactttcttggacctgcgtctcatcagagtagagaaggttcactgataaaaatgctggtaattggtatagagattaaaggagaatcactcatagactcctgttgtttgcaaatgttttggtgattgaaccacatcttgactattatatgggatcatattgctgattgatggactgggaagtggagctcccattgactgcctgtttattttgggtatccttaaacctgtttttccagtggtataaggttatattctgggcccccaagcaagagtttcagtgaggggtgctcttaatgtttctgaacctcactgtaacggacttttactgaagacagtattggagacccaaggataatgtgtttattttggaattacttaagcttagtaaccttaacaaacttagcttgaaagtaacagttacactttcataagtcccatacagctcccttttgtaatgacccgaggaaacacttatggttccactgattcatctcctggggaccatcagttttccattggtctctggccagtcttttttagacagtttctcttctatgcatttaaaaaaataacatttctaggcgtctttctataaataatacctgtgctttgtagaagttttaaaagaag

SEQ ID NO: 121021 - DNA, 1024 bp, Homo sapiens
ttaatttaaaaagcctaattttaaagtgctgcctgtgagtaactcttgaataaaaacaaaatataaaaaattgagaatgtagccttttgtttgaagtaattagatacttaagagtgcctgcaaaccagcagctatgtactctgtgtcatatttaatgagtaactcttgggtaatcaaaatggtgatgcagtatcttaaacacttaagaggcagttctttgtggctttgttagtttcagcaaagagtggtcatttctgtatacactgacaagttagattaactttttagtacctcaaattttttttttgttaatatcactttaaagaaggtctcttgtctgccagctacttaaataatttatgggtcagggcttaaaagatttaacttccttgccccattattttcttataagtattttttgacaaaggcattttaaaagttaatttcaagaaggccatcaaacttaaagctctatgtttagcctaagaagtcagttacatcagtgtagaatttggggaatggatagaggtggagatatttaattttatataattcatataaattgatttagttacagtatcagttggctacaagctcattatagactagcaatgttttgacatcaccaaaaacgtttgcccagtcttagaatactagggactataggaagggaagggattcattcattcattcgatattgaatgtataccctgtgccagagtcttagagagagaacaacaaacaaaataggcctagttcttgtttagtagagcttatagtcttttgagaatgacagacaattaaaatccaaatgtttatttggtgattcttatgtgtcagacacttaagtgttgggagataagcagttattaagacagagttcttgctctcatggaggtgacattagtggggaggagatactaagtatgtccagggaaagtatcagaccatgagttttagattctgtggaggaaattaaagtagggtgattatgagatagtgaatgagtggctattttagactg

SEQ ID NO: 121022 - DNA, 1031 bp, Homo sapiens
aaagagtatttgatgttatctattacaaacctactattgattctaatttttggtaacagtatgtgaacctaaaatgtttacttatatgtgtttgcagcttggaataatttgagacatttgttttgattgtctttaatataaaagtagctgaagacaagtttaatattattggtgttaagttactattaaacaaagatgtatgtaagtgcatgtagtgtcatggaaagaatttatacatagtctcataaaattgctgaagataatatttacaaaaaacctttttttcctaaaatacaatgttgtatttattagccacttaattattttgctcaacaacaaaaaagtcttaatatatctcataatttgaaatgacttgggcaattatgaatggtaacttttaataactaaatttaatctagagatttttgtattcagactgccaaaacaacttggtaataactcaagaatttataaaagtccaatgttagtattttcaataaaataagaagagactggcatagagttagggaaaatcgggcataaaatgacaagttcctcaagatttatgggctctgggttacatggactacaatgagagttaatactatgtttttttcccattctgccagccggagaagacctcttatttaaagggcagggctccctccactgttgttaaatcagggctctgcttctgacaggatatttataacatagggcaagtatacaaaagaaaaatgtttaatgatgagttttgcatgttatacagtgctatatatcatatggtttaatttaggtcctctgaaatatcagagttagaatgaaattatcaaaaggagaaaagtcacatggcatggtgcaaacaagatgtgcctatttgtatttatgtttgctaatgaaattcagccatgattcccactttgattttaagagtcttagaccaccatttggctttattcattataattaaatatcttgcccacacgcagacacaagggcagcaaagaaaggggcatattttatcttttaaa

SEQ ID NO: 121023 - DNA, 1033 bp, Homo sapiens
tttattttcatttttggcctgattttctagcattgaagaaaccatgtctaatgatcttgagtattcctaaagaaaaagaaattatattttacataatggtttacatgtgtgagttccctctggcagaagcactataattagtgtgtcgtctctgagggaagagactagctgtcttaaagatgcagtggccacatttgactgcaggagctgagtgcagaacattatgattttgttgaaagataaacaccatcccttttcacttattcattcactctccttcctgcttctttggcaagggaagcaaaggacaactgagtacaagcggttttcttcctttcttattcagcaaaccatggagaaatatcttggcttcttgacattaataagtgcttcaactatatttggaaccatttgggcagcttttcaaaaatgaaaaaggtacaataaaagaggaccgaacttcctgttttactcataaagtagcagattcagcaaaggcttactctcctctgggaacagtcatattcttccctggagactggagattgtagaatattatttccttgcacagctttcattgaaactattaaaagacagcttgaggaggcataatggcagacagtatgaagcttttcagtattgttactaaacgagaataatggtagtgtaaatgcttgactgcctctgaagtagtcaaaagtgtctctgattgtcagggtggtggggtgggacctaaaggctgtcctagaaccgaaacagaaaaagaatgtgagcgcatatataatggttttgtgtaagatgtatggatgtatctgttgtctatctgcattatcgtctacacaccatctttgtgtagtctttgctgtatattaattcttgattccctgcaatatttgaagaaactggaattgaccaagaatcaaatacggcacatttcagaccagtacctatggctgcacagaagtagtgaaaagatatgaagaaaccattctatgaataaagatgacagtttcattaggagagcaaataagaa

SEQ ID NO: 121024 - DNA, 1055 bp, Homo sapiens
tgtttttttaaaacatagaaattaacaactctcccacttttctaccctagaggaattttatacatataagtgaaatatatgaaaattacttacaggaaagcaaaatagtaaggagatgtgtttaaaaagcacaggaataagaaccagaagacctggtttgacgtctgcagttaaccaattttgttgtgatgcctcttagttactgttagagcctagactggatgatctcagaatctgttccatcactaaccagattattgattttgtttcatctcacaacaaccctgtggaataagtgttcctgtctttgagcaagttacttaacctctctgtaactcagtttctttatgtagaaaatgtgaccaataatagtgccttctcttggggatgttaagaattcaatgaattaaaatatgtgaggtccttagaacattacttgcgatgtatttaggaccctaagtgttaataatgatgatgatgattttgcagatgaggaagctgaaattcatgacagttacttaagttttctgaggttacttagagcttatacagctggaacttgaattcaaggcttatgaattccatcaaaccacattatttgcacatatttatttcaaacctcgttacctggttttgaaatactaattgactagcacagcatctacacagctggacccctaatcacactctcccagcgttttttataggttgtgttacagaaaaaagcatggaatgagaagttgtaatgttgtttgtccccaggcctctgaatgcccatgggacatatacaatccctccttcaaaagtaagaagtcttacagggcatcactacctaggaaggtagaagagaattctgcttttttccccaagcactatttgtgaccgcttcactttttttaccctactttagttatgtctacacgtttcttacttatttggataaagagaatgaacttcattttacattatacagcctattaaagcagtaaaataattgtttgcttttgaaatcggctctttgttctccaattctccaatcttttccactaattgtg

SEQ ID NO: 121025 - DNA, 1067 bp, Homo sapiens
tttgaaataatatgttcagtgggtagttatgtactaccctaaccatactgggaaaagtatgaagctgagctcctagcaccatgctggaactataattggagctaataaatgcctgtttaattgacctttgcactctgcacctcattcagcactgaggagcaaagctccacataaccaacaagaaagaactttgctgtcaattttaagcctctgaggattatcttttaacttcactgataaaactctttaatcattttgcaaaagtggcttttaggtgactaggtaatatgtataaaacatttaatcttcatggttacttttatcacagaagtccattctgtctacctatttgttcctgacagcaattttttaaaaaaatgtattcaaaggagcaatgcctaactattaggttctggatagaatattattataatagaatattattctttgtaatggtacttgatgaaggcagattttactcatgtgactattttatgagctattaaatggaaaatatttaatgaggactcaagttgatagttgataaacatttgttatgaaaatcacaagttacacatgaaactatatgataggggtggcactgaatcatcactatccatttaggaagcttttgtctgaaaaattttagataccaaaaataaccacttggaaaacaaaatttgaagaaccccaagtagcagaataatatggacagtaagacgcatctatttgttagatgaatgtgtgttctcatagacacaacctaatttttctgataaaagtgcttttgttagtgggatgcttttgtagagttgcagacacatttttattatacatttttatgtgtagtcatcaattaagaaaagagtctagacgtcttgttttcaaatttggaagttatgttctcttcttggataacaaattcacatgcagccatgaaattcatcaggttcccatgcagactgtagttgtctacattcttaatgaggagcccttctctcatcctgttaagaaattcccaacataaaatattttgtgctatatggctaaataaaaaagctagacag

SEQ ID NO: 121026 - DNA, 1050 bp, Homo sapiens
agacttcagagagaatagagtgtaaatgtttcttatcagacttaaggtctgtgttgatgttaatgctggagggtataatgtggcatgtccaacccccacttcccatcatggcatgaactagtctttcaggttaaattttagaatgcactggccaaggagaaagtccattcagatggttggggggccttagaactttacttttggtttatggtaactagtatgatctttggtttattctcttagtctatttcagcagaaccgtaaattattcaagacagatgagaatgtatacagtttccagaaatttcctaagaatttaattgtgaaatcttggtcgccaggttatcttagcatctgatagttacatacttttcttcaaacctaagttgaaagtgtttctttctccccagtggaaagaaaaatgtgtaatgttatatgaacaaactctctgaggcccttccaaattttggtagcagtatttctcatgcattcagttgggagaattttgccactctctttacttttatcccaagatggcttcttagcactcatactttctttagaggtaaggtaaggagaaagaattggatgttcagatttagatagatatgtgcccagggaattcctggtgatacagggcatggtagtaagagtccagatctcatctctttcttacttccttgactttgtttgaactgttttctccttttggatctagtcctaagctttgacccacttgctccaagatacatcgtatttcctgatctgatccacacctggtgaggacctgtatcctcaggtagaccaaaggactgcgtcttaatcatcttgggttcctctctcagcaaaggacaatacttttgtttatttgtagctcaacataaaagattgatgaatggatggacaagtgtacagaacgatggtctgaagagacaacagccacctgatagagtccaattttaatctccctaatcagttttaggcccctcaaacttaatgtgccttatataaatgtacacttcattacctatgattaatttgcatatgggt

SEQ ID NO: 121027 - DNA, 1037 bp, Homo sapiens
aaaactttactaacttgtgagtttcatgatgtttcttggagaaaaccaggtggcttagcagttacttaaaatgttggctatttgtgggagtggtttcaaggggattcatatttctaaagagagatcttagctaattcctaagaccttttggcaaaatgatgcatcattttgaactaattttctagagatacattggtcatttaacttaatgtcacaggttaccagctgtatcactagattacccccaatgaatttacttagagtgaatttgctaatgaggaagccaatattgtgctgatagagcatggcattaccgatagaaattttaaagtaggttttaagtactcaaatatctcacttaagccagctttgcaaagaactggtttttttctatataatatatgatgatagaggagtatttttaaatttccatgattgtactggaaatggtgtggaagtatttaaaatacttggattacacagctctcagtatcgtagttcacaaactattgtaagcaaggatagaacttctaggctgcttggctgtggtcccacctagcctggaggtatttattctaaaagactcatgaggcttcatttatactcctgaaaatttatgtggtgctccctgtgctctaccaaggtgaaagctgtctcaagagtctgtcagtcatatttgcatgtttagacagtcatggcactgacatgctgttcagagacgcagcatatgtagggctgctgctaatagaaaatcactaccagagatgtaagcactgtttccattaatatgtcagtttgacttttaaaaacatatatgtacacacatgtatgatcttttagatagaatgtacatatattgtacgtatatgtgtgtaaacatgtatatgtatgtgtatacagtctcaaatacagtctcatttaaaatgattatcctaaatgaaccaaaaatttaatgaacactattttacgtaaatgaccagttaacattctactgtctttgatggtttttcaagggcttttgagtcagacaacttgcc

SEQ ID NO: 121028 - DNA, 1037 bp, Homo sapiens
ggacagcacttgatttttgagtatggacaagaatccgtatctgtacaactgaactacatgtgaccattattaacatccacatgtgtcctgagatccttatagctttgatacctgcatttattcaataagcatgtgccaaacattgtgttagaaatatattgggagggaggtatggtgtatggagataagaaaccagttatccaaatatagcaaaggaggtgaataaataagcagtgccatgtgactgatgttgtaactaaaagagggacagtcccttagatacggcgaaaggatggcacaatctgcctgaggaagtgaaggaaaacttttagggtgtttaatatttgactttataaaacagaggggaagggaatgaatagtgattttgaaaagacaatacaagcacacagaggagcaggaataaaatgaaaaataaaatagatgtatgaaagtagcatggctgttcaggcaaagatgaggaactggatctggagtacgttgagatgagatgaagcatcaaagataaagtgatgccattttgagaaggacttttaattgcgagccagtttacccagactttatgatttagggcagcagttagcaaactgttctgccaaaatacattatggatttcccacaaataatagtgttttctctagttatacaaatttttgtctcttaaatttctttttccttttctgtcttttttttttttttttttgaaagaaacaaggtcccattctatcacccaggctgtgatgcagtagtgcagtaatagctcactgcagcctccatctcccaggctcaagtgatcctcgtacctcaggctcccaagtagttatgcaccaccatgcctggctaattttttaaaactttttggagagatggggtctcactctcttgcccggactggtctctaactcctggcctcaagcaatcctcctgccttggcctcccaaagtgctgggattacagatgtgagccaccacacccagtgggaaattttcttttaaacaacagacatagtcattaaggag

SEQ ID NO: 121029 - DNA, 1766 bp, Homo sapiens
atatacacatctataatttcttaagtttgtattcacactctcatcgcaaataatccttatcttttttgtatctttttgtgcttgcaaacctgccttttacagatgcggcaaattaaaacagaaagttgttggtttcgtttttgttttgtcctgagatacctagaaaattagaaaccaagttgaaatggtcttatgacaatcccaggtatgataaataaatgtatcataatttaacatttttcattttaagttgatgaccctcaagttatttcagaaatgtgccaaagaagctcctaagaaacgtttataataataaatgttaaaatgttttttttaaaaaaataacttcctgtggttctttcagtaagctttcatgacactttttatctgcaggcaagtggctgtattctcctgtgtcttgacatgcaggcttaggtgaaatattgtgggcataaaaattgcgtttggtaggtctgctagaaaggggtcatgtaaaagtcatctttgatttgttaatggaattcttttttagatgtagtatatggcagtagtgatgtgcatcctaagggaaaaaccggtctcttttgtaaaggtttattttcatatttatacactgtagttctgttgcgtgtttttgatttagtaacaatttatgtgtttttctgtcgcagagcactgcagcctgtggtgttgaggctcacagcgatgccatccagccctgccacatcagagaggccattcgacgctacagccacaggattggcccactttccccattcacagtacgtaataacagagttataaaaagttatatttataatatgaaagaattttgattttcaagtggtcaaatgaagaagcaatggaattgttgaaagcaatttgtggtgactgtaattttgttgtataaaagtggcataattctcttgggaaatgaaagtcattttcatctctttttggaaggacactttttttctacaaaatattattttctttcaattacaaattaagtttttttgttgaggtttatagtttctatttttcaaagcttaggtttataaaacgttattctcaaattatatgtatctaaatattgctagtagcactttatattttaaaattggttagattggcattaccacttctatcagatatccttctcctaaacatgcttttagttggaagaagaagagatatttctttactggctttgaactaagctgaaatgcagacagccttttacatcttcaaatgatttgaaaacttataatcagggttttgtgttgttttaatggggaattaaagacctgatatttcaacagtctaaagaaagtgtgtgcaggtgtgtgtgttttaattaaatgctcatcttatggccctttaaaaaaaagatcttatttgtgttaagagaaatttcttcaagtcctactctgtttataaggaagtagttcaacagaaagtaaagtttgatatacctaactgaggaaagtcaaatttacttttttgatactctgttttaacaagctaatgaaaatgtatatgtataacattatacataaacaaatgagaaaataaatagtattacatagtatacatttttacctgagtggattttactattcataaaagtcatgattttgtctatattatcttttttccttatgtttagttaaatagaatgctttctttccatcctttattttttttagttgttgttaattatgtagatagattctctgtgtaacaggaagaacatgttttataaa

SEQ ID NO: 121030 - DNA, 1033 bp, Homo sapiens
tctattctgtccctttggggatttcctttctcattccgcacctactgtgattgcgcgaactctggcatctcgtttatcaaggatctaagattatatgttagccactcctctacccactggatgctgcccttaggctaaaactgtaaagacaggaaatccacccactgacattcccttctaaaagtacatactaccgtttccagtttcagtctggttttgatcagtctacagtgctttcatatacttggtttttttttttattacctattcaaagtttgtaagaatttcagctattgtactctgcaactcattcagtagctaaaactatggtaacaaaatcttacctaaaagacctcttcagttaatttgattcacaaagtatgtgagaaggagttgtaattaacctagtgatatgtatacataaattaattttttatgtttttagaaattctttacatttttctccgtatatttaaacatttcttcccgatcctgttgaaaactattaaattggagttattttacaacaaagttttcctgaggaaagtattatcccagtctatgtctgtattctcttgaatttgaacttagtggcatcagaattaatattgttccacttcagaggctttaattatttttctactcatttatacacttctttctatattcagacttttgctatattttgagttttactcactggaaacctcagctatgatgctataatggttcaagtaatcctgcatataataataaaatctctacactcactacgtgtattacaagccaagaaatttgatgtatagttatatctgtaatactattgttgtagccttggacatgtcccgtattttcactctttcatctataaaattgtgtaggagttggaaacatttagaatagaccattcttatgtcccatccagagataataatgtatgaatccttgaatttagtgaacctctattattttttccttaaacacctttctggttttaattaaagaaaacctttttcagtcacctataagaaaa

SEQ ID NO: 121031 - DNA, 1103 bp, Homo sapiens
agagaatatttttgaaaaatattagcaatagtttctgtatgtttcttttttcatcacaggttctttcttgcaagattttctttctatatgagtaaattaaggttacatcagacaagaacatcttctgacttcttgttgtaacatgagcggtagccaatggtaaatctgacagtgtgagaagtattaaacattaaatgctttaatatactatgtcatatagcataggtgtaaaataaaagacccaaatacgtaagagagttgttgaaaacaaccattgtgttgccttataactgagagttaaaacttggatttcttggggccagaatatctagacattaattatgcattttatgtgcattattttttgtgtacaattctgagtatacttttttaattttgtgatagtaatgtgcagtattaaaacactttaaaaattaaaatttctgcacttgttttttttaaatggccagccaaaaaagcttccaaatttcgagactggttggactgcagcagtatggagataaaacccaatgttgtcgcaatggaaatcttagcatatttagcgtatgaaactgtggcacaggtaagaattctaatctgtcatatcgggccacactggctggtttttctttatctctgcccatgatcaattcttcttctccctgctgctctaccagtaataacagccatgaattctctcctgtggcatttacatcattttctaaaatttagttcagttatgtgtctctgcatcctcaattcaagtggatgctaggataaaaaagagttcttgtacctttatcttaatgagaaatggaatccctgcatgctttttcttgacattgaactcaaatccacatctgccttgtttagagattatttttgagctttgaaaaacacctttctacgtatgtgagaatttaggagtacttaccaaattctgggtctggaatctcgccctctaaaagactttctcaagatgtggtctttagaccacaggcatcagcatctccttggttcttgtttaaaatgcaaattctggccaggcgcggtggctcttgcctgtaatcccaacactttgggaggccgaggtgggtggatca

SEQ ID NO: 121032 - DNA, 1050 bp, Homo sapiens
tctggaaatatttcttgtgagtctgctaatgccaggcagtattctaggtgctagggatacagttggagatatatggtccttgtccctgcattctcggtggttacaatctagcaaggaagctaattctgttatgtggatagatccaactgaatattaataatgatcctttccctcacttttaaaatcaactgtttagagcacagtcacaaaatatctgtttctgtcctaaagatctgtcaaggagataagtgattaatgtacatctcattgatcttgccaaattgctgcctgttaactttaactttagaagtattccacagatgttaaacaagtgtttgtgagctatcgcagcatactagttagatggaatgttgcatgtcagaaagtatttggaagatttgttacgttggggagatagctttaagggggattatcataattctgccatatttgacagctttgggtatatgcttcgatagcaggacttaatgttttccatgatttatttaaaagagaactcttctgtatgtggaatcctgaagattctatatagaaggatcaaaatatcatgctttgagttactattaagtgttttatagacccgtggggccagattaatcaaaagaataatcagtggattataaagaaaatcttacagatttcataaaatcttcactatcaatctttccctctaggttactagttaaatgaataatgtctaatgaagtccctatatcaaattagactgcttagcactgtggcagtgtagagatatttaactaaaggttacatacgcgcttggttctgtatatgcttggtactattacacatgcagagacataaggcatggtcttctcccacaaaaatttgtaatatggcttaagaaattataagcatttgtgaaagaatatctgatggtatcagtgttcaataaatggctagagtagggaagtatacctttggcctgtatgatcaagattcatatgaatgaagaagagtgatggcagagcattccatggaaggaaaggagtaggagtagacacacagagg

SEQ ID NO: 121033 - DNA, 1052 bp, Homo sapiens
tcctattttccctaatccagatcagaatatattatctgatattcacaagtatcttttgttatggggacatgatattttctatctggatttggtaggaaagcattggaataatgattgctatttatttccacctttcctacatcaagggaagtaaaacagagtcatttatttgggtaaagatagacatcagcactgcacactgtgaacactcgtgtccactgttggtgatgcatgatgcaggccttaccgggctgctgtttttagtcttgcctaaacggatatttgactgccacatggtgattatactgttcaattaagttttttatagaatcactcaatattttctgtctcaagtaatttcagtttgttctttttaaaatgagatccttctcttttaaaaaatacttttcaagggttttcttagagatcagtcttctagcttgtttgtaaaacaccttggcaaagatgaattttaaaatatcattgaatttaagaacaccacaagatttgccactaatttacatttaatgtttatagttctcaaattgtggttgttgtaataaccaaaatatttttgccttgaatattttgtggattatatttccctattctttctccttacccacattccccacagtaggtgggcagatggttgttacatagtttggcctttatttatctttattggtttaatctcaccaagttagtgtttctaaatatgaaaacaagtgtattctctggcaagatttttgtctttttaatgtttcagtttatttagtggaattaacagatcattatttgtttggtatagataatttcccccatttctttatgtgcatccatgctgaggagctgcctttagtttaattcttattgttgccactactttatagaaaatgtgcaaatcaagctgtttaatgtaattcgatttttttctatatcattgtgttcctcatttagaattaataattttggattaacgcttgaacccacaaggcggaggttgcagtgagctgaggtcgtgtcactgtactccagcgtaggcaacagag

SEQ ID NO: 121034 - DNA, 1797 bp, Homo sapiens
aactgtgatctaaaggcagtgttcttttaggtatcaattactttagaaatgtgtggttatcttggtttggtacaactgcaaataattttagttcaactttgccttgggccaaaaacatgctaagttgtccaaagcagatgataaacatgtatttctgatgtcatcattgcccaaacaggatatggttgtttagtggcatggtttcacttatgatgcattacacaaagagcaaatattgtttatgctttattttttaaatatttttatattataaaaatggccactgagaaaggttcattaaggaataaagcataatacataaagcattagtaaaattgaacaggtaacttttcaattttgatgggaagatcttggctagccaaacctgttacctaaaagggcattccacaatcaagaagagaagaaatggaacattttgtagctctataatagcaggctactgtagacctagaaaactgggggtcagcagggtactaaagtcaataaaatatctggagatgcagggtagaaaaagcttgggtacttatgcagtctgtacacttcttctttatagttatgtattacatactggtaaccaggataataaaatatcagaagttgataaaactagttacagtgaaaatcttcatatgtacaaataaacatgagactggcaacttcgttaagctttgtatcataacaaaaatcttctctggccaacataacagagtagcttttatattctactcatccaaataacagtttaactgaaaaaaatatgctgggcttgtagacataacttaactgtagacagtagaaagtggaactgttaagagcataggccttgcctgcttctaatttgataggttatagtttcaagagttaaccacaactgtggcagttcatatgaaaccactttggactcagagactgcaatctcttgcttttaaagttcagtagaataatcagtcctggcatcattcaatgacttaactttcctccaagcatcacttatggttgcagaaactttgtttactaccttctcccctagcatgtatgaaaatggtatagacctaccaacaggcttaattttagttttctttcttctttatagatataaaaactcacttggtattctagcttcttctcaaaacattgagcaaacatacaaaaaacagcctgagttctttcctattgttttcagctgatgtatgtgtgcttggctttagtttcatccataatttacttcattactattagtttatgtgacttgaaatataaaaaaatctgaatttttacatccattttgccttactagttcatcatcgtgatagttagctaactcttacacatttatttttctctagcaccagattctagcacttgggcatacctatagtagagatccatgatctcagaacatccttttaaatgatcaaataaagattaaataatgctcagagttgctttagtgtatttgagggactgagaaagaagagcagggaaatacatacaactatagcttccctccaaccccacccacctccatcctaaaataaggcaggtgtgtctaagtgtagctaatgtttctttcattctaattttttcatctaatcaaatattgtcaaccaaagaccaaaatacagtcactgaaagcttcaaatagctttgagttttcttgtcagtgaggaactgtggtcacccacagaagagctgtgcctaagaacctgctttgctgcttgtagaggaacctgagaagctcaagtttgtcaataatcaagtaaactatctagtctt

SEQ ID NO: 121035 - DNA, 1009 bp, Homo sapiens
gagctgtattttctaacgttaatgttaccagttctgctttcttagcttgtatttgcctagcatatccttactcatcattttttgtattgtcatttcatttcagaggtgtttgttataaatactatataacagtattctttttccaaatctgagcacaccactctctcctttttataagggatttaattagccctttcacacttactttgataattgatcatttggttctattctttcattctaatttgtgacatgaaaaattatttaattctgtatgacttatacttttattttgaatgcaagaattttttaaaagattattttcagagaatcccaattctgaatttggtatactatatttaatacatgtaataattagtgctgatgtaaacctattgagaacatttctttttttctttcccttgacttcatgaagacaaattgagtggcagcaataatgcgaacaaaagacaaaagattgctcaggacttcctcaactctattgaccagacaggagaacttttagcaatgtttgaagatgacgaaattgatgaagttaaacaagaaagaatggaggtatagtacattcttccctttttacagaaatagaacaatcattgcagtgcctatgctgtttggtcctattctcatgttctttaaatgttgtctgaaatctctaagtcagtggttttatgtctgatggcagcgatgtgcagaggatcagcccctgaagtgggagtcagatctgccttcagcatcaactttgggaaacaacttctgttttctgtttccttatttcccgttttgaaaatgattaggtttccctactctggatctgacatttactgattttattttatgaagctaatttctaattaaatatttacctttcttgtttcaaatcatccagttttatttgtaaacaaaactaattcttactgcttttatgttggcatatatagtgtgaagagctattcttctggctatagttgcaggctctgattggact

SEQ ID NO: 121036 - DNA, 1705 bp, Homo sapiens
cttccttagaatgtaactgtatgagtgttgcgtaattgtaccattttatcctgatgtgaatgaatctcccaggaatatcctgattttggttttagtgaccagagctaaacattttctcagcctaccaagttattagtggaatctcttttccttttctatatacattgctgtcttaacttctccctagccaaaaatgagccatccctaagcaatacttatgcaggtatagtgttttatagttctctatttgtctttactacattatttcatttaatctttacaatgatctgtaagtgtaataaaatctgtactttgtcaccttcctgagccctttttaataacctgatagtgaaatatggaactgacatctgagcttagggaaacccgacttttcatttcattttacatatactgcatctaatttgataaatactgtatacaacatgtattggttttcctatgcaagcaatctttggatacagaatttgaataagggctactttctctgacaaactgagggagaagtatatacaaattatctctgttcatcatatgatgaaagcatagggcagatgagaaatggatagagaccaatgtcttttacatattaattagcaattgcattgctataatcccattttgcaactgtctttggctttcaaatacacctggaactattgaatagaatactaaagtaattatatcacctgctgatttgtgtaccatggtaaacatggtaagataagtcattactgctaaataagaacccaaccccatacttcctttcatgcacttgcagctagttgagctggttgctatttccactggtatgactaagtgagtttcccttagagcattgactcccatctgcaccttaccaagttgcgccattctttcttatggttcctctttattttttctcttattgatgtaagtgcttaattatggaaccaaaactatacccagggttaaacactagaatcagaaaagccaaaaggatctttggagcttatttgatattcacctctctttagttctcacttgaagaacctgaggaccaaaaagatcagctattctgttaaaaaccgtaacaacaaaactaatgtgtgcattgtatttcattttgaggtaattttacatgagaaattattagagaaacaattcgttctctatcaaaaaagcccacattatttttcccttgaagtttggatgaaagttagcttacattttacaagaaagtgattctagtgatgtacagacatgtttggtatgtatctatgtatgcacacacaaatatgtattataattaaggataaaaatatcacacatatatacaaatacatttatccacaaattatttacatcctaaattttttaatgggaaaatgtcattaatacttaataataatttgataataacctttaatctttgtgagtactaaaagttataaacttttttatgagttcttcacaatttaatttatcttttctaaataaatgtcaataacatttacgtcaggctagctatatgctgcatgatgttacctcactaaaacatgaaatcataggcatttaaaaaatgttatgagacaaagaaagtcaagatggtttgggaaacattttctaagtaatgatttttaaagcttcgactactgtattcgactataacttggaggtaataatctaaagattctggaacactctt

SEQ ID NO: 121037 - DNA, 1030 bp, Homo sapiens
ccagctaaattttgtatttttagtagagacagggtttcaccgtgttggcctggctggtctcgaactcttgacctcgagtgatccaccagccttagcctctcaaattgctggattacatgcccggcccaggagttgtatttttttaaagttaggtgatggaaacagatttgagagcaaaaattaaattctttaatagtacagaaatactgaaatcaatcctagcagtttttttaattccttcaattttgacattttgctattttgttttgattttttgtttaaagcctatcacacgtaccacctcagcaaagtagatttgaaatgtttggacaatacccatccacatattaaaacacttttcttcccaaaggaagtatagtaatttattcttttaggagtgttgtgacttaaatgcgtctttttcttcctgtttcttgatccaatgtaattaaataatagatttgatttcataacttttcaaaagcaataaagaggaaattatgttcagcagatttgtttattttttttctgtgcccttccaaagtttaaatggtatcctttttccttgcactaacgggaagtgaaatagctctttcaaatcaatgtccttgagaaatgaatgttaatttaaaaatacaccttaaagaacagaaacataatttttccctggaaatatctgatgattaaatctagttacatgctactttgaaataataccaagattttaataactattcagttatttaaaaatcagtgccatgcaatatatacacccagtaaagtataatttaatgaattgccaaattagtccttatcaagttttagtttttataccaaggtataatacacctttaaactttgtcaaaatcatttccttcaaattgtgtatgtgtattttatgtgctgtattcacttgccttgtttatattgaaaaatagttttctcctaatgttattaaaaaaaattacagaattaaagaagtcctaatacttcaaacagtataacaaccagaggagtctttcctgtttac

SEQ ID NO: 121038 - DNA, 1149 bp, Homo sapiens
aggttttgttttgttattgctttaaatttagctaaataagagtgtctgagtcaaaggtgtctaattacattgacagtcatccactgagaaacgcagtcaatacaaaatgctactgtttgtatgactggattttttgcaaagctactgaaaggtagtcatgccataatctggaaattgtatttagcacattcctataaaacctttcaatgtaacttggtatagctatgtatctgcaacagtccttagctcttgtcacctgataaacaagtttcatgcttttctttaattttaatttaaatttcagaatgaatatcacaacataaataaattacagcaatctcatttttaaatgggctttttaaaaactcataactacttaatgacatagtctttccaccagttaattatcccatttcagaaaatatattccgaatcttctatcaccgactctcttcaaaagagctttttgtgcacctccttgtaactaaatatatcattctatcagacaatactgccaaatacctaggtgattccctctgatttctcaaaagattttattgtctggctcattgtgcttttgtctataatactcctgttacaattcttgatcatttcagtagccatgtgcatgatccttctagtatcctggactttcagtttttcattttctctccaatggcactgtcctccaatttatttcagccattaattccatgattgtaccctagaccttgttgtttacaatgactgcaactcctgtgtaacttcaatttagagtattctactctccaatcaccacctcccattgtctgtcacctaatttaaaggtttatgctcaatagttataattactcctttgcatatgtacttagtacccttggcctcatttcatttgtcttattcagctggcaatactcaacactggttaaattctgctctttagcagcttttaaactgtaccaatgcagctgaatattgctagagataaatacaacatgcttacagtaattcctgaccactaactttagagttttaatgagttgttaatactgtcctgtgatatatgtataaatacatatatttaataaatatatatacatacatacatttgataaatatatatttaataaatatgtattatacataaat

SEQ ID NO: 121039 - DNA, 1093 bp, Homo sapiens
ggaacctttagataatatattttagcaactctcagaatctctgtcacctctagggatgttgtttctcatattcttgtttatttagtgaaattactaattccataaaatctgtctgcctttctgtatataaccactgaagtctctgctcaagtttttttctaaatttaatttaataattttttttaatttaatagttgctattatgcttaaacatggctttttagtgattacccctggggcagcaagttttaatggtcagccagtgattaaaagttttcttatgggttcaaacattttgaacccataaggcttccacttttgctgagaaatctgtatgtatattagggcacacattcaaagttcaggcagtttacaagtctgcctgtggtttcacttcatagtctgctcagggtgtacaggatctcgtggtctacaattgataagtaggcagctgaggacttttctggtctttcctaagcatgcatgtaacctggtgcatgtgtaatctgttcagattctcaggaatatattggaacttttcaaagcccccaatggctacatagtggcagaaaagatttatcttttcctcacttattgcaaggttcatggctgagatatttgtattaaaagatagactaacaaaggaaaagcatacacatttatttcatataaattttacatgacacaggagccttcagaaattaaaacctaaagaaactggaaaaactatttttatgctacattaaatgaagagtggacatttgtgcagaagtctgattggataaagagagatatgatctaatagtaataaactggagagatttcagcaagacctttttgttcagtcttctctgtatccctgtgcgacattccttgcctctgtgtgtggggtacatgagggccttaagacctacttcagagaaaggccagagaattcttttgtggcctgcttcaggggagaagggtaggagaaggtaagagagaccttcctactacagcttacaggggggagaagatttctcagtcattgcaaggttcatgactgagacccctataacaaaagacagattaacaatagaaaggcatgcaaatt

SEQ ID NO: 121040 - DNA, 1046 bp, Homo sapiens
gtgtagatttataatttttattatttcaactttttcaaatgttatttgtgttactttgtaaattactttctaagatgaatgtaataacttttcccaacagtattacaacaactttattatggactgaattgaaataattcacctaaaagaggcatctgtatcctttgccatatcagacgccagtgtaaatactagataaggtgtatattcatataaaaatttgtttactttgtgtttaaaagtgaattgatactggataatgtctaatatcaagaaaatttggatattaaataacactaattttaatagtgtgtgttttagtgtgtaagtgttcatataacacatcacccaatttaatacctttcaattagaatttgagtctttgccaaaaaaaaaaaaaaaaaaaaacagcttatggataaaaaactggctgtaccacaattgattttggggtgtaactctgaatttacagctcagaacaatggtatcattttcaaagatatcatgactagaattatgttattcataagtatcacataaaatattagtctgatattgatatatatagtcataatggattttagaactatacacatattgcaaaagcttataataaagattatcaatctacattgtaagaaattgtttttaaaagcataaacaatccctaatttctttttttgtttgtttcttcaacttttattttaagttccggtgtacatgtgcaggacgtgcaggtttgttacataggtaaacttgtgccatggtggtttgctgcacagatcaacccatcagctaggtattaagcccagcatgcattagctattcttcctgatgctctccctctccctgccccctctaaaaggccccatgtgttgttccccacagtgtttctacgtgttctcatcgtttggctcccacttataaatgagaacatgcagtttttggttagctcttcctacattagtttgctgaggataacggcttgcagctccatctatgtccctgcaaaggacatgatcttattcctttttatggcagcatag

SEQ ID NO: 121041 - DNA, 1054 bp, Homo sapiens
gagaaatttatgatagagttgtgtagcaagtacacatttataatttatttaaaacaggatctctgactgttcagaaactatgtagatgaattgtgagttatgggtgaatctacatggttcttgctggcctccatgactgaagaaagcttgatgtttagatattgggtgaggctattgatggctctagatccaaggatgacaacctgtctctccgtaaaccctttctctgggatgactattttgatctgtgcctgagataactgatcatgctaattgattttgaagcctagaggcctaattaggcagccaattaagtaatttcgaatagtgacttcatgataagtaatttgagccagttacgttcaggtgtgcccagtaacaatctttcacctctgtagaggtggaatcaatgtcattgaatcccatattgcatcattggaaaatgggtctgctgcattgacagtaagttaagtacagcttgatcaaatctggtcagttcaataggatattgtgcttgaagagcagaggcttgacaacctacgaagaaaggtgactggagaactgaacatcttggtcatccccttcagtggggaggagagaatgggaatgtagggactggattctaacacaactgcataggtcatcctgacatactacattatggattttagaatgcagcagtgatgaacactcagtcaaattgaaatgtgtcttccttgccattggatttgagtccttttgctctgatttttttgatcttgtaaccacactttctgatgagatagccccactgaccagcaaggaccacctacctcagggtgactagtagtagtggagtgtcttgttttcccattacctacatattcttggtaacagatgctatagaatgtgttcatatcaggatatgacctctggttctgcaccatcatagtataaaataggtgagtgagtagggtgggcaataggaatatttctggaagccattcctatactctgacagctagcgataaccatacaaggaagtggctgggtatgtctcaccccaaatcaaagg

SEQ ID NO: 121042 - DNA, 1184 bp, Homo sapiens
ttaaaccgtttcataattatctgcaattttataattttgtaaacgttccaaggaaggtatcatcattattaaaagattcttatgacagataatgtctaaatattgcatgatttatttttaatttccaattattgggtatgtcaaaagagttaatagtattgcttttgatgcctgattttgagagctggatttcttattttggaagatattcaaagtgaaaataaaatgaagtcaccttaatattataatggcaaaatatatgatttgtaccattttaagaagttgcttgagtcagtgaaaaacaattgaggtttcctaactttggaaatcacagatgtaaaatgttgattagtcgtgcatattctactactttttaacatgttaacataatttgaaaatgtacattttatgggcttaactagttgcaaattaagcagaacaatataaaactgttaatattttaaaaactaagcataaggtagtttggtaaattttaagaacacacatgttttagttggaacagatgtgaaagacatattattttaaaggaaaatggggtccacagctatctgtttggaaatgtctttcaattacagtggcgtccatgactgttggattagaatgaagatttggctggaagttctctctgtcctattctgtgtttccttttgaataagaaacagcatgtgtgaagtacatttactataatccattccatactgggtaataaaaattctgtgaagaatgattatgcatgttatgaaattattccgattatgtttttttccactttcagctcactagtatttttaagtttatataaattttacagagtgtgttgatatattaatttatttttaaaaatgggaatatggaataactaactctcattatagataatcgcattccattggtggtgtgacttcctgtattttaccaaatgtgaaacagtattcactgaaaaagaaataaaaattttctgagtgagcaataaaccaaccaattagaaatgaattcttgcattttaagttggcaagttgcagtatgagattatttgcatttaccaattcatatgttaaactctaggattacactgaactttaaaaaataagacagttgaaagggtaacttttagttcacattacaaataaaatgaatgattatgttacccgtatcattcactt

SEQ ID NO: 121043 - DNA, 1027 bp, Homo sapiens
accttcagcatgggagtcatggccatcatgaacatgtcacagtgctgcagagattttgtttatggccggttttgaggtcagcttatggccagatttgggggtctgttcccagcacactcctaatctgccttcttctttaagattaactttattttctccagttccttaattctcttgtccagtagaaacccaattttccaccttctcaccatcctagtacgtgagaccctaaattgatttacttaaaaataaatgcgcgtgtgtgtttgtaaagtaaatcaatttagggtcttaggtactgggtacaatttaggtctcaggtacacacacacacatgtatatatcctgtaaatataaagttatcaaatacatatattacatttttctgtttctaaggagctctttccctaataatatttatattagaatctacaaatttaatgccacttgatcctcccagatttcaaaagagaattaatggtgacttttgtgtaaaaatgaagacatatttatgtacagtacagaatggagattgtccttatcagtaatttaaacttttcagttattagaattattcataagtgtttataaggtggggctattttatttaaaatgtggccttataataatgtttatactgatgcagaaaaattcattggaaacatatatatcatttccctttaatttgtaatttcaaatgttttatccatagttttagataaagcatttgtcacttgtatcattggctttctttccagtgttaattttaatttctttccattctctttttctcatctaatttctgtgtcatttttttcctaaatccgaaaaaattctcatgagaggtattttcatgttagacaggttaaggcagaattttgtaaactactggttcattcagctcttaaattttattaagaagcgttttgtatcttgttaaactatttctaggcattttaaggacttgggagtgttaaaattcataaaaatctgttgtaccatggaacagtttctgatcagcagagat

SEQ ID NO: 121044 - DNA, 1470 bp, Homo sapiens
atagaaaatatattgaaaatgaagcgctagaatactgatctttttgtttttatatatttgacagtattcccattggaaatctcaatttctcagaaagcatagcagtgaaaacttgcactaattttacttttaagattaaggaagtcaggaaagaaatgttaaaatattcatatattttaattatattaatattagaaaattataaaagtatacatttttataatattggtataataaagcattgtttaaaatgtaggttttacactttaatagaagcttgaaagcattgaaactaattcctgaagaagtctgtttcttgatgcataggcataatatacgtgttattcagtctttttatgggatgattaaaactttattcagcttaatgaactataaaattgtttgaatatgtttaaaaataagtatttctagttttctaaaactagcttttttagtgaccagtagagatcactctagacttttataaaatgttaattgtttctttttataaaatgctgcattggataattattcatgattcttattaagttattagtattaacaatattaaaacttcttgggaactgggaggtcacaagactttttacttgatgattaatgaatatttcttaggtatttatttataatatgttttaaccatctaaggtgagattacaattttttttctagcttcatagggaaaacagattctatagaaataattggaaaatcagtttttccctattgttatcacaatatccttccactgctgaatgattctggcaggtaagtagtgggaaattgtgttcctatcgcttttcaagagaacaagtttatgggtagaagagagaatgtattagatacaaatagattgtttagagaaagatctggtgcttacctgtcagaaatcaacatgcatgtgaaacttgattggttgctagattgaaagtagagctgcatagttcacttttaggatatttgagaaaacttggaatatggactggattgcgacgatactatggaatatgtattaagttagatgtgataatgctatcatgtttttatagtacaatatccatagtcttaaaagagatatgagctgaattaataaaatttaattaaatacattcataaaataaatacatttgtaaaataaatgtgtcaaaatgttaattggtgaatataagtaaaggatatataggcatttttcagcttaaacagtgaattctgaaaggtaaaccattttatgtttaagtgatacagaaatttgatttcaaatggaaatcatacttgaggaaaattcactcatgtataaataaatttttaaaaatgagtgaatatgagtagcttgggctatacagcaattttagattttagtttatagttttagtctttaaattttattcacagtaaaaaaatggctagttttcacagtttatttatatatggcaaatataaattgaagatggt

SEQ ID NO: 121045 - DNA, 1097 bp, Homo sapiens
gaaattctgaacaacagtgatgatatacaataattcacatctttggactgtatcacattctggggtctgcttcatatttgctgggtggctggattccttctgttttcctttttcttgtcttcttaaacttgtgaatctgtaactcattgtaaaaaaaaaaaaagtttaccttaaggtctggttgcaaactgcttgctaggcttgactataattggctgtcatgaaagtgttagtctgggcattcttttacaaattttaaatcacgtctgtctagtttattatcaatctattagatggcggcctttacaataaagattaaatgtaatgtttcatgtataccattatctcatgcctagtttgaagatcttaaaaaaatgaatgacagggattgtaatatagtttattggatgaatcttagttttctttatgattgtaatattttttgtctttcattgaagtgtattcagtttatatagttctttaagtagtttagacattaatagagtttctgatagcagatcttctataaagtaaaatgcttatgttataatgtagattgttcagtatttgattctatgagcttagaatagagtgggttaacagaagctatgtatttttttgtttctaatggaagctttgaaataaattacaaaatgctgtgtgtagtaaggaataatgcccacagacagagtatgttagtcgtctcgatttgctaattctgattcagaagaaaattggaaacatctttgggaaactatctccttttttgcccctttggacaagtatgtatagaactcattttcttattaggatgattatatatcataggcagtgaattttatatttatgaatagagcttcctgttttcatcagttgggagcgatggagtatttttcaaccaaaattataaaggcgaacagaccaattttctaggcatttttttgccatttatccatgccactctaaatctgcatgttagacttcttcctagtgtgacagtaactaggagtggcataaagtaaatggggtgggcggagacagtgaattacaaaagattatttggaatgtgcagggaggtaagggctagggagacagga

SEQ ID NO: 121046 - DNA, 1100 bp, Homo sapiens
tatcctcacctctataactctagaaaacattttgatcaatgtgagataatttaattttgtatatttcaagtcattactttgaaaattagatacattacagataccaaatgcaaatatatacagaaatttcatttttcaattcttaatgcaacaagatagcataattaggatctttaatatgctatttggaaaagctagcagtttatcaaagaatcatacctttatgtttaacaggttcatatcttacaggattttaaaaatggtaacacttaccccaaaagaagttttgctgacatggtgtcactgtgctgaagaggctgtttgatgccatagtccctcctttttttttcagatagaacttgtaccctctgttgtaaatactgcttgcagccttaaactgaaaatacaaaccatacccaaaccttgttttagttttacagtatgcctggagtacatagactttatatttatttttttctgtcaagaaattatgtagctggtaacatgtgaaaagcaaagaaacaaaacaaaaagagaatgagcaaatatttgaaggacctactattactgcatagactgtggttagagagcactcactgactctgttggtctcggtggctggtagtgacctgcggagattaaccatttaaaaaccagagacttcttgctgtcctcctggagaaagtttgcaccgcacttgtggttctgtggttgtttgtgaggcgaatgaagcattcacacaatccaaaaaagcaaaagctttaaaactccttttttttgcaagcactattactggagaggcagaatcatgtggtttgtgacctcacagtactcttaagtaaagtgggactgcctaccactgtggcttttcccccttgctctttctctctctctctttctctcacaaaaggcttgtggtaaggcctttcctggcatccagaaggatatagctttttaatttttgtgactcatgaggatttggatagaatacaaatgctgaaggagcccaaactcctgtaaggttaagcatttgtagagcagagctctgcagttaagggctttcctttctactccccgctcaacctctgcctttttgcctc

SEQ ID NO: 121047 - DNA, 1532 bp, Homo sapiens
cttttgcatgacttcactattgacttagagttgtcatatcttagtatcctagaacaaaggttagaacagtatggaagattggtatttgtatgctttggagagggatttgagatgttaccctgttttgccgtcaattttcaagtatgcacgggtgcatcattaatcatgagaaatgcaaaaataaataatatagtcccattggatttttttctatgaatacttaccttttccttttttttaaatatatatatacagttgaggtatttaggtaacccctaaccttttgcttcaacaaagaagtacagtataaaaatattaccacagttttcatgtgagcagctcttgaatcggggggagggggaaagccctctagatgaatatttgttgaaaaaaaaagttgtgatacagaatgtcttaactcagcctcagtacagtacttgaggaccaccagtgtgtaaaattgaaagcacatgaattttgaagcactagaaaaggtttgtaattgattagcgctgctttaaagtattggagtacagtgagttttgatttgtgaatggttctattcaataaatattaattctgtgtgtttgataaaatcttagtgccttcaatgagttagctccccccgcccctgcagtttatttaaccatcaaatatttcagtgttcttttaacaaactggaacatttctatcttaccgaatttaactttagcatgactgatttaaacaagtcaaactatcagttgttagctggaagagagtaattgaataaattaatattttgttcttttaagataactaaaatatatcataatgtaatcatgtatatttcatgccttgtgatatagagacggattgatcaggagagtcagacagaccagccagatctttttccacaatttcttttcagtgttttagatttcaaaacattttttaaaaataaaaactaaaaatctttaacagtttgtaatgtaaaattaggattattataatttaaaataatttatatgagtctttgggaattactttgacatttttagcttttgatatgtgttagagtgattttctgtgtttgttcttaactttgtaattctgctccctagttttggaatttagctctgtattttaaaaagaagctataaaactttgtcactactgaatcttgaaactataaatatattattgatatggaccacaattgctgttttggaaatcagtgttcacacatcatgttcaagcagttacaaagattttatgtagataatcagtcagctgatatattttcatgagtcattaattttaagatactctatgagtcacatctgtgattttcagcaagctatatttatgataaatgatggacagattttgagtagtacagattgaaaatttttgattaactcaaagtgaagtatgctgagagatcaaggacacagacatactctttctctagcatgtgcgcgcgcgcgcgcacacacacacacacacacacaccactcattgtatttgaggtgaagcagttgttaatgtgt

SEQ ID NO: 121048 - DNA, 1028 bp, Homo sapiens
tttataactggaaaataacatctttggattttataagattgattattttagtcttgaaattcctagtagatgcctaatccctgttactggttttatagattgacatttgttaacttacatgcaaaaaaattttgattatatttcatgacagaactatagtacctcagttacataatttacaatttttttcctggtttataatcattattacaagttctgtagtcattggtgtgaatgcattcacactcatgcatgtgtatatgccatgtataaaaatgttaagacaaacatagccagaagaaatttaagttgaacatatatgacacgtattttgtttcggtgtaaaaatacatcgtgttcatgtgaagttctgtggaatatcacgttattattctgatatttctaaagaaagactgcatatatatgtattcaaaccttattgatgattgttattgtgatttggctagcatttaactttgtcttttttttttttttttttttgcttttcctgaagcacaaaatagatgtaggtgtaagatacatgactataaggaatatgtaaataatggtatggttcatgtaatttaggggaacctacaaatgtgtatttaagttcttgagttttaacttagtctattatgtaaatatatgtttatagttgatggtatataatgattctggtagacatcattgatgtaaaaaatcgatgtaactgaaatgtaaaataaaattaccttatttgactttgtggtgaaaattatttgccttacataggatatttagatatacctttttagaaatgtcactaatctgatgtaactaatgtataattaagagaattggcaataggaatagtagagataaaagagtctttaaactgtttgccaaaataatcttagatatatttctgggaataatgttaacttggtaaattttctaacatcagtatgataatttttaaatatctcaaacattatcgaaattgcgtatgtatatatgtcagagatttccttgttttgtgggcagtt

SEQ ID NO: 121049 - DNA, 2530 bp, Homo sapiens
tcagctttttatataagcttatatgtgatcatttgaagtaatcagaaatgataccagttttattgtatttttattactgattttagaatttcttgagaagttgcctataattttttttttttatgagagctacatctggaaatgctcaaaagttgtttgccttttttgagagaacaatctgcagtgaaagtataacttctttagaggtgatgtttaagttagcaaatgctgaaccataatgtgaggaagcataatattgtgaattatttggcaaacatacctaatacaggcattagctgttgaaaccatttgtaaagtacaacttacagaaagctagaaagataggctacacagaactttatctgtaaactctgaggatgaaaactagagtacaacttaagtttattcaataaagactaaattctgtaagtttaagtttgatttgtttataggttccatgattaatgtgtaattagagtatgaaagaagcatttagaatcctttaaaatttataggtgataacatcattgtcaagtcaggagttttgtttcttaaagttagaatttacttaaatatactttttctctaaaaaaataaaatcttatttctacttacagtagtaccaaagtgagttttcgcaaaaagaattatttaatatgtatttaatatttgtttcaaataaacaaaaataaacataacaaccaacagtggaggggcgtcttagatttgtttttagctttctttttcatggcttctagaagtgtatcatattataaatacattcaaaatgttttgctctgaggatatgtagcattcctataaaggttaaatcaataaaaatgatttggacacattcctaagcatggctagaacaggtagtccgttgttttaggtacccttgagtttctggagcagatcattatggcgtagcaaaagaacttactaaaagttgctttctatgtgtagatgcatcagcttaaaaaaataagattttctggccttctagaaatgagtatttttagagtaacccttgtatatattgatttaattatatattttaaatgcagttaaagttttggagcttttttttcttcgaatgctggagatacaccataattgataaggaagaggtacgtacaggaaaaatgcaatggcaagcttttccagcaaatttagaataaatgacagtcttatggttaaagaaagtatcacacattataattgcaaaatagggattggatgtgattctttttagtcttgccagtttagaaaaaaattctgtaagtcattggcatgttgttctgttcatatgggcagttcaaaaggcaagctttaatttgagcttttattttagaaagcatatgtatatctcctatgttcggggttggcttctcactatattattgttgctatgtagttttatgcatttgcttgcattttttgtgttcatgtcataagttttaagtatgtaagttttcagatcacactgttttcacagcaagtttcaaaaaatatttttatgccagtttataataatgagtaaggccatttttattaaagtttcctttaaaacagcatttaagatgtttctggatcaaaaaaattaagtgaattgaccatgtatttgaatgaagaaagtttaaaacagaggtagaaaatttgagttacatgtattattaatgaagttatattatagaaaatcacttcctatctttttgtacatctaatatgtatttactttgtaagtaaatactttattaaaaatactgtgttacagtatttcttggagcacaggatttaattttatagtcaagaaaattgtttgaatacgtctgagtaaaaatttattgtacatatatagagtggtttaaccatttaataattaaataatttagcaatttaagccaagtattttgatgttttaaaaaatatttaagtgtatcttgatagattctgattttagtgtgtcttgtgtcttgataggaccagaatatttatgaaaataaaaataagcctaataatcagcacatggctctaaattttcttcctgggtacttgtgagtgataatgttaaaaacagatcactttatgtgttttctctagtcctattggtgtacaaaaatattctgcaatatgcttatgcgtgttataagggagggatattgttaaatctttactacataatcaagaataaagctttcgtgacagtactcattgtccttatctagctaacacttttaaaatgaagtggttactagtggtaaaaagtttttaaaatgttaagttttccttctaaattacagagagagaaataatgtatatgtgtttggttttgaaaactgggagaatagaagaattctgggtggacactggagtttataatatgtgaaaaggagtttcttctgtggaaaggaggttggattaatgatcaaaagttggagtacattgacttgtatatttccatttctttagaaatacactgtagcacattgtctttgtaagtagtatctccataggcattatcttctta

SEQ ID NO: 121050 - DNA, 1030 bp, Homo sapiens
aaagttttggattagattgattatgtacttagaatagctatttgaacctaatagaaaaataagaatattaatgtttttggctatagtcatcttatggaatcctctgtacttcttattttccttattaatatagcttgttaaacacaactttatttttcttattaatattactggttaaacacataaccattgactatcacctctattggaagaaaaggaaggaaagaaaggaactaattttttcttgtgaacaagctttacaaatgtttattggggacacaatttggaattaatatattttggatatgcattttgtctttagcttatttctaggagtattaaaagttggctatctattggctcacaatcttggctaatttatctagggagttttgttttaaaaaagttctgaaggctttctctccacaagctgctcttccccaagacttactccccaggtaattctgttgatcagccagatttggataccactgtaacataagaagtcttgtataggctagtgaattctttaatggaatactctttcaatcccttttttcttaaagccttatagtcaagtaataagattacttagccttatagtcaagcaataaggccataactatcttagtttgcaagatatttatggcaagtatgtcttctttaatgtaaatattcttatttttaatttttcttcttatattaccttatttctatgttttatgtcaccctgcttattacatgtcattttatactcacatgagtgtaaatagtttatacttatgtgtcttcagctcaggactagaatttgtatgaggcaagcaaagtgcctagggcacaaaatttaaggaggctgtctctttgaggactgtgcaagagtgagtacctccttaaattttgtgccctggatgcctcccttgtctcatccagagaaataggctgcatataaattatttttattttagtttagcataatctcatgcatacttggatgttttataaaaaaattgatgacaaaacgaaatagtat

SEQ ID NO: 121051 - DNA, 1043 bp, Homo sapiens
cagctagtcaggcagaggcaagagaattgcttgaacccaggaggtggaggttgcagtgagccgagatcgcaccactgcactttggcctgggcaatagagtgagaccctatctcaagaaaaaaaaaaaaaaagaaatgtttattgaattcctattatatgccaggcatttggctagatgatgtgaaaagaaagtaagagtgggagagagggaattcttgtgtatctgtgctaccaagagagtgtgtagtttagtgtactgtattgtatctctgtgcttaatgaagttgcctgtggggctgctcaggagggcatgcgaggttctagctaccctctcacccttcttcgtttcaaccctgtagactcctttaaaaatctattttatttattgggctttctcatagcatttcctatgaacaatggattttgcaatttaaaaacttcagtatcacctgtctagtagaattatatatatttacatatatacataagtagagtgagaatcttacacacatagaaactgagagaatgacaggtggtagatgcaggtaagtatgtgaaaagagttacagatatgctactataggaatatggaggtggatcagagagttttcaatttggaggatgaaagccagtgaaaatagtgtcgtttgagatttttcttcaaggataggcaatatttagccctgtagagatttgtaggtagggtgacagtgaggataggtagggaatattgcaagtacgggagacagcatgatcaaagacacagaggcagggatgaggcatttggagcaaatagcttactgtgtctagagagaaactgggtcatagaaaatacagataaaacatgattagtatcaaaatgtggcaagctttggcagactgaggagttaagtctttttcaaagacaattggaaacctttgaaaaatgtttgaaagataaaggtacggtgtgcattgatactcattaagaagaattgataatgcatcatgtaaaatgagttggctgtggaaagacctattgtagtagtccatgtaagagggaa

SEQ ID NO: 121052 - DNA, 1078 bp, Homo sapiens
acagatgtcctatagcagaagtcaacaaattatggccatggacttgctgcctgtttttgtaaataattttttactgtaccatacccaggcttattcatctatctgttgtctattgaagccttcatgctctgtgccagagttgagtatttgcgacagagactatatggcctgtaaagctgataatatttactatatggtcttttacagaaaaagtttgataatctctgatctgtaaaagacagttgcctttaagaagaagactacaaaaattaaaaataaaaataaaaaacctatgtacctaccaaaattaaaaataaaatattaaaaaaaccaaactgttcccacaaaaattaaaaattaaattaaaagctgtagagtattatattcttttgttatttatacttaggagagcttctatttagtgcatttgatggaccttgggccattttaaaaaaactgagaaaaaataaaggctaaattcagcactttcttattaaatacttttgcaaacatcttcccaaccaatgtacctaagctgaattcggaatgcaaaagttattgttggctacagctctggaagaaatgtacattttccttctatttcagacctcatagagaggccactcctaatagttacattcatcatttatagtctgaagttattttttttgcccttaggaatttctttatagaacagggaaatagggccaaaattgggagaatccttttaaatttactggtatttctattgttatgagatttttaggcttttgattgtataaaattagactcaatatacatttaattcttgcttatgtatatttcaaatgagaaagtgtggacttattctgctatgtttattttgtgttacagtaatttcattctgtgactccctactgctgctgttcatagttctaagcctgtttatattgctgcttttcagtcctctgctgctgtcttccccaatccattcactattaatgagttgttgttcttttggctccctggtgtctaaataagtaacaatattgtagtgtcatttctggggaatggtttcactgaaagttgtctagttgtc

SEQ ID NO: 121053 - DNA, 1114 bp, Homo sapiens
tacattttgcagactttccaattcatattggaaaactgtggttcctggagatgaagttattttgtgtgaggtcatagcagatatgtagcagaagtggggaaaaagtggagcctcttgattttggtatattcattctcttctaaacagtacaacttttctcctgcctttattaatatgcttactgggtccatatttactttgacatagaaagccacgcagcaggtgttaaaatacaatatgctgagtgtacaaaatgtcaaacattcagatgaatcctggcgaatgtagtcaattattgcagtattttcaaatgttcacatttttggcatggtgaatttgaaaaattgaaaagcacattgcctccatcaggagtacagcattacctgtattcagtagccgcttgagatatgagatgacgtgtacagagaggaagtcttattttcaagggattttacttttgatccaggagacttctcatattgagaataactatattctccagggaaagggaggcagcatggttccgtctcctctgagatgaaaacaatgtcagaaaacaagctgggggcaagggcacattgctgttagcaaggggtgctgactcaacattaactggccctctcagagttttagtgggtagccccacagacttctgtctctgcgaagtggggctctttatggagctctttcatttatttcaaaaatgtttacctggctgggctcggtggctcacgcctgtaatcccagcactttgggaggctgaggcgggcggatcacctgaggtcaggggttcaagaccagcctggccaacatggtgaaaccccttctctactaaaaatacaaaaattagccaggtgtggtggtgcacacctgtaatcccagctactcgggaggctgaggcaggagagtcacttgaacctgggaggtggaggttgcagtgagccgagatcgtgccactgcactctagcctgggtgatagactaagactccatctcaaaaaaaaaaaaaaattaataaaacacttaccatgtgctggacacttttgggagcagggttgataagtggtgaacaagacagatgagatgaaggcccttctctcgtgtagtttcctaac

SEQ ID NO: 121054 - DNA, 1052 bp, Homo sapiens
agagaacttgcccaggatcacacatctgtgttgaacatttcatatttgaaattggttagtatgattcaaatcaaattcaagttgaaaaaaggttcctgctgtgaatttgaagaaaaatgtgtaagatgtcactattttaccacatccaaaataatttcagattactctaactagaagctagccaatttttatatgcatttttttgggaggagggggcaaaagtaagtaggaatcagatacatgtgaagaaaaaaaaattcaaatcaattttgggggttacatagttgtagtttttgttctgaattgctctggtggaggatcaaagaaaagcagaattaatggagaaaaagagatatgtagaaaaaaagaaaacattgcctttttagtgtagcagcttgttcattactaaggatggaagggaaaggtaatgcttaacctttcccaacagaagaaggctgcaagtcagggcagggatggctgaatcagcaggtaaggtagttcttttttcctcctggaccatctccataggagatagggtgactggagaagggaaggtggaaggaagatcccatgtcagacaatgctttttcctatttttggaattctagaaacatgaaagatgagaggatgtagatttgaagactctaaaaatcctgaaaagtataacattttcagttcataagtatatctggaaaagaagaagcattcttcttggcacatgctttgccttaagctactaaaagtctacctgaaaatgcaatttgaattattattattttttattcaacgcttgtaaaaactaaagcagcctttctagtgtgacttttgacatcaaggaggctaagtgaagtagagaaaagtaggagactaggttggggaggctggcccatagaacaaagtagaagaaataagccagggcaatggcagcttggctgatgagagcctgggactgagtggaaaaacatagaggcccagtcagccattgtggttaaaagctttgtgaaaagtgtgcagaggtggctctaaaatgcatttgtctggttaatatgaca

SEQ ID NO: 121055 - DNA, 1016 bp, Homo sapiens
aaatagaaatataataacacctacctataatggttattttagaggatagtgtatagtaaaattttgtcatttgtaaaatgcaacataaatgtaaaagtcatactatccttagcgtgtaatagaaattttgaaagaaagacaagatcacttggaggaaattaggtcctgaagaaaatggttatgatggattaggtggactgaaggcatgtgttacaggcacagggaagggaaagaccagggaatgtgaagaagtaagaacagctggtttggaacagaggatgaatgttggggagaagaggaaaatcacattgaataggtagaatcaggctaatgatgcagggctgtaaaagctattcagaaaagtctcagttaatggagcaggcagtagggtggcctcatgaactccccaacaagatagttgaagggagggctttggattgccacctgacagggaattacagggactggatccattctacctctgtccacagaagtgctccagtgttgtgaagcaacagagatattttgatttggtggggaaaacaagaggaaccaaatatacggaagacgtagaagggaagggatgtatagaggcaaagaagccagctggaaaagtactcgcacaaccccagtgtgatgagacccaggaaatatatatgccatttaaagtcagtatcaacatcatggagaaggaaagtgcaaaaggaaggaatgtcttaagatggggaaacactcatgaaatgagtctgaagtcaatcgacaagaatattaagcacctactatgtaccattgctgttcttggcactagtctgggcactcttctaagctctgttctaagcatggactacaaacatgcttaagggcaggaaatgtgtgggaggaagccaaatagtgatagaatgaggcttactattttttttttttgttttttgagggattaggtccattagattttgtatttcttcggtgcctactacataatttgctaagtgaattaatgatttttattaaatgaa

SEQ ID NO: 121056 - DNA, 1011 bp, Homo sapiens
catcaattccataggacagactttttttttcttttcttttcttttctttttattttaagatggagtctctctgtcgcccaggctggagtgcagtggcaccatctcggctcactgcaacctccacctcctgggttcaagctgttctcctgcctcagcctccagagtagctgagattaaggtgcacgcaataggacagactttctgtgttgaattgcaagggttgttagtaggatttgttgagacattaggcaagttaaatcttgagaagagcccatcctctgagcagaaagaatgccattcctgagaacattctcaatgaaaggtccatgaaagagataggacccagaagagaaagaattaaatgataatattctttcagggattatcccattcttccagattgcattacttcttttccagtgagcttcataggttcttcggtatgtatcattttgaactaaaatgaaggcatctaattaggctgaaggatgagaacttcctattgcaaagaaaggtacgtttctattgcaaagaaaggtatgcttgtgatcagaagtgtttgtgatgtcatggggcagagtataaagcatgtggggccttgagaggacggtatccctaattacctggatagagacatggaactaatgttagtagtaacgctgttcctctggctggattattcctctctgtacacataggtatgcatataatagagataatataaatttataaccacatatatgtacgtatatgtggaaaagggaatatatttcatatggaccaaagaaaaacattttgccaaactgtcattattgattaaataattcagcatgaagccagcaggcagatatccacaaaacttaacactacacttgcttttgaaaaacaaaaaaaggttttaaatgtaatcgctcgaaggatgttttttaatattaacccacaccaacctgcttcctttggcttgagaataatacactttaaaaaaatctgttgtgccttgaaaagaagagt

SEQ ID NO: 121057 - DNA, 1074 bp, Homo sapiens
tgcagactggcttctttcacttggtaatatgcatttaagttcctccatgtcttttcatggcttattaatgcatttcattctaccccgaattgcattccattggaaggatgctattatatatatatatatatgtgtgtgtgtgtgtgtgtgtgtgtgtgtgtgtgtgtgtgtgtgtgtatatatttgagatggagttcgctcttgttgcccctgctggagtgcaatggcatgatctcggctcatggcaacctctgcctcccagattcaagcaattctcttgcctcaccctcccgattacagactgggattacaggcacccaccaccacatctggctatttttttgtatttttagtagtgatggggttccaccatgttggccagagtggtctcgaactcctgacctcaggtgatccacctgccttggcctcccaaagtgctgggattacaggtgtgagccactgcacccgaccggatgctattatatttttaaaatcatcaaaggtgctctacctgaacctgaggatactatcttatcttccattttccttttgttgctgactttgtcagtggtcgttcctattagaaagcatttcacacatttcttcctggagaagcatgttttctatcatagcaattgtcaccaaatggttttctgtatcttgggtgcatttttaaattaaatatttttttcctaatcttgcccatagataaattcctgaacatctactgtttggtggtcatgcataccaattcaaatacggaacataccaagttaaaataacaatacagttatgtgactgcttagttgtctcccaaaatatttgactctcctaggtaaaggggggccttttctcttaaaaatgcctggcattccttaagtgtgctgtgctatttcccacttccatgtcagcccatttctttgcactggggggcagggccctgttgttccctcttgggcatgcctttcccaaacaccactttcttcaaagtgaatcgctgtctcatctacacccatttgtatgtcatttctgtactttggacacacctctaatgtgtacatatctttctttttt

SEQ ID NO: 121058 - DNA, 1049 bp, Homo sapiens
ccacatatgggattgccactagcttcttctgccaatatcaaaataccttctcagatgctttagaaacatgcaacaccaactccttttctaccctcctctccgtccatacctacaaggccaaggacaaacgccatcttcatccttcttagaaagagatctattaccccattaggggagacagagagagtgaatggaggagtaccgagctggctatggacttgggtgtctggcaaacacagcttcagtctcactacttctgacactctggttattgggcactaagggccagactggaaagtcacttgagacacattctcagtttgttgcagtgccaggaatgctgcgctgctgctgctgcgcacctggcccatgctgtccctggcttccatgccgtccaggccctgccagaaaaggaaattggcatgcaattctaaactgcagtgactgggatgggaggggaggggagcagtgttgatgccaaaatacccacggggtctaccagccatggggtttgcttgcttaggagtagttgtttcagaggtgattacaggcctgggtttgactgtgcttaccaatgagtggtttttgagctatgagaaagtggatgggagtgggaggaggagagatgggtgaagacaaaagagttctttatgagcctcgatgttccctggtaaacttttaaaaaggccttctctcatgatctaagtcttggactggtggcatcatgtaactgctaaccttacagtaaaaacccaagaatgggtcaaaaatgtcttcccagtttctccaagctgcttctggaatgcaggtctgtcggctgggtgctctccagcagctgctcctgcctgattcaactgtagcctgtaatgggtaaaagccacatttaggaggtggtctgatcatagaacaccttaggaagaaagtccatgagactttctgactaggaaaccatgtggtttgaacttgaagaaaaatgtagacccatctgggttaattttcctacaatctgactcaactgccaggtgaaaaaaaaaaggaaaaatttttaa

SEQ ID NO: 121059 - DNA, 1082 bp, Homo sapiens
ttggattgaagatatttgaaagcagatgcattgatctttacttccacatttcctacaactctttttgtaaagctaagcatttcgaggtgcaaatgagagtttcagagcttgattgattgttgaataaagtcttgcctaccatagtgatcatatttataaaatattaaacatgctaatggttcccttttgtccaaaatgtattttgctcagttactttaaaatagatgtgagaacttcatagtttgcaatggcaatgtagacattagaatttcagaaattttcctcttatgaacaattagatgttttctgctcatatggccttataaaatctcccccatctctgaagatttggaaaacaggtcatgcccagtgtgcttcaggaccaactggagttttccagttttctaattgctagcatctgtttcctacaagaatcactggaccagaactgctttcttggttattgatgggaaacctctcctcaaatatctcaaaatgcttttcagacctctgcccagttagcttgtgtttgtgtgtctgtgtgtgtgtgcacacacaggcacacatatgcacacacacacagatgcacatatagaccatgtattctcaaggcaggggggtaattatcaccccaaaagtaataaaattggttcatatggggtacaaaattacactctttttatataaggcataaatatatacatacagcccttaaatagatatacagtgtatctgtggtattaagtctatataaggggtgattagggaaaacatgtttacaaagcgtccttgagggaggtgataatgaaaatagggtggagaaacactgatacagacttacagcagatatactggagtgtaaatacacaggtatttctgcattcacatacaggccacccatgcatatgatgcatatgtatctgttaggcataaacacacgctatgtagtttacccagggaattgaattcacagtggggcaggactgaattctgtggtctttctaaaattctcttcaataaagaatctctccgtgaaggatttgttttcactttcaggatccccattaaaatatttttttaaa

SEQ ID NO: 121060 - DNA, 1140 bp, Homo sapiens
ttcacatattttctctttacagtaggcaaccacggttacgataatgcgttagcagatatgcatccaatatttttagcccatggtcctgccttcagaaagaatttctcaaaagaagccatgaactccacagatttgtacccactactatgccacctcctcaatatcaccgccatgccacacaatggatcattctggaatgtccaggatctgctcaattcagcaatgccaagggtggtcccttatacacagagtactatactcctccctggtagtgttaaaccagcagaatatgaccaagaggggtcatacccttatttcataggggtctctcttggcagcattatagtgattgtattttttgtaattttcattaagcatttaattcacagtcaaatacctgccttacaagatatgcatgctgaaatagctcaaccattattacaagcctaatgttactttgaagtggatttgcatattgaagtggagattccataattatgtcagtgtttaaaggtttcaaattctgggaaaccagttccaaacatttgcagaaaccattaagcagttacatatttaggtatacacacacacacacacacacatacacacacacggaccaaaatacttacacctgcaaaggaataaagatgtgagagtatgtctccattgttcactgtagcatagggatagataagatcctgctttatttggacttggcgcagataatgtatatatttagcaactttgcactatgtaaagtaccttatgtattgcactttaaatttctctcctgatgggtactttaatttgaaatgcactttatgcacagttatgtcttataacttgattgaaaatgacaactttttgcacccatgtcacagaatacttgttacgcattgttcaaactgaaggaaatttctaataatcccgaataatgaacgtagaaatctatctccataaattgagagaagaagaaggtgataagtgttgaaaattaaatgtgataacctttgaaccttgaattttggagatgtattcccaacagcagaatgcaactgtgggcatttcttgtcttatttctttccagagaacgtggttttcatttatttttccctcaaaagagagtcaaatactgacaga

SEQ ID NO: 121061 - DNA, 1054 bp, Homo sapiens
aaaacttggactgggattctttcacaacacaacacaagatctcttggtgtattattatagcctgcattatcagtgcatctaatagaattgatttcatcttctatgactttactgtgcctttgggtattgactaagaaaatctcagcctacctttcctagaacaggacacataacccatgagcaaacttaataatagcaacaatgtattgagcactgactatttgtcaggcactatagaaagcacttttattcattcattcagcaaatatacattgaatgccttctatggtcacggcctcagattaggctctgcagatatagggatgtataatcccattggatacaaaagcctatgtagtgctggcctttattctcctcagttcctttttccccaaaaaggatgatgctgttatgacctctaaagaggcttcctttgctgacgtagggcatgtgagaaggaagtctagtctccagagtgagacatcctggagagaactctctacttgacctctaggccacttgatagtgtgaccttgagcaaggatccttactgctctgtgcctcggtttcctcaactacaaactgatgaaaataatactgcttacctcataggttggtggtgatggctaaatgcattagagtatgtaaaacacttaacataatgactggcagacagaacacatgcaagtaatgtcattcattaccatcatcatcatcctcagtagtagtggactttgtacatggaattctaagttttcttgccagggaagtctaccttacttgcctctcattatatcaaactcttcccctgcagttttcaactcatctttgcacaggggcagcagtgccctcacctcagggacactcagaggtgacagaaccctacatcagaagggactggctcagtttgggagtgaggaattacaggccctcccagggagcagagatgctgcagttcttctcaggctgtgtctcttccaaacctcttttcttgtctcttccaaacctcttttcttgtctcttccaaactcttccaaacctctctagataagtg

SEQ ID NO: 121062 - DNA, 1047 bp, Homo sapiens
accagcaacagcaccagctgggaacttgttagaaatgcaaattcttatgccttacactagatccgatgattcagaacctccacaggtgaggcccagaagtttgtgttttaattctgatgtgctcaagtttgggaactaactacatgagaactaactatagaatggaataaactgtgggactctaaacacagcaggattttctagctgtaatagtcccccagacgtcacctagtttagtggttctccaccctggctgcatattggaatcacctggcagctttaaacgacaccaatgcttaggtcccaaccctggatgttagaatttaattggcccagggtgtagcctgggcattgggatttttcttatctcccaggtgattctaaagtacagccagagctgaggaccactgatcaagaccagccctagcagcatatttaaatcacctgcaaactctaacaatacctacctctcctatctcagaccaattgaaactaaatctcatggggcctgagcatctgtaagttgtcaaaagtcctcttccctgatacatggggaggttgagagtcactcatcaagtgtagcgctctcactttatagatgaagaaacatggaaaattcttccccaaaagcccatgatcagggcttagttcctgctgatgttccccctcctcctgggcattcatattttaactgaggacattttaaataagagtagggatgggagactctcaggcccttccaccacctttggagatatctgggggcctggtgtcttcccctcccctgccactgtccctgctctgagcaagctgtcccagggaagccctggggaagtgtgctcatgatagtgagcaggaggcctccagcatgatcattactggagtgtatttttcattgatttgataaattctgttttactccatgggatttacaaaagtaggagaaaggatttctgcagcagggtctaattctgctttaaaatgccacaaccatctttcctaggaccacagaagtgcttttgcttagataaatgtcattctagacct

SEQ ID NO: 121063 - DNA, 1058 bp, Homo sapiens
aagtaggcacataaattataactcaaggaactaatcataggtgttcacattttatgtagttccaaactgtaatttaattttttcagcttctgattgtagaaaatgagcaagaagacatcagcagagataggagaataaattaaaatatctttttttaaaaaaattcttacatcagtctaaatatatcttcactagaatacagttaccaaagtatagtctgataattcctgggggttactaagatcctttcagggatctgtgaagttaaccacaatattaaaagtggtaaaatgttacctctttttaggtacaaggatgtttttgcctttttcacttatattctcacataggtgcacagtggagttttctagaggctgcatgatgtgtggtgatgtcattgctctgaggactaatggaatgagcttttgtgcattcctgtgctttaaaactttgctcaaatttttaatacagtaaatacacactgatataatccacataaatgaaagaactttggtgtcctcaataatttttaaaagcataatggatctctaagaccacaaagtttcagagccactgctctagaataagatcgctcctggtggatgacaggatcatcttgcaagagctgttgacatccagcctgttgaagaaaggggaccacatgcatgcctgaggagtctaattttctctgtcaagatcattacttggtatgtattatacaattatttgttcctggctagaacaaaagctccatgagggtaagggctttttgactgctttgttcaccactctatgcccagggcttataacagtatctagcacgcccccaatatgcatttgtttaaatttgaaagcattgattaaaatctaagacattgaaatatttaactgtttactatgtgctaaccttgttatatatattatctatagtattcccagaatccctgggtggaagatacattatctccattctgtttaaggaagtgaagtaacttgtcccaggtcacacagtctgtcaggggcagcctaaggactcacacattgccgcctctgctcca

SEQ ID NO: 121064 - DNA, 1005 bp, Homo sapiens
tttttaataactcttagaacctacagctaatagcctctcttagttgcctgtctgttgtttcctattttgtattcttgatacacatgtgctgggaatctgctattgtacatacctttgaagaaaccaatttgctattgtacataactttgaagaaaccaatcttttatttctcagtgagaatgtataaaagtgaaatcacacctatggaaaatccacattcccgatgagaaggcaaatcttaaaattgggaggactaggaggattgaattaaattataaaagtgagtgcattttcactcatatattcctcttatttccctcttcattctcctcctaagcaatctcatccaaacctttaattgccacctgtacactaacaactatgaacattctacccctgatccaagcagcctctctgaggtaggtaactgatgtctcctcttgatgtctcatgatatagaaagccatctgctaaccaggtctccttccattatttcttgtattcctgaaccaaaccaccctacatccagtttttccactcagaagctctccttctccctcacccaatcattctgtagctaatcctgatgatgttacgtcctaaatatctctcctatttgacagctcacttttatccctgctccaagcttcaggcatctctcatctcgactattgcagttgtctctgtcttggtctgcgactggtcctctcttgctgttcttcaatgcatttcactttgaagcttgaagtgctttagttttttggtttcaaagctcaaatatggtatgtgtaaaacccacccaaagcttcccattcctttcaggatgaaggtcagtattcttagcctggccttcaaggtcaacctacctcaaggcttttccttcactcctgagtcttctgtctccagccatgctaactttctctccttctttgagtttacaactgttgtcatattcccagggtctttgcatgtgctgatttatctgccatatacactgccagccgc

SEQ ID NO: 121065 - DNA, 1036 bp, Homo sapiens
ctctggaggttaaatctgttttgttttgttttttttccctgaacagtgactgagacccataattagttactgctaatcacttgggggcacctgccagatgagaggcccagtgtggggcagatttgaacgctgctgtaggacattttatgaaaccttaacctttcttaaagtgactaaaatattccagaggcatatttagtatcttgcttctccacagtactgagtgacccccggggcccaagagcctgacaagctactctaaaagtcccacttaactacctgaaaataattgagacagtagagagaattaaacctgatggatagagttgagagtatttggattctgtgccaaaaagtgggtaaacatatattcttgatgacacttggtgaaagatgactgccatattccatttattctggtatgatattaaatagggacatggagcttttttttctccctatttgcaaaaatgagtacttggaacccacttcatatggtttccatcagagctgcttctagtctatacagtgactgtgaattattaaaatgagcagaagcagtcttaaggcatactgcctggggaaaggaagtgactttgtaaaaataatgtcttgccctctaggctgatgggctgcgtgcagccctgaacagggtgccttggtggtggtggaggggtaggctagatttcatctgccactcacttcctgggccaggagcccctgagaagtacacaaagacacaaccatcgtgggggccatgaaaatttcaaagtacttcaaattttaaaagatgtaaattcaaaggtaactcttgagttctgttgcctaagaacattacttttttcagaggcagtttcagagatagaacccagggttaggatgagctttatcattattattttctttagtctcaacagctgaggatgtcatgggcttcaccctgcctgtcttgacttccttgaatctagtctcagtttggtgggcatgaaattcttgattgacttggtgataaccagagaaagtcagagttttgatg

SEQ ID NO: 121066 - DNA, 1040 bp, Homo sapiens
aatcagaaagtgtcctacctcagcaagatttttttttctttttttactcttccttttgtggacagtctttaggataccaaataatctgacatggatttaattttgacttaattatatctatatagtttaaggtgacaaaacaagataatcagataccagataagttgacaatagccaggaggcatgattgctgggactccagaaaaaaaagtggggagtcttgtggcatctcattttcactgcatatttctcttccagacccagaaattcatatttctttcatttaacctcctttttaaaaaactattatgataaaatcacttattttaagacattaagtatcatactccattctgtcagaatattctttccacaaggtttaggtttcgtgaatctgagccatgaagtctgatgatgggtattttccacaaagggtggacattttaggcactgtgataagttggtggggagatatttttaggcagggggaaaagaagcaaaaagcatttccagcactccttgtattggcctatgggcaaggctggccatggtaattgtttttatatttggctttgggaagatgtattcagcagcctggaattatagcagggggtggagacatcagaaatgatgcttagccttcatttccaaggtttacgagggtcggtggtttcatatgtaatttgttttggcagagtcttttcttttttggcacagcctgcttctgaaatcattgtgtcttgatattgatgcatttaagtttagcctttgtcttgcaattattataaagtatacatttaacttccatagttgggtaggaattaaaccttttgctttctatcacaaatgagtcttgcagcattctcttctctattttcctacatgtctgagataccttttcatttttgaggaaatttatgaattgaacttctcataatataggtaacagcacaggatgtgatctggatctgtttatttctgtatcactttgttctgtgcaaaatgataaatattctgatatgctcatttctgctgtccta

SEQ ID NO: 121067 - DNA, 1064 bp, Homo sapiens
tgataactctgtgacaataatgatatccagcagaatcagatgtcttctaaaggtctcttcctccgggtttaatcatatgtataaacatttgtcaggaaagaaattagagagttttggaaagattaattccttgtgtagaaagccagtaatgtctctaacatccagatttattgggggaaaagaaattttttcacttattcatacaacatttattaaatggctacttctgtgtaacagatgttgaacagatatctttatgtttcaggtggctagtctttaaggtaggaaacatattgtctttactttaggtcttttaatgtttaaaaagtgctatcatgttatttgaaaatcttggatgaaaattatcttcacatgtttgcgaaaaaatgaaatggtcgcaaaccctcccttctccaggcttccttcttcattaaaatgagtcaaatgcaattgtctatgtcttcattgccattaacgttctaacatttaaataaactgtcatcttgttgttggtgatgttttctggggggaaaaggttgtttgttttttgttttaattaatttcttttgccttacaaatatcttttcctcctaatagggtcttcacccaaactcataccaaatattcaagctgcactgctgcttgtttctcattgtaatgatatgagctggaggtttgaagctggaggtttcatacactggaggtttgaaactcatttacacacttaacagtagaagatgatggccacctctgcagtgccaacttcctctgccattggcttgctcttgataagcctaacaatagtaataaatagctttcattcacatgttattggcagaggggggccttcaaaagactttcatgtagatctgtaaggtaggcaaggccatgttccttctccattctgcagtcaagaaagccacagctggctgggcatggtggctcacgcctgtaatctcaacaatttgggaggctgaggcaggcggatcacctgaggtcgggagttcgagatcaggctgaccaacatggaaaaactccgtctctactaaaaaatacaaaattag

SEQ ID NO: 121068 - DNA, 1101 bp, Homo sapiens
tctcaaagctgcagtatctctcactccctgctttctttccttttcactctgtttctctccagcactccatgccccatctgaaaaccaaaggtgaaagatgacaggataaatcttactttggctaccatagcaacgttcttgtgctttgctgcccacttttgaagtgttgccctcctgtgaaaagttattttgcataacattgctccactcttccagaggctttgggccttctttaagcttcttctaagcaatcatgagaggatggtcttctgtctccaggtggggcgtctgaacacatctcccccagtggtgcaggcattctctactatatacagagccactcattccctgttcacttttttgtttctaagaaaaatgcagtcagaggtgatgaatcttcaattgtattacataagccctggtttgagccatctatttacaaatgactcagctgtacgttttcaaaatttaaagtgctattgaaattaacctataaaatttctagactactacccatttatgaagggtgtgcttgttatctttacttgatcccagagagtctctctccacccttatccctctgcactgcgccctgtgccccagagcctgacctctgtgttccacctccatggccccctggccctctggtttccagctgggtttgaccaatgggaggtaccagcaggagatcagagaaagataacaagttggggatatttatttctctggcactctctttgtagcactactgtagattgactacatcctgcagtgaaagatgtgtcagggggccatctccacacagccgtctgttctctccagaatatccccaggttctggaaacccctcccctcctctcaactcttcaaatctagggagagtgctagaccagggttttgtactatctgttgtggttttcctgtaccctgcccatgctgtaaatagtccctttgttatactcttttcaaattatccaatttgaacatgctgtctgtttcctgtgagaccttgactaatacaatgtccaaaactcttttgctttgtgtgagtgctccaatattgcttgttttgtttaacaaatctataattcactgtagctca

SEQ ID NO: 121069 - DNA, 1037 bp, Homo sapiens
aaactttctcaccaaactgactcccctttcctctggagacaggcagcattgcatttttgtaggctcctttgcagtaaggtgtggccctgtgactgagttctgaccaataatgtggacaaaagtgatgcacaactaacttccaggactggccggcccgtaataaaagcttccatgcactgctctgttttcttcctccacataccagcaggaattatggattcagtgatggttctcaggctacaggggatggtggagaaacaaatagaaaaagtctggatccctaaatgactgtatggagaagggtcacctcctcccagcacaacccacattaaaatgtaaaaataggaaataatatacttttacaatgttaagtcactaaaatttggaagttgttagttccagcagataacttatcttgtacgtttacataagagttatataacataatttaaatgctatgttgtcatttggatcagacttaaataagcctcaacatcacttgaaaattatttctgttaccatgccatgaagaaaactaaactgagttttctcagtttggagagcaaataccataaaatgaaatgaagacaaattaatttagacctgtttaaaactttaattgatttgatttactctagcttattcaccaataaatggaatgtggtgaaatgatcgtcatgtatctttcagatttttatgttctatttacatgggttttcaagagctttgttccaacgagcttgttttgtgattctgagctccttcagaaagtagtttcatatttaatacatcatgtttgattgttgctaagcatccttttggtgcaaattaataacaacacaagcactagcttcaaaagccaaatacaggatggggctggagcaaaggatgctagactgactgccctctgacttgcaaaaccaggagatttcacatgtgaatctctgtaacaatttgtttttcttttgttttggcttcttctccagtaaagaagaaaataagaatacaacattgtgattgtgaattgctcaatgttg

SEQ ID NO: 121070 - DNA, 1073 bp, Homo sapiens
caggagagaatagcttgaacccctgaggcagagattgcagtgagccgagatcacaccactgcacttcagcctgggcaacagagggagactctgtcttaaaataaaataaaataaaataaaatagaataaaatagaataaaatagaataaaatagaataaaatagaatagaataaaatagaataaaatagaataaaataaaaaaaatacaaaataaaaaacaaactaggtctccttcacctcagcatcagatgactattatcattgcctaacccttctccctgactgtattatctcttatttcaatccatcttactcactacatacagatgagttttccttaaataataatctgattgtcactctctcattgagattctggtgccactacctgctgaccaaactcattagcctagaactccgggccctccataatctgacaccagccttacctttctaaacatctgagaatgtcctccccagagcgtctacttgctgttccttactacagagtgtccactcctccccttgcccatgttttctgctggctctggaatgctctcactcaacaagtctacttatttaaaggttcttttgccctcatggtgtagctcaagtttcacctccatataaagtcagtgttaatcatgccaggttgtagagtgctctccagactccaaattttgtttcccttgtttctaccttcatctatatattattgtgacctcttccatctctccatgtgcattgctagcattgtgttgtgtcggtcttggtgttctcaatgcctgtgtagcattccttaatgaagtatttaaatacaaatgcagaaaatacgcaagtaccaagtatttaaaaaattttcaacatgtttctattttaatgagctttattagtagatgtgtaatgttgttcttgtaagtgtaaaagataaatctgtcataaacaatgtgcctcattattttcactgttttgacattagaagtattaagaaaacattacttacctgaacatagcttagcttgcttctgaagagcttctgtaaaaatacgaatttacaaggcccgttttcttt

SEQ ID NO: 121071 - DNA, 1081 bp, Homo sapiens
atatttccttccatataactgaatatatgtacatgtgaatcagaattatataatttcctctatgtaaccaaatatatgtatatggaaatcagaattatatagatactatattattagattttatattatttataattagatattatataattatatagatattaaaaattagattttctcacattcaattataaaaggtatatcttcaccacaatataattgtagcatcatttttagtggcccaaattctctttaaagtatatttcaaaaaaatgatttgcagctgatttttctgttatagaattacatcattccttctggtgacttgttgatgttgtctccattttggctgcatagaaatccaaagtattttcctgagcctgaattgttcaaacctgtaagttatctctttcagtatatattattctttcattttaatttctttttatttcagaagggtaaattcagaaattaattaggactatataattaagcagccatatttctctcgtaactaagaacaaagttgactacaaagtacagaacagatttgcaatatagatagtgcaacatttacaaatcagttagaaaagtttttgtagtaaacttctctaactttaaaatacattttacatgaaaccagaagggcatgttcaagtgaataagcctgtttttgatagaagacttatttcatgttcttcaggcaattgcttctgtcattggtttccaaggagtacaaaaaaatacaaataaagcaaattaaaaccgtgatctgctgtttcttagaactggaaagttacagggccgaacagaatgttaagaggtcatttagtctgttctctgcctttaggtaaaactgtcaaaaatggcatccagatgcattcattctgcatcccaagctttttctaacaggcagggatgtcagtgtcttactactaaatttattaccaagagcaattttatgacggagcctgagaccttattataaatattcttcctcttcttaggtcaattctgtggttgatttaccttatcatttacatttaccacttaacagaattttttaaaaacctttttattt

SEQ ID NO: 121072 - DNA, 1054 bp, Homo sapiens
aaggtctgaatgagttagtaaatgcctaccattccccttcttttctggcaaaacatggattatttccccaaagttattagttaaatttttaatgaatattacttcaaagctgtagaaacaattatatgtatatttatttatttacttactatgtctgcatgtatgcatgtgtgtgtgtgtgtgtgtgtgtgtgtagggggaaggggcttgaaatattaaggagctagagaagccatctctcaaagaaggacatcctttagtgattctatttgactcatgttctttttttttttttaagcccaagaaatttttgtgattaattttggaatttaagttagcattctttctgactccaacccatccttccaggcttagttgaaatttcagccctaagtgagaagagacacttgaattctcttatatgaaacttagagatatttatatccaggtattttttgtgtgtgttcttgtttccaggatcctttaaggcagtggccgtgtgtttctcattcccttcttgtctttgaggaagcaatgtggcgtagtagcaaggttgaaggctttcagtatagacagacataggtttgaaggctgctctgatactttcaagcttgtctccttgaacattttaacctctctgaggctcagttagctggcagatatctatgaggaataaatgaagtgatccaaaatatttgtgacattagatgggcaataaattagttttatttcctccctatctcttatagcacctatgcttaggctagcacataacagatatggagcaaatttacattgagtgaatcaatggctaaagtaatagaatttcaatttgttataattattaacaaatataacatatgtaatgtgttataatacacatcattatgagtatgcaatcctaaaactatgtataatgttttataaactttttttgctatttctgaacgcaagaatcatcatttcttttacttgattttcaacatcctaaggtttgccttcatcatgtttatgccaagagttaaacagatggtttctgaattttagcccaaat

SEQ ID NO: 121073 - DNA, 1082 bp, Homo sapiens
ggtcttagaacttgggtgctcaataaatggtaattctcatttctctacaaagttgttatgaggatttaataagataagcctagctggtatcaatgaatattagctctttctctccatttgtacccattctccttctgtgtgccattcctgtttgcattgcttagcattatggtcctacaagcttccgcatgaatggtgctggtgaaattggaactttcaacacttctaaagagaggcaagacttaaaaaactgttttttgtgggtttttttgttgttgttgttgttttgttttgttttgtttttttgagatggtgtctcattctatcacccaggctggagtgcaatggcgtgatctcggctcactgcaacctctgcttcccgggttcaagcgattcccctgcctcagcctcctgagcagctgggattacatgcgtgagctactgggcccggctaaaaaactgtttcttttaaaatctgtcttgcattagattagagccatgagatttgtctgtcacgtcatgttcagtgccaacagtttcctgggccaggaggttctcacattagcctaagatgctacttatattatctgaaattaaagggtaactttttaaatatacttgttttctactaaacaggaggatttaacctatccatgatgatatgtgtgggcatttttcttcctttttcttctaacagatagaaattaggaagatgttttaagtattatttatttagccttacttttataaaggcctaggttgttaaaggctttctcagtcatgatattctagtttcccttaacttgttgaaaaatttactgcataaagagaagggatagaaattctggcctcttttctcaaaggtatgttagccagtggaatatacatttcatctgatatggtcaagtaaaagtagtctaaacccttccccttctttatgtacctataatattcttctctggtttttccttaaataatattcttggaaactgattaagctatagcaaaattgagaaacaaacatcaaaacaactctcaaagtagcaacaaaacaggcactcctgtcaaagaattatttttca

SEQ ID NO: 121074 - DNA, 1099 bp, Homo sapiens
gctacttgttataatgaagatattattaggtgtcataaaagcatagaagagcagttacatctgcctacatgagtaagaaaaaactttaagaggccatctagagtggaatgatgatgcccttgaatgagcaagtagcgtttattccaaggattttgtgagtagtatactcatgtgtttcctgtgaagccttaactgtgtattttaagattacccttacattttcttgcctgttacaaaaaaataaaaagaacagttctgatgcgttatcatttgtaaatgttagttggtcctattttaagagtttattttttaattctagcatagccagccatgatcagttgtttcgtgctcttccatttttgccttttagcccctctattttttaatgtctctcctttcgaaaatgatggagaatttttacttttcattgtttttactgaaataaaattcatcagcttaaaaagatctaaaagcagattgctgaatgatatttccaggttttatttttaattgatgtgtccccctctgactcaatggcttttatacaggactattcctcgttaaaaattcatggagagaattgtgtgtggagaatggatgggaatcaaaatgtgggatggttttaagtacaaaccacttcaggaacctgaagcatcatttaacaaaccagcgagaaaacaaaacttattttgaaagacataatctgtgtaatatggagaaatctattaagatttttcaggtttcatatgtcaataaaatattgcttgaagtctatgcaagctacttctgttctagggaaactgtcagcaagatactaacttttccaaaaaccagtggtaagatttaatattcacttcccttccccacattgttttctcttggaaaaggtatactaaggttttgtgtcaggtggtggtcattgaaaagtcttatataatgtaagtaatgttcatgaacttgtctgaatgttattattttaattattcaggacgttttctgtataaggttatgagctctatcttccttatgtaggccgtttagcttaactgtattaaggtaaaaggtctgtatctaatttaaaacttaaaaccaaaaaatt

SEQ ID NO: 121075 - DNA, 1465 bp, Homo sapiens
taggtttagaaattcaagcaatcaaaaattaacacaatatattataatacaattatatataatgtaatattatatgtatctttttaattgagtacctacatcatgcaaagccctatactgaggactcagctttgaataagaaactataagtgataaatgttatgggaagagtgcataatgctatggaaatatatagcaaataagcacagcctaagctggcaattgagtaaacctccctggagaatggacttctgaatttagatttgcaaaatgagtatgacttagccaggaaagagggcaggaaaaaaaacattctctatagagggacagttggagtggacagagagcagggtgagttcaaggaaacctagcagaccaagctacagagacctcatggagagagtcaaggggtgagaccacagagaggcagacaccacactaggaaggaccatatgagccagaagagtaatgggcaccagtttgaagaaatatgcatttttagaaaatttgttctgcctgtcgtgtggattgggaaaaggccaggagtagtgatatatgagagataatggtggcttggacaagagtatgacagtgggaatagaagatggattaaaaacatgtttaggaggtagaaagggaatagaaacatgactgattggatggggatgggagaatggttggagaagataaggaaaagtcagacttcattcccagattcctgctctgagcaactgaggatgatgatgtaatttcctaaaacggggatcatctgcagggaagatttggggataaaataaggttagtttaagacctatgaaattttggatacccataggacatccaagcagagatgtctagatgacaaactgaatatattggtctatgtcttaggagagaatacagggatggaggtttagatttgagcattttccacatatagatggtaattgaaatgttgataataaatgatatcatcaaggaatagtaggtatttgtgtattaacatgaaagtaatagccaaagcccttggcaatacctgataaaagtataccagagtttgagatgttattttggtggttttgattataccttgaaattatgtcaaaactgtggttgtttcttactggaaaggtaaattttgatttggcctgcataaaccaggcactgttataagtgctggtaacactgaggaataacatagtctttgcactggaggagcttacaatgagatgtagaagttaaacatgtaagtagttaaaattacagaaataataaaaattactaaataaatactactgaatcacttggtatatggccaacactgtgctaatcattttcatgacttaactcgttgaatttccccaacaatctgtgcagcaggttactatcatatccctcttttatagagaaggaaacaaaaagcatcaaaagtctaaatagcttggccaggtgagtggttcagggc

SEQ ID NO: 121076 - DNA, 1016 bp, Homo sapiens
actcaatatcaagactctgtgggaaataaaaatagtcaagtgtttccattaacaacagaaaagaaagaagaaatttctgctgagacacccttgaaaacagcaagagtagaagctactctttcagagagaaaaataggagattcatgtgacaaagatttgcctctgaaattttgtgagttcccacagaagactataatgcctggatttaaaacaactgtatatgtttctcatataaatgacctttcagacttttatgttcaactaatagaagatgaagctgaaattagtcatctttcagagagattaaacagtgttaaaacaaggcccgaatattatgtaggtccacctttgcaaagaggagatatgatatgtgctgttttcccagaagataatttatggtatcgtgctgtgatcaaggagcaacaacccaatgaccttctctctgtgcagtttatagattatggcaatgtttctgtggttcatactaacaaaataggtaggcttgaccttgttaatgcaatattgccggggttgtgcattcattgctccttgcagggatttgaggttcctgacaataaaaattctaagaaaatgatgcattacttttcccaacggaccagcgaggctgcaataagatgtgaatttgttaaatttcaagacagatgggaagttattcttgctgatgaacatgggatcatagcagatgatatgattagcaggtatgctctcagtgaaaaatctcaagtagaactttctacccaagtaattaaaagtgccagttcaaagtctgttaacaaatcagacattgacacttcagtatttcttaactggtataatccagaaaaaaaaatgataagagcttatgccactgtgatagatggacctgagtacttttggtgtcagtttgctgatacggagaaacttcagtgtttagaagtagaagtacagactgctggagaacaggtagcagacaggagaaattgtatcccatgtccttatattggagatccttgtat

SEQ ID NO: 121077 - DNA, 1052 bp, Homo sapiens
cgcagggcattgccaactatagatgctcggagtaattcagtgtattcagagaacacggtgaaacaaggaaaaccggcctgactggggggtgaattcagcagggagtaaatctgatcggcatcaggtctgcggaaaggagctggtgagcacgacaccacccaggcattgcctggctctctccgcggcgggctaagttaaccgcgggtccaggtgcgggccatggtcttggggagggtgctgggtgcgctcgagcaggctagcgtcgggagccgccgctgctagtgagaggccggggccacacacgctcctccccggtacctcctccagcatcaccaggggaggagagggtcggggccacaaggccgcgctaggcggacccaggacacagcccgcgcgcagcccacccgcccgccgcctgccagagctgctcggcccgcagccagggggacagcggctggtcggaggctcgcagtgctgtcggcgagaagcagtcgggtttggagcgcttgggtcgcgttggtgcgcggtggaacgcgcccagggaccccagttcccgcgagcagctccgcgccgcgcctgagtgaggaggggccccgggggcgaggcgggagtgggaggaagggcacggtcgccgcgctggaggtcgggaccccggagcggcgaccggccggggtgggctcgctgagtcgcacccgctctgctggccggtcctgggctcacagtccctgcagccctcggaaacagcgctaggatccttgcggggagagggagaggatgacggtattagacaccagttcttccaaaccttttcccgaaaggaagcaaccctaagagctcagagctggggggagaatcaggacaggcagggaacacatggagttttcttttcttttttttctctctctctctctttctttcgttccttctttctttcttttgaggcggagtctcattttgtcgccaggctggagtgcagaggcgcgatctcgactcactgcaacctctgtctcccgggttcaagcaattctcctgcctcaacttcccgagtagct

SEQ ID NO: 121078 - DNA, 1033 bp, Homo sapiens
taagggccatattgtaagatttccatgttaatgatctaatataatcactcagtgcaacattgagaatttttttttaatggctcaaaaatggaaactgaaagcaagtcatggggaatgaatactttgggcagtatcttcctgatgtcttcttagctaagaggaggaaaaaaaggctgaaaaaatagggaggaaattccttcatcagaacgacttcaagtggataacaatatttataagaaatgaatggaaggaaatatgatcctcctgagactaactttgtatgttaaggtttgaactaagtgaatgtatctgcagaggaagtattacaaagatatgtcattagatccaagtgctgattaaatttttatagtttatcagaaaagccttatattttagtttgttccacattttgaaagcaaaaaatatatatttgatatacccttcaattgccaaatttgatatgttgcactgaagacagaccctgtcatatatttaatggcttcaagcaggtacttctctgtgcattatagaatagattttaataatcttatagcattgtatattattattgctgttgtcactgttattattattgtggatactggcccttggtgtgttgcatagctccctatgtattctctgtttccatctttaagttcccagaccaatatacattaagagttttgcatggtctaaattgtgtttattccaaccacgtggaaagctcctggaaagaaattttacattcggttgttctgtgctcctaatgacacttgaccttgttgaacaaatggcagagcctttcccaaggatttgattgtttgtgaattatctgcatgtgtgcttttttttggtgtgtatttcattaaaaaatataaatatttatgaaaattgcacgcatattagagttaaccatgtactattgatacagcaacgctacattgcaaataaaagtccgatcccaaaaggagaatgagacaaaaatagagttgtggggctactcaggatgtgtgggccgtgtggcaacataaat

SEQ ID NO: 121079 - DNA, 1318 bp, Homo sapiens
cagctccaaaaatcccatcttagcatctggtttctcaaactattcctggcactgactatcacaggctgggttcctaggaagcaaacttagtgatagagagtcatactcaggaaatgtgttacagattgctcttgcagttcatacctgtggaagaggagaggaagcagggctgggtagagaaagaagttgggctgtattgcaggttcaacaaagcttcaggggactccttgaaaagctctgaatgtgagatggccaaacacaattgtgcagaatctggccggccttttcagctttttaccactagtcactggatacaggctgacccaggaagggggtcttgaatttgggtgaggtgaccctctttaaataattctgaagagaattgataggtgaaggctctgtggacaatactctctgcagctgggggaatagagtcttttggtgctagctgggcacctaggtggcccatctcagcaccctctacagctgctctctttatagtataaggatgtgggataattaacacaggcaagaaaccgtagaggactaactttatttttcttttagttttttttttaattgacatataatacttgtagatatgcatggggtacattgtgatatctctctatataatatatagtgatcagatcagggtaattagcatatccatcatctcaaacacttataatttcttgttttgggaatattccataagagcaccaactttagacagctgaccctggaaggctgtgtgcccacaaaaggagtgtttggttcagagaaattgcgtgagctaaatagagtgcaggtcactgagtctgacagaggtcaaggctagatgtggggagagcactgcatggaggctcaggagacagagactggggcctttcctttctcaactactgaatgactggtaaagttgatttacctctctgaccctcagtttcctcttccagaaatgaaggtgatggaccagtcattgcttgtgtctagaatacataaagatttctcaaaactcaacaattaaattaaaaattcaaaaattagaaaaggggcaaaaggcaagcagacatctcaccaaagaggatatacagatggcaaaataagtacacaaaacgtcaaagttcaacgtcattagtcatgatagaaatgcaaaataaaactacagtgagatatcactacacaactgtcagaatagctaaatttaaaaccaaatagtgataacaccaaatgctggtaaggacgtgaggaaactgaatcatccatatattgctagtgaaaatgtcttggttcagccactctaaaaccagtttgg

SEQ ID NO: 121080 - DNA, 1863 bp, Homo sapiens
attaatgataactcagcaagccattcaagcaagaccttgtctgatctctaccaggcaaatcttgtttgctatcttacacgtgcaacacaagtaaaaactcttgtgttgtttcgaatgtgccagaggatcactcactctctcactgtaatggaggatggagaataataggctgggggggacatagatgtctctctctctaggaccctgctctccttcctccaggccttgccagtacagtcaccttacagctgtctttgcttccctctcttctctgcagaaaagaaggacacagtgttgcggcaggtacgcctggacccctgtgacttgcagcctatctttgatgacatgctccactttctaaatcctgaggagctgcgggtgattgaagagattccccaggctgaggacaaactagaccggctattcgaaattattggagtcaagagccaggaagccagccagaccctcctggactctgtttatagccatcttcctgacctgctgtagaacatagggatactgcattctggaaattactcaatttagtggcagggtggttttttaattttcttctgtttctgatttttgttgtttggggtgtgtgtgtgtgtttgtgtgtgtgtgtgtgtgtgtgtgtgtgtgtgtgtttaacagagaatatggccagtgcttgagttctttctccttctctctctctcttttttttttaaataactcttctgggaagttggtttataagcctttgccaggtgtaactgttgtgaaatacccaccactaaagttttttaagttccatattttctccattttgccttcttatgtattttcaagattattctgtgcactttaaatttacttaacttaccataaatgcagtgtgacttttcccacacactggattgtgaggctcttaacttcttaaaagtataatggcatcttgtgaatcctataagcagtctttatgtctcttaacattcacacctactttttaaaaacaaatattattactatttttattattgtttgtcctttataaattttcttaaagattaagaaaatttaagaccccattgagttactgtaatgcaattcaactttgagttatcttttaaatatgtcttgtatagttcatattcatggctgaaacttgaccacactattgctgattgtatggttttcacctggacaccgtgtagaatgcttgattacttgtactcttcttatgctaatatgctctgggctggagaaatgaaatcctcaagccatcaggatttgctatttaagtggcttgacaactgggccaccaaagaacttgaacttcaccttttaggatttgagctgttctggaacacattgctgcactttggaaagtcaaaatcaagtgccagtggcgccctttccatagagaatttgcccagctttgctttaaaagatgtcttgttttttatatacacataatcaataggtccaatctgctctcaaggccttggtcctggtgggattccttcaccaattactttaattaaaaatggctgcaactgtaagaacccttgtctgatatatttgcaactatgctcccatttacaaatgtaccttctaatgctcagttgccaggttccaatgcaaaggtggcgtggactccctttgtgtgggtggggtttgtgggtagtggtgaaggaccgatatcagaaaaatgccttcaagtgtactaatttattaataaacattaggtgtttgttacttaagtagtccgagtatatttaatcgttgaatttcttgctttgtacatgtcctctagttgtgactctttgattagtcttttgcaaaagtatgtgtgctctaaaaacctcagctattctaatc

SEQ ID NO: 121081 - DNA, 1422 bp, Homo sapiens
ggggaacttctggggtggtgaggagaagaggacattataaagggattgctgacacacatagaaccaggaacatttagtgatgcttgtgtttaaagttgtcattgcgcacaaaggagcaatgtttataaataggctttagatttttaatgacatttcaggctgttctatttattatcatagtccaaagtttcattcagttagttgacaaccttttgtcaaacaccagctgtgagcctggtactggataaagaagaaaagtggtcaatgcctttcaataactcacttgtggtgatggagacacgtgtgcaaataattataattcagtgggataagcaaatgttataatagaagtgtgcatgaggaattataagcatcagggtgaagaagtactcaacctgccaaaaaaatacatagaaagctagagcagatatatatttgtccatttgaaagtcacttaaaaaaatcagactagttttttttcaagactatattttggtcttctttcctgaaactttcacatttggtttctgcctaggaagccccacctgctttttcatattaagggcttctcaaatctttgactctgcaaagaacgtctgttttacttacatccttgttttgctcagtagcaagctttttagaaacccttaactgttctgtaatatttaaggtatagaaataaggttttaatatcccagttcatgtcacgtgctagatattgaactttgaatctccaggaactactagaaggaactgacaaattcaagaatttgactttgtctctctgaattgggtttgaattttgcttttgccactcactatgtgaccttgggcaagtcctatacagtctccaagctttgtaagtgctttgtaaagatcttgctgagaaatagaggtgagtgtaaatgcccagtcctgcacttgacatagagcagggggctcagtaaatcttagcaactattttctgtgttggaatttgaattctacattgtcctttttttgacttgacagcaaatgcattatgttttcagtaaatgcacattaagttgaaatcagcatttgctaaatatctgttgtgtcccaaacactgtctgggtgctctatagctggtttatttagcaagcttcatggtcctgagaagtataggtgggtatattctcattaagatagtgatatggtttgggtctgtgtccctgcccaaacctcatgttgaattgtaattcccaatgttggaggtggggcctggtgggaggtgactggatcatgtgggcagatttcctgctttggcactgttcttgcaatagagttctcacgagatctgattgtgtgaaagcatgtggcacctccccctatcaccactgctctgaccatgtaagacatgcctgcttcccctttgccttctgccatgattataagtttcct

SEQ ID NO: 121082 - DNA, 1035 bp, Homo sapiens
cattcattaaagcagagctgccttatgtaagaagcttcccttacaagccctcatttgttttttattttttctctggtgtaggtatcgatatcctgaagcttgtagcagcccaagtgggaagccagtggaaagatatctatcagtttctttgcaatgccagtgagagggaggttgctgctttctccaatgggtacacagccgaccacgagcgggcctacgcagctctgcagcactggaccatccggggccccgaggccagcctcgcccagctaattagcgccctgcgccagcaccggagaaacgatgttgtggagaagattcgtgggctgatggaagacaccacccaggtaatggagcccttgttgtgtgtcattaccaccgacctattgcccctatgcttcaaattttatcagttgtatgggaacaaagaaaaataacatattcggtggataggcacacacacacacacacgcatacgcctgcacacacacacacacaccctaccttctaggacgggggttctcagtggccgtctattagaatcatctagaaaactttaaaaaaaaatactgatgctcagaccctacctgcagaccagtcacatcagaatctccagggggcagagcgtgaatcggtatttgtaaaagctctctttgttactccatttacaatccattttgcatgacacactttgaacaaaaccaagaaaaaatactttttactacaccgcctctcctccagagggtgtttttgtgatgtggcttatgaaggcagcattcttgcctcctgaggatgcaggtggtgctagcggcagttgatgacagaactgattctcctccttgggttgttccgtggagcacatcagatgggaactgaggggacccaggagtgtgatttctttatagctaataagccctggctttggagccagacagcgctggatttgaatcctggctctggtacatattagcttaggtgatgaagggtaagttacttcaactttccttgcctctgttattcacattttcaagtctg

SEQ ID NO: 121083 - DNA, 1011 bp, Homo sapiens
ggggttgttaaacttaaaccttttaaactctgtaattacttcgtaaaggccgtgtatttgcatctgaaatgcattgagccttaagtttagtcctctgtgtatggagctttcataatgatgggaacacttccaaaaataaagtaactctatagaaaatgttaatcagcttatccgcagtgaccctagtgagtttctccattgtacacatgaggaaatggacatgacagttagaggtttgcccaaagccactgtcatcggcattatgaagatttaagcaatggtcctacttaccagaaaacatggtcatgttttcatgtaagacactgtggaccttagtcaaattgatctaaattaagattcagggactaacaagacttttggtgtttggaagagtctaccacatcaatcacaaagagctggcttattccttaaagttacctgcagggtttaaaatcagttatgggttttctgaggagtctatttgcttgaaatcaaaagctctgtatctgactaaacattgctcggaaaactgaaaaggacttggttcaagtaacttcacactgccagggaaaactgtgtgagaagtacagtaatgactcaatttgtggcatcctttttaaattttttgtggcattctactttttttgagatagagtctccctctctcacccaggctggagtgcagttgtgtaatcttggctcactgcaacctcccctctggggctcaagcaatcctcccacctcagtctcccaagtagctgggaatataggcctatgccaccacacccagctaatttttgtattttttgtagaaatgggttttcaccatgttgcccaggctggtctcaaactcctggactcaagcgatccacctgcctcaacctcccaaagtgctgcattacaggtgtgagccaccctgcccatccattctacttttatagttgacaggaaaacagccttctactaggaactgatttttgaaaaccattttcagtggattggtgcagaatg

SEQ ID NO: 121084 - DNA, 1032 bp, Homo sapiens
gaggttgcagtgagccaagattgcaccactgcactccagtccagcctgggtgactgagtgagactccgtctcaaaaaaaaaaaaaggcaatgtgatgttctgtgcccctgtctatcagcccttcagtgggttgagggttgtgttacttttcaatgtaaggaaaaagacacttggcatcacatccagttaaacaatttagatcaattcaacacatagctactgtcaccaatcttgacaaaaaccctgggaactccgatggggcagatgactgggcatcctgccaagcagagaggtggtctccatgtcacttactgtcatttcacattgaggttaataattggggtgggaactttcattgtcttctgagtgtggtttcttttcttttaatgaaatgcttttctaaatctttatgctatttgacagtcctacccaaggtctctttaaattgctgtaattgcaggggctggtgaactacagcccgtgggccatatccagcctactttttttgtaagtcgagttttattagaacacagccacattcatttgtggtgttggtggctgctttcatgctccaacagagctgaggagtcatgacagagactgtatggttttcaaagcctcaaatatttactgctgtccttacaggaaaagtttgctgacttctttcattctctctctttttctctttcttttagggtatcatagatttaaagaaaggaaataaaggatgcagtggctcactcctatagtcccagcactttgggaagctgaggtgggcagatcacttgaggtcaggagtttgagatcagcctggccaacatggcaaaaccccgtctctactaaaaatacaaaaattagccgggcatggtgaacacctgtagtcccaggtactagggaggctgagttgggagaatctcttgaacctaggaggcagaggctgcagtgagctgagatcacaagaaaagaaataaagtccctggggaaactgttccagtgtctattaggtggtgcaaaagttactgtggtctttgc

SEQ ID NO: 121085 - DNA, 1395 bp, Homo sapiens
agcaacttaaagaaatcttaaaatctttcaacacaaatgaaaccttcccacctttgccttgaagagacaaaggtgttcttctttatgcctcctttccttgaaccctcttagagacttgagcacctttctagctgcttttgacattctctgactttaactcagttttacttgaaaatgttcttgtccaggataaatctatatgaaagctcctctaggagagccttattattggtgagggaagggagagaagtaatacttcctgtttactgaatgcttatgatgttccaggcactgttctatggaatttatgtatattttcttgttgaattctcagaataaccttatgatgtcaggatcgtgccaattttacacattaggagcagtggcacagaaagataaagtaatttgactaaggccacaccacgagtcagtggggagcctggactggctctcaggcatgtggccttggatcctgagctgggaactagtgcatacactgcatctcactcttacccttccatcctttggagaaggaggagtggaggtgtggacagatgcttgaaacctagaccatcacaaatatactgttgcaacatatttctcctcaatttctacttgtttccctttctaggaccccatgatgaggagtgggggttgatggagagacatattcaagatatttatattcaaagaagcaatcaagattcagaaagatggggttgataatttttacttcaccctgggaggcagcatagtgcagtgaaaggtgagggctcatgcgtcagatatacctgggttttgaatatcagtcctgtctatgccatggtgccaggcctgtgtctcacctgtaatgtggatatgactcctatctcatgggatgtctatgcagattgaatgatataatatgtaacattgataaaattaccagcttggttgcccctttttctttcccacaaggccagggagatgagccatactggagcattcatggagagctggagtgaggcggagggacattatatctgattttcaactcaagtagaaatccgtctagggtcaaaatgtatgagtcacataggccagaagaagtggttgcagaggcaacaactgcactaggaactttgactataaaatgccttaaagattgaccagtacaagaagagtagaaaagaaaatcagagtgtgaggccaggtgcggtgactcacgcctataatctcagcactttgggaggctgaggcgggctgatcacttgaggtcaggagttcgagaccagcctggccaacatggtgaaaccccgtctctactaaaaaatacaaaaattagctgggcgtagtggtgcgtgcctgtagtcccagctactcaggaggctgaggcaggagaatcactggaacctg

SEQ ID NO: 121086 - DNA, 1144 bp, Homo sapiens
cctctagcagtaactatttctaagtctgctgaaggggtaagtaacaaaggagaaccatcagctatgagtgggagcaaaaaaggtggcagctgtccttgtattttctcttaaaaattgttctatgcttcctccatctcctaacagatgtcggctttcaccaggagactccatcttatgtatgggtccacctcacaggtgtacctgccatgtacctgctacaactcatctctttgccaaactggagccatagagaagagaggagggggtctgggagagctcaggttcaaatccattcagctactaaaaggctggatgatctcaggcaaggcactttctctctttggatctcatctttctttgtaaaatcaggagacttgaacccatcacagaagggccaccagattttgatcagtgtgacaatttatctgtgccttacctgagtgtgcctactgtcttcctggtgtctatcaggaaaaacactggcctgaggggtcctgcaatgtgctgtagggtggagaacactgcgctgccagtcagagggaagaggccaggctcaatgccaacctcatgccactgaaggattgtgtgctcactgcaacatgaaagagctttcccccaggcttttgaacgtgtgagggcaggttagtgaaaatttctatttaaattaggtcacagggttgggggaaaaccaagagaatgtgtaataactctgtgtgcttttagggagaatgtgagacatttttttttctttttttaaaattacactttaagcactagggtacatgtgcacaacatgcagatttgatacataggtatacatgtgccatgttggtttgctgcacctatcaactcatcatttacattaggtatttctgctaatgctatccttccccgagtccgccaccccccaacaggccccggtgggtgatgttccccaccctgtgtccaagtaatctcgttgttcagttcccacctatgagtgagaacatgcggtgtttggttttctgtccttgtgatagtttgctgagaatgatggtttccaacttcatccatgtccctgtaaaggacatgaactcatcttttttatggctgcatagtattccatggtgtatatgtgccacatttttttaatccagtctatcat

SEQ ID NO: 121087 - DNA, 1083 bp, Homo sapiens
ccactgcatcataaaatagtcaaaaggtgggagaaggaggatggacaaaataattaaatttgaactggttctctgaaaactcaaaataagaattgattagatctctgcacatatatgtgcctgctcaatatgtgaagtacaggagaagctgctgtcaagctcagctgttggatccttaaggttgcccttggttttggtgtaagaatgtgagtttagtggttcagttccatttttgccttccacatgaaggtgccattagggtctttatgaaaatgtgcaacacaatttattcttaagccccaagggtcatcttatctttgattatctggcctagcttggagatgaccagggaaaggagggaatgtatagatccccaaatatggaaaagctcttcccccctccttactcttttttctaggcatgaactcaacagaatccaactcttctgcctctgttagaccaaaggtactgagtagcatccaggaagggacagtccctgacaacacaagctcagcaagggggaaggaagacgtgaacaagaccctcccaaaccttcaggtagtcaaccaccagcaaggcccccaccacagacacatcctgaagctgctgccgtccatggaggccactgggggcgagaagtccagcacgcccatcaagggccccaagaggggacatcctagacagaacctacacaagcattttgacatcaatgagcatttgccctggatgattgtgcttttcctgctgctggtgcttgtggtgattgtggtgtgcagtatccggaaaagctcgaggactctgaaaaaggggccccggcaggatcccagtgccattgtggaaaaggcagggctgaagaaatccatgactccaacccagaaccgggagaaatggatctactactgcaatggccatggtgagccttctctcttctctccttgctcacagatctctctaccactttttccctagtccctgttttctgaaggaatgggaatgcgtagtttgtggaatctcctttgtagaccaaacactacttgatctagtcgtgttatagaaaaagagattgaccgtctcattagaagt

SEQ ID NO: 121088 - DNA, 1040 bp, Homo sapiens
tggtattttcttcctttctccctcttctctgctcctggctatgtctacctgggactgactccatgttggaaaacttttgatctggaaggaaccttaaacatctaaattattcatttgtttgacaagtttgaaactgaggcctgaagaggttaagtaacttacataaggtcacacgctgtccttgtttctcttggttcatattttatagcttgatgtgacctagtttttagatatctgatctcccctaacagaaaaattctgagtctacatgtttctattaagtccaaaaaagccagatttaattagccaccatatgaaggcctctctccaaggggtgactttggaatacacgaaatggagaaaacatctttggtataagcccactcttggtacctccactgggctcaaagccttcctcaaataaataattcatgaggttaagttacctttgggaacataagtggaggaagggacttcatgggtttccatgtgctcagggcgtggaaagatggctgtgccaggggaaggtgaggtggagctggagaaggacgggagtgtgccacagacgttgtctgtctccttggtccccggcttgatcaccaccaggttctgactcagacagtctgtgtatgctttgcatttcatcacactagaaggcacatctgagaaggtaccccgagcacactgcttacaccgcacatcctcagtctctgtccctttcttccgcacaccccaacccacaggacacaccgtatggggggcacaggtagcgttagactggaacatgccaggtgggcaagtgcattctcggtcagtcaaggcagcacaaggtaatttctcaatcattggccatgggcatggctgactacagtcatggcatttctctatgccattctcatgcctggtaaaggtccccacagggcaactgctgcagacgcgcaggcttgtgttggtacaatgctcagagacataggttcctgctggacacttgtcacaggttagcacctggccggtggcacggtcaacatggcggtatgtgc

SEQ ID NO: 121089 - DNA, 1512 bp, Homo sapiens
aacagaaaatagctgcactaagaaaagcagaacacaagcaggtacatacacattagttttaactatacataaatactataaacaaagggaattgaattgaaatgacacataaagagaattctacacccactaggttcttctagtctgacaacttacataagtttaaattgttctttcttaataactcatctatccttcagttgttgttcaaagtactgagatgtaatgctagctccaactaccctctaacttgactagaatgaatgaacagttagtttaaatcaagatccttctgaaactcattaatcatttattccttaactgttatgtgtcaggacattgagccagaaacacaatgatgaagagcatattgtctttgagaagctgaaaaacaatattagccctgagcttttcaaatgaggaaacacacacaaaccttgtctattttgttatttttccttgaccaggtctgcaaggtttaaacccaagaggagagaggagtcatggacttctacacataaaagaatagcaaagattgaatcatgatatagttaggatgtatgtcctctccaaatctcatgctgacatgtgatccacaatgttggaggtggagtcttacgggaggtgtttgggtcatgaggtggatctgtcatgaacggcttggcattgtcccattggtgataactgagttctctgttaattcctaccagagctggttgcttaaagagcctagcacttccttccctctctcttgctccctctctcaccatgtgacacaccagccgcccttccgttctgccatgactaaaagcttcctgaggccttactagaagccaaacagatgctaaatccatgcttcttgtacagcctgcagaaccatgagtgaaataaacctcttttctttataaatgacccagtcttgggtattcctttatagcatcgcaaaacggattaacaaaaatatccagctaaattattctggggacctgttaccatttgccttggaatctctttcttccttcccaacacccccacctctcctaatcctgggcaagctgacctggccgtgtataggatgaaatcaaacaatggtcttgtcccaaaggttatttgggagaccagaattccaacctgttttccaggacaaatgattaaataatttcctctcaccctttgccttttcctagtttactcagtctctacaacctacgaagcgatgtttaaaagcttacttaagcgagtgctaccagtcagtatgataaaccacacacaaacacatgacctctgacacccctcaaatcacggagttaaaccagtttctaagagacctgaaatgaaaagtgaaaaaaggaaatactaacaacagatggtacaagcccgtgcacttaccctatacaaataactaggctgacagcaaagaaaaccctaaaaggtcctcaagttctcaggataagtgagttgaaactacattgctaagcagaacccatgtcacaccgttattcactaaacaaa

SEQ ID NO: 121090 - DNA, 4206 bp, Homo sapiens
gtatgcccagcaactcaggaggctgaggtgggaggatggcttgagcccaggatgttgaggctgcagtgagctgtgaccatgccacggcactccagcttgagtgacagagtgagaccctgtctccaaaaccaaaataaaaaataagtcatcaaactcaacctaccctaaaaattgtgcactggatttgcaactaaagacctgacaatttaagtttggctactttgaaaaagataaaatttataatggggcttaggagcagtctcaagttgataaccaatacaggattccttattcttctgctagctatgctaaaaagacttcaggtaaattcatgaaatggcatgaggttcagcccttcatcctgaagggtgactggagggtgtgccaggaatcagtagagactatgttataatccccatccagggtggggaggaaatgccttttgtctttcacattcttattctgcatgcccaagtccacagcacaggctttgttaatgtataaaatgatgatctcatgatactgttccaagaagtatttatcccattgggatccttggccatgtgaacataacggacatcaggtactggagcctgggtacacgtggcagggtactcagaacactactgggggaggtgggcaagttagtggcctgcccacgtattacagttagattaaaaagtaataatcccagtaaaatgttctatttattatgtcttttaatgctcttctttcaaatatctccctttttgtgtgataatatttattgtcatcatttttgtgttatgactttttgtttgtcatgaccggctaactgcatgaaaaatagcttactataagcttataaaaatacaaatatataggtacacaatatgatataatatatacacatgtatatagcaattgtatatgtatagagagagcaattgctacatgccaggtgctttgtatacagtatctcatttattcatagcatctttgtgaagcaggtgatattgtctcctttttatagttgagaaaatggaagctcccagaacttcattggtttgtcccaggccacacagcttgcacgtgatattgctggggccagaacccaggactgcctggctcttcagctcatgtcctcccttagccctgtgccacactgcgtgtttcacaagtccaaattgcttgataatgaaatgtaacaacagagaaggctcactggggaaaagttaagaaggtggtttggtttgttacagaacgtgaatgagaattacaggaatgcctttggaaggaagtattcttgctgcttgcacttctatttctgatgagtgtctgcatgataatagaaagtaaaacatacactgaaagacaagagctgggttcaaaagtctggggctcaggtggacaaaacattcttgttgctcgacacccagtaagtctagtgtgcatgattgtgctttgtcttcagaatctaagcttaccttccaccatcttgactttaccaattgtactattctgcctgagacacttacccttgctatatcatatctctgtaaggcagagacaagatccatgagagctttaggtttgtgccagtgataaggaatgctctagaatggcttgcccagagtgacactacttagtcagagatgccccttgccctcggggagctcgctttaactgcataggtaggattttggcagtgaggccctcagaagagaagggagccataattggtaaagatatgaggtctgaagttttagaaaactcttttgcaagcattatgaattccagatagagggctatttgctgttatagcctgtccagctgtgcgtttgcctagaaagtgccaagtaatagtgtttttctctgttactgaaactagacatgtagcttagtgctacctcctgaccatcatttatcaaagtacattacctcgtacattggcaattcactttggctgtttgggcaggtgtggagtggtctggtgggggctgaagttctgaatcatgtcaagacttggtggcaaattcgagcagaactttaaattagagctgatattatatccaaaagattttctctctcctatatatcttagctctacaatcctagaatgtgaaagctggaagggagcataaaaaatactgatttaacaccctgtattttttggttgagagaaaaaaaaatactctactggggaagtgactgctttttcatgtttacaaatgaaactgcatcgagcaccctttctaagtgaggcactattctgggcagtgggaacccagggatgaattgggatttggatcttgccatgaaggtacaattcgtatggtatataaaatgagcatggccatcaccagtgctggttgggttttactcgctcatgtggaatcactggatgaatgtagtatacttaccttaatacacaaaatatgattgatgttaaaatctttaaaatacctgaagtaactttggctcttagtctgagaataagagaaaaaaaagactttcaaatctgagaatgacatacgttagcctcagtagagaaagcaacttctaatcagaggaatggggagcgcagaacctgtgctggaatgcaggagtcctgaccgaccccatgagttatcattacagtcaaaatgtgtataatggaattgagctctgtcatctgaactgtttctgaaggcatatgtttgaatcttccccaagtccagtacaaaacaaacacacctctagtgtaaataaactacacaagtaaatcaaatcagcaataaaaaaaattcctcgtaaatgggatttaaggactaccttaagttgggaagggaaaaaagggaggcttgaaaaggcatatatccaccaaattcctgcatgacatattttagtgtggctaaatgtagacaaagtctatcaagcaggatatagtaagcacagttaatgctgtatattctggggcagtttgaagacagtccttttctccaggtatgctattattgggtcagaacaaataggtgggagcttctgggctggctctggcaggtggtctttgtcctttcttcattgtagaccagaatgtggagacatcacactttaactttgcaggcaactatatccacgaagatgagaggtgaagcctctttggaggctgcatagacagtttgcaaattaattttgtgttcagctggtccttcataaagcatgtaaactctaattgccttaaataaacatcttttttttttttttggtttttttttggtgacacgaaatgatccggtgcattatcagatcattactattcaggggctggtatgaattgagtgacttttccttgtgcttattttccagaaagcactaatattctgttggctttctttccccaagcaggcctggcaaattccggtgatgccaggtcaccagcaacttcttggcaaactcaggtgcttctcttctgtgacaagaagagcccaggttatctcagagctttgggcatgtgtccagtgatcacttggagctgactcagtgtggaccattaggcaaagatatgtctgtttgacagaatgacaatgggagccataataggaatcaatttggttcccaaagttggatcctcatttagcattagcagaaggctgggccttgtggctgtagcagcaacagctgctgagctttgattatttaggataggggcgagatcatgaataaatactggccttgccccagtgtttgtgtttgtcaaataccaaaaaataaaatgggaatcctaaattggcttgcatgctgccacccagctttcttaccaccttcatttctagcctgaatccaagaggagaggagcttgggtagaggttataacccaggaggaacctggcagatatcagtgagtacaggcaggactgagggctatacagaggtggggttcactgatacttaggctgttgactcaaagcaatagtaagcaatagtgatctcagtgagatcagtgagcagtagtgatctcactgttcttgagaggtgctaaaggccaccagaagattttcttgtcagtatcctggctttggagatgacagatgtgtgcagtggtgggaaagttgcgctcagagagacctcaggcaggtgtgggactgagcagggtgtgggtggggatcagaacattgccctgtggcttcatatttaaaaattatgcctaagactttgtgctacacaaaaataaaaacaagaaaacta

SEQ ID NO: 121091 - DNA, 1009 bp, Homo sapiens
gggtgctgtcgcgcggtgcattcccgagcagggcgcaagccgccccctcctcaatccctttaccctctctcttccctcttggctcgggtggggtctcaggttctgtatgccgaaatatcacccttagacccactctccggcgcctccaaagcgccggcttccagccagccagcgcgccggcactggaatggggggagggggaaggagatgtgtgtgaaggaagatgaattttctacagtctttccgatccctcgtttacctgtggctaggcaggtgaccctgcagggtggtgcagtctccctcatcgtctaagctgcatccacatctcgggtcaatcatcttgaccaaaaacttaccctcaacttcccccaaattccctccctttatttccaaatattggggtgaaggggcaagttaggtggaagaaaatttgagatcaaacccttgagcttcccttgcctatcttttatcactgcaggagggatggaaattcttagctaaaaaccgaacaaaaaaacccccaagaaacaagagcttgttttcacgacagggctgtgtaagggaaaagcaggcttgctgtctccttccccaaaagggcttaacgcctggccagccaagaactgcttagatctcaggacattgcagttgctatggcctgggaattcatcctacagacactctggttccttgtgtgtgtgttttaagaggaagagagagactaaataaaagtttgttactgttagcatttataatgaggcaagtcccagtctcccttcagaaactcttttctgcccacttattaatggcatggccaaggtttatatctttgaaacaagtgaaacaagtgtggtggatggtaagcagtagtcggggagtctcttgggacaatgaacctggattgacagtcttggtgtggagagaaacacatctaggtccatgggaacactgatcctagttcagtggagtgagaactatcatcatttcctttttcacagctttagatccacta

SEQ ID NO: 121092 - DNA, 1418 bp, Homo sapiens
gacctgaccttccttcccttcctcatccccttgcttccctccccctcctcgtgggatgggggagggcgatcgaaaaacttgataaagtagcactttcaacttctttattttctgcgaggctttgaatacgtttaaggagagagataaatttgttcaaaaactttttttttttcctgctgaaactcgcaaggggtgcctcaaggacaggaaagcttgagtatttgttttactcgggttctacctaggcaagtgtgttggcacctaagcattcagtgtgctcccgaggactgggtttggacttcagtgttggatcctttgaggagcagtttcctgtttggagttagacttccttgccggaggagagaaaaatacaaggccttatatgttatttactatgtgctttatagttttgtttgaagttagagaaggcagaatgtgtggcagtccgggttgaaaaggagttttgttaagtggtgtaacaatttcttttgataacaaagttcggtgtgggctaggcattaaactaactccctcaatcctttaaaaattaaaagcaacttaagaatagcttacaaaaaacaaaacaccctgtgtctctataaggcagaacgtgttctgtaagagtaaacccaagtttgatttttgtagagcaaatcaggaggaccctatcactttttgcagttgagagttggtactgcttcatatcaacaaacgatcaccgaaatgaataattcatgtaattaacaaatgatttagaagcaggacgaatacagactactgctgatgtggcaccctctgtccacactttgctttgtgggggatgttttgagcatattgtttatagacactcgcctagctatcctctgttttcttagacttttctaattttatgttcccttctccacctccctcctttcaggtaactttcatactcaaaagtgctcttgagctcaaaaacagtgaaataaaacatttgctatttggaattttcaaatgaattattttataattgattagttgagcttgcagggcaattgtgggcatattcttttaagtatgaaattataaaatcactttaactgctttggattaagataatactaaagttaattacacagttcttttctgtcttaaatgggatgcagaataaaattaaactactttggatgacctggggatgcagtcttgttttgcatatagggcttttgagctaaattctaaataatatttgttcgcattttgaaattatttaaatactttttttttttgctttgcttttggatgtgcttgtaactgattagtgtcccccatcatctttccttttctaatttttttttagaagtgtggaaatcatattcaggtttgtgattctgcataggggaaaaatcagtaggccgttacttagtgtgtgaggtcgt

SEQ ID NO: 121093 - DNA, 1023 bp, Homo sapiens
acaccaatattaagaaaaagggcctgtcacaaggtcacatcatcaagcaaagaagctgctggtgagagtttaatcaatcagtattttccttaatgtgaggaatgtgattaatgtcatgttaaatgcttgggggtttaggataaataaaagttttggtgccttgagtagtttacaagtgttaaggattgggcatattattagaatcacatttttgttttaaacttctcacaacccctgggttctgacataaatgcttctgcctctccctccctccagtttttgatgaatgtcatgaatgtgttgggatggcttatgtgataggaataagacaacataataacaatgaaagttagtatgtgaatccattagaaaaataaacgagagagagagtatagggtcagtgtcagaaatgttaaaatgtagtaggagaagcatatggaatattagaatatagattcctgcactgaaggaaatgggatttattcatctctcattagtttgaccagtgatgatatactgagtactggcagtagttaaggtattttttcctccacttctggcaaagagtctttagaatgaagtaagccttctcttgagctgatcctttcagatgtgtacttttacctgaaatattaaaactgtcttatccttcttactgtcctatcagtgttccaataatgaagagtctggaaatttacctaacatctagactgactttaaaaatgtcattcctggagcatttatcacgattattgtaataataaagggccacagtgttttggattgtaaatgtagaagctcatatactgtatttgtaaaattgagactacatagtcttggttagagtgtttttgggggacatttaaagttggtcttttaaatgtatatactattctctagggattttctcattctttgtgttagaaacaacttttggtttatttagaagtacgttctcctgagatccaagttttgcatttaactttaattaaaaattcctgttgtgctgtagcaggttgcagt

SEQ ID NO: 121094 - DNA, 1028 bp, Homo sapiens
tcttctgcctcagcctcctgagtagctgggactacaggcatatgccaccacgcccggctaatttttgtatttttagtagagactgggtttcaccatattggccaggctggtctcgaactcctgacctcaggtgatccacccacctcagcctcccaaagtgctgggattacaggcgtgagccactgcccctgcaggagttaagaattttattttggaattagcaagtcaggaactgcccattgctttggggacctctacatttctcagtattcattgctctgagaaaccagcattcatccataatagctgtactagttttcctaagctattttttatttttttgtagattaacccttcagttttttgccttggaaggaaaatgccatactatttagcattttatctcgttgaattactgtggttgatatagagattgagtaatttccctgttttagccctgcatgcatttcatgtgagcctacgttttctgaatttctggtctttttgaggtctacagagcagtttggtatttcatttatagctcccttaggttctctaggcttcctcttcttggctttatcagctgtgcatcccctttcagacatttgttaaaatttcttgccgggtcccttatcatgttgggatgttttcagctgtaaatagaaatcctgtctaaaatttacttaaacgttaagaaactacttcatgtaacgaatctgaaggtattatagttaaaggtggttaatctagcagtttgatgaatccagcaaagatccaggttattttcatcttttttctcctccacgttaattaagtatccgctgtttttctggtctcaagtggttatagcaattgtaggtatcaaattctcattaaagaacatccagagtctgcaggaggccattccttccttggtttttttttttttttgagacggagtcctgccctgtcacccaggctggtgtgcagtggcacaatcttggctcactgcaacctccgcctcccggattcacgccatttctcctgcc

SEQ ID NO: 121095 - DNA, 1042 bp, Homo sapiens
tttagtagagatggggtttcaccatgttagccaggatggtcttgatctcctgaccttgtgatccgcctgcctccgcctcccaaagtgctgggattatgggcgtgagccactgagcctggcctgtgttttgtttttaaagtcaaataaaaccttcccagaagaaagaattcattcatctcagctgggcatggtggctcacgcctgtgatcctagcactttgggagggtgaggtgggaggatcgcttgagcccaggagtttgagagcaggctgagtaatatagccagaccccatctctatttaaaaaataaaaataaaaagaattccttcatctcatgcttatttgaaaaccattcactgtgtatgtttaattgtatgtgattaaggttgctatacatagactatctgtagacctttgcctctttggcagttagatatcctggcacctgctcaactgtagttggcatttaaacaaggtttttcagctgacctgattgtacttagtgtctgagaagtacatacctagactagtgaatatgtaactccctggggctgagagaatcttcgcctgtaaagtacagggtctcaaaatactgaacagaattaaggttctatgagaaaggaaggaggggaatgggcaatgtgggaatggcacttggcttaacaaacaacagtgtctggtcatactcactttcctttttttttttggtggtggtggttgtgattgttgttgtggttgttggtgtgtgtgtgtgtgtgtattttctttttagtcagtcttgtaggaggaagaaaagatgaatggggatatggctagtctgctatcttgagcaggaaagctgttattgctttttaaaaattgaaccttgtaaaatattaaaaatatgcttatgtgatcctataatctaaaatcctgttattaaaagaggtaaaataaatacatattaatcttcattttagagtttgttttctgtttttacatacaatagtaacacaaacttagtagtttagaactatatatatttattagctaatagtttctgt

SEQ ID NO: 121096 - DNA, 1391 bp, Homo sapiens
cctggcctgaactcctgagtttaagtgatctgtctgcctcggcctcccaaagtgctgggattataggagtgagacattacgccctgccatcatattctgttggttagaagtcagtcacaggtcacattggcagtcaaagagagagaattacataaggacatgaatacgaggaagtggggatcatggagaccacctcagagtctgtctgctacaaaggatatgcatgtgattgttaagagtgtctgatggcatgaattatgcattatttttcttttgaggctcccacttaatagctgtattgtactctatattaagatattcaagaaatttgctgatgtagccaaatatttaaagtaattgaaatcagccttgctgatgtctttgtggtattaaatattgttgctaaacagattccttagttttaaatttattaatatagtttacagtattttgtgaattagattttagacatttcgttttttcccccttttttagttgactatattgtggagtatgactatgatgctgtacatgatgatgaattaactattcgagttggagaaatcatcaggaatgtgaaaaagctacaggaggaagggtggctggaaggagaactaaatgggagaagaggaatgttccctgacaatttcgttaaggtaagtattttcagttaaatttctagctcttgcttcataggatttaatctttaaatgttaagaaatagatatacttttaaaattaaaatgttttagataaatgttttctttgtaacatttaagaaaatagagtccaggtacctctataatggatatcattgttgctctgtgtcctgctggatagtaatcctctatgtatgtgtttgtgtatatatgcttgtatatggttgtgtgtatctacctgattactgattgttttaaaataaataatagttttcatttgggtggcatttagtaatttataaagcaggcttgctgtatatattctcatttgagcctacagtatacttgtgaaatagttatgacagatagtagccccattttaaatatcttgatatttagattgagaggttaagtgattttgtccactgttggttagctaagacaagagactttgaactgaagtctgggacagttgcctcgctggtcttctcattatattttgttgcttttccaacaacaaaatgcatttggtcatactttttgtgtttcagcattatagcagttatctgccaaactgtcttcttcaactactaccaaacattccttttttagtaagtattctagtcgcttctgccagaaaacaatctttagggctcttatcaattacaaacttataaaattctcagtagtttagagaagaagaaaaaaagtaaagcatatctgtgtatttac

SEQ ID NO: 121097 - DNA, 1575 bp, Homo sapiens
tttcctttgtattttcgttaacaaaaactccctccgctttcttttccttgaagtattttcactgttcttagccttttgttctgtataaatttagaaacagcttattaaattgctactccaaattttttgtgtatttgaattgcattgatatattacatcaattttaagggagaactgatatatttttatgatactgagttttcagttactaaatatggcataactttgtttttgtcttcatgtcttccagtaaaattttatacttttccatgatggttcacatgtcttattttatagccatgacttagatcaggggctatcaaactaccagcccacaggacaagtctgaataccacctgtttttgtaagacccatgagctaagaatgctgagaattttataaatggttggaaaaaatcaaaaggataatatgacatataaaattatttgaaattagaattttagtgtctataaataaagttttattggaacatagttatattcattcatttaaatatctgactgcatttataccacacataggagtgttgatggttgcaacagaaagtgtatggtctgcaaattgtaaaatatttactatctggcactttatagaaagtttgtttacccctgactttgaattattgtttgtctttgtatctcagtgtttctttgtagttggggtgagtggtcggggtggggtttgagcctctctttcctttatcttcatctccagttctgataaaacttaaactcatgagtcactgttaccaaaatgtgttttattcttcagatatgtttgagcagagcaaaggttggaaactattgatattatgatttatatagtaattactgtagctattttttggtattttacatttgaggatttaatataaaaaatataacttaacttgcctctttatttattttcccttttgtaggaaattaaaagagagacggaattcaaggatgacagtttgcccatcaaacgggaaaggcatgggaatgtagcaagtcttgtacaacgaataagcacctatggacttccagctggaggaattcagccacatccacaaaccaaaaacattaagaagagtatgtaaataattcctttcctgcataattacatcaaaatagaaggatattttataactgtgtctaaattaagaaaaattagttcagtcttttgtagacaactacagtaacttcctgcaaagtctcatgttactagttattgccctgtgtagtcaatcttaatttttagtcatgtgcaatcaataacaaatcaatatcattataaattaaagcatgaggctctgttttcttatttatctttcagactctgctgaatgattaccattttaccttaactatattttaataccatttatttagtgggattctgaaatatctgctgattcttagcatagatacaagaattttgatagtgctttttcttcagttgttaaacatctgaacataaacatttccaaggtggttggccttgcaaattaccttgtaaggatttggtactgtgtaaatatgttaggggaacaacttggcaaagaaggagagc

SEQ ID NO: 121098 - DNA, 1025 bp, Homo sapiens
tgggagctaagctatgaggatgcaaaggcataagaatgacacaatggactttggggcctcgggggaagagggtgggaaggggatgagggataaaagactacaaattgggtgcagtgtatactcctcaggtgatgggtgcaccagaatctcacaaatcaccactaaagaacttacttatgtaacctaacaccaccggttccccaataacctatggaaataaaaaaaagaaaaaaaaatttaaaataattttttacatctctgcttttatcatttgaaggagtattaaagtttaatttcacagttgaaggtcatgttttcaacatgtatgttttgataccatgtattatagcacagattgattttgtgtcaaaacaccctgtaatgtaatttatcactagtgtttttatgtttatacaaacttagattgtgtttatacaaaggctgttctattttattttcacttggttgcagtaataatagttaacatttcttgagcttatgttatggttgaagcattgtgctgagagtttcacatttattatatccttgaaagttttaaaaaacctaagaagataggtatttttatccccattgtacataggaagagactaaatcaaggaagataagtggtggctgttttagttactgttgttgcataccaagccatcccaaacttggtggcaaagaataacggttgtattatgcctgtgagtcaagaattcagatggggtatagcccaaatggcttgtgtggggcccttagctggaaagattcaatggtggggtgtcctggaataataggaaggttttttcactcacatatctggtgcctagaaaccttgaagactgtaactgccaattggagagccattatgttagcctttccatttgggttgactctcttacagtgtaggcatctcaaggtcgtcggacttactatatggcagttcacggctcttaagtgcaagcatttcagcacatattagctttattgccctttacaaactagcatctgttggttacaag

SEQ ID NO: 121099 - DNA, 2293 bp, Homo sapiens
gtaaaatttgacagtgaatagtttactcttttttaaattttgtttttttttttttgagctggagtctcactatgttgcccaggatggagagcagtggcgccatctcagctcactgcaacctccgcttcccaggttcaactgattctcctgcctcagcttcccagctagatgggactacaggtgtgcaccaccacacctagtgaattttttttttttttttttttttttgtatttttagtagaggtgggatttcactatgttggccaggctggtctcaaactcctgacctcaggtgatctgcctgccttggccttccaaagcgctgggattataggcaagagccagtgaacctggcctaaaaaattgtttttaacctgtgagcactccttaatatccatatcagaaactatacatttttaaagttattaaatattaaaaatttcatagaaattgagtaatcttattggtaagtgtaaatgtttttctgaagtgtttgattcatgaggatatatctgtttggaggaaggtgtttagtggagcttgacatctgggtttttaaaagtaggaaattattatacttaagctaagaatcactgctcaagtaataggtttagcaattttctgtgccatttaggaagttatgtttattttcttttttctttttttgagacagggtctcctctgtcacctgggctggagtccagtgccacaattgggctcagcctccccagtagctgggactacaggcgcgaaccaccatgcccagctaactttcgtattttttttagagatgggatttcaccacgttgcccaggctgatctcaaactcctggtcaagcagtctgcctaccttgggctctcaaagtgctgggattacagacctgagccaccgtgcctggccaggaagttatattcttagaatcatcaaatttttttcaaataaaaaatttccaaatactttaaataatatacaaatcaagccttagtagtgtttacaagagtgacattccagaagctatgtacttcttgctgttaatacagtatatatggttatctgatactttcatgaaaagtacttcatagattgcgattgattacaaattgtcattgtaaatgtgcgaagtactgttgatgtatgattaatcccatatatgagtaatacactaaaatttaatccacttaaaatatattttcttcattgtgttttaaattttaaagggtttatttcatagtgctaattttgtgcctgtttgcttttgcagcttaattttcccatagggtgacgattttcacttaacagaagttgtttttgcttttgaattgtgaactttttcaggtagaagaaggctggtggagtggaaccctgaataacaagttgggactgtttccctcaaattttgtgaaagaattagaggtaacagatgatggtgaaactcatgaagcccaggacgattcaggtagactattttttaaaatttttaattgatttaaataaactttatatagcatctagtgttttattttgtattttttgaaactctgttctttcttttgaactttgagtcagcttcaattagtctactttaaaaaagcaaattatgatggggacctaactgaattaaatatctagtccaataatttaatatttttctttctctgatttctgctttaaccttaggtaaatctttagtaccctgagtttaaaatgattcatcttaggttatctgatttcttcctagtaaagatatatttatatgcatttttggtctgctgagtttgcaaatggcctgtttaatacttcagaaattttagaaataagaaacaaccttacttttgttattttctgtattcacataatagattttgtttattctgggcagccaaatgtcatttagttattttgtgatgttagttatttagagactcacccacaaattcttcttaatttgctcaccatttaagagtatgattgacaaaattttaccccaaagctagatttaaattttgttacttttaagaattgctgttggaattaggagagttttttttgttttccaaaagaggtcttgaatttacaagtggaaatgtagggataagaatatgtttttctcgatggaaatgtatatgtagtgagaattttcggggatttgcattagctaatattatttggcaattttatgattagttggatttataggtattaggagtagatcataaccttaaggttgccagtatcattggtttttgtttttagaaccggcttaatgcaaatatatgaaaactaaatattaaa

SEQ ID NO: 121100 - DNA, 2159 bp, Homo sapiens
tagatttctcttgtactcttctttttaacctcgcaccctaccatgattcattaacagattttgtcaaaaaatgtttagaatctattttctttttaccaccttcactgccgctatcctggtataagttatcttttgctgtataattaccatagcctatatgccattacctacttactgaatagtctggtagccagtagtgatcaccctccagtagctttgcatttcacttagactaaaagccaaaatcttttaaaatggctacaaatccctctatgatctggcatccccatatccctccctccacctttcttacctcatctcttatttaactttcccctttgttcacattggtcaccttaggtttcttaaggatgttaggaacattcctctctcacagcctttgtgcttgttgtatacctttgtctggaatcctcttcttcaagatgtcctgatggctacttgtctgattcaggattctctcagaaatcaccttatcagtgaggcccttactgacagctctgtgtaaaacagcagaaagtccccattatccactttttaattctcttctcttttttttttaacgtttcaaagaagaatttgttgctattgcttattaagcttattgtctgtctacctgctcattagaatatatatatatatatatatatacacatacacatatatatatatgtatgtatgtatttgtttactcattgtctagaatggtctctgatatgttgatgctcagtgaaacagtgaatagttttttgtggtatatgtagaacttttcaaacacttttgtcaagtgaaatcctcttgagtttttgttgttgttgttgttttggtttttgctttaagttctgggatacatatgcagaacatgcaggtttgttacataggtataagtgtgccatggtggttcctgcacctatcgacccatcctctcaattctcccttcccccgctcctcacccctcaacaggtcctggtgtgtgtttccctacctgtgtccatgtattctcattgttcaactcccactaatgagtgagaacatgcagtgtttggttttctgttcctgtgttagtttgctgaggatgatggcttccagcgtcatccatgtccctgcagaggatatgatctcattcctttttatggctgcatagtattccatagtgtatatgtaccacattttctttatccagtctatcattgatgggcatttaggttggttccatgactgcgatattgtaaatagtgctgtaaatattgtaaacatatgcatgcatgtgtctttatagtagaataaatcctcttagcttttaagaagattaatgtcactcccattttaagggtcaagaagtggaaactcctgagattatttaactactgagtggtaaaatcattagagttttgtttttctgatttcccagtttttttttttttaactttactatgctgtttaacatatggggtatggaaatttggtggtttttcactattgtagtccatttgtttgctgctatcttcatctaattttcttttaggtatgcttatagaactatcttttcatgtacgttcagctctttgagggttgtgagtagtaatatgtgcgtatactagcatttctcatgaaggcagggtattccaaaatctgaaatttaaaagtcaaagccggcaaagggaaattctagatataaatacaattgtttagttaattcagcattcatatatttattcattcaatatattgagtgccttttgttaatgtattgtacaaagtcctgggaatacagtgatcagcaacataggcatgatttaccccccttgtttgaagcttttttttccattgggaaagaaaagatgatttaaaaaagtgattgtaatttagcaggagaaatatttgttacaggaaagggtgcaataaatgtatataagtgggctaatccagacttggcaagctgtgaaggaatgtgccctagaagaagtcatagattgagatcccaaaatggctaggaaatttctaagcaagtttgtggcagagggtgaggaaaagcatagcactgcaagatcctgaaagagatttaattcagaggcattatagagtatataattagatgtgaatgttgagcctggagaaattattgggtcagacataagaaa

SEQ ID NO: 121101 - DNA, 1010 bp, Homo sapiens
aggctagtcaccaggagtcaaggtattatacagtttaccttggggtctgtaatcatatattagtattcaccttatactcctcctggtgagcagctttgcaaggaaactttttctggagttttgatgcccttactggtagtacgttgtggatctttctaagttattgctaacagccagaccttctttctatgtgtactttttaggaactatgcaatattgattgattttaagtccagttaaaacacccgcacccacacctgcatgatcgacttacaaaatccttgagaataatggtgaaagatgactttaatggtgaacttggattgattctattaaatgctttttattttcatcagatttcttttttttttttaagctttcagtgcagttcacatgtggtttcttgtttccgtttttctccaaacaagtaattgcattttgcagttcttttaagtcactttatatgaagatacaagccatcaagtagcttttgctatagagatttaatgaagaaggaggagggagggtttaggctcgatagacagatttgctgtttgttttatgactgatagcaacatacataaaatgcagatgtttttcttcaagcatagcaattcaaggacaatcagatgggtaaagtatatgggtattaaagtgttagaagtaccatatagataaggttactgttttgtctcattatggcacctcctgcatgccctttttcctcctcctttttcctttctccttgctccttatcctcttttcttctttccagtggctgttttcccttttatactttactgcttctttgtgatcagtgctctctctgtcacttaatggttctcagtgatacatcttttaaagttttaaaaaaataatagacactgagccaggcactgtttaaagcacttcacaggaataaattagtttacttctcatagcaatcctgtgaagttccccattttacaggcaaagagattgggcaaatataatggagggggcaagatatg

SEQ ID NO: 121102 - DNA, 1070 bp, Homo sapiens
gggtttcaccgtgttagccagaatggtctcgatctcctgacctcgtgatctgccagtctcagcctcccagagtgctgggattacagacgtgagccaccacaacatgctgtttttaaggacctcgtatgacatgatttcctaattaggatttcttaattttactaattaaatttacctaaaattattatcgttttgcacaataaaaaagtctgtgtaaattgcataaattgcatcttgctcttctggatatttcagtactgaatagtttaattttttttctactgtgttttattagaaggcatatagaatgtagacattatgacaggatgtcaagcgttttgtgattctaggtgtcattcttcaaaaacaaattattgtttcagaaactgttttggctgggcctacttcacctataccttctctgggaaatgtgagtgaaactgcatctggatcagttacacagccaaagaaaattcgaggaattggatttggagacatttttaaagaaggctctgtgaaacttcggacaagaacatccagtagtgaaacagaagagaaaaaaccagaaaaggtggtaatgatggacttgttagattaactccactcattctctcattaagcattttttaaaatgtaaaagtcagtttgtaactctgttagatttctttttttcagatcactaataatttggttatgaatgaggaggctgtgagaaattttgtctccaaatttacaatgattaatattcatgtttgaatctaataaaattagaatgcttatttcttggtaaatttaacacacttagtagaagctttagggtttttagttagcacagtgtaaataaaaattagagggttttttgccttttaaagctaaaattatatataaatttagttatatatataattaatataataaatatatatttaatttgaattagacctaaaatggactgtttttaaaatggatttagaaaatattaaattacttgatattttggcactacttaaatttcctctagattgtcaacattcattaaatttactaaacttctttgaatgtgtggagta

SEQ ID NO: 121103 - DNA, 1582 bp, Homo sapiens
tagcccagggatttaagttctcaagtgctgttgtttttatttattgtatttgttttattgtagtttttagagatagggtctcaccatgtcatccaggctggaatgcagtggtacaatcatagctcacttataaccttgaactcctggtttcatgcagttctcctgccttggcctccctaagtgttgggattcagacatgaaccactggttcctagcctcttatttattttagagattctaaaattaaatctcattaatatactatggacgtcagagaatattatctttgagacaaggaatctttaaattggtagctctgagctatgatttaaggaactttggagacctttacctgtttcattgctaagttttcagtcacattactatcctagctataagtaccattagggaaagctgggtaactgtaaatggaaactttgtttaacagtattatctttattctatcttaaaatagtttatgccatttttttctattctagcccttaatcctacagtcactgggacccaaaactcagagtgtggagataacaaaaacagataccgaaggtaaaattaaaggtatgtttttgaataaagctttcatattgggaatagtagaaacatactcaaatgtattaagagacttgttggaagcatttgttacactgtcttattagaatagcaaattctattagatgtaagcaccatgaggtcaaggattttgatatactttgttggttgatggatgtatctccttgtagttgaatctgtgcctggaacatcacaaacagtaaatatttgaatgaatggattaatgaaattgttacttaacatacggtattgactataagtattttaaaatttaaagataattaagttcatctctaataacttttagtatactttacacaagatagaggctaaataagtatttgttgaatgaatccatttgtgtgagccacattatttacattctttatttcagctaaagaatattgtagaacattatttgcctatgaaggtactaatgaagatgaacttacttttaaagagggggagataatccatttgataagtaaggtaaggtgtttctgtttttcagtgaattgcttaatttatttatagaaatatttttcaaaagttatacattcaccctagagtgttcttatattcaccctggaatctagaagagctgggactttgtcttgtttctaagtcctgaaaacttggcacgtaataagtgctcagaacgttctctttttgagctaacttttattgactatatttgttgtaatttacatattgggaattattgttaaccatcatatttgttcttttttaagtactttttttttaaaattaacctcaacttcccaggtttttattcttacttctcttccacctcattctattttttctcctgtctgtcgtttggagtgttgtttgtaatgtaaacagaagaaaaatagggaaacaagctaaacatccatgagtatggaaatggttctgaaactctttttactctggaaaatgatgtcaccattttaaagaatgaagtgattttataacttggaataaatcc

SEQ ID NO: 121104 - DNA, 2185 bp, Homo sapiens
ggtctcaaacttctgacctcaggtgttccacccacctcagcctcctaaaatgctgggattacaggtgtgagccaccgtacccggcctcattttatctttctcttttttcctctgagaacattttaacgttataaatggaattttaaaattgatatagtttttaaaactaaacgcaattttgtaactgctgctaaaagtaatacgtgggaaatattttcttttaggacagtgtgatctgtttagttccagccaggcacagtggctcatgcctgtagttcctgcactttgggagaccaaatcaagaggatcatttgagcccagaagtttatgattgcattcctgtggtcccagccacttgggaggctgagttgggaggatcacttgagcccaggaggttgaggctgcagtgagtcatgatcgcatcactgcacttcagcctggccaacagagcaacactttatcttaaaaaaaaaaaaaaggtctattgtcttaattattctattttgctttttaggagactggagaagctggctggtggaggggcgaacttaatggtaaagaaggagtatttccagacaattttgctgtccagataaatgaacttgataaagactttccagtaagcttttgtttttcaatgatgataatacttgaaagaacattttgccactattcttttgcaaacaagtttttttgcattattattgaataatttttatgaaggagtttcagatgtagctattcaggtaggagttatttgagttatagtaaaacaaaataatgtttcagttccgtactttattcttcctttgtttctttctcgactgtactgaaaaataaccttagacttctttattttataatttaagaagggctgtctatcctaataacataaattagtactttcctggaagaaattgtatttttatttaatgttgttgaaaagctctagtttattttaaggtcttgtggatattgctgttatgctgttggtgcatttttttgggagggcaagagcactctgcctccttacagaatttgttatttttgtgtcacttctcagagaaaaagtgaggctgagtcattcatcagtggtcttttgccttcctacaacttggtcccttttccccatggatgaggaatataatagagtttttagaatagagggaaagagcatcaacacaagcacacaacaggatgggctaccatgttaggtttaagccaatgcataactctccaactctatggaagcttaggctgtctgaggcctttgttttgttagattgcattcagtattgattcagccttcatatgctttattttatagttttactaaagaatacgtttttctgcttttattatgtttgtacattacggcttatcaattattcttaatttgtaaaaaccaagtccaccaacttagaagtgtatatcaatattttaaggtattaagtcttaaaaatgagcgaatgtttataaattgagaaaaaacatgtctttgcctttaactgttcctttgagagttccaaagagttaagagtgaaaactaagtctatttgttgctactctgtttttaaaaaccaaaacaaaacaaacaaaaaaaaaaacggtctctcccttgttctgccagtcttcctctccccacaaccccagctgcaaaagaggggtaaaatggtacttaggaatcttaacctaggggaggcagagcagaacatttttgctcattaagatttttaaggtttattcaatccactgaaatatggattgagatatttgactgaattttgaccaatgaggctgttttttctaatgaaataatttgttgtcattgactttttgggtagtttttacgatcttagcattttatattttgtcaaggattgaatgaagaggagagacatttgtataatttagattattactaattagagtttattttaactatatttgatatgaaactggtcagccgtttccaccattattattttaacagaaaccaaagaaaccaccacctcctgctaaggctccaggtatgtaagaagcatattattcagtttgctattttccattttttaaaattctaaaatggtaaaattggatctaatgcaaactattgatttttatcaagtatgatgtctgtaaacatttttagaaatatatgaaaattgagtgttcacatgcatta

SEQ ID NO: 121105 - DNA, 1020 bp, Homo sapiens
tttatagaagttggtgttgaaagctttttatatagctttactcttcaatgtggtagccactaaccatgtgtggcttttaaacttaagattaaataaaatttaaaaattcagtttctcagtcataggagtgccatttcaagtgttcagtagtcacatgttggatactgaaaaaatagaatgttttcatcaccacagctcttccatactgcagtacggtagaggatatgatctctaacacctaaatttgacaaagaaggaactgagaccacagagtagggtaatagtggcaggtccaggattagaaattgagcctggtaattccggtacattgttctttctattaaaccatggtttcatctgatgttatttttcaactcatctttactttttagaagtgtaattgtctctgtgctttaaaactgtcttcttaaaaaagtattaatgttttttcccatagctccaaagcctgaactgatagctgcagagaagaaatatttttctttaaagcctgaagaaaagggtgaggctaattttcaactttcaaaaaagcaattatttcttttattgtcattttaaagagaattatttctccacactgagttatttacactgatttttaacaggtattcagtatgtatttaacaatgcttggagttttctgggagggagtagttcatttctcaaacagataacaatttacattcattaaaaaattaaactattcagtaggatgttgtctttattcagttatttcacagactgtataagaaaactaagcattaaataactatgcttttattatttttatagtgtttcagtttttaaaaaattccttagaatgttgaagacccagttcctacttaagcatgaaaataattaattacatattatttaatctcactgcatgtgtttgtcataatgtaaacctggaaagttattccagggtaccacatgtattttgctaaaaaccttattggtttgttgtgaatttggagaaaataagtccttctcattgcacat

SEQ ID NO: 121106 - DNA, 2065 bp, Homo sapiens
taaagtattgtatcctcttacttgatttctctcactttagctccttttctggctcatacttcatgttgttgccaggatcatgttttttttgtttttttttgttttgtttttttttttttgtctcgctctctggcccaggctggagtgcagtggcgcaatatcggctcactgcaagctccgcctcctgggttcatgccattctcctgcctcagcctcctgagtagctgggactacaggcacccgccaccacgcccggctaattttttgtattttttagtagaggcggggtttcaccatgttagccaggatggtctcgatttgctgacctcgtgatccacccacttctgccttccaaagtgctgggattacaggtgtgagcctccgtgcctgggccagtatcatttttttaaggagactgttttttagagcagttttaggttcacagcaaaattgagccaaaagtacagagttcctgtatacttcctttcttcacacaggcacaatttttcccactgttaacattctgtaccagagtggcatatttgttaaaatcagtgagccttcctacattgacacttctttatcactcaaagtccatagtttcctttagtgttcactcctagtgttgtaactattatggattttgacaaatgtataatgtcctgtatccaccattgtagtatcatacagaatagcattactactctaaaaaccttctttattctacctattcatctgtccttcccttcaacccttgtcaaccattaatttttttaatgactccatagttttgccttttccagagtgtcatatagttagaatcatacagcacgtagccttttcaaattggcgtctttcacttaattatatgcctttaaaatttctccgtatgttttcatggcttgggaggcatatgttgttagcatcaaataatatttcaatgtctttatattccacagtttattaatccactcactcactgagggacatcgtgattgcttctaagttttggcacttataaggggagctgctataaatgtgtgtaggtctttgtgtggacatattttctattcatttgggtaaataccaaggagagggattacctgataatatggcaagagtatattgagttttgtaggcgcaactgccaaacttcttccaatgtggctgaaccattttgtactccccctagtaatcagtgagaatttctgttctacgttctagccagcatttggtattttaagtgttttggattttggcctttctaataggtgtgtagtggtattttacttttgttttcagttgcaattccgtaatgatatatgatgttgaatatcttctcatatgcttaattgtcatttgtatatctttggtaaagtgttctggtcttttgttcattttttattcaggttttttttccttcagtttctttctttgtatattttgtatagcaatcctttagtagatgtcttttgcaaatattttctcccagtctgacttgttttcttcacagagcagaagttttaaatttgattgaagcttatcaattacttcttttatggatcatggctttggtgttgtatctaaaaagtcattgccatacccaaggtcatctggattttctcctgtgtaatcttctaggaattttatagttttgtgttttacatttaggtttgtgattcattttgagttaatttttgtgaaagttgtaaggtcattgtctagattcatttttttttttttttggcatgtgaatgtctagttgatccaacaccgtttgttgaaaagactttcagttttcagataaaaatcaaaagttcaaattcaaggccctccagtaactaactgaccccccgattacatttttgatatcatcttccaccctttttgtttactaaatgtagcactcactctctagtccctaaatatgtcatgtactttcctagctttatctttcgttttactttcaaaatggaagtttttttatattctttttttatacttaagaattttaaaaatatgctgcacaaacaatttatgcttaataaaaatattagtctcagat

SEQ ID NO: 121107 - DNA, 1871 bp, Homo sapiens
atatcctttgaccatttttcttggtatgttatataaaacatctcttaatttctagaaatttaagtttggctggttgttataactacaaatagctttatttcgttattgatttcaattggagagtttggttttttacaaattcctggtggtataattatatatagtacattgttacatcttgaggccatataaaaatagatttttgtaccaaatgatgaccagaattttatagactaagctatattttcatatgattcaaagtattaaataagtggtaaaagtgagaaaatagtattttgtattcattgtgaaataagacttgtaatttttaaaaggaagaggtttagctatgtgctacgatgttcaggttttataatcaccagtttctggttgatatgaaatcttacagaattatttgtggtcttgtgatagacatttttttcaaagaccaaataaattttgaaaattattcagtatggtgcttaggagcttcttatttttgtatatacgtcttaagacacattttagctgactgctgtattatgactatctcatgtatgcatgtgtcaattttaatacctatttatgagcacctgaaagatcaggaagcaggtatgtcatgtgtaataaaagagtacttgttgcctttttggtgataaaattgtctttattgacatagtataaaattgtcaaaattgtttttttccagcttattttcttctacttcaaatggaaatacccatttcattgcattattaaatgaaatggtattaataaaattcttagtgcagtactaagaattacaaatataagcctataattctctcgtctgtggctaagcagtcttgccctagtttctcttaacatttgatttttttttccttcaccatcatgctttttaaatttgaatgttatataggacttgagtttctacttgtttttagttctctatatttcagtttcagaaaatagtctggatttaagtctagataattttctggttagagtaaaatcatgtgtggttgtatttgagatagactactacacttaaaagcaaagcttcctgggaacataataaaaagcaggcattatctactaatcggaagcttattagtggttttcctctctaccataataaacattttttaaagttatttaggattattaaattaaaatataactttaaaataagtaaaacagtgcacatgtatacaaatacagagaatgaaagttcatgtctgcctctgtcacacttttccagcctgatacaaacttttggaaatagaaaaacctaaataattttgattgttaataacttgtgaaatattttaaatcttagatgaaaaatcaacactggaacagaaaccttctaaaccagcagctccacaagtcccacccaagaaacctactccacctaccaaagccagtaatttactgagatcttctggaacagtgtacccaaagcgacctgaaaaaccagttcctccaccacctcctatagccaagtaagttttacctaattttaaattagcttactgatttactcacctttgaccttaatggctctattgcctttctaaatctccaggtatgttttttcttatttttcagttatatttatttttaaaattgacatatacaattgtgtgtatttattgtatacaacatgatgttttaaagcgtatatataattcattgtggaatggcttcggtaactgtgataacctcacatagttaacatttttatgatgagaacacttaacattcactcttagcatttttaaagaatgcggtacatcacattaactgcagtcactaaaatgtacaatggatttcttaaaacttattccctctatctaaccgtatgtatt

SEQ ID NO: 121108 - DNA, 1050 bp, Homo sapiens
gagcttattcatgtaaccaaatgccacctgtttctcaaaaacctgttgaaataaaaaataatctaaaataataaaaaaaatttaaaaaaaaatacaggagcattctgtacattttgatttagctctcactgttgcttaccttccagagttgtccttctattgttgcaatttaatttttaagtattatttttaatattttctgtatactaatatctgttgaatgttaattttatgttataataattttctacacttaactaaactgttctcacattttttattttattgtgatcagccttaggagagagttttgcgtttatggaaatggttttacagaacagaaagtaatcggtattaggccatacaatctttaatgtcattaaatcacaatttaaaaaaaagtcgtgtttcatactagtgatttttgcgtgtttttttcttatttcaggattaatggggaagtttctagcatttcatcaaaatttgaaactgagccagtatcaaaactaaagctagattctgaacagctgccccttagaccaaaatcagtagactttgattcacttacagtaaggacctccaaagaaacaggtaagtcagcatggacagcggtggtgcatttaaaaaaaaaaattgtcaaagaaactctttaagagatatatttatgcaatttgtgtgtggataaagttggataaagttgaaattacacagttgaaatttgtttaaaatttagcagccaaagtagaaataataaaagaagataagtaaaatttttatggtccttactgatcagactttatggtttcttactgatcagaggactgaaatagatgttaaaagatgacccatctattactccctctttatagtggaatgactgtactacccaacggagatatgaatacactttagttttaaaagtttaaaaatgagatgacatagactttcagtgccagcattagattatatttcataggactttaaatttctcctcttaatctagagatacttttatttccagtggaggaaaatatgctttttctaaccctt

SEQ ID NO: 121109 - DNA, 2024 bp, Homo sapiens
taaagactaaaacttgactaaaagttgatttagttataactacattatgagatgtcaacatgctgatttattactctggcctcttaaagcaccaagccatccttttggaaactgtcttggtgttcagtgagtaataaaacaggactttctggcttaatgcatattgaaattaatactaatattaatttttccctttgaaagacaaaggaataaacctaaaacctaatatacatcttgtgtaagttagataacctgcaaatagttatatgccaaacattgaaatggttttattcattctacagctgttcttttttcctgttttgtaaaataattattttggtttagtcttttttctagacattcctatccttgacttttctttccagattttgtttcctagcctgtttgccatgtttcccttcttacgtgtcaggaaattattctacccttctccattttggtaagatgaaagtttataaagcaatcaaaatagtattttcaatataaataggtggtgcacattgatttttctttgtaattttactgaaagtgtacatgtctgtctgtctatttattctaacccttttggttttccatttttagatacaatgaaattcattttggaaaagtttcctgattcgtttaaaatattcttttgataatattttttaagaaaattggcaaccataaaaatcagtttattttctctccaaattggatatttcattttgctttttaaaaattttatgtgttcctagcaacgtgcagattgtaagtggctggcagagtgacaatgtgattgcaaaagctaaatgattgtcgtgcctgttatgccacgtgtacagtgtaaatccattgttatccctcttaggtaaatttaaaagcatttagatatgtcatgagtccaaaatgtgcactgttccattttactaacctaatggcttaaatggagaacctgagagagttttagaatagtaaagttacttgtcttggtgtcatagttcaaaactggacatacagaagacattttacatgagcatggtgtataattttgtaaatctatgttttatttaccctttcagtttcatttttctttgtcttttcctgtgtttttctgtttctttttctttctgcaagttgcttaaatatgcatttgaaaataatctctacaggctaaaatgattggattgtacttgttaaggttttttctttgtgggttgttaatgcacacatcagtgtaaaagcaattttcacccttcaaattacgacatattttaacatcttttaaaaatactgattgctttctttgtgatatttacaaataacatgacatttaaacatatatttaaattcaaccgccttcagattatataatgcatttttcattgtcatttattattatggtttgttatatttcatgattatttacaattatcaaaagactcaaaacaaaaatcaagcatattagagtatctgttttaatgaatcagcttagttgatacaagtgagaacacacaaagaaattgctagaaaaaattatcagcaaattattctagttgttataaaatgcatattaccgaacagtgatgcctttttttctgccttacctttgtgtcctccatcccttaaaagcattttctaaataagttgatgaataagttttgtgggcagtgatgatgagtatctttagatctttttaaagaaacaaataactgagttagaacatataaatatctgacagaaagtattataaacatctaggcagatggtaatgtgaagaattaatacagatctggacgattagaccaaaggaatctgctattagttagaacattttggctgtggttaatattctgagtttggaatctggggtaaaggaaggttatattaaaaatggaagtatctgtagcagtttaccttttgggttcttgattcatatatagatatctgggctttagagttaaagaaatttcctttagcaagactttctgaatcatctaggaaaaggcaaagtattatatatc

SEQ ID NO: 121110 - DNA, 2402 bp, Homo sapiens
tatcttttggataaaaaccattttaattggggtgaggtaataactcgtagttttgatttgtatttctctgatgattgttgtgaaatattcattgtttttgtagtacttgtcctcatgtctaaatgtattaacttctttgtatgctttttctacattgcctggagtactggtggtactgtaatgttaatgtattagctcttaaacactatagtacttttaaaattacctaaatggagaaaatccttactgctaagaggcaagctgtttttgccctcaagatatgcaaatgtgttattcagcttgaaagtatatagcatcctattaataataatgggatatcagcaacagtagcagctgaaaatccataaaagttatttgctttattatccaaagacttactaccttttcttttctttggtctattatgtctcttgacttctaaaaaatcatttagccaactcacagccccgaaaaaatcttgaagttaccaaaagaagaagacagtgccaacctgaagccatctgaattaaaaaaagatacatgctactctccaaaggtgaggtgcattgtggtctaaggtttgttgactttctgggattctttgtggacatcaaacatagggaatttaaggtgttctttaggacgaattattttttctgccaagaaatgaaataattgctgctaaaaaattgagttgtttagcttcatcagactattttctgcaaatgtttttgaaagagcttacattttaattgaataaaataaatattacatatttcatattttttaaggcatagatctctgcatctatttcgtttctccattaaacatacattcttaaggtcaggaatgaacacttgtatagtacttacctagcttggtgcttagtacaataattaagcattcagtatatactggaattaatggcagaatactgtatgtccatggatcctttcatctgttacatgtgttaggtgtcttgtcaaaatttttaccatttttatttaacatagtttcactacaactgagacatagatttaagaaggtcatttaggtttcctcccaaattatttcttgatttcatttcagggcatttttgtcagcgtttccaatttattaaatacacttaatctgattctctcagctgtcagcagtctattgaaattttattaaagtgactttctatttttttagtgaaatagttaaggggtgtcaggctatggactcattttagtgactcttcctggacctattaaattgttcacaattacttttaagtgaagctctttggacattccaaacaataagtattgaatatgaaagatcaaagtaatacctttataatgctgttacattcttgcccctgtttcactaggcaaaccatccataatatacatttgatggatttttctttcttccttttttcttctgttaataaaattgtcattttctacaaaaaccactaatgattacaaatgtattctttagttgtctggtgatttttccagttgtgaacatcaaattgcttttgaatttccaaatttgccacttatcttgaagtacttaattgtttttcttcttgctgttaaaatctttcgaacgtaaatataatattaaataaaatcagaaattttttttttacgttttcagccatctgtgtacctttcaacaccttccagtgcttctaaagcaaatacaactgctttcctgactccattagaaatcaaagctaaagtggaaacagatgatgtgaaaaaaaattccctggatgaacttagagcccagattattgaattgttgtgcattgtagaagcactgaaaaaggatcacgggtaagtagcccttcttttctcctgtgagtactacttaacccatgcataaagaatttttttcaaaccatattaagtaaaaatctaatctgtggctgggtgtggtagttcgcgcctgtaatcccagcactttgggagaccaagtttggaggattgcttgagtccaggagttcgagaccagcctggacgacatgacaaaaccccatctttgcaaaaaaaaaaaaaaaaaagaaaagaaaagaaaagaaaaagccaggcttggtgacacatccctgtggtcccagctactcaagaggctgaggtgggaggatgtcttgagcctgggaagtcaaggctgcagtgagccgtgaacatgccagtgcgctccagcctgggcaacaaaaccaagaccctgtctcaaaaaaaagtctctggtatgagcaagtatattttcaaagaaattttcattaacagtccttttctctttttggcaaaaaagttaaattggtgaagttattctagtagctggattgtggaaaacgtgcatacataaccataattttaggctagaaatcttctggtcggatatgatta

SEQ ID NO: 121111 - DNA, 1069 bp, Homo sapiens
acttgttcacattttaagcacaattctacaaaagcccagtaggtaaaatatattttaaaaaaagcagttaatctaattgaaatgagagtgagggtgctcatcccttgtcttcaaattcccttctaaaaagatttcttggaatatggtacaaaagttatggccaaataaaaagtataaaagaacaaaaaataaaaataaaacataaatgttatggccagaggccatgttccctctgagcctgattttatcatttcttttccaattttaagttggcctaagaatcttattaaaaataatattgagattaacagtataaggtatttggagtttgcagaacactttcacaggtattccttagaaataaaaaatgtatcttgaatgactacttaaaaatatgttttatatattatgtatatagaggagtttataatttaatacatgatggtatttcttggaatccttcagtttatctgttttgaaagattcttttagtagattctgcaacatgcacattataagctgtaagtttacttgtccagtaaatatttattaatcaccacccatgtaccagttagagaattctcctgattcgattttgttgttttacattttttataccatgtcctgattttcatatgcatattgcctgtaggtgctcttaaattagctctagaacggataaaatatttctgatttatatatatatatatatatgtatttttttttttttttgaatataaaacattttggaagtctttccaaagggtattttcaatatcttgagtttctctggcaaagtgaaactgaatggcaggtttttttttttttaatatctaaaaaacttgcatcagcaggagaagggataaatactattgatatattaatagagaaatactacacagcatacaacaataaaagtaagtttcaacatcaatatgaattaatctaaacattgagaggagggagcaggtcagaagcatacacgcaatcagtgtatttcatttgtataaagttgaaaagcataccaaaccagaaaatatattattttaagaatgtatttgcgtgtggc

SEQ ID NO: 121112 - DNA, 1076 bp, Homo sapiens
agaaagattagaagggaacacgggaaggtgaaaagatgagttgaggagagactattggctagagtttttaatttgtttggtttttggattttaatgtgttatttaatttttaaaaatagagaaagaaattcaaagtctaggttatgttaccagataaactgttaacttgccttgtattgtgatgtgttgatattcattttaccaaattgcttgggctttcagttttccaacctggaaaatgtatgatagccgaatatagaaaatttcttctaaaggttagatattatttctgtcttcgtgagctgctctgaatttgcttgatttcttgatctcagatttgtcttggttttgctgaatttttaactgttatattgaaccattctaactagagaatcttacatttttcttaattaacattgctattgcccttaaaaagtttttcccatgaactggtaggttaggtaacaaaaagcctgtaaacattagtcaaataaattatttaatcgaaagacttaacagtaataagtactttgtttttaggaaagaactggaaaaactgcgaaaagatttggaagaagagaagacaatgagaagtaatctagaggtaattaatttcttccagcattgagagtttagtgagcataaactggacatgtttttcccaacccaactgggtaatcggttcctgtacaaattatgctatactacttcagttggacatacacacaatggactactattcagtcacaaaaaaagaatgagatcctgtcatttgcaacaacatggatggaactggaggtcattatgttaagccaggcacagaaagagaaactgcatgttcccacttatttgtgggagctaaaaaaaattgaaacgattgaactcatagagatagagaacagaaggatggataccagagggtgggacggatattagtggaattaattagtggcaagggtattcttttgaaattggagtcagtcctcttaaaccctgcctctgctttatcaactaagtttatattttgtaaatcctttgttatttccacaatattcacaggatcttcaccaacagta

SEQ ID NO: 121113 - DNA, 2346 bp, Homo sapiens
tttgtttaattatagatacatgtacatttcttaatttggtttcaaggattcttttgttctttgtaggactgactgatttttttacagctttaattttaaatgctcacatgacttaacatttgttctggctgaaagggctataattgcttttttcttattgtaactgccatttaggaacttgcattgtactgttgaaactttattcaaccaaattatagcatgggaaactggattttaggtctggaaaaaaagtctgaaggcttgaaagtatgatcacatcttaatgacatagagtaaaataaactactaaactaaggatattttatgtttgctcaatttatgttttttgttttagatggaaatagagaagctgaaaaaagctgtcctgtcttcttgagtggtgtggacctggtgttcataatgttccagggattcagaagcaacgctatgaacttcagctgacttgttacttaaaaattgtgaattctgttgttgtgataaatatgagcaaatgaagtgtaatatctatagaaaagtagagtgagggtgaatttatatatatattttgttttgccaatatgaagaaaaagaggccttatttcttaactgtgctgggattgcaaacactttttaaaaaattgtttgcttgaaaatactactgaatataaataagaatgtgcacagtagtttttttattgaaacttgtattatttttaaagagatctatactataaatatggtgatatatttacaagtaatctgttaagatatactatttgagagggacagattagccttttagtaactatagtcactactttttccataatgcataagggatataaactctgtgtgtgtgtgtgtgtgtgtgtgtgtgtgtgtgtgtgtgtgtatatatatatatatatttttacttttatcctcttaccgaaggttacactgttgtgcctgtttgtctgcaatgctgtttatattttgggtgatgaaataggagtttcctagctatataaaccagattactcacccatgcatatagtaagaactaatgaataatcaaaataatttcatcaacttttagaatattttatgttgcttgcactataggagtcataaaaggaacttagttaaaatatgttggattgttaaacatttggggaaatatgaactgtattttaaatttgttaggtctgaagaatctaaaactgttaatttaacccttaacttgtgcctagaaactacagcacatataaaatatgtaaacaccagcctgttgctgtacttttctgcttattttacagcctcaaatatttctcattatcttgtcacttagttcttcatgtttctccttctgacttttaataatggtaataggaaaacaaaacccaaagcttttcagaacttcagtgtgaggtttcctattttgacaagttaacttgtaaatactcaggttttacgatgtataatttacctaatagaccaaactaactcatggagatattttgaactattatttaggtacaaactttataaagaatgttagtatgtcataaaatataacattacagcttatttaaaaccaaatatagttgaacatatttaaaatacattttcacagaatggatgaattagttgtttcttcagagttacttatgaacagttgaatgctttaaaatgttctgtctgtaggtaacatctaaaacacaagtgggtttatttaaatttttaaaatttgaaattttttatttgcaaaaaattgttttatgctttattatatcgcaaatgagtgtcagatttttgagtaccaatgatcatgcttccattttttttagttttaaaccaccaaaccaatatttttcctttaaattttaatcttataatatagaaatcttatgtaaatgaaattttgtcatgtttcaaataaagagaactgaagtagaaaatagaaatgccagtaaacaacataatgtttaatttacaacttacattaggggtttgggggaatgctaattatatattgagaatatacattagaactcttcaaaatgggctcttctaatgaggtcactactgaacaaaattgttccctcttctgttaaatagaataggtttaaatgactagtcaaatgaattattttcttcttgttaaataaattaaatcttactttcttttaatgaccaaccttaggtaaaacaaaaatattgtaatcctagaaattatcctccagctttctcacctgaaaatctattgaagtgatccctggtcatcctaataatgggatgagggaagtttccagcagatttcaggctgttcttaaagtttttgttggtcattttctcaatagtaca

SEQ ID NO: 121114 - DNA, 2145 bp, Homo sapiens
atgcttatgagcatggaaatgtatttaaagtttttgcttgtgtcctcctcagtcagaatagaaaagtaactgaaatacttttacctttctgtccttgataaaatagtaaagaaaaccaaacaaacccaggcctgatgggaaaaatgattcctttattctagcaacttactttctgttggtatgggaaatgttattaatttctattactaaagttcatatcacaaaatgatatttaataataaccttggggtaaatcatgaattttttttctacgtgtgagtataaaagacaaaagttgaacagcatggaatctcattgccaaattattagtgaatgtatagttcaggtattctttgagacacacagtatcattaatttctgaattgtatttcagtgttattttttgtttgtgaccactaagcttctgtcttaatacaaagctgttaccttctacagaatttaagtctgaagatgtaaagagagaacaggccttgtgtaacagaagatactcttttttatgctccttactgtgatcacagaaaaattaaaaatccaagtgctctctagatttgttgataaacattttatgcttgcatttaaacttgaaatgtatgagcagaatgagacaatcagttaaatcagaaatgagaagtattataatgtaaaggccttgttttgctgtagcaataaaatgaccaagtgcaatgacttgatttaataaaatcatattttaaaagttgctgctatgaatatttttggctataaaattttaccctgacttgctttcaataactgttacgtaatgcagttgatgttgtaacctaacattccaaaaaaaaaattgagagggggaatctcaaaatagtatatacttcactaacttgtttacaggtgctgtatttaaaagcatgcttctctctcaaaaagaaaaattaaaggattttattgccagtcgtgtcagtctttattggttattttttgttaactttagcatttgtgtatttcagagtatgatgaaaattatattacttcaatttccaaatacaagaataaatagtaaaccaaaaacattaaaaattctagacccgtatgacttttactgaacttttctgagtctggtttttcatctgaaactgagacagtaatttctactttacaggattatggggagaatttgaaatagtttatctaaatggctttgtagagtgcttggcatagagtaggttttttttaaaaaaaaaatggaggctgctgttttacctttttaaaaagcattttacagtgatggatatgataaaaattagatggataaggttaagaaaaaggaggcattgtgtatcctttccccctgaatacggtatagtatccttttctttggggagatgctcctttcatttgtattatattgttcaaaggggagctgctaccatcttacagattctacctccttgatcaccccacccaggaaatcccttgagagagtacttggctcaaactgagttactgagttaatcaaagaatgaaatttttaaaattggaaacaaaaagagctaatctcagcatgggagctctccacagttctgtttttctgtcatctggaaaaagctgatttgaaaaacaaaatttagtagagcatagatagatggaaacagaatctggaaggactttgaaactgattgtagctgttgctgagtctcagctgtctattgcttggttctataagcacagacttgctcataagcttgttgggtttctgaactcacaaccgaaaaagtcctgataaataacagaaaacaagatgaaatcaggagaacattaaggtccacatacttttgctgaacatagatcacatatagctttagagattctagtagtgtgctggaagatttgaaacagaaggaataggacaccactataaagcaatgtggaaaattagtgtgtcataagatttttaaaatcttatttaaaaaatttctagttcttactggcttttagaagcactagacaaaaaactttggaggcatataatggtaaaagttttggactatagaatttgtgtttgaagagtgcagatggttttgtctgaaaatacaatttgcaaatttagcccagttctaggaaataaaagcaggtagcagtttaact

SEQ ID NO: 121115 - DNA, 1045 bp, Homo sapiens
ttatgccagtgatggtgtcattgtctaggatgtatttgcaactccccagttgggatccctttggattctctgcaatgctattttgaacatctttgaaagtagcagtgtttcatcctttgagagtgtgtttgattttgtataagcagccctaaatcattcagagttaaagcacatgaacaaggtgaatggccaaattgcataatatagacagaaatactgaggcttgggagcttcctgcactgggaaaaagaatattccaaattgtgcaattgctgattttccaatgtgactgctagattcacattcaacacaacttcagaaatgtccacattctagtaatgcttgaagcattggaatcagtacctagtttgacactgattttcttaaaaagagaccacttttaaggaaatatcaaaatgtgtatttcttttaattaatttttaaattttctttagaaaaaaatcttagtagtaaacatatatcagcctctattctatgcattttacaaacattagttcactaaaccacataaccaccctgtaaggtaggtactatcattaacttcattttacaaatgagcaaactgaaatcaagtaacttcctcaaagtcaaacagcgaattagtattgagtttgacttaacccctactcagttcaactccagagtattttgcatctttctagatggcatcaattttgctactttatggctctgcctcctaatagtctggtctataccacgtggattcatgtgggtaacttctgtctcccaactcatattctcccacataatttaactatgtcaagttctgtcagggagaatggtatttcactctagatagatataatataggcaactgggagcttcaaaaccattagaagggatagaggataaaggactgagaaggtctccccaggctttcagaaagtcaggagttgccgacctgcagggcatgccagcagcttccatagcttcctccacactccaagattcacttctgctgtggtacatgtcttttgctttttctggaagaacacaagtatgt

SEQ ID NO: 121116 - DNA, 1040 bp, Homo sapiens
tagaagggcatatgatttgactttctgcattctatttgttattgttgttgttggagacagagtctcactctgtcacccaggctggagtgcagtgttgcgatatcagctcattgcaagctctgcctcccgggctcaagcaattctcctgccttagcctcccaagtagctgggattacaggtgcacatcaccacacctggctaatttttgtattttagtagagacagagtttcaccatgttggccaggctggttttgaactcctgacctcaggtgatctgccagcctcagcctcccaaagtgctgggattacaggcatgagccactgtgcctggatgactttctgcattcttatatgttcaaaatataatctgattgtcagtatgcatgaagaaactaggatgatgtgacggctagaaagaagtgtcaatagctttgagtggtaccaactgtctacatagcagtgcagtttctaatcctggacaaagtttattcttacctaaacatgaacctaactttttctttaatataataatttgttctcagaataatagctcttgataactgcctgcctgttttctactatcaaggctaaggcctgtatgaagctacccataagtgaatgagtcaagtgcaattcaatttatctcttttcacaggtcaccaagtgctcttacaaacaatgaaagaagaataaaagttcatatatgtatgtatttttatttttagcattgaatataattatacaagaaacatttaaaaaatgatggattctaattacagatattttcattacttgaaggagaaataatgtaatagttacagacaagtgtcctagtccagaaatccatggaatcatagacaattagagctgtatgggaccacagggattatcttctgtcaacccctaatttcatggataagtcagtgagagacaggggaagtaaaagaacatgggtagggtaaaaaattttacaggaaggattaaaatgataatctcttggctacaaagcagtgctgctttcattatactacctttttta

SEQ ID NO: 121117 - DNA, 1043 bp, Homo sapiens
ttctaccagaaatatttttattttaactgaagaaaaaacttgccaaagtgattaatatctaaatatacttattgctgcttggtagacactcagtaaaaatgataatgaagatgatgataatgataatgacaatgatgacaactaatgttatttctaccaataagtaaatcctaactcactttcaaagaactgtgggtcgtcttttaggccattagacaaagtttgattgtagaagtagcctaaagttgagagataaaattgaaaaaccatatatttgctgttaagatatccttgtatatgttgtgcttatcattatgaaaaatgctctaagcattcaaaaatgttttcaaggaagaactattttggttttcctaattaaacacaatgctattgttttctggttctcagatcctcgttttattattttttttcctactgtacctgtaggtgtctccctaagttcaggattattctattttcctgacactgtatttgaaatgatgcccatccaagaaacccttaggtgctataaacactctgagaaaaatcatgtctgtttaataatttacttagatgctcctaaggtcaccctttgtaattctgatctgtggtcaataaaattaaatgttgataattgtttatgaactgtgctacatgtcatactagaataatatgagattaatactgaattatattctgtgaatccatccctaactcacacagactcctttttaagttactagttctccatgaactgtttcctccatttacattcaaacctcttattgttatactgacctcttcttactatttaccataattcccctgaagtcctgaaaaacagggaaaggcagaatttaataacttctggcaggattattccaataccctttgattctgaaaccataggcaaaatattaattcagacaaatgctatgaattcatgataccatatacttttattggttgactatcatttgccaaattttaatatgctattacttttagaaaataaaaacaaagattttcctgtgattttgcag

SEQ ID NO: 121118 - DNA, 1032 bp, Homo sapiens
gccaattgtttaggggctttaattatatctacaaaatttctttccagcattattcagagattagtgtttgatcaactgggggaatgtgtttgtgtgtgtgctacagaaggattgtctcctttccatcctccaatccacaaaagagagggaatatcttatccgttgtatctcatcctaactggagatataatagaaagggaattttggagactgtagttcattctagctaaattgacacattacacattacaaaatcgtcatatcccctcactttatgtataggcaactgatgcagagaaaggaagatttaaccaacatgacatgatatttatagcatgtctagagcctggtttgctggctccagactcagcagttttcatattcatatctgaggaaaaccacattatcaagatttataactacccatatttgctattcattattctgcagaaaggtccaaaatttagagtcagtacatatatagttggtgacaaaaaatttgaagaagaatcacttttgtattgaatcaaacatttgcatcaaaggtatctgaggatgtactttctcaaatccagtcttaaaaaaattattctcagagcttcttctgttattaatgaatatgtcaactgggattaataaatatgtaagacttttccaagactgtaacaactaacagtaattgttatacaaagcaggcactacttttcctttactgtaaagactgctctgattatagacaccattgactcttcttcccaaatgagtcaggagtaaatagactcaagtggaacttctggctataatagatggagttccataactacagggaaggcaaacaaagtatttctagcaatattataagtaggctagtggcatcacatcatatctatgtgcagtgttctatcaaaaagctaatctggagaagggaagttcatttgttgagccttggactctttcaaagtcttgcacaaagtgttgttgaaaaacatatagaaaatatatataaaatatagaaaaaaagaactccagact

SEQ ID NO: 121119 - DNA, 1822 bp, Homo sapiens
tattttcatttatagaaaatctatcagttgtccaaattcaaagtgccatcattcactaactgcagacaaaatacctaggagaaaatagttttttaggctcaaacttatcacatcatactaaatttaacacacataatgacaactagtgaaaatttaggtgagagaaaattatggcttaaggctcagaagttctcagtcaggatatccagcttcctaccacaagcaacacatagaggcatttagaaaatgggcggagtgttttgttttttaaataacttgggctgggaggctggtgctgatgactattagtagcactcccaatcaaggaagaattttttagccccaaatgccagtagtataccagttgagaaggttttgggtaattgagtgacaaagaagaaaggatagggttttatttccgtgaaaatggaaatagtggctcttattaattaaacacattctttcaacaggattatgaatttctgtttgaagttggtgtttccaatgtatttggtcctgggactcgaattccaaaggctgccgttcaggtgcttgatgatattgagaagtgtttggaaaagaagcagcaatctgtataatatcctctttttgttttagcttttgtctaaaatattattttagttatgatcaaagaagagagtaaagctatgtcttcaatttaatttcaatacctgatttgtactttccttgaaagctttactttaaaataccttacttataggcctggtgtcatgctataagtatgtacatacagtttcacttcaaaaataaaaaaaaaatccctaaaaactctctatactctctataacaatactttatcaagaactctggacaatggtattatttttaaaaatcatggtgatgtatttattagaatgtttcttataaatctgtttactttttatattaagaattaaactgtacctaaaaaaactctgactattcccatttgtcagtttagcattacattgtcttgagcaccagaaaataaaatccatatattaataaaaacctatcttgaaaaactagtggagtgtatttacgtggcaaaagagattttgggaggagtcctcagccaaattctaccagaatcaccttaataaaagaagtattaaaatcaagcacagcaggttggaatatggggaatttgacagtatatttcttcaagtctgagtttactttcttcctgatcatgaccatctgaccttgttatttctgggcttggctcaagaccaaggagagtggatgttgatgaacattcctttaaataaaagtgcttaggttgtagttatggctttgtctagaatggtgatgtcaactgtgagtgtaggtctgtgatatagaaagaattcaactttccagatctagaaagatgctaccttgcatagatttgctccttaaacataaattgcaaaaataaaaatatcacagagaacacctgtactttgcttactgaaagatttgctcactaaagaaggaaagttgccatttacctgtttaacaaatctgcacatcctgcacatgttccccagaatgtaaaataaaaaaagtttaaataaaaaaggaaagttgtcctttattgttaacatgatccattacatgaatataacataaataattatcttttttaataaatttctattgtattagatcagagagcagtcttttggaaagtattatagatacattactgtagaatttacaaactcattgtaatacaatgtatttaattttcagaatatgattatctgaatggtattgtcatgattattgttcccattttcagatgaacactgacttc

SEQ ID NO: 121120 - DNA, 1030 bp, Homo sapiens
taaaaatacgattgttggccacatgtatgtcttttttggaaagtgtctgttcatgtcttttgcctgctttttaatgtttttttgtaaatttgtttaagttttttatagatgcaggtattagacctttgtcagattcacagtttgcaaaagttttctcccattctgtaggttatctgtttactgtgttgatagtatccttttcagtgcagatgctttttagtttaattatatctcatttgtcaatttttgcttttgttgtaattgcttttggcatcttcatcatgaagtctttgcccattagtatgttctgaatggtattgcctagattgtcttccagggtttttatagtcattatctagtaataaacaatgatttatctttactttctgactgtttagactcctcgtgaagtggcccagcaggctgtggatgcggatgtgcatgctgtgggcataagcaccctcgctgctggtcataaaaccctagttcctgaactcatcaaagaacttaactcccttggacggccagatattcttgtcatgtgtggaggggtgataccacctcaggtattttttatctctatttttctagtactgtgatgggaatcttgagtaatgatagcttatttgtggttctaaagataaacttgtagatttaggaacatattatttcctggtgatttcactaaataaattctacaaggtctaaaagtggacagtgttgttttgcattcaagttatattgcaatttattatgtataatttaacttaacactttacaaagcttcaatgagagaactacctccttgcaaaccagtaacctatgctagatgtttaccttcattctcaataaacagttatggagaaggaacaggataaaagtaataaaactcataagtggagtagagaacagtggtagtaaatacacagtgaatatatcaaaacctagccagagatatagtgagtactccttgtcctggggggtggaatgagtcctttagtttgcttgcttctatttagaaggagctacc

SEQ ID NO: 121121 - DNA, 1131 bp, Homo sapiens
cgctctcgagattatttttaaataaaagtatagcaatatgcatattattatcaatacattgttatttatctaaaggaaacttaaaatataactaaaatattctctaagttttgattttttttcttgtcactattaatctttagtgttccttcaaaatacttcatatgaaagacccacttgtttacaatgtcttggtactttagaaaagcctaagtaacatgtgctacttgggaaggtcagcactattattgcccttcatgtttctgatttgttaggattataccaaatgtaatattattttaggaaatcctgagtgaatgaatgaattgaatgaataaaattcctaggttatatattattcttttcaattttttcctcttaaatttggagttaggattatggaaaaaaatgccatatgctatgcatcagggtctaatctcttgatctctgttttattctctcttcatgtaaattgtccctttccttgactttttccatagatcaaatccagcagggatcaagctttggctgaacgttgtcttgctgcactaaccgaatgtgctgctagcggagatggaaatatcctggctcttgcagtggatgcatctcgggcaaggtgaagatatataagtttggaggtttccaaagactaaaagttgaccagtttagcttttcagagtatacttaaataaaaggttgatcctgtaaaccatgtgagcccaaaagaaaataatggcatccatcgtaaatttaattcttatcattttaaaatttctgtatttaaaacattcatgttttgagtgaactgtattaataattgtgtattttactgtggctgaggaattttgaaactattgaaatgaatccatttcactgattcgcaggttgaaatgtgttggactctcaagtatatcaccaggtttatgcctattaccttggtattttaccagttaaaatggctgtggggtggggaggggaacattaatctgagaatttataggaaaaacttgtcatcccattgcttttgaattagttttaaccatgaagcaaccggaagagcaaccaacttccccacacccccctcccagtccttcccttgttattggagccatgtgttcctttaggagtaga

SEQ ID NO: 121122 - DNA, 1026 bp, Homo sapiens
actaatagattatagaagggttctttttttgtttaaaagtgactggctgaattcaaaaaaatattagaaaagctactgggtattcattctctaccttataaatcttagatggcagctgctctgattgttatttcgaagtgttaaaagatttattagaaaccgtgggaaagtgtatattaatagtttggtagaataatgaaagtccttccttacagagactctgacatatacctctactttcctctcacacccccttctcagattgggatttgctgatctatattgaagttgcattaagaattaagaatactacttaaagatattaaatttataaggaaaatacatcataaccagagcattacaattaggtaattatttgtgaataaaatttttctttgggaaattaccaggttctgaagtaattgttggagtaaataagtaccagttggaaaaagaagacgctgtagaagttctggcaattgataatacttcagtgcgaaacaggcagattgaaaaacttaagaaggtattaatagcttgcttttttttttttttttaagtattttctgtgttctgggctctggctaagcttttaaactgtcctgcttaaattaatccttacaacagcatgaggtgtgtattaatttccatcatttcaaatgtaagggaactaaagataaggcattgagaaacttgctcaggataaatagacaaccaggactcagtcttagtctgttgacaccaaaaacttgttttaaaccatgatatctacctctgtgaaacttataagttgttattaaaaaccacactacaataataataccttccataatttatagattaaaaccaaggcttagatgattatgtaacttactaaaaattaaaaacagaataaagtttagagttattatttgaacccagggcttcttattgtaatttctttcaccagaatgatggcatctgatactactttgaaataattacttgctttttgatttttaaaattcaactatatttggtagtgct

SEQ ID NO: 121123 - DNA, 1101 bp, Homo sapiens
gtcaagatttatagattttaaatttataaatcaaatcacttacagatttatataataatttaaacgatgtttgcaaaaaaaattcagatttgattttatagttttcaaaacaatccatttaaaaatacatttctattaaagtattttattaaaagaattaaaaagacagctagtattaaaaagctcatacaaagaacagcagtttttgatcatccacttgttttttcctgcttcctggagtaagatacatacttctttgcttatttttgtttttatctgcatagtttaaaatcacatgtatactatttcttgtaattttatcaactgtagacattacacatgagaccttagacactatctattgctttcctagtagggtagtttagattttggctgattcatacccctacttttcctcctcccttactaccaatataattatatctcaatgtaatcttttctgaattcttctaatgttctcatttgacttaaattgttttttctctatttctgctcactattgctgttctttgactcctctttgccattatagtaggaatatattttcatttctcctctgtttaattctgaatcttgaatcccatgtctatctcttggttatttggaagtacatctcatagaaacctgctaaaaatggtgcatgggagataaattatttgaaacttttcctgtttgggaatgtctttattctatttttataattgattaatagcctgactaagcttgacattatttccattcaggaaattcataagcaagtttataagcattgatctgttttttattctagatttttattctggctttcaatatttctgatcagaaatttgatgccattctcattcaggatctttctttctgaaagtattgggacctcttctttattttttgtattgatgtataacttggtgtattttttcctacatggtactgaacctttattgggtctttttcatctcacctttttttaaaaaatatttttatagctctaggaaattttcttgtattatttctttgacagtatttttcttgtcattttcatatgggttctctttctagaactcctagtcataagctacg

SEQ ID NO: 121124 - DNA, 1050 bp, Homo sapiens
atataagataaaagggagaggtgaagggcacaaattggagaagtatatgcctagaccaatgcacaatcattcttttacaaaacacttttctggctaaacaaagcaaatttgctgttttatttcattcataggtgactcctgtcttacatattgagtattcctaaaatatacattttttaaataaattgaatctttatttaatgaagggcataggaagagattctttcattaagaaaaccaattacaaagtgaataattcttacctgaagcaaaatttcttccatatgcataaaactgtaattttatgttaggtttaaagttacataaatgtacgtgcactgatcttaattcaaattaagttcttcgaaattaaaatatagaccttgattttctagtgtgtgatacaattagttttattttctgctctatattgttaactttaattaaattctggacctaacgttactattttaggttgtctttcttctggggaattggaatgaatttctatatggaaatagcaaagatgagagctggtagaagactctgggctcacttaatagagaaaatgtttcagcctaaaaactcaaaatctcttcttctaagagcacactgtcagacatctggatggtcacttactgagcaggtatgtatataatttaaaatgtagaattttaataaagttatatatatatattttttctgagcaatgtggcacaagcaggaaatagaattaagaagctatctgttaatatttgaaatgataaatattctgaagcataatgtatacttaggtttgtaattatacataatataataaataaataaataaaaattgtctccctctggtggttaacaatataaaatcacttacatcctagcttccctgtagtgctgaaacacttgtaaaagtaaacaaggctgggcgagttggctcacaccagtaattccaacattttgggaggccgaggcacccagcctggccaacctggcaaaaacctacctctactaaaaatacaaaattagttgggcgtggtggtgcatgcctat

SEQ ID NO: 121125 - DNA, 1048 bp, Homo sapiens
tttaaaaattttgtacgatggtcataattctgttttccagaatatttgaatagccaggaatcctttgtgaccatattagataaaagaacaaaatagtaagcaagcatacaaatgctaagttatttttgccatatatgaacagccagatcttttcatgaattttagaaatatttcaatcaagtaccatatcttcagatagatacgagatgattgagatttgttgtttctcccattctttcctttagtgaggtctggaactaaatttgtgcattttggcacaagggaaacaactgactctcttaagaagtgaagtatctttatttaagttggttttgacatgtatgagcataaaaatagttgttataaaagtgtactgttatgagatgaatcaacatttttagtagtgttaaaagtaaatcattttaccttgattccagactcttgaatcttacattatttttctttatatatttagctggtcagcagggattatcagttgcctttgatctggcgacacatcgtggctatgattcagacaaccctcgagttcgtggtgatgttggaatggctggagttgctattgacactgtggaagataccaaaattctttttgatggaattcctttagaaaaaatgtcagtttccatgactatgaatggagcagttattccagttcttgcaaattttatagtaactggagaagaacaaggtgtacctaaagagaagcttactggtaccatccaaaatgatatactaaaggaatttatggttcgaaatacatacatttttcctccagaaccatccatgaaaattattgctgacatatttgaatatacagcaaaggtatactttgtggttattataggtttttctatagttccttgaatgtaggaatttttacaacatgctataactgaatttaaaaatttagtctgagtaatataaatttagaatgttttgttattgttactttttgtttttaatgtactaattttatgttctgtcgttacttgcaggaatctgggcaacagatctttactgtgttttc

SEQ ID NO: 121126 - DNA, 1347 bp, Homo sapiens
tgtcttattcatcacttttttctctattacccaacataatgtcggtcataaactgatatttaataaaagcactttgaatgaaaaaattaattaggaggctgtagtatatcttccacatgatacagagtctttgaaaaattccatgaggagtgtgacatagtcatatttacattgatgtcattgtatggaagggattcgtatagaatggagtagaaaaggagtaagactggtcagtaagaccagctaagaggctactgaggaaaaagactgaaactacaggactgatagtaattgtgaagaagaggggccaaagttataaaatatcaggtgcaggaagcagaaaaggggaagaaatgaaatcagactaatacatcctctttcttttctgttcctttcttatgagtagctcctatttcccaccccctcttctaaatgtttttactctatgtttctttttctaggtcagttcttatttctattgggtgtttccatgctccaccatgttaagagctaagaatcagctttttttactttcacctcattacctgaggcaggtaaaagaatcatcaggctccaggctcatacagcaacgacttctacaccagcaacagccccttcacccagaatgggctgccctggctaaaaagcagctgaaaggcaaaaacccagaagacctaatatggcacaccccggaagggatctctataaaacccttgtattccaagagagatactatggacttacctgaagaacttccaggagtgaagccattcacacgtggaccatatcctaccatgtatacctttaggccctggaccatccgccagtatgctggttttagtactgtggaagaaagcaataagttctataaggacaacattaagggtgagattttaatgtaagacataatatttatgataagtcatatgcctcctagttttttattttttgggggttaatctctgtaaagatgatattcactctataattttgtagttaaagactatactctgaaaaaagtggatttttttaacttctgtggtcaaaaagataagtgaattagaataaggtgctaaatttttgaaagaaaacaacacatgcacgttgtttaaaaggaattaggtgaggtaaagttgcatgaagaaaagaagacattagctttgccttcgaaaaatgttcaattaacattgttgggatagcgattggagaggaagatagtttagatgatgcccaaagaaagtgtaaatgtgataacgtggtacaaacatattcagtgcaacctggcattcattcactgaaaattatcttaactattatttcttctttctgagctgtaataaaattgta

SEQ ID NO: 121127 - DNA, 1079 bp, Homo sapiens
gaagaaacaatctgcttctggttcacaagaaaacctctgaaatttaggaaaaaccaaggagaaaaaaaaaaaaaaaaaaaaacagagagtgagggataagtgatgtctgaagtgccaaatttggcatcaggagaatggttggaatagatcgtgaactcttagcaaaagagaccattctgggcttgctgagctccggcgcccgcggagctcgcaccaggctccccggaaaggacggggcgtgttaccggggagcagctgctctattgcgcctcgaggctccgatcgggctaggccggcggcctcgctccctcccttcacctttcctctcctggcgggcccggcggcgggcaagtgactgcccgccatgcctgaaaggcgactcttcgattcaagatgaccagagaagaacctcttcccaagaaagttcgactgagtgaaacagacttcaaagttatggcaacagatgagttaattctaagatggaaacaatatgaagcatacgtacaagctttggagggcaagtatacagatcttaaactctaatgatgtaactggcctaagagagtctgaagaaaaactaaagcaacaacagcaagagtctgcacgcagggaaaacatccttgtaatgcgactagcaaccaaggaacaagagatgcaagagtgtactactcaaatccagtacctcaagcaagtccagcagccgagcgttgcccaactgagatcaacaatggtagacccagcgatcaacttgtttttcctaaaaatgaaaggtgaactggaacagactaaagacaaactggaacaagcccaaaatgaactgagtgcctggaagtttacgcctgataggtaaacaaatcatcctccccagttaagacttccctgacagtcccactacgagaaagctgtggtgggacaaccaagtactcgtttccacaccaagactcagactttttgagccaaaaaaaaaaaaaaaaaaagccacattcttacactgtccagcttgtaatgtttaatgtaaaacttaccagatgaaccttgtgtttcagcttttttcttttccccttccccttgcttcagac

SEQ ID NO: 121128 - DNA, 1038 bp, Homo sapiens
ctcctactcctcttcatttttcttcttcttctctggcaaagcaatatttatgtttcaggaataacagtattaagtgctatggagaagggttagagggttgagattgaggttacattataaagacaagttgaaagcttcaatttatacttgagaataacaagatatgaaaggattttgagaaaatcctttgttcattagataatgtttatttaacaagatgagtgttttcaatgagattatactgtggattttattgaaaagactttaagaagtaaggtctctgttctttaaatcctgctgatttaaagaaatattattaaatacttttaagtccatttttattcagctttgtctacttgccattggttataatagacttaaaaccttaaatcttattcctttattcttcaatttttgttttaaaattttggcaacattgttttctttgtgcttgttgttattcatagatcccagcagaatttccaattttttttatagtcagtgccattggaagaaaccataatatcattgtcagtgggaaatctgttagcaaggaaatctctgcagtgacaatgtggcagtacagctgtgttgtcttctgtgggtcagaagtgatgtgactgtaccactcagtttactcagcacagtctgtttatacacacagtcccaacataattgtaatagcaccaactcttgatttgaacagtaaaattttgtggttactcacgacttacaaatctatatggaaggttgggtgcagtggctcatgcctgtaattctagcactttgggaggctgaggcaggtggatcacttgaggtcaggagttcaaaaccagcctggccgacatggtgaaacctggtctcaaccaaaaaaaaaaaaaaaaaaaaaaaaaaggctggttgtggtggcgggcacctgtaatctgagctacttgggaggctgaggcaggagaattgcttgaaccagggagggagaggttgcagtgagccgagatcacgccactgcattccagcctaggcaacagagaaagactctat

SEQ ID NO: 121129 - DNA, 1001 bp, Homo sapiens
aagagtttgctgttacacgtcatccaagagcatgcagaatgaactgaggccttcaggtcattggtttaagaatttatctgtaatatgaaagcctaaaatgcagacagttctatgtatctttttacttgttttcacctttctttcacctgaactactgctacagtacagcatttgacatttggagctgtttctacatatgattcttttaattaccataaaatttcatgcttgaatatttatactttttaacatttattttatgtttttccatatgttgaaggcttatctctggaatagagtgaaaagctgtaaggactacagtattggttttaaagtcagtgccaagcgcatggaaatgctgaataaatgttcgttttaatgtgttggttgcatttgttgaatagaaccagcaaatatattttttgcacagaagaatgaaattcagggacacatttatactgagaaaatatgtgggtagcactaaaaagaaagtagcaaaagaagaaaagataaggggttaccctcctatttacccctagatctactcaaatggtgttctatagtaagttttctattggttttaagaattattccaccattacaggtatttatgctatggggaaaacattctgatatgttaaaataagcacatgcctaattgtgggacttttctggacttgagcttttggtgaggatcccatttctttggaatccataagggatgtatgttccagagtatttgatgaaaattatattttatcctaacagaagggaataaagactgaagatagtgtcttagtttgggttgtcccagaagcagaccctgatacaaggcttagaatccaagtagtttaatggggggcgatcctataaaacaccagtaggaaaatgaggaagtatcctaggaaaagaaataaggccaataagggaagtgttatcaaactggttaccactgtggaagctggcgctcaagtctgatagggaactgcgggagaccatgg

SEQ ID NO: 121130 - DNA, 1032 bp, Homo sapiens
ctgaggtcaggaagatgagtagcatggagggctgatatgagcactaggggtgggctgtgtctgttttacgtcaagattaacatgaggttgaagtaatcaggaaccctactgtgactgcagagtcacagaggccaaaggtttttccttatcttcttactgtgcatgtttctcaggataccagtgtgtcaggaccatccacttcttttgatttcctggagtttatttcatattccttttctataccatgtcagcattggtctctctgagcaccatggtacctgcttgttccaatcgcagctcactgtgaggccacttcttacagtaaaaaggagaatctggctaaataggtctcaagagtgacaattttgttataaattgctcttagtagatcctggtcaaatccaggggatcttattagcataacaagttctagcccctgccacaagcccaaggtggccatggatttagagggcgaggcaatggtcctgagtccaccctttgcctctttcacttgtgcctaaccataagtccagtgagtcggacctacaggctagccccagaactgttaaattttaatagcatcagagagagagtctggtgctcccttggtctttttttatgtctttgccaaaaggattgtcgtatattttatttgcactgaattataccattcaaattttatttctgatttgatccattcataaatgtaacctaaaactataaaaacttgagacggacagagattcctgagattgttttaccacttcagccgaatacagccataaataagagtaaatagttaccattaactttatggctattcacttgatatgtattctggaacaaaattttaatctgaattgctctctttccattacttagcctgcttctgaagaggctgtcttgtccataggtcatattctgttcatgaactgcaaaataatctgaatactcaaataaactaaacgtaataaaaaccatttatggtacaaagaaaaaaaattaaatcatgcagctatagattttcttccc

SEQ ID NO: 121131 - DNA, 1049 bp, Homo sapiens
ctagattatttgaagtatttagctctaaagaagtgaaatgggaataattttgacagctgctgaatcatgagtgtatggtagttttaagctgactcaaatggcagctaactagcaatatctttggaccagatctcatagcttgtgacctctcattgacattttgggctaataacttcttcttagaaagacttacagccaacagagagtttgaaatatatttaaattaaaagtattattaaaaaattctaaaaatgtccattctcatttatatacatgtactcttcccaagctctttttaagtgttcaatatgctccagggaagcaattgctgatgcctcctattacttgcaaggttgcttcactccagttcattttccttgttaatttcatgaactattggattcctacaatacatttcctattaatattggagcaaggactccttggttatgctactcaaactaccattaagtcagcagcggggctgtttataatgcataataggattgctcctgccctctttaatttccaggtaatgattgctgaatgtctagggttctgtcttttacttattccaaatgcattgtatatatttagccacacttattttcttcctttgtcttaagtgtcctaactccatgagtattaagtcaagtaattcagtcagacctcattggcctcttacttgaacaagtaaacttcagggagtgagaatcattgtggttaggattgcactaactctgtattttgaatgcatgtggaatcagtgctttggcattctgttttagaagccttagcgatgcactggtagcactgaatagtctggaaatttttcatttttgctttctagacattcattattctacctgacgttaatgagcccaattccagtgagtaaaataataatatgtagggatatatttttatttctaatcattttgattgtgcagagcatgactttttcttcattctcagggatgcagcctgatttttattattttagtgtttttaccaaggatgttttaaatgagtgttttgagagttataaa

SEQ ID NO: 121132 - DNA, 1058 bp, Homo sapiens
ctgattgaaccattttagggactgttcttagaggagatcacatctgagctgggccttaatggaagggtaggattttgacagacagagtattctaggcagtgtattctaggtagaggggtggctccgaagaaggattttgtgggagattcatgggatatcaagttggaaataaaaacaagagctatcgtttattaagcctctatttttcttatacagatttataggtgttttatatagaacattctatttaatctcattagtagtctcataaagtgagcattattatccagttggaaggaagagaaactagaggctcagcaaggaagccaggataggattttaactcaatctcagacccttgcatctttctgtctcactgtttgggagcttttagactatggagggcttcagttactagctaggctactgagtttagttctcagtttggcaccttgatacctttaggtgtgagtgttcccatttccaggtgaggaactgaggtgcaaagagaagccctgatcccataaaaggacaggaatgctgagttccgccagaccatgcatctcttgctagtaggtgaggcgagtctctaactgattgcagcgtcttctattttccaggtcaagtacttgctgctgtcgatattggggcttgcctttctgagtgaggcggcagctcggaaaatccccaaagtaggacatacttttttccaaaagcctgagagttgcccgcctgtgccaggaggtagtatgaagcttgacattggcatcatcaatgaaaaccagcgcgtttccatgtcacgtaacatcgagagccgctccacctccccctggaattacacgtaagtgcaaatgagactgattttcacattctttggaaaaatatgttaattcattctaatcataaagtagaaaatgtagaatacatagaaaaaataaaagggaaaatcctcttaacaatgaaaatttcactttacctgggagctcatatctttcttgttttggactaggttcacctttgtggttgatggtcctaatattttgcttccacgttctcat

SEQ ID NO: 121133 - DNA, 1076 bp, Homo sapiens
aatgtgttccgtgaacctcactgcaattttatgggaagttcagcaccttccctaatgttccctaatgaggtgcatcccaggctttcatgtgatatgaatcatttaggcatcttgtgaaaatgcagcctgattgagtaggtttgggatgggggctggagagtctccagttttaacaagcccccaggtgcgaacaagctagatgctgctgttcccaggaccaaactttgagcagtaagattctcctagattgcaggattgaggggtaagaaagagccaactttctcattctaaatcttgctctatccatacgtgctgcctcccctcctgaggctgttgtcctctctctctctctctctctccatatatatatatatatgctccatgtagacatcataaacctgttttgtatataaagaggtttaccttagacatggaaataatggaagagaattaaagaattaattaaagaattaaagcacaacatacacattgaaacaatttgaatataaagctcatgactcttagttccctggtcatctcagatactaggagtttctggatggcagctctcatttctcttctctctagggttaactgaaattcctattattataattattttgaagacaagatcttgctctgtcacccaggctggagagcagtggcaggatcatggctcactgaagccctgactgcctaggctcaagcgattctcccacctcagcccctcaagtagctgggactacaggtgcacaccaccatgcccagcatttttttttttattttgtgtagagatggaggcctctttgtgttgcccaggctggtcttgaactcctggcctcaattgatcctcccgcctcagcctcccaaagtgctgggattataggcatgagccactgtgcctgaccatattattttttatgtgtagcaatttccctgtctttaccctggaataggctctgtctttgcacttccaaaaaggtaagttctcttcaagacagaagtgccatctggtctgatataaaatttgcagctctcttggaaggagaaaactgttatggcaattttttttttgg

SEQ ID NO: 121134 - DNA, 1323 bp, Homo sapiens
ggtgacccagattcaccagagaaaactgctaaattatctgcgtgcctcattccaaaagagaagtctgtttacatttaggtttgtggtctgaaatactgtagttaaaataatttggggagcttagagaagtaagtttttgtatcttgaaaaatggcaccttattccttaactcccctggataaatgaagtggcaaaatgaaagggtggttttcaaaaaggacaatttggtaaggattgttgaaattgaatctcttctccgccatttaccgaataacttcaggtaagttttatgctactctttatttcagctgtaaaatggggatgattcctgccttgtaggatgcttgtgaaacataattgggaaagcagatggcaggttcccacctggtgtattactacttcatggcagtggttttgattactgcaagttcgagggcccattaaaacaaagtgattcattttgacaaatgtttatgaaacatgatcctttaatcaaaaccatttacaatgatttcaccctggctgcattcctgaactctcatctcttccctgcctttccactctctgatggttcccacattccggtcagtgtggctctgaggcaagcacttcccccagagaggaccctctcggcgctagctcggcaatgcatttttcagctttctcctgaggacagtgttacctcacaacagggccgggtggtaggaaaacatcaagggggataaagaggagaaaggttcacagaaacgagtgaatctgccagccctctctttctcatgtctcctgaggagatttcagactacaccagttgtcctaatgattctgagcttgtgaagtgagctctgcctggagggtttggtcagtagaatatggcaagcacaagagtcacctgtgtgctggctgcctcaggtgctcagccctaacaagctctgtgcaagctctttcccttccttgccatcctttcctttccccacttctcaagagccaggtaacgccatgtctgctgtacatgtagggaagtggggagggtggagcgttaaactctggttgcataggaactctcacctgagagccaaaaggttggcagggtgacatgagccctgcactggtaagcaaaggcatgtgcatctgagttccttttctgacactaggtaccagagttaacatgccaagctaggctggccacttagaggaaagtgcatggtttctacatctggaaaaggaggtggttgaactacgtgatttctgaggtcccttctggtaatgaatgtgattttctttctttctttttgaaattgagatagagtcttgctctgtagccca

SEQ ID NO: 121135 - DNA, 1813 bp, Homo sapiens
gccactgtgcttgtttgatctcattctttttaatgactgcagggtttccatggtatggatgggtaaaaatttaatgaaattctctgatgatagacatttgggttgttccctgtttacagtaaaacagtattaaatttatcagtgtgcactcatgcaagtatagctataaggtgagttcctagaaatgggctccctgggccaaaggatatacgcttttaagggtttagtaagtgctgttaaattgtcccgcattgacgctgaccgggttactattttacagtgaatgggaatgccaatttcccacacgctagtacaatagtttagctttaaagggggctcctcaagggtagcactgccatcagaggcagatgtgtgtgtgagaaagaatattgaggggacgcctctactgtattaatactatggattttcctagtatagctgtttcctgagagcatttgggtttgtttactcctcttccccctttcttctgtctggggcaggttgaaggcattcaaggtggccctcttggatgtgttccgggaagctcatgcgcagtcaatcggcatgaatcgcctcacagaatccatcaaccgggacagcgaagagcccttctcttcagttgagatccaggctgctctgagcaagatgcaggatgacaatcaggtcatggtgtctgagggcatcatcttcctcatctgaggaggcctcgtctctgaacttgggttgtgccgagagagtttgttctgtgtttcccaccctctccctgacccaagtctttgcctctactcccttaacagtgttgaattcaactgaaggcgaggaatgttggtgatgaagctgagttcaggactcggtggaccctttgggaatgggtcatgaaagctgccatggggtgaggaaagaggagacagtgggagaggacaatgactattgcatcttcattgcaaaagcactggctcatccgccctacttcccatcccacacaaacccaattgtaaataacatatgacttctgagtacttttgggggcacaactgttttctgtttgctgtttttttgttttgttttttttctccagagcactttggtctagactaggctttgggtggttccaattggtggagagaagctctgaggcacgtcatgcaggtcaagaaagctttctttgcagtagcaccagttaaggtgaatatgtattgtatcacaaaacaaacccaatatccagatgaatatccgagatgttgaataaacttagccatttcgtacacatggtcttaatagtcatagtgtgttttttatacataacattgaattgttttccttgagagcaatcgtgcagggtttgctgctcccgcatttgcagcaaactaccacaaggtggcagcagcctgctgtgatctctgggggtcatgtcttctctagaggcagttttcttcttcagcagcaccagcgtttatcagtcaaaattgatagtatagaccaaaccctgccaatttaaaatagctaaatggccacgggaggctagtgagtaaaagttcaggagaagaattgcccctctgcctggcgctttttgcctgaatctaaacttatccttcataaagatagaatacccgatacgtcagacacctcaaaatcctgggagttcttgcccataatgagatcttgttacagtatctttttttttttttttttttttttttttgagacagggtctcgctttgtgcccagactagagtgcagtggtacaatcacagctgatgacagccttgacctcctgggctcaagtgatcctcctgcctcagcctccctagta

SEQ ID NO: 121136 - DNA, 2440 bp, Homo sapiens
gcatcagtgacccctctagcccagccacacttgccttggtcttaggttctggagaaggagaagaaacgtaagaagcgaagtgaggatgaatcagagacagaagatgaagaggagaaaagccaagaggaccaggagcagaagaggaagaggtaaggtggggcaagcaaatgagattaaaaagttagtggccaagaagttgggggtgcacgcctgtaatcttagcaatttgggaggccgaggcgggtgggtcacttgagtccaggagtttgagaccagcctgggaaatatggcaaaactgtctctacaaaaaatagaaaaattagctgggcgtggtggcggacacttgtggtcccagctgctcggtaggctggggtcggaggattgcttgagcctgggaggcagaggttgcagtgaaccaggatcgtgccactgcactccagcctgggcgacagagagagatcccatctcaaaaaaaaaaaaaaaaagtagtaagttccagtgggactggggagagaagtagagggtagaaggtggaaccagcgctgcttattgatgtcaggttgttcatggagagtgttcctagacctgcggggtttgaggatgaagataacctgggtaggctgggcgcggtggctcacgcctgtaatcccagcactttgggaggccgaggcaggcggatcacgaggtcaggagatcaagaccatcctggctaacagtgaaaccctgtctctactaaaaatacaaaaaattaggctggcgtggtggcaggcacctgtagtcccagctacttgggaggctgaggcaggagaatggcgtgaacccaggaggcagagcttgcagtgagtggagatcacaccactgcactccagcctgggtgacagagtgagactccgtccgtctcaaaaaaaaaaaaaaaagaagataccctgggtaaaagagaaggagagcgagtccttcttgtgtgcttttgacccctctactgaagaaatgctaaatagtaggaacagcaacccaaccactgagggttttgaatatatacttcaaaattctaagggaaaaaccttcatgcttatagttgaatttataagggtgagtgatgtggaaaagagcgttgggaagcagcgcctgtttgtgttctagtctggggacttggtctcgtttggaacaagcagcagtttgcaaaggcctaagcctagtgcttcactttgacttagtggttctgtttccttttctccgtagttagaggcacgtgatggggcttccttgcctttctgtctccaaactctttctctctcttaactgctgtgggtattttagaaggaagactcgccagccagatgccaaagatggggattcatacgacccctatgacttcagtgacacagaggaggaaatgcctcaaggtgagtgagcccacttactgatgaaagaggttgttcctgtgactcttggacttttccagttgctctgtgcactttattttcttgtggactcctgtttgtttggctccctgcttggggcctatgtccaagaggtttgtcccaagagagcttcaggggaaactttggaaaaagctttgctatattatatacacctccttgatgaactgtgctgtgctgtttcacctggtataagcatttcagataatatatacattgagggtctcctgcctgactaaattccttcatcatccaatgaagatttccctatatcctaattgttctgcctggccccataagaaccctaggaaataggagtgttcagcaggctgagtgagagattgggagtggagatgatttctctagtgtttgtggaaatggcttcaccttgcttatcttccccatctctacaaccatcaaccctctgaagtacacactccaaagacggcagactcacaggagaccaaggaatcccagaaagtggagttgagtgaatccaggtgagtacggatgttgctcctgccccttcaagaattctgtgtatcgctgaggaagggactttgttcccttggagagggtgggaaacaaactgctggtcatcaatagaactcaaaactagaggcctgcagcttttaacattttatattctcatttaatttcaaacttactgaaaagttatgagaaaagcatgaagaacttctggatgtcctttacccagaatcttcagttgtttaaattaataattctctctttctgagagagaagagttttacaataaggataaaacttaatgtcttactgtaacctcagattcttcttggtgggatagatacattttggccatttgtttttgaaatgaagaatttttaccaccagggttttaggaaacatttttatctatgaattttgtttactggacaccaagaaactccatagccaagttttacgttttttctttttatactttaaacacataatacagtgtatttactgaaaaaaat

SEQ ID NO: 121137 - DNA, 1086 bp, Homo sapiens
ctccggactgagtttactgaagttacgtttttgtcctcagattacttctttcctatccctcctttagtgtgactttggaaaatctccttgaaggtctttgagtcccatttccttcatgtataaaacttctccaagttattaagagggtgaaatgacagaatgtatataaaggcaaacttcctgctgcattgcaggcctgcaatcactgatgatttttctcccttctcttttctacgctgtagctttttatctttccagttgttagatgcctaatcttccctgttcacttgctcctccttcctgcaacactcttgtgtatatttccttgatcattgctatcatctttctcatttttatatggtatctgtagagaacacagaactctgaattctttgcttgggcctcctggggcttttctggtagtgtcatttccctttctgtgcagtaggattgatgggcatgcctaaaagacttgggataagcaatcctcccttttcttccctagacatctccagttacagcccgaacactggaaactctgattcgactggccacagcccatgcgaaggcccgcatgagcaagactgtggacctgcaggatgcagaggaagctgtggagttggtccagtatgcttactttaagaaggtgaggattcagatgcctgggcatgagaggatctcctggatatattacagatgcatgggcttcccagccttccgtggctgacggctacatttggattgtcaacagaaagcagtatttgtcttccagtcatcagtctgcctcactctttcctctgaaacactcagtgattctcaaccctgactgcaccagagaatcagatggaaagctttaaaatgctgattccagggctcctagagattctggtttagttgatgtgctgtactttcagttagctgcttctctgtctacccctacttcctttgcatcttaaaaaaaaaagtaggtgttttcaaaagagctaccttggtaatcttccttgtcccactctacctttcctcttggtagtctcttcaaatgtcccattggcacctcagaagctcatgtttaaagttgaactctca

SEQ ID NO: 121138 - DNA, 2947 bp, Homo sapiens
gcccaggctggtctcgaactcctgggctcaagcagtccacctgcctcagactcccaaagtgctgggattacaggtgtgagtggatgtgcctggccagtttctaagatgttatgatatatagatcattgaccattttagttgaggttttacttgtatcttctgagtaagggactccaaaaagttctaagtgcttgtagcctaaccaacttgccctgtctttatgacaggtaggggaaagggatcatctttcagagtcaggtcctgccttgggaatgagaagagcagaataaggtttgggaagcaggggcctggttttcagacctacactcagcctgttagaggttcctgtagtagaaagtggggcttcctaggaagctcagttaaagaagggttgcaggtagaagagatgatttacattgtttaatggctttaaaacacttccctttttcactgctttttgtctgttttgctctttgaggtcaagcctttcattcccactcccagaactgcagcagccttgttgttctttcttcctattgatgtcatgtccacttctgttgtcctcgcattccccagtatgaccagtataagactccaatggagaacattgggctacaggactcactgctgtcacgatttgacttgctcttcatcatgctggatcagatggatcctgagcaggatcgggagatctcagaccatgtccttcggatgcaccgttacagagcacctggggagcaggatggcgatggtgaggccataagaatagtaagagtaactaatggaaaggcgctaaacagatggtagtttctcaggcccaacccaggtggtggtaggtgtttcagtgtccgggttgatgttgaagagccctcaactgtttagccacctccccttcttgcttagtggagggtatcctaaggtgtgtcttttgtccatttctgggtctgggaataactgagcatcttgtgtgagccaggcagttccactatctttatttgtgggttccatgtgtctgattctttttgggccctttctttatgaatcttggtgtctccccttcttgtgctatagaagaagcaatttcccctgggttaaactctttattactctcctttctcctaacttgggtataccagctatgcccttgggtagtgctgtggatatcctggccacagatgatcccaactttagccaggaagatcagcaggacacccagatttatgagaagcatgacaaccttctacatgggaccaagaagaaaaagtgagcattctcataactcttcctcaagggaacctgaaatatgtgttatattagagcatgtgtatatctaagcttagctaaggccttatatgcccaggtcaaagccatgcctggagtcataaccacgtggattaattttcttcttttctgggtccacaatatatcctttatcctggccagttgccttgtaaatgtttaggtgattcagcgcaggttcaggtcttttcttaaaatagagttttgatgatacgcctgatggtgggtgtgccttatatatgaaagatggcaagtgtcatgtagccatttgtgatgaagggtcagcagatagcaaacatttgagactttgtaggtagacttggtgaaggagacgtgtgatcaggtgctcaaagcatgaaatgtgggatcttacacctatttttggccatgatgcagtaagaagcatagcataatcttcaaagctgttggtttaagaatgtagaatttggagtcagaaaacttttagtcaacttgagcttctctgagctgtagttttcccacctacaaaatagagcaaataatacctaaactttctgcctaaactacctaacttacaaataatacctgtaataattaaataaaaatatgtgaaagagtcttgtctatgttccatataaatgggagttatgataatgggttctaggctttgttttgaccctggcttttctgagaggcaaagccactaatccaggcaggtggtaaggtgtggcagggagatggaattcactgtgtgtggctccagggagaagatggtgagtgcagcattcatgaagaagtacatccatgtggccaaaatcatcaagcctgtcctgacacaggagtcggccacctacattgcagaagagtattcacgcctgcgcagccaggatagcatgagctcagacaccgccagggtgagtgcctgggggagcctaggcttggggtcccttaggtatatggctgggcaggagtccctgctatctgggagctttgaaagcattttaacttagtgacttttttcctggtctgaagggcttcctgttatacaattttaatcatttccttttataaaggaaaatgaaataaggaccccagagataacatgtctcttattagttaaaatgacattggcctccagaagctgtgattcattcagcaaacataggagtgacttctgggaagtgacctagtctttcctcttacaagcaatgtaaaattaataaacactcttttcaaagagctcagatccggagcgggggaagcacaaaggtagatagaaagacttccgtacatatttataaatatttaccccagtgtggtacttacaaaggaatgaacgtgaaaggctatttgagcatagacgaataaactgttaatttcttttagacttccctgaaggggtatgaatgtcaaggaaggattcccagagagtatgatatttggactggactttgaaaaaatgactaacaggcaaccatgatggttattcaaagcaatttctggtaacctaatataggtgtccatgaatttgtctaaatcttttttttgttttgtttttgtttttgttttggtgagacagagtttcactcttgttggctaggctggagtgcaatggcgcgatctcaactcactgcaatctccacctccctggttcaagcgattgttctgc

SEQ ID NO: 121139 - DNA, 2969 bp, Homo sapiens
gtgtttatgagatttatccatgttgtgtataggtgtgtttcatacatttttattgctgtatagtattcatttatgtgaatataccgtgtttaaccattacactattgatggcatttttacactttaaaatttttgactactaggcataatgttgctatgagcattacaatgcatggctttgggtgaatgtttctgttgggtattacctaggagtggaaaaactgcttcagaatgtaagcatatattcagctttagaggggaagtaagaatcttaatttagatgttaatataaccatagtccattcagactatgggttgccccttccattcgatggttgttactaaaacagacaggaacacaaaaagctagagaaggtacttggctttttttgttactgaataataaaattttatgaagtcatcttatttgccatgacaggtgagtgtggcatttttaagacaggacggagatcactctgtccctctgtgtgcctttttctaggatgaggagaacaatccccttgagacagaatatggcctttctgtctacaaggatcaccagaccatcaccatccaggagatgccggagaaggccccagccggccagctcccccgctctgtggacgtcattctggatgatgacttggtggataaagcgaagcctggtgaccgggttcaggtggtgggaacctaccgttgccttcctggaaagaagggaggctacacctctgggaccttcaggtaaagggtctgccttaaagtatatggaatgctgttgacagcttccatttctggtaatatcctttctccagtttgccatattccagagagttatatctgataggtggagcactctacctgcctgggagacaggataccttcaatacctcttttctatcagataaagctggtgatacttaaccatcatatgccaaaaatgagagttattggtgacaatgattacagcctcatggctttcctgggagtttctcatttaattacacttcgtccccatacacagttctgtctgaagttctgtgggtcaattccagaggtggggcatgatcagcatatttggatcacagacagaaccagttgtttaattcacaatagctacctgccccctccccaccaactctaattggctggtctagtttggcagcctaaaaaggcttactcctgctaggggtactagctactgatgttaggaattgaatataacgggtttcctctttattctgtttgtcccaggactgtcctgattgcctgtaatgttaagcagatgagcaaggatgctcagccctctttctctgctgaggatatagccaagatcaagaagttcagtaaaacccgatccaaggtctgggcatcctttagaaatttgagggtgggaatggatttctaagagttgtgttttggtgcatggctatttttgtactagatcagaaggaagggttgaggtttggtgttagctttttctatttttgtctcaatcaacaaatgaagggtgtttttgctgtttgttctttagtaattctgttgttattaaacaattttaatacctgctacctgctgggctgctaaatgagcctagtacaaatattaggataggtgttaacttgcccgtgtaccagtaagtctatttattactgaaggcgttagtgatgcattactacttaaacattttttctttgttttagttctccaacttgtttttatctttttaagataggatgtatatccacatttagaattgaactacatatatgaatgtgtgatgataaaggttactgttcaagcacagtacatgttcttattaaacctaaaatgttttgaacctggggatacttttttcccttaaagattaaacctctaaacaagttttggaatccaggctgctctgtgcctactctgataatggcctgatagtgtaatttgtcttagaaaataattttttgcagttaggaacaatgtacctgtttgtgtgtttcttcaagtattttctttttttttttttttttttttttttttggtgagacggaatcttgctctgtgaccgaggctggagtgcaatggtgcgatctctgctcactgcaacctccgcctcttgggtttaagtgattctcctgcctcagcctcccaagtagctgggattacaggcgcacaccaccacgcctggctaattttttgtatttttagtagagatggggtttcaccatgttggccaggctggtctcgaactcctgacctcgtgatctgcctgcctcggcctcccaaagtgctaggattacagacctgagccactgcgcctggccctcttcaagtattttctataggccaaagtatataaagtggagctccacaaagtcccattgaatctcactaggcttgccattggttatttctcctgtaggatatctttgaccagctggccaagtcattggccccaagtatccatgggcatgactatgtcaagaaagcaatcctctgcttgctcttgggaggggtggaacgagacctagaaaatggcagccacatccgtggggacatcaatattcttctaataggtacgatgttggggatttgctttagactgttgttctgatggagtggttgtggagacctataatatgtaagattgtatattctgtacttagcagtatttcagtcctatcaaaggacaaaaggctaaaatgaatcttttttttttttgtcatctctggaattcctgatttatagtatataaatattcttccgtgagtggtgaagggaaaagcgaaggaaaaatattaaaatccacttactgtgtgactctgttgtgtcaagagctgtgctagaaaggcagaatttgctgggggtgctggggagtttcctagagagtcatcactgcccccaccctacaggagacccatccgttgccaagtctcagcttctgcggtatgtgctttgcactgcaccccgagctatcc

SEQ ID NO: 121140 - DNA, 2474 bp, Homo sapiens
acccaagacttaaagccatagaatgttgaaaaaaccatcttgaagggttgatgatgtgaccaaatagctgagattctctattcctttaggtcggggtatgagaaccctttccgtattatagagatgattggaaaaaatattactttttacataattcttaaatgaaaagccattttaatgtgactattaagagtctgttttatttacatttttattgtatatatttgaagtgcacatgttttgatatacatggtgaaatgattactacagtgaaacaacatatccatctattcacgttgttacctttaacattcacattgctaggtttaacttaacattttaacaaagtttgcacttactgtccatttagacttctcatgagctcattttaattctccactaaagacagaaattacagcatgcagaaaagttgtccatgatgatgggaataacagcatggaccttgaggaagtcattataattcttatagtcccctcttagggtgttatttcgaatctaaaaacagtgaatgaaagggagaaattgatgagcacatacttactggggattcagctctgctgcagagattgacttagctatctggctatgagaactacttctgtttagaaacattgtttttaaatttgtggctatggtgatatgtggtggctgttttgcaggaagaccagggaatttatcagagcaaagttcgggagctgatcagtgacaaccaataccggctgattgtcaatgtgaatgacctgcgcaggaaaaacgagaagagggctaaccggtgagaggcaaggggatatactggctgtcagtgagaatggctcccttccctcttggccagattggaacagcctctcaggagaggacttgtatgaaacaggattgatctacaagccctcgtagctcacctgcacctatttttttttttttttttttcaaaaagtgggtggttggcattttcctcccaaatgcccctccttccaatgtttagctgaatatcatttttatatctttgataagttgaggtgaagttggtccttagttctggtattttactgagtcttataggatggtgttttactgagacttataggagaaagcagaagctggattttctcattgtttttaatgatctaagaatgtctgctgttttgaggatccatttttttgagttctgcccagtctaatttttctttctcttgcttatgtacaggcttctgaacaatgcctttgaggagctggttgccttccagcgggccttaaaggattttgtggcctccattgatgctacctatgccaagcagtatgaggagttctacgtaggactggaaggcagctttggctccaagcacgtctccccgcggactcttacctcctgcttcctcagctgtgtggtctgtgtggagggcattgtcactaaatgtaagtgggttaaagggggccgcttaggaaatgaatagacagggagatggggaaagcaggagaggcaaagtagatctgggtagcttgtggcttcaaagaggtggagcattggaattacgtggtaaaacttggagggctcagtgtgtacaatgattgggggaccttgagtaatcacatgtattagtagaatgatgaattctgctgagagctggaggagtcttggttcctggcaatctctaattccaacctctaactccacctatttattagttgggattggtggtacttaaaattttacatggatatggtggtggtctatatataaataaaaaagtgaataaaaggtaatattgaaatatcgtaacctagtcaaaaaaacacagtatttggagtcattataggcttgcatatgtttgggttccacctgtatcatcgtctagttgggtgagtttatatatgcacattttccatccctaggttctctagttcgtcccaaagtcgtccgcagtgtccactactgtcctgctactaagaagaccatagagcgacgttattctgatctcaccaccctggtggcctttccctccagctctgtctatcctaccaaggtaagggggataaatcagttgagctgtcttggaggttggaatcaaagatacctgttttaaggcaaggaattgtgtaatatctgaagtcttttttctgtaaagggtgaaaaataaggattaatccaaaggaaagattgattgcaggccagagtttaatatgaaaagcccacaattcttatttatttatttatttatttttaaagatgaggttctcctatgttgcctaagttggagtgcagtgggtatttgcaggtgcagtcatggtgcactaaatttgcaaactccggggctcaagtgatcctcccaagtagttgggattgcaggcatgtgctacgccacctggcttcacaattcttatttttttttttagagacgggatctgtctctctcaggctggagtgcagtggtgccattatagaacactgcagcctg

SEQ ID NO: 121141 - DNA, 1020 bp, Homo sapiens
accatcctctgaatttggtcgttgcatcgggtcaaaagttctgcagcttgaaaaaccctgcaaaaacatccggaaaggagggagaacactacaactcccagaacgcaatgctttccctctcgccagcctgtcccctccagctgctcaatgaccagcctctgtgagcctcctctcagccctattggtcagtttgctcgtcagtgagtgaggcggagggaggggaggaacagagaatcccggatggtacgtttcccgccaccgcggggcgcgcagcggaaaacccgaagaagaagaagcttttgattggacagtcgctagtccgacctcagagaactcagccaatcataatgcttatatgctcccaaggtccccgcctcttcctcgaggtaacctttggtggcgggaagagttcggaagttttcgcgccggggtggagtcatcctgggaacctccacgcgactttggtggaggtagttctttggcagcgggcatggcgggtaccgtggtgctggacgatgtggagctgcgggaggctcagagagattacctggacttcctggacgacgaggtgagggaggcgccggcgcgcgggctctagcgctcggagcccctgcggacgcggcccggccgggaagccagaggcccgccagacctccagaccgtgtgccgcagcggagcctgccgggcccgagcctccagccccaatcttgtaacttctcaacgccggactcgctagtttgtgttcgataagtgaactcttaggaagccagctttctcttaagtacaagcgatggtccgggcgcgcaaaaggcgacaggttcccattaagtgcaagcagattggcaaagcccacctcggccttttgcatttcactgctctctcttgatttgaggagactgtgggggaggggctgccctagggctatagtgaccagccgcgttgcagagtgctcagattttagggactgacgttttacctggaggaaaagactccataattcggctgcattctttttcaata

SEQ ID NO: 121142 - DNA, 1058 bp, Homo sapiens
aaatgctatgaggaaaaataaatcaggataaggggaaagagagtgccagttttaggtaagggtaaggtaagggtaaaattttagattagctcgcttttagcttccctagagaagccaaagaccactgaagtctttgctaatggagttccagctttattatatgctcatcttgtccagtgaccctctcaacaatatatgtacagtggacattcagcaagtatttcataatagtaataacaatggtcttgctagacttgaattggagcactttttttctcctttttactgtctataaaagaagcatgaatagaagaattcttctattacagaagaagcatgaattgcataggagaggacacacaggtactgttgacaataacacagtgatccatacatccatctctgtggaaaagaagattgaacacagctgcatcaaaatgtaaaagaaaatattaaactctttataattatgtggctgtgatacatctcatggcctagagaaccattgggtctaaatattaaccaaattccaaaggaggtaataatatatccatgcatatgtaaaagcatacaaagacataaaatagctaccatgtattgagcaatcactgtgtgccaggcattgtgcaatgtactttacttgcattacctttggtccctgcaacaaccttaggagggagatatcccagtacaaatgaaacagagatgaagtggctagtgcaagggctcttaaagttagtgtcagagcaaagatggcagatgccttgtttgtgtgggggcatgaaatcgtgtttggaaatgctggtttaattaagggattccttggagtgcatatctagcttggcattactccagggtggagttccctgtctgtccagctcagcactctatctaagaaatcctagaagctgggaatttctggggctggctctgaattgatgtaagtggtttcctgaacccactggaggcatggagtgcattgaacattttttcactattttgtatgcctgtgaaaccacatacatgtctgtcaggcagctgcacgagccattaaaact

SEQ ID NO: 121143 - DNA, 1382 bp, Homo sapiens
cagctgcgccgcctgcccaagatcctggaggatgggcttcccaagatgccttgcactgtcccagaaacggatgtgccccagctcttccgggagccttacatccgcaccggctaccgccccacggggcacgagtggcgctactacttcttcagcctctttcagaaacacaacgaggtggtcaacgtctggacccatttactggcagccctggccgtcctcttgcgattctgggcctttgccgaggctgaggccttgccatgggcgtctacccactccctgcctctgctcctcttcatcctgtcgtcaatcacttacctcacctgcagccttctggcccacctgctgcagtccaagtcagagctctcccactacaccttctactttgtggactatgttggcgtgagcgtttaccaatatggcagtgctttggctcatttcttctacagctctgaccaggcctggtatgaccggttctggcttttcttcttgccagcagctgccttctgtggctggttatcttgtgctggctgttgctatgccaaatatcgttaccggaggccttatccagtcatgaggaagatctgtcaagtggtgccagcaggtctggcttttatcctagacatcagccctgtggcacaccgtgtggcgctctgtcacctggctggctgccaggagcaagcagcctggtaccacaccctccagatcctcttcttcctggttagcgcttatttcttctcctgccccgtgcctgagaagtacttcccgggttcctgtgacatcgtgggccatgggcatcagatcttccatgcatttctgtccatctgtacgctctcccagctggaggccatcctcctggactaccaggggcggcaggagatcttcctgcagcgccatggacccctatctgtccacatggcctgcctctccttcttcttcctggctgcctgcagtgctgccaccgcagcccttctgaggcacaaagtcaaggccagactgaccaagaaagattcctgaggctggcaagtggggcaacgtgtggaggaagcccctcataatttggagaaaacttgatacaatagaagctgacttttaaggcattggcttttaaattaatacatatatccaaggatatgttatagctgcagtgtttgaaagccaaaggatttaagagttttgttgttgttaataaaaggaatactccttttccttttggatcatagcttaacaaggcacaggaagggaagggatcttgactaagattcatgagacattgaattaaggagaatcatcttcatgcctgaaaatttagcaaaattccgactatggcctccaggggcaattcctaaaagctgaatggataataaaattggactggaaagtaa

SEQ ID NO: 121144 - DNA, 1012 bp, Homo sapiens
ctgcactattttaatcatgtttgtttctttctgtggactttccgtgtcctttaagtggttttgtatgtggaacaagggcacaggccaatggagaagccagggtcccaggctcagggtgcggcggtcactggcctaactcccttgctcctggaccagctcctcacaggcagagtctcagcccatgcttttccctcctgtgcttggccagcacctgcagggacacttttctctatcctgcccgtgtgacttgcccccttgtctccagcttccaggtgaagtttttctacctatgccagctggcctactggctgcacgcacttcctgagctatacttccagaaggtacggaaggtgagtgctcacttctctcccttcttggaggccattcattgaccactcccctcctgctattcccaggggtacctcccttccttttctccagaagcatggagtgttgggtggtgataggaatatgttggggattgagcaacatgctgagtcatctcttggagaagtgtcatgtagttgaccaccagtgtcagtctcttgcctgcctcttccaccagacctgtggctttggaggaaacctaactctcatcttatagatgtcaaaggagaggtctttgccatttccatagtctttttttatttttactttttatagtttccttctgaattatttccaagagccctcttctccagtccctgtctcttatttctcaatccaaacctcaccctctgacactagacccaaggctgctggaatttgggaatggacctgaatgcccttgaatttcagcagcctggtgcagtgggactgtgggactcgtgggacatgggactgtgtgttaaagcagcccagaggagcctggccctctctcatccccctgcacttttcccccttccctgaatcttcagttagggaattagcaaatttaccatctgcttctcttgtttccaggaggaaattccccgccagctccagtatatttgcctgtacctggtgcatatag

SEQ ID NO: 121145 - DNA, 1036 bp, Homo sapiens
tctaggaagagacattctcacctttctgatgtccctggaatgaggtagcctggggcaggagagctgatgaaggcaggcgtatgcccgacagagtgggtgggtagaggtgatagaagcagtgtatttgagagagctcacaactgtcaccgccaccacacacgccaccacccgagagcctcatccacttttattcctcaatcggcacgtgacccagggaggagagagtggtagtgagaagagattagaaatgaggccatgtaagttcgaagtgagatcatttccttctaatccaggtgactgtgactacagtggtatagatgtatccgataaaaggacttatcagtcaggttattgtgctcatggaggcccaagtttgtgggattagggccgtggactatacccgaaaggcatgctgataggtcacagggcgtttagtgactcaaaggtgggtggatcagccctcacttggaaatacaactaaagatcctaatagacaataacctagaatgcttcttactaaaccctgttggcctcattctgagcactgtaaaacctctgcctttaatcccagtgtgaacatctgaggttctcagccttctcatcaaagccaccagctcagctgattttctgatttactgaagcaacctagcctgaagttattggaccagaaggcttgtggcccaactcggatttcagctgtgctactgaaaaactatcttggctgggcgcaatggtgcacgcctgtaatcacagcactttgggaggtcgaggcaagtgaggtcaggagtttgagaccagcctggtcaacatagtgaaaccccgtctctgctaaaagtacaaaaaatagccgggtgtggtgttgcgtgcttgtaatcccagctactcaggaggactgaggcgggagaatcgcttgaacctgcaaggcagaggttgcagtgagctgagatcgtgccattgcactccagcctgggcaacaagagcaaaactccatatcaaaaaaacaaaacaaaactatcttatttcaggagatccttcc

SEQ ID NO: 121146 - DNA, 1031 bp, Homo sapiens
ggcctgctggcttcctttctgatctagaacaggtgagcccaaatgggctaagcatttagccacaaggttgtcttgggttgtgctactaatttgctgaattgtcttgggtgaaacacttaacgctgaatggtcttgggtgaaacacttaacacctggatctccatcttgcatctgcaaaatccagagtgatgaccactccctcagccccagtggttcttgtagacaggaagccctgggagtcctctgaagggcttgctactcagattttccgtagaccaacaccatcggcaccacctgggaacctgtgagaaaaacacactctcaggccccaccgcagacctgctgcatcaaaacctacattttaacaagagctccggagattcctgtgccccgtaaagcccgagaagcacggctttaaatgaggtgggcgaaaatctctaggctttcaaataatcctacacttctaacctcaaaggtaggatagggaaacccctaaacccagtaactcatttgcatctttctgtccttttctagtttttgtttttctataaatatttggtctgggaaagctggggggaggtggggagtatcactggtggagttggtttccagctggtgctatacagcttcctaagaagtcatgtacacatttgtggctgggcacggtggctcacacctgtaatcccagcacttcgggaggccgaggcgggcggatcaagaggtcaggagatcgagaccatcctggctaacacggtgaaaccccatctctactaaaaatacaaaaaaattagccgggcgtggtggtgggcacttgtagtcccagctgctcgggaggcttaggcaggagaatcacttgaacccaggaggcggaggttgcagtgagctgagaccacgccactgcactccagcctgggtgacagagcgagactcggtctcaaaaaaaaaaaaaaaaaaaaaagtcatgtacacgtttgtaaggcagtgtgagcagaagttctggtagctttgatgttgctcagcctgcctgctgc

SEQ ID NO: 121147 - DNA, 1019 bp, Homo sapiens
aataatgtttcctataaacagccttagagggatgagaaataattggaatgacatttttaataggctcctggttctcagccctgtgtgctacaggaactcagctggtgcttgcggagagggacttgttagtggtttcatccctagtctgaggtcgggagagggtcatggagtgaagacttggggtgctaaaggaccttttaaggcacagaagaaggctgaagaagtaagtctgctcttgactagtgctttttgcttttttaatggatggatgtggtcaatctagaagctgatcactccttcaggtggctgcagaaaagcttggagccaaatttctggccacctttagccaatgagtaggacttcctggaatgcatttttgtggatcagcctcattccttgcttcttttctttgcctaaaatgcatattttttgtgttctttcctgcttccattttacattaccattctattctatgtgcagtattgtgtgcctcctaagtttgtttttgggacaaggtttttaaaaaatcaagttgaatgttgccttttctgcttgtatagttgtgaggtctcgggaggctactttatctctctgtgccccaaatttggctttttcatctataaaccagggaaactgacaccatcttgttgagatatggtaatgtgggagcaagcatggctgtttacagagaaagttgcactttttagaatggtttctgctgctactaccaggggggctagggatggaaaaatactgggatctagtatttttgtcatgattatggccgtagatcctgttctctcagaatcatgttcagaaaacatgttaagcattcatctgtagtcactaaatattatagctgcttacagtatgagtttgtcaaataggaatttatgagaaacctactattcacccagctctgggacagaccgagagagagaagacatacagagaagaataatcgtggacagatgacaggatgagggtcagatagctgagcacagcaccgactctctcct

SEQ ID NO: 121148 - DNA, 1006 bp, Homo sapiens
tccctaggccaccctctgtttttcagtacccgattaatttcccaaattggggatgtatattatggcaagttcaagctttattctcttttttaaaaagcccaacttcaaagattttttaaaccctttattgtgactctttctacattcctctgtatcccaatataaagtttagacttttaaatcaatgactgtaacaaaccaagtaatataattttattgtggctattcaaatttcgagtttttttcataaatacacaatgtcacttttaatctaaaactgctatcaaaactgttaatagtgagtctattcaacatcgtgatcacaggcttgtagagaatctgttgtgtgcgtgtttgtttagctttgcctgatttttgtatcaaggcagtttttcaggtgaaaaaccagaatctctaggcgttgctaaaagccacacagaaaggtactgtcataactctgccccctgtgattcaggcgctcagccctcacagacagcctctggcccttcaaaacggagattttcagaaagcacaagtgaaaagcatctttgtttcagctgtatctgccttttatcgagcagtggaggggctgcaaacccacgtccatcacaccccgaccacatacctggcgcatgcaggtgatcagtgggcttgggacataaacactccaggaaaaaaggctaaaagactattttttttaaaaaaaaaaaaaacccaaaaatctcttccccaccaattgggcgtaactttccaaggttttcttgtctgcctgaaattttcctattcacttcctccgcagaaagatgcaaaatcaatctggggaaagccttagtgaagaccctttggcttccaaaaacaggccgagctgggagaagaagggaagttttaggtacctaatttcccagcctcagcaggacctgtcacttggctttaccctgtgtttctcaggaagaaaaaatgagggtcctcactgtcagtcgtgggacatatgtgtctctgtgttttg

SEQ ID NO: 121149 - DNA, 1055 bp, Homo sapiens
ggatgtgtgtggaggataattttgctggtttaaagtgtcctattcggttgggcatggtggcacactcctgtaatcccagcactttgggaggccaaggcaggtgggaggccaaggcaggtggatctcttgaggccaggagttcaagaacagcctggccaacatgatgaaaccccatctctactaaaagtacaaaaattagccgggtgtggtggtgcattcctgtaatcctagctattcgggaggctgaggcaggagaatcacgtgagcctgggaggcagaggctgcagtgaactaagatcttgccactgcactccagtctggatgacgggagtgaaaccctgtcgcaaaaaaaataaaaataaaaaataaaaatagtgtcccattgccagcagttacgttgatgaggttaattattatcatatggtgttagtattcttttatttgagtagcatatctccatcagtcagagtcccaacaggaaacaggtggggtaattgaggaatggttatgtaggcactattaacaagggcgtggactggctcaggggaaacagataaggaacagtaaagcattctaaggcttgcgaacgtggggagctatccctaagcttgaaggggctgaggatagcatggatctagaactaagaaggaagggagagaggaaataccattgagagctgtggttgaaggggaggggctggagttttggtggagggttgcagtgactgccagaactgtccagcaggaaaggagccaggtgatgaatacccctttcatgctctctcatgttctgcagattccatcggaagcccactgaagtactccataaaggtgaagctgtctgttctgggacacagggtaggatggagcattgtgcagcccagtagaacttacagatgctattctgccttctgtttgactcctacctcatatatgacaacaggcaatcaaagggtggcaaagctaaactgatgtccctgaaatactaccatctctgagaataggacttttggacagacgtttcctgattgtaataagccaaatagtgcaacacat

SEQ ID NO: 121150 - DNA, 1068 bp, Homo sapiens
ctttgtctcaaaaaaaaaaaaagccaaacaaaacaaaaagtacagattgagtgggtttgcggagggcttctcggtgacctctgagccccacttctccctgcgtgcctgagcccccagcccccggctctgcccatgaatgccctcccccaagagccacaagctccagaattacccctcaccttgtcccttctcaaagatcatatggcttcagcactgcttagtgctgtctccctctcccactgggaagaaaactatgaggttaaattaaatggagatcagctgcttgaaatattttatactgaggcgtgacctaaccatcataacatgtttaaaaataacagagattttgcgttttacatgttgtttttgttgaaggactttcttttctgtgtaaataccacttttataagcagatctcctatagctcttccactttaaaaaattgacttaatttttactctgtttttgtgcctggacactatgattttttatggttgtaataagaatgcacaggctgaattctgatttttttcccactcaatagtatatccaaatattttgagatgttagcattttttaaagatgaggttgtcctaaatgcctaccagtaagggattggttagatcaatttaaaatggtgacataaatctgtatgcagtgtcatagaatgatgtccaaaacatatggttatggtttttttaaaagcagcttacagaataccatattggtgtgggcctttttctgtaaacgtttggatgtgttttatttttatagaaaaatacctgtaaggatgatcatcaaaatagcaccagtgtttttctctgtcgtaggatttcaagtaattttactttttttctccacgcttatatctgtctattcatatatatatatttgttttaatgaaatgcatattattttgatgatcagaaaaaggcaatgttaaagtggttttgttttgggaatggaaaaatagaaagtttggattagtgataagcctgctgctgggggagaggtggtgggttgggggtagaagccagggcacaggtggagggtgggggtggaagtggg

SEQ ID NO: 121151 - DNA, 1021 bp, Homo sapiens
ctaaaaaatggccatggtgacgtggccgaagtcccagattaggggtatgtgtaaaactaaacagattgcagagaactggctccaggtcacatttgattttgttcatttccatggagacctcttgaaagtgaaagatagggcattcttatatagtatatagagctccttttggaaaaggtttattatgatgattaactcacaggctcttcttccctggaaaaataggctgcagatttgaggctcagttgccttatcaggacatacaccctgattctccatttctcattgccatgtcacatggggcttataaatacggtgttatgcatgcgtggtgagtgcaggctttgatttagattgtctgattctttaccgactcctgtacttaactagataacatgatgaagttacttaactgtggccgtttccttgtcagtaaaatggggttgaaaattcttgtacctacttcagtgagtttttgaaaggaccaaataagtgaataatgcatgcatggcatccttatagaacctgatatacagtaaggactcaatgtatttgttcagagtacctgaatattaattaattaattccatgagtattgtctctgtcattaagcagccattttatgtgcctctaattttcatattataggttatgtacagtctgtacatcctggtgcatccgttcctcaccagacatatcttttttttttgagacagagttttgctttgtctcccaggctggagtgcaacggtgtgatcttggctcactgcagcctccgcctcccaggcccatgcgattctcctgcctcagcctcctaagtagttgggattacaggtgcccgccaccacactggctaacttttgtatttttagtagagacagggttttgccatgttggccagggtggtctcgaactcctgacctcaggtgatctgcccacctcggcctcccaaaatgatttttttttttttttttgagatggagtctcactctgtcatccaggctgaagtgcagtggcacga

SEQ ID NO: 121152 - DNA, 1078 bp, Homo sapiens
acttgtttgtatggattttgtgactggaggaggaatgttgaagtagaaaggaacaggtggtagttgattttttaaaagaatagcagggttctggtttggttatgatggctggaacgtgtgcccttctttcagggttcttgaggaatgaattatggctggtgccaatggagggcctgcagcagggaagcgtgcagtgaaaggggcgaggacaggggcctggattcttccattaaatagccttgtggcccatgcaaggcccttcacctctctggggctcacctgcttcatggatgtgtcaaatgtccggcggcctggttgtgccttcttaacatggacatgtagaacaggactggaaaatgtgtataaaactcaaattgcgagtcagaaattgggaggagaaggagagaggcacctttccccaatcctatagatttaggagtagtagctaggcaaacattgtgctccattaggttagtgggctcacttctaatcttggtttcatttattatttgagttgaaaccagattctagcacaaatttggggttggcatgaaatatgtcttagcagaacccatggtggagaaggagaaaatctgtatattggaaaggaatctgggtttggctttgagactttaagattgccatccataatgaacaatgttgaagtttcaaaactaaatctgtggcaatatggagaatttggctatccagactgattcatccgcagaaatttctggaaagctacagttttatagcgctgaagtaaaaagcaaagttggtctgctgcatagtacattttattacccaagaaatgtaaaagaaacatttctgtcattctttgcccagcctgggaaatatctacattcaacactattcaaccatttggccattgagttttattttatttataatcattcagcacatacacctactctgtacaaaacgctgaaattgaaattcaagccagctaacatatttgttgatacaactctctctactgtgctcatttttggagcttcagaaagaagagaatgtgacacttctcagctactcttccctgcatttcctgggtccagat

SEQ ID NO: 121153 - DNA, 1069 bp, Homo sapiens
gggttctgacttggccctggctaggattccttcattcggaagctgagccaggaaaactcaattataattcttcccacaaagagcgactctcttggccattcctccttctggggacctctgtcgtgcctctgccaatgggctgggtccctctcccccatcagcccacgcgccaggcagccacagcccttgtgtctgcattgcatccctgcgttgctctttcccccactcactggtcacctcttctgcattcagggggcttctgtttccccgttagggaccccagggctttagttctctgtccccagggagatgatgactctaaattctttcccttgggataatttccttttgggaacacatatgaaaggctgtctctcccctcaccactcacccctattgctaccccaattttggtttagtgttgagccatcctgtttcgaaggcagggggcagcttttcccccctgaacccaggttttctcccagtcctacaggctgcttggaatagagaagctgctctgtgcagccacagcacttggctaaaaaatgtcaggaatgtggaactttattttccccctccttcctttccaccgttaagtctgcttttgggagaggtggcacagggggagttttctactcaactctttggtccttcagtcctgtcttaggtggagtctggcctgaccatcaaccagggtgtggacagctggttggggggtatgtgtatcagatttgaaagtagcctcctccccctccaccttcccttctccttccagtgtcctgttctgtgccacgtttcaaattgaaacaggcaggggaagaggaaaagtctttgattagcgaatggagaatgaggaaaaagggggtgcaccgaagagagaggaagcaatttatatactacctttaaaatgtcagttcaggactgaaactttttttttaagctcatttacaggctctaaagctgcaaagaaatgtttccacaattctgagcctatcatttgtaggtttggtttctttttggtctgtgatgacttaaaggttgagggacccagaggagttcttggtgatgg

SEQ ID NO: 121154 - DNA, 1021 bp, Homo sapiens
gaaggccaatttttggatatcctttaccactccgtgaactgtccctttagatccatctgcggcgacccagagcttcaccccctttacagagacaagaagagagacagggataccctccactttttggggaaagttgattctcttatagtgtaggagtggggggcagaggatggggatcccacccccaacagcaatgtcctggtgtcggcctcccaggcagggagttgtagaaagccagcaaggggtcagaattcacaagactgatgggaaggattccctactcttgcagagcaagaaaaatgtgatattcaaaagtgggaagaactggaggaagcttggcatgggtttgttgcggtatatcttgtctcagaagtgagatatgtgagcgacattcccctcactctcaccgtggtctcctctggttcctgagactccttgtcctcccttctgcgtcagcttgcttattgcattctcacggttgggttaggaagctgtgatcatttacaaacttccttggagatggaggatggcttgcctggctaaatttccttccctgtccctctgtctcgggttccctgtatctctacgaatgacaagggccctaattggctggcgaagctgccctcaagctgggaacgttcttgtggtggccaagtcagggttggatgaatgaatgtgtccgtggctgagctttagggtctgtaggaaataaacggtggtgctaggactggggtctccactccactttttgatagtgctcctttagttcagtccctctctccttcctctccctctcacagctctctctagtggtatattgggtcgggcttgctccaccttgttctgggttctcccctggaagtgtgtggtgtcacacagagtcatatccgtgtgtctcagtccctgttctgtgactagtctgactgaaaactgactgcagcctcagtttccccatcattaaagacgttcataaaactggtcttcgtcacagggtggttgtaaggtttaactgagatcatat

SEQ ID NO: 121155 - DNA, 1023 bp, Homo sapiens
tttctttggtaagaagtttgtagactgaatgcaatttgccaaaattttacatctatactgtctgacgaatacacagatagatgagctaagtctagtttgtatttagacaaaatatcaacaatattttatgatttcagcagtttcattaaaatcctcacagaaatgaagaagatgatttgaaactcctgttttcaagtcaaagtacctaacagctagagggaacatatttttgctgccatgatttggcatattacttaaaattgatgtactgtagaaaccaggattgttggtgagatatgacagaaattggctttatactgtaaggagccaacacatctgttatcaaaaaatttcccttcttctttgtccagaggatattttagctgcaattcttgaatcaggaaatgaaactttactcagtttcatagagcaatcaagggaacgctatgacaatgcaggcttatttgcctggtatgcccatgctaattcagcagctgctatttttgactgagcattggtgtcttttggggaaacaaaggtatttttgattggtttagaagcattcacctgtcccatcttacttgtgagatttgccctccatatgtgcttgcacatccccttctccaccatgtccaatctcaaatttttttctgtatattatgtagtatgctctgttttggttatttaccttcctagttcagtagtatgtgtccttccatccatcatcaaaattacatagtcgtttagccttcttcttcagtgatggggtcatggttgcattggtattataaccattctcattatctgacctcttagaaaacatggtcacaatattcacaatgttaaaaaattaaactagcactatcttgttacaaagcacaccaattaatccacaggcaaagtcgaagatgaactattaataatcattatatacacttaagccacatcactttgaatgatgcaacgatggatggatgaccattctgaactacaaattatggttgccagtatcagtggtcaaat

SEQ ID NO: 121156 - DNA, 1048 bp, Homo sapiens
cgaaacttaaactgaccttattttttttttaaatacaggatctcagtcggtcgcccaggctggagtgcagtggcaccatcccgtctcactgcaacctctgcctcctgcctcctgggttcaagcgattctccagcctcaacctcccaagtagctgggattacaggtgtgtgccacctcacccgactattttttttttgtagagacggggtttcactgtgttgcccaggatggtcttgaattcctgagctcaaagcaatcctcccgcctctgcctcccaaagtgctgggattacagtttaaattgactttaaattatgcctccctgtagcaacttatcatctcaatcttctgccttcttgattgaatacagaactccgaccctcttccttatgtaacagccctttggagatttgaagaaggttgtcatagtgaagtagctctagaggttctgtgtcactgagaattacagcggaattcctcagaataaaaaaggaaactcaaaaattaaatcttgtgaagtttgtttgctacatctattctttgtgcataaaagtgcttcagggaagtaatataactacatctaacttatgaaagtctaagttggtcctggggaattaataaaattcctgaagattcacagaagagttgatggcaaggcactggaatgtggcgtggagaaagtgatagcctgaaatttggttctgagttctctcagccctcctttccatccccttctatgcccatccttaccccagcctcctcaccttctctcctcacactctcagaacacttaccctatttggaataaaactaaaatcctcttggaatacttcattatcttcatctgatgtgacctgggtaaataactcccctctggacctcagtgcctggatttaagatatggacaagactagatgctctgagatcccttacaccctatcaccaacatactcgaagctggaaacagcctcatgatattcctactcaaggcgtatcacctaaaactaaagaaaaactctttgaatattatgggaattccatacccttga

SEQ ID NO: 121157 - DNA, 1026 bp, Homo sapiens
tggattcagtgggtctttgatattgatgtacccatgaacattcttattggatacgcatagtgttgctgtagtatctggtcacataggcatacttgcctttttcagaagaaagagctaactaaactcagcctcatttttcctcaagattcacccatctgcaacactaaatgtgttcatttaaatctaatactcagtcccttttagagagtttgacagagtgacagtgtgatacagttatttcaagtttttaagggacagaaatttaatatttttaagagtttttaagagagaagttttaatattttttaaaagataaacagagggcctcaagtttctcttaatttgatccagtaattctatccatgagattaagcatattaccaaataaaaatttagagataacattttaaaaatttctccagaaagctggctttatatgttgaaagccataaacatgtttatttcctttgatagacattttcactttttggaatttattccaaagcagtgagatatgcacaaagactgatgttcattgcaactttatttctagtgaaaacacaatagactgaaaaattaggaacaacctaacagttcaccagtaaggagatgtttgaaaaaatgttttgtccatttaatggaatattgaatgagcattacatttttatgttttcaaaaatgatttggtggcattggaaaatcttagtgacataataaggtataaaaacaggatgaaaacaaccacatatagtgtgattaaaaaaagtttgtgtataaaaaaacaggaaggaaatatttcaagctgttagtgtttttctgtgggtgatagtgtgatgaataattgtaatgttcctctttctacttttgtgtagaattttctagtgtgactatgtattatgtttcagggaggggaggaggagtgtgattacaaaagacagctttccagttatagccctgttctaaaagtgatacttggtggtgggaagaatcagaagtagggtttatgggctgggtgcggtggctcat

SEQ ID NO: 121158 - DNA, 1071 bp, Homo sapiens
ggtttctctaagcctgagtgaatgaatgaatgaatgaatgaataattgaaacgatagaatcaaaaatgtactttaggatgtatggttgaaaaccacaaacaatgctgaagaagaacctgccttcttcatgacggtgttggaggagttcccggaatgttttcttggctcaaattattacccagcagtggccaccctcagattccagcaaaccagtctcaagttttcactgtttaactctgaattttcttggcagcctaagaggtgagagtatgtggtaataatacatgtataggagttaatgggaagaggaagaattcaagaactaatatttactgaaaacttcctagtgatccttcctcaatgctagtccctttcaatattttatatctttaaccctccttatagtcccatgaaatgattatctccattttttcgttaatgaaatggaacatcagagaaatacaatgttcacagtcacactccggttggtgatggacatgaatatctacaccaaggactaaaatgaaatcatgcctggaagccagctgggtgaaggccctgggaacccatgaactggccatgaaaccagaggatgtcactgacagggaggaccggctgggagctaaatcactcttcagctctttggctgtgagactgcatttgatcaaaaccagaaattaggcctcagacttgtttaactgtagctagaagatccaaattctttcaagagacagagattgtttatcccttgcttcttttggaattctgtattctaactctatggggtgcattttgttttataagctggaagaagagatgttgctgcattaattttgcaatatggaaggagctagcatttgttcaacatcagtcacacactgatcattcttctaaacttctctttgttttatcctacaaaaattacctaaggttaatgtggttgttattctcattttacatttgaggatactgaggtttttaaagtaacttgctcagagtaaatgatagatctgggatccagggtcactgctattaaaaaccaaatactgagtcttattttctatgttagtg

SEQ ID NO: 121159 - DNA, 1069 bp, Homo sapiens
gtgagctgagattgtgccactgcatgctagcctgggcaacagagtgagactccatctcaaaaaaaaaaaaaagaatatgaatattttaggggtatgcactgcctgattgtgactttttaatagataatataactcatgctaaacttgtcagcagttgtattattatccatcccagaaatacccagcaaacacttgttgagggattaagcagattcagtacactgtactccataaactgaggtctaagcacccttcattcatgacaaagttgagatttttcttaaaggttgtgactgctattgaggccctgattttactctttcttatttcaggcatttaaaataagaatcagcaacatccctacaattaagaagttcctgcagcctgggagtcagaggaagccacccccgatacccactatgttgaacttgccaggaagatagtgctgctctaatggcagcaggttgcgtgatgacaaacatgatgatccagtcacagcaccagcatgtgctgtctgcagaggataatagaagcaaactgtagatcccaggagcaaagtgtctgaaaagaacaaaaccatgctgccattaacagcaacgctgattaaatgtagtataaaatcattcagatgtgtgtggctttttaaagtctgtcagttgtggatgatagtctacaacttttatgaaataaatgttctgtataaataaataggagccagatatatgtagggcaggggcccacatataaccctgttcttctgtctgcatcaagattgggaccattgagggaacagggaccagcaatttgcagggaaggatctctccaacacccaccataattgctgagtacttggggtaagaaaaaaagtggcaaatgacaaattaagagttagacattggctgatgctagtaaatcttacagggatgtgtggggaacagagaatgttcattctgaaaccctgaaaaaaagttggatatttagacaacacttttccacctaacagagccacccaagactgaattttgctatgatgaaacaattccaagtagcactgagattaagatataat

SEQ ID NO: 121160 - DNA, 1042 bp, Homo sapiens
tatgtggctctggtttggacttgtgggatcacattggtcacttgtttctactggtggtatagccagcaggtttaagctagttgtaacttttgtgtctctctacactggtggatacaattttgcttagccacctccaggtttataataggagcccagtactagcatttcaccacccaaaaggactcgataatcactggcaaaaacttccccaaaaaaattgtgccagtttacagcatgtgttagagtgttggtttcatcctattcttaccagcactggagatttgttgttgttgttgttgttaagattctttattaaatctaatcagtacaaaggcttcatgctcttgttaagtatttagccatgcaaaatggtttttactctcatttgatattctttattatttttctttctgtagattttgaaagaccatggagaggattttcttgttggcaacaaattcagctgggcagacatacagctgttagaagctattttaatggtggaagaactcaaagcttctgttctttctgacttccctctgctaaaggtagtgtattaacatccacacaaagcccagaaaaaaatgaacaaagactgaagcaaaatgtgcctttaggccaatctcaaaagaaacttaagaacattggggtgtgtgtgtgtgtatgtgtgtgtgtgtgtgtgtgtgtgtatgtgtgtgtgtgtgtgtgtgtgtgtgtggtggggttttgttgttgttgtttggtttttttgagacaaggtttcactctgttgcctaggttcgagtgcagtggcatgatcatggctcactgcagacttgacctcttggcctcaagcgatcctcccacctcatcctccagagtagctgggaccacaggtgagtgccaccacacctggctatttttttaatcagggaacctgccccgatagtcacttaggttcttttctattttccttaagcattggccagcttgagaaataaagggacagagtacaaaagagagaaattttaaagctgggcatccgggggagacatcacatgtc

SEQ ID NO: 121161 - DNA, 1006 bp, Homo sapiens
gcctcattgtgcaaataaggaaactgaagctcagagagattaagaaacctgttcatgtgagagagagagagctgagatttgaacctgggtctttttttcagtacccagagcctaactcagattaatgtgtttgggtaaatgtgttcttctacattttctaaaagatcttggctcaccacaacctctgcctcctgggttcaagcggttctcctccttcagcctcccaagtagctggggttatagtcatgtgccaccaagcccggctaattttgtgtttttagtagagacggggtttctccattgttggtcaggctggtctcaaactcccgacttcaggtgatccaccctccttggcctcctaaagtgttgggattacaggcgtgagccactgcgcccagctgcgggctttttttttttttttttttttttttttttttttaaatcaaaggctattctccaactagccaaaggtcatcatgctgtcttcactcctttctgctcagcccaccttagatatgtactcggggctgtgggtgggggaatgcatccccacggctggctcatctcaggtgaagctgcacacaggtgaagttttcaagccctgagagataggacttaatttccaatgttataagacccatgtgaggacacacctgttggccaatatcagcatcagaaaaaccagagctgaggagatgggcttgagtgcctgctcatcttagcttctaaggttctggaccttccagcagcggagttctcagagtgtttgcattttgggtgaaatccagaaagcactgctccttcgttccctgcttcttcatttcccacagatggggtatatatttccattgcacctgttcttttaagctttgacagtatacttttaaacaatcagaataactgggtttactttttgaagtataaacaaacttggtcttctatattactaagctgtgatttagcctaatctttgttgaaactccttagaggtcaaggaaaaaggatt

SEQ ID NO: 121162 - DNA, 1040 bp, Homo sapiens
tatgtgtggcccagtgaagccaaaagattggacacccctgctaaacaaatgctaaatttcatttctgcttggaactcttcaacaagtatttattgaacaaattttggtgggccattttgcataaccatatcttcgtagtatctaataccttttttgttagccttaaagttttggttttcctttttcaggaatacacagtgaaactaagtaatatccctacaattaagagattccttgaacctggcagcaagaagaagcctccccctgatgaaatttatgtgagaaccgtctacaacatctttaggccataaaacaacacatccatgtgtgagtgacagtgtgttcctagagatggtattgtctacagtcatgtcttaatggatcccagctctgtcatggtgctatctatgtattaagttgggtcctaagttgggtcttttgtgtcaacgagatcatctcttctagaaatatcaaccttttttgtccagtaaataattgttaggggatctttattggaaaacttttttggagaggctggtatttaagttagatctgattgggctactcatgtcctgtagccagttcatcctcataataagaatgggcaggatctcttgttctctcctgagtgtctttctactctcctgagcgtctttctgctctccttatcctgttctcttatccttatcccctccagtctctgcctaatttttagtgtttaataacaaccgaatgtctagtaaatgactctcctctgagctgtaataaataaaatggtagtaatgaatgcaatcagtattagccaaaataaagaatttatgagtcattgctcattgtcttgttgtgagaattttttaattagtttttttcaaatatagaatacatttgcacggttcaaaaatcaaaaaagtataaaagggtctacagtcttggaagtcttttcaaccctgcttccccgcaaccgaatcctgcttctcacaggcaaatgcagttactatttgtgtacccttccagttacatctgacacatgtataagaaaa

SEQ ID NO: 121163 - DNA, 1081 bp, Homo sapiens
cagctgaatttggaaaatctgagattctcgaggtcaaaatatataatattctgaatttgtgaaatcccgtactgctagcacatatgtttttacaacaaatggccccagcttcccaagatccaggataagaagtcataaatagaaatcatataaaagccaaggtttttttctccatgttttaaaatggtggtttttttttcttgagtgagggaaaatgcagcaacaaaaataaagaacagtttcccgtgccaaaatcctgaatattcatttcgcccctgagcactgggttgaagacgcgaaattgggactgttggtctgcgacgagctgctgcatttgtatttcagaaagcctgaaaagctatcatggcagcaaggcccaagctccactatcccaacggaagaggccggatggagtccgtgagatgggttttagctgccgccggagtcgaggtaccttatatgctgtttcttcacggatttgtcatacagcttttgagacctttgaaagaaaaatacgttttgaagcaccgttcagttctagttctcgtccaccaaaatcacaggcacgcttcactgagtcagataccatccctgaagggatttttctttataattagaacgtagttgatggaattctattttccttttgacttttacttaattattggcttctgatctagcaccagtgaatatttattaataagaagaaaggaaatttacctgaaaattgtcagttactctgagctcttattaattatgcattctcagggtaaatttcttgttttcttcagtggcttcaaactggcagccttggtatcttgcttacatatgtgtgtgtgtctgtttttgttttcgttctgttcttttagcttcttagtatggaaattttcaaataccaataaatgtagagagaacattgccatgaattctatgtactcatcacccgacttcagcaatcatcagctctatgctaatcttgtttcatctatcacctcccttcccttgttttgtgggagtattttaaagcaaaatccaaacatcataacatttcatctgggagttcctcaacattttcctctaa

SEQ ID NO: 121164 - DNA, 1920 bp, Homo sapiens
aaattatatgtggtatatgaaaaaaagaggggtcaagaatgatgccattatttttggcctgacaactttaaaacgatgtctttaactgcagtagagaagattataagtaggagacaagatgctcctcttgaactccttattttctcatgtttttgtcaccaaaatgcatttatttgtactttgcttacattggccccatatcagtcatgccggcctttttctttcattgcaggttattcctccctgaaggccatgagacctcatcctgggcgaccattcttccacacccagcctagaagcactcctgggttgataccacggcctccagccgcccagccagtgcatggccggacagactgggcttccaagtacgcatctcggcgatgactgtctgccttggtgatgaatctcttcctagggagaagcaggatactttccctcagctgactggtgttctacctgcaagatgtgcagagggcataaaagcaaatcaacactttatagttattcttctgaactaagacatgtcaatattcttttttaaagtttttttttaaaatattgatttgaatgcagtaggcttttttgtataaaattattttattctaaaactgggtcccattattttcttaaacaacagcattttgtatatatggattatgttttagcattttatacagtcaactttgtaatgaactttttaaaaattaattgattttcctttggggttccagataatattttctacagattttgaaaaatgtaataatattaatgcagtattgcaacaggggtgcaatttaaggctatgtgatagagggttatttactcagtgtgtgcagatatttatgaagtggtgaaatttcaagtgtggctcactaggtacttcaggccttcttggactgttgttagaaaagtgatcctctgcttttcttagtaggtcattggtttgatttttggataccactctgctgttctaaaaggactattatattatataattcactttgttttacttttgttccccagatgaaagaactctaagtaaatacattttaaaaaatttttctgacaccctttaatgtggttgcagatctcagatgaaaccaagcttaattatactatgccattatattctaatttattccatttttgaaatcaagttgtatgtgtaccaataaaagagatttctgcttcaaaaggctctcaacatgaaggttaacacagtcaatcaaacttacattcctgccaagatgcatggccaaaaaactaagtatcaaagcagcagaaggtttttgattatagtaactgagatggaattttgtgcctagctcagttctccagatctggctaggagcagtcaatgactaatgttctgtcctagccaaattctcaggacaatttggggagcagaaagagttatggcagaggttccactcatctacaaagtcacagtcacatgccacatttgatctcctaaccctggtgtagtttctttcaagagtgagaactttatttgttgggcagaggctgttccattgagaggaatgtttacagcagtttcaaaaatgacaaagtcagtttggagacagaaaaagacaaaaggtccagtctcatccatctctatatggtacatttgcctcacttatggttgccttaaaggcaagagggaaggtcaccatcagtgaacgcaatgcaatctcaacagtgtattgattcatattctcctagggctcaaactactctctattggttccaggataatgacaaattgaaccatatgtaagtaatcttttattttttattttttttttgagacagagtctcactctgtcacccaggctggagtgcagtggcgcgatcttagctctctgcaacctctgcctcccaggttcaagcctcctgagtaactgggactac

SEQ ID NO: 121165 - DNA, 1092 bp, Homo sapiens
tttaacatcatcaatggatggcagctgatacaatctgtgaaggatgagtgagacagaaagattgggaatgtgttttctacagttgccccttcagataagcaatgttatgccccaggagcctcctttgcatagcagagaaagttcagatggagattactcatggatgagttctgttaatgccaagtattgctttcccccaccccgtttgtttacacagaaaatcacagctggcctggagcacaaaaatggtgagataaagccaaagagtaggagaaggtggggtcttatttccaggtcaacaaaggattcagatgattgggctgacttggatgacttggatttcagtccatccctcagcaggattgacctgaaaaacaagaaaagacagagtgatgacactctctgcaggcaagtgtgctgctcacatttgtaaacagactgaatctggaattcatgagattatgggtacatatccgagaatacatactgtctctcgtgctgacccaagccatgctctcttcattcaggtttgagagtgttttggacctgaagccctctgagcctgtgggcacaggaaacagtgcccccacccagacgtcatatcagcggcgagacacgcccaccctgagatctgcagccaagcagcactatttgaagcactctcgatacttgcctggtaatataaatgacttggctttactttgattattaataagaaaccctgtccttggaatcacatattcacaaaggttctgttttagaaggcagatactagggggcttcccttcagaactgaggggaacatcatagaaatatttgctgaagcccaagcctcactttttttttgagttggagtctctctctgccacccaggctggagtgcaatggcgccatcttggctcactgtagcctccacctcctgggttcaagcgattctcctgactcagccttctgagtagctgggactacaggtgcccaccaccatgcctggctaatttttgtattttttagtagagacagggtttcaccatattggccaggctggtcttgaactcctgatctcaaatgatccaccagcctcggcctcccaaa

SEQ ID NO: 121166 - DNA, 1048 bp, Homo sapiens
ctgcttattttgtactcaattcttcagagtcttccaggatcattatgtttggctctttcagttttgtattatttttttcttcttctgtggaatgaggaaataggcttggaaggatgaaatactctatttaagacacatagcaaataagttacaaaaccaggatctgtgttgatccagaatgctttttagaagtagccagggtaacagcagtgtaactggctactatatataaataactttgtgttgcaatcattacatatattttatggtatcttagataagaaaaatcacaaggggtgttaaaaattcaaggtactgttttctaattgggctaagaaacagtagtaaactggtcacaatgaaatatagcccagtaatcaagacagtggtaactttcctggctagacttttctcctaaagccttatttgtcattccaggcacttcgatatccttacttccaagttggacacccactaggcagcaccacacaaaaccttcaggattcagaaaaaccacagaaaggcatcctggaaaaggcaggcccacctccttatattaagccagtcccacctgcccagccaccagccaagccacacacacgaatttcttcacgacagcatcaagccagccagccccctctgcatctcacgtacccctacaaagcagaggtctccaggacagatcacccaagccatctccaggaggacaagccaagcccgttgcttttcccatccctccacaacaagcatccacagtcggtgagcagcccagattcaccagtgagcttcgtgtctgtttattcctcttctgaccccattattgtgtgaaatattttctttttcagtatacagggtccagttatggtagatttatgtttgcaacagcatggaattgtaaagacccttggctttggagtgaaagatctaaattcaagttctggctgtgcctgttaaaaccgttgtcactaatggaggcagctatagggtagtggctgggagctggcctctgcagccagactgccaggggctcaaatctcagctctgctgt

SEQ ID NO: 121167 - DNA, 1076 bp, Homo sapiens
taaagataattaagttggcaaatccagtgtcttttccactattcccccagatttcatggtcttggtggtctctctattaatctaaatctatgtctcattccatacagtgccacagtagtgaatgtgggtggttaatgaatgtgggtgggtaatgacatggttgcctttccatttggggcacacatgccagaatacaaacttatatcacagcaattggctgagcaagattttctatcttttccttctttcagactgactggcctgaaggctatcaactttcaagtgcaatgaacttccgttggccacagtgtgtacccaataacttaaagaccttgattcccaatgctagcagtgaagcagtccagctcctgagagacatgcttcagtgggatcccaagaaacgaccaacagctagtcaggttttcttccattttcttgttataacgttcatatctaactctgaataatttctatgaattgcacaggaaatatttagtatttagtattatgggtgagaaatagtacagaataccactaatggtgtactatataaggtatgagaacttaaaatagtttgaaacttactgggtataaagtagttacaatgtaaacaatatagttgctttgaaaattggcatgtaattcacatgatatatcaccatttatatggaaatggaaataaacatatatttatctgtctttggagaatgttttcaaatctattctctatgagttacaattatatagtagtttgtttataagccggtactggttgttgaaaggcaacttcatattatgtaaaagtccaactgactcataacctgaagagattgacagatgagatagacctaggatagtaactgcacttagtatttcatagcactttacagtgtgcaaatgcttgaatatattttatatgatttttaatccaataaagactccatgagacaggcattattgttttcaattctgtgagtgagaaaactcaatcttggaaagtttaagcaatttgctctaatcactcatccattaattagttcaaatagtgcaactaactacaattcaaccaactgacc

SEQ ID NO: 121168 - DNA, 1099 bp, Homo sapiens
tctcaattcccatcagacagttatctgggccgggcatggtggctcacacttataatcccaatactttgggaggctgaggcaggaggatagcttgaagccaagagttcaagacaagcctgggcaacagagcaagaccctatctttacaaaaacaaaaaaaaaaaaaacaaaaaaactagccaggcaccatggtttgtgccagtagtcccagctacttggaaggctgagacaggaggatcacttgagcccagactgcagcgaactatgattgtgccactgcactccaacctaggcaatagaatgagatgccgtcagtgatatttttcccttgagtgacagtttatttttgcaaagttatctcagcctataatccagtttgatattttaaaagaaattttctctctagttaaaaaaaattatgaagaacacctttgaatgatttgcaaagggaaatgaatgtagtaatcctatgagaagttcgaaggactctacattatctgtgggatgaatgcataaagcctttggtgccatgccagactactttttaaattataactattttgcagagagcaatacaattgcaaagaataatacgaagcaaacttgcatttggatttcttctcctctactgtctctataggcttctttcatcgagacttaaagcctgagaacctcctctgcatgggaccagaacttgtgaaaattgcagactttggtttggcccgagaaatacgatcaaaacctccatatacagattatgtatctaccagatggtgaataccatttttctcaaaattatttaattgcacttctttaaaaagatatcattatgctaaggataatattaaagtcacaaatgttaacttttcactaagagaaacagtgcagtctgaaacatatatttatagatatgttggtaatgtacaaggttaaaaatcttgtgttctaaatcatgttaaaagaaaacctattatgcttttctataatgtaaataaaattttatatataggccttcctgaggacagcttaacaaaagaattatgtaaaatattctgcaaagacctgtctgagaaccatctaattgctattgtgaaaacttt

SEQ ID NO: 121169 - DNA, 1825 bp, Homo sapiens
tattacttttttaacttttttgctaaaaactaagacacaaatacacacattagcctaggcctacacagggttaggatcatgagtatcattgccttccacctccacatcttgtcccactggaaggttttgaggtgcaataatacgcagggagctgtcatctcccatgataacaaagccttctaggtacctcctgaaggacctgcctcaggctgttttacagttaactttttttttttttttagtaagtagaaggagtacaattctaaaataatgattaaaagtatagtatagtgaatactagataaggatttttcagcttcattataataagaccaccatcatatatgcagtccatcattaattgaaacttcgttatgcagtgcatgactgtacagtgaacttacaaagaatgaggagttgcacctgattggagcacactttacatgtattgataagtgttggaaaataagtttctctctttaggtagagtgaaaggagttcagccctgtttaatataaaaaggagtcatggatggtttttgtgggtgaatgagagagtgacaagggaaagatagtgtttaagtggtcaggattataggagagaagctggagcaaggaaggtctgcaagaaagtggcaatgcaggcataggcagtgagaaagtagaaagagacagatatgagatttacccccccaacccccccgcgccgctccaaaacgaagtcttgctttgttgcctgggctggagtgcagtggtgtgatctcagctcactgcaacctccacctcgcaggttcaagcaattctcccacctcagcctcccgagtagctggaattacaggcatgtgccaccacgcccggctaatttttaaaatatttttagtagagatggtgtttcaccatattggccaggctggtctcgaactcctgaccttcaagtgatccgcccgcctcggcctcccaaagtgttgggattacaggcgtgagccaccgcgcctagctgatatgagatgttttgatagaaaatacgacacaatctcataactgggtaaggatggatccaacataactgcaaggtacctagaaatcttatccaaaggttaggaaggggagatgatttgggagaggacaaaagtggttttggataagttaacatagggatgatagtgacatccagttgctgtccaaatagagatttatgtcttcagaagggtagagaaggcacattagaaatgtagacttgagcgttgtcaacatacaggttgtcaaggaatcgtgtagatcttcagtgatggctattaatttctcccataatgtgctagttagaatccagctttcacaacattgatacagattgagtatctcttacttgaaatgcttgggtccagcagtgtttctgaatttggattttttcagattttggaatatttacattatattttaccagttgaacatccctaacccaaaaatccgaaatccaaaatgctgcagtaagcaatttctttatgtgtcaggttggtgctcaaaaagtttcaggttttggagcatctcagattttgaattttcagagtagggaatactcagcctgtaatgatagcaatgataatgtgtaacaaataatagcatcagcagcagctgagttgtatttccagtattggtgtcccattgagatttggagccacattaaatgatgtctaggttggtgatactctcaggaagtgggaggtttggggttttcagagacatatattgcaattcactgggcgtttgagtgagcttggaagattgccatgttgactatctcctgcctgtacctccagagctctgct

SEQ ID NO: 121170 - DNA, 1061 bp, Homo sapiens
gaccttacagatatccaggtcacacttatccgtgccagaaatagaaatgcattgggcagtctgaaggacaatgttttgcaccaagagatggttctctgcctctgtgtttcctcactgtcttgctgtgcatgaccttgagatagtccattgcctttctatgcattgctgtcgttctagccttcttgataaaaacattgtaggtttgaatttaataatatctgggaaattaaagtttccacagcaggaaagtgtcctgtataaattcatagtgtttgaagattctctggttatttccatatattcatatctgattcatcaataacaaaatgtggtagaggggagaaagccttctttgtggcttgatgttttccttgcccaagggttattaatgaaaaagtaagcacacacattttctgccaggatgaaagaaaatccctctgttattcagctggcatataggggtgaaattaaattgaaggtctgttcctgtcttctggaagtcaaacagttttgaacaggaaggttcttatcataatagaactttgctgttgcgtgatctctgaatgaccacaactaaaagggtttccattgtgaatcagaagcccaaaggaagaagtaggcttattgttataggtcacattgcacacaccagcagaactggaaccctgctacgaatcagagttttattaccacctcctcaccgatggagcatgtcagatgtaattcttattagcaaaaaatggagccatgtctgcctccctacttcaacaggtatgtgggagagtcaaatgagagaatgtgttaatagtagtactgttaatgaccagctcttgcaaggtattaatgtgcaagcactgctcaaaaagctttataggctgggcgcagtggctcatgcctgtaatcccagcactttgggaagccgaggtggacggatcatctaaggtcaggagttcgagaccagcctgaccaacatggcgaaaccccgtctctactaaaaatacaaaaattagctggtcataatcccagctacttgggaggctaaggcaggagaatagcttgaa

SEQ ID NO: 121171 - DNA, 1088 bp, Homo sapiens
tatcaaatgtttaatctttttgtttttgtaacatgtgactatatttggtgtttataaggtagctcccctgtatggacaaatggtattctttagtatttattatcaaaggatctggcctttgatttataactttgttttcctctgcctcatacagaaataagttgtttcctgagtctgctataaggaatatcatgtatcagatattacaaggactcgcatttattcacaaacacggtaggtgattcggagtgttgtgcttttgaagagcagtgaaatgttgttatcaagtagaagttgtaggaaacattaatattttttgtagctgactcccagaaaaggttgaagagttgagaggctgacaatggattttaaaatatattaacttttataacttgatctctgaatttccctcattacttattgtgtctgcatgtttttattctgtaggctttaacattaagcttgttggttatagatctaaatattgtttctgaccattgagtagtatgttaaatgagaaacctacaattagaattctgagcagtttcatgtattatgtttggtccactaacagtgcttcactgttacttctcatttttctaatgtatttatatttcaacttgtttcaagcgagtttaaaagtagtctaacaaaatgtatgcgacacaggaaaatagaataaattaaaaattagcaaactaaaaaaagagacaaaggcaaaacaagatgtggatatagccagaggtgaggttagtcctcaaaatgcatgccagcaagttttatttcaatagaagaagcaggctaagatttgattgtgagctcgttgtcagaccatgcaaaatgtgaaatattaccagttacaacacacataggtaaaaagagaccagttacccaagaaaagcagaactattcttgataccaagaccagagagaagcttttttcatggaccctttagagaggacggtatgtaacatgactttatcataaacacagtgatgggttttagagggcagttttttgtcatatccctcaatggaggccaattacatcacctaatcagagaaaacatttctacgggggccagtct

SEQ ID NO: 121172 - DNA, 1011 bp, Homo sapiens
caaggaataatttatggatgattaaaatagctttgtacatgcttagatttatagttgatatagtcatttcatttgaattttttcactaatgctggaaagggaggcaaatgataacattacagctgaagcagaagattatggtataattgtatatactgttattagaaagctttcatctttaatggatcacttatatcaatatatttcaatataaagaagttgaatgtgttgatttagtgaattattattgcctattttcttaattattaacgtaaaggaaaatcacttgttgagtgtttttcctagacataatagcagtacttacttcagtttcttgctctaataatttgcactccactttctgtgaggaaattcattgacccccacacccttgcgcttgttgagcctcacacagacttaccagcactgggccacagcctaaccctgaacacagaggggagggaaggcagaagcgggtagaaaggaggcaccttacaagattcctcatccgttcctccttgctgaggtccttcttttgtgccatgtcaagcattgtggagcaccgatctttacttttattcagccttctgactggattcattattctcctcctttccccctgcccctgggattcattattctcctcctttccccctgccccttcttctattgattttgttccaatttttctctctgtcagagtagattgatcacattgagttttacatgcataattctcttccttgtgcagtggagtggtgcttcatctaattttagtcctctcacccagccctgtttgaaacacctaatagaatactgaaaaacaccctttctttttctccaaaggggtcctgtacatggaagtgaggttacaagtctaaagcagggatcagcaaacgttttctgtaaagggccagatagtcagtcttttatgcttctaggactaaaaggtcatattgaagatgttatatagatacatgtgtaacaagagcaaaaacaaatttccataaa

SEQ ID NO: 121173 - DNA, 1022 bp, Homo sapiens
gagaatgtgcaaactccacatggacagcagccccagccgggaatcaagtttttgtccctcatcaacattataatgaaacaacattattccaaaacctgctgtactttgggctttgcaggctctacagcgtcacacaactattcagctctgctgttgtagtcatgaatggtatgcaagtatgtgggtatgactgtgttccaataaaacacagatttagacttacaaaaacacgtatactcaaaatgtatattaacatttatccttgtctctcatttttctctgcaggcagaagactgatttttggaaatatgtatttgggagacagtcacgtcctattgaataccttgtgctggtgctgccatcgaaaaatctggttacactctggggaggactgctaccactgcagaactgaaccacttcggccgtgagatgagtgtccggcctgagcaggcacaccatgaatagatacacaacaatcaggcagctcggggatggaacctacggttccgtcctgctgggaagaagcattgagtctggggagctgatcgctattaaaaagtaagtttgatccttcactgccatgataattttaactctaccctcaccattacccgtctttgtaacagttctaaaggggagtgggtaggatgcctagagaagaaccttagataatgattgctgtgggttagatgattattgactctgtaacactcatgttagaggtctgaaaacatttccactttagatttactactttgcacatagtaaaagtacttgttatcaaagtgtgttttctcttattgtgaggtagtaacaagcaggttaataaacatcattttacatgagaggaaactgaaactctaagaaataagatgacttcatttgggccatctacatgcgtatggtggtctggtgactgctgtcttgttccctctgcacccccttgcccttcacaacctgagtccagacacattgtattagttatctgttattgtgtaacaatttactccaagacttagttg

SEQ ID NO: 121174 - DNA, 1793 bp, Homo sapiens
ttatattttatctttaaataagctcatcatggctgctataaaagataatgcctctgaaccaaaagataaagtattataagtgtgatgtccaactatatttgacaatatcatgaaagtaactatctgcgtgaacttgtagttcctagcagatgattgtcatcctaactcactttttttgaaatgaaagggccacaatagtgccttgcttttcatttggtgcttttcccaccatgtcaagaacccttagtagccacttaataaatgtataacgatggcccagagcttatgagaaccacacgtttttttaggagagatcagtgtgagttattttttacctttctataggtgaagcatgacctgtgataaagtattgataacatgtgactgctcttttgactaccataaaagataatgcctgagaaccggaaaggaaagtactattgtataatgcccaaatacgtatttggcaatatcatgaaagttactatctgcatgaacttgtggttcccaaaagatagttattaatggttttgccctcttggacattgcctttgctttgaaagagaatttactagagaatgatttaactaagacaaaggggagtaagaaaaatgtaagatatacatgccttcatgtgatcttagctgttgaaaagcaagttttttcctaaattagtgtaaaagtttttagaaggagtcataattttggtaccctagtcccagtacagttgtccagtttgcaaagaagtggggcgtgacgggatgacagtgagggtggacgtggtagtataggaaaatcatctatggtcaggattgccttttaaagctccataagttgttcattcattagttaattcattgaacatgtctttattgtgagtccgtacttgtgccaactatgccagttctctgggaactgagtactgggaatacagttgtgaatattgcaacgtttctgacctcacagagcttatattctaaggttaaacacagcttgtatgtagccctgtaacctaggggtaagtgagggctctatggagagtactaaagtgcttctgcttatttgggggatttcctcatcttcagggcttgacaaactatggcttgtgtgccagtccttcctgctgcctgtttttgtaaataaatttgtactggaacacagccatgcccatgtatttacatattgtctttgactgctttcatgctacaatggcagagtggagttgtgacggagatggagagcctgcaaagcctatcctgtttactgacccttcacagaaaaaacgtgcttatccctgccctattttatttttacattaagcctttacttcctttaattcattttgattttttgtatacatgctagcaaagcatcttacactgagatcagctccttagtcaaatgtgttgtaatagcatataaatactgataacatgtggctgtccttgtaactaccgtaaaagataatgcgttagaaccagaaaggtaaagtattattgtgtaacgtccagctacttatttgccagtatcatgaaagttactatctacatgaacttgtgatatgctcttagtcactcccctatcttcactatcccttatcttgcccacccctgaaacacaggcaagcaggactattgccaccctcggcagttttcattaagctggggactctcgttctagctcatctacagtttcacacatggcagggtaaaggtttgtttttctggctgtttttttattttttattttttttaacatttcgcctttacttcagttctttacagtccaccaaa

SEQ ID NO: 121175 - DNA, 1025 bp, Homo sapiens
acagcctcccaagcctgactcttagtaagctctcattaaatggttgctgaatgaatgaatgaatgagaagcatccctctggtcttttcagtgttctattgcctgtctaatctttaaaatgatcacttcatcatatctattctggacgtgcaaccttcagtttctctccattatgtactatctcaagtctaaaataatatgcctgacttctcaaggcctatcataatcagcctttcccttcctatctaaaatcctcttttcatttcagcatgcatctctgcactctaagcagtctggtcttcttgctgtcctgctaatggtgccaggcttcttgccactgcagtgtcactgctcatagtgctttccctagaaactacctcccttctctttactctcctgtgcgactcctacctgtcctcagaggagcctaagtctacttctcttataatatttcctctttctatttctcaagatacttgcttgttagcccttcattatactggctgtattgatctccaattggtttaggttagtttaagcctctttagggccggagccatatgttatgcatggtaatgtggtattgtgggctttgaagtacagcagaattggggcaagggcctgactccacttattagttgtgtggccttctgtaattctcctactattaatctcatgtgcaaaatagggaaaatgctcccccccagtttcacccccgagttgtggtgtgaagatggtctatagtgcctacccataactggcatatacatgataaaggtctgcttatcccttgacagtaacttaacagagtccaattcctgaacactcagcctggaggcctagagaaccagggtaaccatgcagtgaatccttagtaagtattatcctgcccttacttaaaatggcttgagcttaggttattcctggctgcagctctgcttctgggatctgttgctgtttttccatctgaaccttgccaggaacactactgcttaattttttttttttatactgctcctcttgcag

SEQ ID NO: 121176 - DNA, 1036 bp, Homo sapiens
caaaagggctgacaactcaagtgttttcagatagaactctcagcagtttgggtaacaagttctttatttctgaaagggaatctgggcaacacaccagagtctaccttatagggttcactttttatgtgcttttaattttttttttttttgagatggagtctcgctccattgcccaggctggagtgcagtagcacgatctctgctgactgccaacctctgccacccgagttcaagcaattctcatggctcagcctcccaagtagctgggattacaggtgcccgccaccacacctggctaatttgtttgtatttttagtagagacagggtttcaccatgttggccgggctgttctcgaactcctgacctcaggtgatccgtctgcctcggcctcccaaagtgctgggattataggcatgagcctctgtgcctggcctttacatttttgaaataacaaatatttgaaaaaacattttctttttgaaatacagaatgttaatagattttgggcttacctacagaatttttggcagcattcttaatgtctactagatgatatagtcattaaaaaattattggaagcttataacttcagtctgtaagtgatggcttatattttcaattctaattaaaatttggttttccaatataatttgacttttggtgtactgacatgtattttatgctaattttcttgattctttaagttttgagcagaaaattattttaaaagatgtatttaatggatatttaataattcagaagacagtgatttctggacttagagtaataagtatatacgtggaagtagatagatgttggacatattgatacattgttccagagttgagctacccttccttgatgagtcctaaaatgctgttctccccataggcacaactccagatgttccgagctcagtggatgtttgaacttgctccaggtgtaagctctagcaatttagaaaatcgaccttgcagagcagcaagaggctctctccagaaaacatcggcagataccaaaggaaaacaagaacag

SEQ ID NO: 121177 - DNA, 1014 bp, Homo sapiens
ttttttctataacttatttggtatagaacatcacttttcttaatacattcttccttcagtactcattggaaattggttccaggaccctttgtagataccaaaatgctcaagtcctttatatgaatggtgtaatatttacatataacttacttattatgtaaatagttattatactgtattttttttttaaatttgtatttattttaaatatttttgatctgtagttggttgaatcagagaatgtgaaacccatgaatacagagggccagctatatttgaaattgttttttaaaaaataaaaaatagaaattgtttttctatataacctgtctttttgcaaaaaaatattgctgggaaacatcatcatgttggtaggatgagcaaaataacttttttttacatttagctttagttattcttcattaataaagtatttaaaaattattcattttaaaatatgctctttttataggtgaaaattgcttcagaggatgggaatataaaggataaattgaggaaaaaatacatgtttttctttctaagttccaatttacatattaccaacagaaatatgtggtaatggccgggcgcggtggctcacgcctgtaatcccagcactttgggaggccgaggcgggcggatcacgaggtcaggagatcgagaccatcccggctaaaacggtgaaaccccgtctctactaaaaatacaaaaaattagccggcgtagtggcgggcgcctgtagtcccagctacttgggaggctgaggcaggagaatggcgtgaacccgggaggcggagcttgcagtgagccgagatcccgccactgcactccagcctgggcgacagagcgagactccgtctcaaaaaaaaaaaaaaaaaaaaaaaaaaaagaaatatgtggtaatatatgtgtcagctttgtgtcttttattaacccaatagaaatgtgtaaataaagtgataggactatttgccatattaggtttgtaattatgctttccttttgtgatagtaa

SEQ ID NO: 121178 - DNA, 1035 bp, Homo sapiens
tttctgattatttatactgttatataaaatgtatattaacttctagcaatcactgaagaaagctggagagttttctaaaatgttgttattttttattggatcagcttttttgttttttaccagatagtttgttttttatatatgaaaatgtaaagctgaaatctcttgtgaaataactagtaaaattatacctgaatatgtttttggctctgctcatgtcgaatcacaggggattttttttcctaaattagctcatatagataattctttccataaggatattgttagaacttcagtttctactggaaataacctaacttcagataattttcttcttcctgttcttaaaaaaggaaaaaaatgccaagcaaatatgattactgacattattacattctagagtgctttaaattgtcctaacagattggtagcctaattttttcacctttctccatatgcacgttttcaatcctggttaaaaattgttatatgtacccaagaagccagttgtatggtatttggaataaatattaatatttacttgttgcctttataattaatacagcttttgaaggatatttctcttgtatgaaattcccccttctctaacatcatatgtccagacagggcagagtttcatctgcgagtcctatcaccttgtggccacctgttgctggcgtctccacttccctctgatgggctcctggagcctgggcagcagcagcctgagagacagagagagttgctttgactgtgactgcaggtttcctgaggtcaaaattgggaatttggaaggccttagttgctcaggttttatctaattaaaagagtttaggaactcccatgtagaatgtcaattttctcttcagaatatgatgaaatattcatagtgtttacatttttttgtttttagcagcagtatttgcagaagtgtaattctaatgaaccttgtcacagctgtttgctcatttattttactgttattgcaaaagataagttatactctgtgctttttcagcatccttcaccaattta

SEQ ID NO: 121179 - DNA, 1051 bp, Homo sapiens
cctcccgggtttgagtgattctcctgcgtcagcctcccgagtagctgggattacaggcacctgccactgcgcctggctaatttttctatttttagtagagacagggttttgccatgttggtcaggctgctctcaaactcctgatctcaagtgatctgcccacctcaccatcccaaagtgctgggattacaggcgtgagccattgtgcccggctgacaaggcttttttcttcacatgagtaatttttttggcttcttctcctccactctagtatttccaccctcagtaaggaatggaaacctgtcccgtctggggtgtgaagtgccctctgctttttcccccacattgtttggggttcccagcacctcagccacattgcatgctgggttttcattgtcattgttgcaaatgaaatggagtagacatgtgaaatgctaacctatctaggacctgatctatgccttcttgggaactgagaatgaagaaacagaaatagatggtggaagaactgcctaaggtgtgaaaagctgaagattctaccactgaagtactgaatatgttgtctagttgtgagactagtgtgtaaaatatatgttttctagatgatttctgagacttgtgatgacaaggaacctgacctaaccccatttttcataaagacaaagaacagcaatgttaaattgccatatgaagagaaacactagtgatgtgcgtggtctccttgcctcttgtttccttccctcttcctcactgacttccccttgcacaggggcttctgttttatcccatttattatttgtggcacctatatcaatgtggggtttgtaataggtgagaaatatttgcttggagaagctcttgtgcaattagcctggcaatgattggccggccatgtttgaatgccagtttctcttctttgctgaagtactttatgataaaagtaagcctagacataaaatctggagagaaccatgcaataaacaagtatttttgaaataaattattccttctcctttattagaatagtaacagatgcacatgatacaaaattc

SEQ ID NO: 121180 - DNA, 2690 bp, Homo sapiens
agcagcatagcactttgttcatgaaggctgagatagtcgccgaggcagtgaggaacttttgaagacgaacaagggatgtgggtgtcaagagagctgctgccaggtgggaaagaccaatttggccacataacccctgtcatctgccatccagatactaaaaggcaaagcaaagtgtaaattgaattttctatgtgacattttaaatagtatttctgttgcagcctgtgattcagttaacttacctcaggctaagcctcaaaaaaaaaaaggaagaatgattgaaaccagtgacaaaagatttagtcaatgaggacttgacctcaggagtttctccttgataagatttgatcttgaaactaggcctagtgttagggatgcaattctcagtaaagttccctataaagaaaactgtggtcatttggttctcatctgcccttacacattttagacctacaacaagaaaggggcctcccgaaggaaagaccacctgaaggaccaccagaatgggtccatggctgctgtgaatggacacaccaacagcttttcacccctggaaaacaatgtgaagccaaggaagctgcggaaggattgaagtcaaagaattgaaaccctccaaaccacgtcatctgattgtaagcacaatatgagttgtgccccaatgctcgttaacagctgctgtaactagtctggcctacaatagtgtgattcatgtaggacttctttcatcaattcaaaacccctagaaaacgtatacagattatataagtagggataagatttctaacatttctgggctctctgacccctgcgctagactgtggaaagggagtattattatagtatacaacactgctgttgccttattagttataacatgataggtgctgaattgtgattcacaatttaaaaacactgtaatccaaacttttttttttaactgtagatcatgcatgtgattgtaaatgtaaatttgtacaatgttgttatggtagagaaacacacatgccttaaaatttaaaaagcagggcccaaagcttattagtttaaattagggtatgtttcaagtttgtattaatttgtaatagctctgtttagaaaaaatcaaagaccatgatttatgaaactaatgtgacataatttccagtgacttgttgatgtgaaatcagacacggcaccttcagttttgtactattggctttgaatcaagcaggctcaaatctagtggaacagtcagtttaactttttaacagatcttatttttttattttgagtgccactattaatgtaaaaaggggggggctctacagcagtcgtgatgaaacttaaatatatattctttgtcctcgagattttaggaagggtgtagggtgagtaggccatttttaatttctgaagtgctaagtgtttttatacagcaaacaaaaagtcaattttgctttccaccagtgcgagagaggatgtatacttttcaagagagatgattgcctatttaccgtttgacagagtcccgtagatgagcaatggggaactggttgccagggtctaaatttggattgatttatgcactgttatctgttttgacacagatttccttgtaaaatgtgcctagtttaccaaaattaacaaagggggggaaaggaccttagaactttttaaggtaaaatcaaatatagctacagcataagagaatcgagaaatttgatagaggtaacttgtttaatgtaaatctaatagtacttgtaatttctttctgcttagaatctaaagatgtgtttagaacctcttgtttaaaaataatagactgcttatcataaaatcacatctcacacatttgaggcagtggtcaaacaggtaaagcctatgatgtgtgtcattttaaagtgtcggaatttagcctctgaataccttctccattgggggaaagatattcttggaaccactcatgacatatcttagaaggtcattgacaatgtataaactaattgttggtttgatatttatgtaaatatcagtttaccatgctttaattttgcacattcgtactatagggagcctattggttctctattagtcttgtgggttttctgtttgaaaaggagtcatggcatctgtttacatttaccttatcaaacctagaatgtgtatatttataaatgtatgtcttcattgctaggtactaatttgcagatgtctttacatatttcaatacagaaactataacattcaatagtgtgctgtcaaagtgtgcttagctcacctggatatacctacattgttaaatgtctaaacagtaatcattaaaacatttttgattacctgtgcctgcattttacattttttgtgctggcaattctgaagaactggagaaaaatccacttaattcactgtctaggaacttacacaaatggatataaataattcagttaggaaggccatattattgcttagttctcaatgaggaaggaccctgcataataaggcatagtggtggttccaccctaatgctgtcccctctgcctcctccaggtaatcccactaaaggttccagctctaaatatgctcctttgtccttcctccccattggccccaatctctccccttaccctgagaatgttagaattactttcctaggtctagaccataggtcttctgcaaaatttttttctggaaagaaccagttggaaaatatt

SEQ ID NO: 121181 - DNA, 1051 bp, Homo sapiens
cttagtgttgtttgccagtaaaggtttaaatctactcatcagccttcaccaaaccagaagcgtccatggataaggagttggaaggatgtccagccaggtggcacatcctgcagtgatgttatcagtgccctttcaacatacacacttgctcttccttctcaaaaaataaaaacaaaaagtcttggatgtctctatagtgtatccttgaaatttggagaaggtagtttaaatagcttggagggcagaggaagaatatatataagacaaacacacctagagtttaggataagtatagtgtatgtgttgtgttcatgaagtgactgctgtacctgcagcaagggtagtaagtgttaattcagaaatttaggtgatgctggttaaaaagtctgcctggtgtggggcctcgtccatgcactgtccctgttcagctgcatcccctctgttcccctagcttcagtttgtgctgacaatcatccagaccagctgcggggtcatctggccgtgcacattccctcttggttggttgtatttccagattggatacatgatttccctgattgctctcttcacaaacttctacattcaggtaaatctcacccttctctgggacttggaatctggggcctttaccaacaaaggccctcatctatttacttaatgggcatgtggagcccttgctgggtgacaggctctggcctctaatggagtcactatgacaagagcagcccctgcctctggggggctcacagctcactggaagacactagaatcctgttctagagcctgggtgaggaagtcttgggattcccctgggaaatggaaaactgtgcagcaggaccctatgttgcttccctctgacctgcagcagagacgtgagaggtgatttcaatcagaaatctctcagttcactaccctgaacgtcatggccaaatgaaatttcagaagagatttttatcacagtcctcagatatggagatctgcttttttgtcccagctttcttatacattcagtcttcaggtgtgaggattcggttcattcctaagcatatga

SEQ ID NO: 121182 - DNA, 4067 bp, Homo sapiens
tatccctgagcctacagcagtggttctcaaagtatggtttccacatcagcagcatcagtatcacctggaccttgttagacatacaaattctaggcccccagacctactggaacagaaacacccccagggacccatgttttactaactcacccctcaggtaattctggtgctgcacactcaagtttgaggagcactggcttagggaaagcagccagaggcttctgtggggcagagcagggagcctgtgattggcttggtctgggcacttgtgctaggaccaagggggtgacgggctgagggttctgcagagaagcagcgtggtaaaggaaggtctctgagggcagcagcctgggagtgacttttaagcccaccccttaggaaattgagactcaagtcattaaagctttccttttgtttacacttgcctacaattgttttttctcagagcaaacttggctcagcacagcccaaggtaaattatcacagattctgcaactaataaagttcaatgaggactttacatggctcagatgctgttggtgactggctctttcttcttttttagttagtaacaggagtatgggaaggcaaatacaacttcttctgtcagggcacacgcaccgcaggagaatcagatatgaaggtactgtctctttttcagaaactttattattataagtgttgagtttttaaaaataaattgtataaaatacaaaatggcccataacctcactgcccaggcaatccctgttgatatttttaaaagaataaaaaaggcaatatatacacatcaaattaaaatttgaatgtgaaaggtataaaataaaacctaaagcatccccctctgtaaaaataactccggttaacaattggcaggaaaaatcacatgcagtcagtatgttatatttacacaatcaggatcataagagcaatgtcttaaatttttaaaatcattcatccaagtacttttttccgagtagtggtgttaaaaataaaatctgacttccactcatgaggtttgttttaaatcacaggccaacagtcgcagctcagcatgggcagtcatctccttagagcacttgtttgacatgtttaattgggcagagacctgacactgcaggttctgattccttttcttctgtgtcacttatcaggtcggctgctccatgttagtccctgaaatcaatagcgtttttcagatggttttcctttgctaatggctgtgcaggctgcttccagagggaataggcagacttcaaggttttgaaccttgagcctcatgtttttgttagtctcaaagagtgtcagggaccctttcaaaaatattccctgtagtcatttcaaacccctccagctgtcccaacccaatcatgttctttggttaaaggtacttggagagtgaccatagctcccagccactgatggacattaagagctcttggggcactcgggcttctccgagttgacatcagatttttggatattagtgaaacatgtcagaggtgatattccagagaagccgtgaggataagccttaaatctttgaccctttcctcttagattatccgtgtcctctggtggtactacttctccaaactcatagaatttatggacactttcttcttcatcctgcgcaagaacaaccaccagatcacggtcctgcacgtctaccaccatgcctcgatgctgaacatctggtggtttgtgatgaactgggtcccctgcggccactgtaagtattagagacggggacttggggaacaggtgtgagcagggaggagagttgaaactaaggctttcagaaaaggtgctgtttctgtaaatgtctaggtcaggctttcagctttgtgttcaagttgcttttaatgatagtttatgtacctatgcacacaaaacccttttttagttaagtgaactttctgtgctgattgggtgagatgagggagataccactggggacatattaaggaataggtacaatattctctgacttagagggcaactttccaggttctttctggtccttctgtatggtgtggaaggtttgagacgggcaggtgaggaaaataggatcacactgttgcatgagtaccagggagcaaggctcattttgaaatacagctttagctgtcatgcattaggaagtctccacatgttctaacaaccctcatattccctgaagcatggtgatcaaggtgtcttctataacgagcaccaaaacttgatataaattttctaaggttgtacttggtttttggaaagcttgtagtccaaagtttcttataattttcagagattgccaccttcagattcagcctgggagttttagcaaatgtctcagtcaaaagtcccgtcatccaaacactgaagaatttaactgagaacctatgggtctatttatggatatttttttctctgggatagcactgcccttgattacctgagcctgctaagattcacagtgtcatggaattccagagctaggaaaaaaaaaaagctttccaaatacagatcctttgggtttgggaggaaactaagaccacagaaaggtgggtagagttggggctttctgctcttcctcccactgtcagagctcatgatggtggattaactgacctaactttctaatagaaacagcccctccctacatttgaagagtgctttaaattttcagagaactttcaggaggacagatttaatcagctccacttgggccatgagaaactgaaccagggaatggatgtgatgtgtccaaagtcaaaagccagttcctatcatagccaggagtagaaacttccctaacaccaggctgtgcacctgcaactgcacagggaaaagccagatggcttggtttggttgctgactgttggggaggaggacagagtctggaaaaagaactagtggtcctactgaacattgaaaatgatgtgataagatggctcttttatctctaaggagctagactcttgactctattattaataaaaatgtatgacctcagcactgcagtcctgggaaataattagaagatggcttcagagacctctccacaccccagcaaatgtatagaaacaaccatttttgagcatattgcccatcagctgtcttccacagccttcagagagcatatttgggcagttgtgcatgtaaagaaaaacagctgtctctgagagtgggtgggcatctgcagcaaagcctgtaggtgctgggatggcgtcgtggcttcagtgtcagatgcccctctagcagctacagctgacccctgggctcggagcctcctggtggctgcctgcccaagtggaaattgaattctcattacacatccatgcattgcttgctgttgcagtgtttgtcagctccgttggaagtcatctctctttctgattcaaaaagaatcttgtattttttttttttttaccacctgttctgtttaaaacactaatacattctccttcccaaatccctctgttcctgcagcttattttggtgccacacttaatagcttcatccacgtcctcatgtactcttactatggtttgtcgtcagtcccttccatgcgtccatacctctggtggaagaagtacatcactcaggggcagctggtgagtgacttggcctctttccccaggacttacttcctggtggatacagacctcttcctggctttagtgttatgtaatagcatctaagatgccccttctccaccctttttcatttgatgtaattaaattccttgaagtgggtagattagggaattttcttgttttgaactgatagtgaactgtgaccatgggcatacagctagttgaattgtacaaagaggtctagaatctaatttgccaacttcaagttcagctcttctgagtttttgcacataagcacatatgcatgtatgtgtgtatatgtgtgtgtgttttctaattatagtccaaaatccaaaatgaaaattgtatgtttccaggggttttagaaggagctggagagtagtatggagtccagggtatgtgtagcccattactaggcagcaaggatatttgtttggcaggtatggatgacccctcagcccc

SEQ ID NO: 121183 - DNA, 1052 bp, Homo sapiens
taaagtttgctttactccaaggaaggaggaagtgtataaagctttgcagtggtactgtttgtatctcagttcctcagaaaaaagcctgcaaataatgcccctgggtggttcttggagttggcagtggtatggaaaatttcgttaggtagtggttagctgtttgtgatggcctgctttttcattatagtatagtcctgtcctctttcgatctgattctcagaagcccaaggtagacagacacctgcccctattttcagtacttcaccttctccagcctactgggtcctctcaccctgtggtgtctacttaacacgcaacttgaagaatttctgggaaattgaccaaaacagctctttggaaagaagctaggcctcagtcccaaagggaaaggtggctgatgtgactttgacttgaggattgtctcctgtgatgtgctcctagtggggctacaggggtcagtcctttgctttgagcacctctgtagtccactacccatggacacattgctatcctctgagggggatggagggagtagagccctctactgctagcccattttatggaggtttgatgagggtcttaggtgaataagcttcaactcaggtccttggtcttggtttgttaaattattctatcctttctgaagccagggagatttgagaatttccatgaccccattatgaaattgatgatgaagagttttcatcttgtgaacagagttcagatgaatatgatcacaaagtcaagcctcgtttaaaatactatgaagctctctttattgctgcacatgaaacattaggcctagatttaggggaaagaattggcagtcttgaactctttgtcatttgtttagcaaatatttgtttgacatctctggtacgctaatccctgtgctggaatatgttgatgcagatgcaggagccacagtcaccacccttcgaaatcttacagaagagcacacaacaggcccattaacaaagggagcatgtgagcaaacagctacaggtcactgcaaggtgagggtagaggaaggagaatagacctcaggctct

SEQ ID NO: 121184 - DNA, 1038 bp, Homo sapiens
gcctaagatcatagcaaagacagatagtgcctaccttatgtcaggtattgggctaactaatctaatgcttattgcactcttaccatctgctttctacagagggaaagttctgggaggcctgaacagggagaactgctagcataagagggcagggcttgaggattcagggaaaatgccagacatacctgtttcagtttggattgaggacaggctgtttctttgtgttttgttttaaagacttctcaagtgtacagaacctgtcttttttaacttagccaagagtgttacgttcagctataacccaggggtattcctgttcacaaggagaaggaaaaaaaaaaaacacctgtggaggtcatgggtgtgaaattatcttaatgggcatccttatgctctggacatgaaagatttgaaatgtaaaaaccacatgctttgacctggcactccctaatagcactgcgaaaattggccaactaaaccctagaggaaataggtactttcaattttgagtagttcatggttaattttaaaccaaacatctgcggaagaaaaagatgcagttaaaggtctgcttttccacagaattcttcatggacagagtatccctaccatgttcttactaagaattcaaaaacagatgaagaagggcaaagatgcttggaactgctgtttgaggtgcatttggactgagagtcaggattcctttgtgctaatcccagtggtaccaagacctgggccatccttatcacttctcattccctgttttctcattaaaaatacgagcttgtaccagatctaaaaaatacacagttgaggactcacacagaaacaaagctatgaagagggtcaaccctacgtattcttggagattttgcttagaaaagcaccttaggtcctgtgatgtagttgaacttgagtatggatagtctatttttcattactttttaccccatttctgcataggaggtagtaaacatgcagcttcatcaagctcttatcaccagaagcagccagtcttctttggaaaggggttatctt

SEQ ID NO: 121185 - DNA, 1025 bp, Homo sapiens
gggtaacactatagcctttaaagctaaaagggggaggaaagcttccctctggtggtaagcagtttgtgtacatttttccaggaaagcctacccacttttcattcttacagcaccaacctatttctaactcttctggagaattaagccctggataaaacctatacaggcactcctgtataggttttcagggtttcattttggttttagttcttcaaggagtagtaaagaagaaggtagaggtgggaggaagaggagagatagaaacatgaatcttaaaattagtgttcaggggtcaaaatgaattctccatcagcctcaggccatgatggtgtctccctgtctacgtgtggtggtgtgcaggagtgtgggcgtgtgcaggcatatttgattatcagaggtgttgcagctgtgggatatctgtgtcttgttctcccatgtatgtttcataagccaaggtacagatattctgaatagaatggtagatgttcctagcattacttttatgcttgacatgccaagaaatgcttacaactcctttttttgcttttttttctgtcctattctagaatgaagtcagtttaattagactccaagatggagagttcaggactggagccaggggaagtgcacaggagtgactcctggccccagcactatgcacatttctgtgttcaagggacaaaaccacagcaagctgtcaggtttctgagtgaactgcttacttttccataattgatagataatacagccatgtctttaagagaactcttacagagtttattattatacatggcaatattaatagagaaaaatatttcatgtgatttttagagaacttaagcatttgccttaaatgtttcttaagccctagaaatatagctataatttcattatttatcctctcttaaacagatgattccctggtaaagagaagaaaaacactgtataaagtacagctgtgtgcatctgagtggatgtggggggttctgaacacattgtaatagaaggtacagattttcctctga

SEQ ID NO: 121186 - DNA, 1018 bp, Homo sapiens
ttactgtagatatgaagtactgtaaaataataattgataaaagtaacaagcggaaaaaactgtcttgtcactgtggcattctgttccctgatatggctcttccttgtcttacctcaagtcctcagttgttgcccagacaggatctcttcctgtctgccacctctcattccagttagttccacttttttccccactgagatttcagcttcacggaaagagtttttatggaactaagaaaagaagttcagaaaactggcacttcatttataaagtgaactcacagaattgtgtctttccttttgatcttcaagttagatctagcacagaagtcacttctgtgaattaaattcttttaacctaaggaactgaacttaaccttgtctgtagcatattctttgaaaagaatttattcttttatgaaaaaatactgtataaaaaacattttgagtagagattaatcagtatctttttttttcttaataggttttcaaatggaacattttgatgcatcacttagtacctatttcaaggcattgctaggccctcgaggtaaggtggtttttggttttgcttaccttctgcagcatcactccctgcctatagtcccttgtaaatattgcatgaggagatagtagaaaatgttagcattttctatgataagtctaaaactttatcctggataacaaggaatttggagaagtctctgacagagacacctgctgtgggtggtcctccgttgactttaactggagtttaaaaatatgctgtaaagcttgtagcctgagaatactatagatttcaccattatcagtggcatttttttctcaattcttggcagtctttaagaaaaactagtttccaaaatgcagtgttgcaataggagtttaaaacctttccccttttacaattttaagggctttttaaggtcttctcattttgtatcatgttaactcactggtaaatatgcacctgaaccttacttgctgtatcttttagaaagtaaatcagcttcatattg

SEQ ID NO: 121187 - DNA, 1030 bp, Homo sapiens
gttctttgttctgctcgtgttagtatttccaggtttttgtattccaggctatggtagttccagtctttctctcgaattcaggcccaaggatcctaaaattctacaacacttagtatagtacatggggagggaactagccaggagcgcagaactgatccatggtggtgggggtgagtcagacgaaggtgtgctgaactccctcacactctcttgctcctttcagctgtatctttaaatatagggtagtttataaagagaatggtcagctccagtcagttttttgtagtgagatacttaaaatgagacacaattataatatagttgcatggttaccaaaaacactccagaatcttataatgggaagcggctttttaaattaggagtgtcttttggaaaatgtgcgttaaaaaggaattctttaaaattggttctaatttacctgcccgtaatccatttttactgtcattattttctgtgtgtggctcttgaactagtgaatagctttggaagactgttttcattgggactttttttcactgggccctgttactactccctgttgtaacctgtaattctgggaagccccctaggttgagtgcaggtcagagactcctggttaaagaggatgggaatcgatgctttggcttggtgtcagcgtggtctttttcctgggaagtgctggccactcccagccctgtccattttcctgtcagtgtgtggggaaccagccagatcaaagaatagcttattcttttgctgcatgtaggactaaagctccttttccatggagcctagtgcctgggcttggtccctgctagtacaattgtacagagcagctgtgttcccacttgacccagctcacccaggctgcctgtagtgtgattcgggttattgagaagttatgtcattggcccaccgtagctcagaagataggaaaccgcaccagtgaggccaaccacagacctggcagtgtgattgggcatcttgtgcaaagtaggtcatgccgttcccataaatccagattactagg

SEQ ID NO: 121188 - DNA, 1065 bp, Homo sapiens
agaaagagaataagcatagattcagagtgttaggatgacagtacacaatcagatgtaccactgttggtgcggtagatatttttgagccaagatttaatccagagttatcatttatttaaatgccaacactttaacatgaattctgtcgtcaagttactttcatttctaaagcttgttagtacttggatcttctttcctttatggtcttcacgacattttgaattttaacattcctcagcaaggtgtggttttatttgggaactgattttcccaacctagaaaaatctttttaaattctagaatcagggttgtgactaccaaattaaagcaccatttaatttttcattctgtgtaactggcagccaacttgaagaatgttcccatgcctgcctaacgttaacgagttgactgataaaagtgatggatgggaatgagagaagagaaaatgcaaggaaatctcagtctgattccttgcagcacatgggtttgtaaactcagctgactcatttttaggtgaacaataaccgttaaaaaaaaagtaaagcaggatatgatgaagttaagctagacaatagctaaacgtttttaaatcaaaaggaatgtgacttgactgataccacaggaaagggagctttcaaagcaagctgactgctgccttagaagccagacaaaccaagacttggccctaaaaatatctttactgttttagagtcagcaaacagcctggttgtgggtttaggaaataaacttttctttaatataattcttataccaactctttactataatgtatatttttaaaaatcttgataccttttaaaacagatttgccttaagatcccagtacttttcctttgctgggcagctttgtcactctctcctaccccaggtagaaatggccaagatgcttaatatttgcactctccttgagacgtacttcatcttgagaattgtgactgtgccttctcctcattaaccccaaccacctccttccgttgttgccacctacccccatcccctcatgttctgttgtccttgggagccaagtggaaaggaggtggaggg

SEQ ID NO: 121189 - DNA, 1005 bp, Homo sapiens
ggagtccctatgatgggatcagtatttttataggaggaagagggaccagtactctctctacccatccccatgtccccaagtccccaggaggatacagccatctgaagccaggaagaggacccttaccaggagcctaatttgctggcaccttgatcatggacttcctagcctccagaaccctgagaagtaaatgttgtttaatctagcagcatgtgctattttctttatagcagcacaagctggccaagaccctctccttttcttctccaacccagttgcaatttattaaattgttcatgtatgtgaaaaaaatcattggagaaaaacataatacattttaaacatgtcactgcttctgtagttacattaattttcttcaaataattgttttcattggattttgcataggaaatatgtgatagcttttccaaatcaaagtaggatattatgtactattttatatccatcccctagctcctgaccagtaaaatgttcttgcctttcaagggtgggtgtgtgttaagctgttgttagtttgtgctgatttttttttctttttaattttatttttttcactcaaattatgacataagacatcaatttctgtgttttgaagtgaactgaaaatatgggtcatgactggaggaatagctagatttctgagctgaagggaaaggaccaggttctctgtccctaccacttgccatagtgccttacacatttggtgctcagtaaaggcatattgttaaacgattatatatgccattttacaatctcagttcttttcctaaaattttcatatgattgacttctccaggaatgcatttctataatttctatacaggaataggtatttgtttctccttcactctgtccttaattttcattttggaacctgttggtgtctctcccttggtgttctggctgtaggtgggcacctaactgacttcatgttaatttgatcactggctttccttcgttttgttacagctaaatggctctatg

SEQ ID NO: 121190 - DNA, 1089 bp, Homo sapiens
ttttagtcatagcttcactgagatcatgttatcactgtatttgcttttatgtcatgtctaggcaggcctccttacctgagaattaatatgaccacgtttatcctgttcctaggatgccaaaatctgatgattcatttgaatggggaagaaaaaccaaattaagtgtcacataaacgttgtaattaatgtaaccattgactcactgacattctatattttacaccattgtcttggtgttagattgtcttggacataaactgttcctcacctaaatcttagactactacttgggacccagtagtgtgttacaggtatctgtaggttgctagtttgatgcatttttctattttcctgacagttaaatttaatcttaatatgattgacagttaaaagtgcaggttgtggagccaacattcagggtttgaatcccattttccaacaagtgcaggctcggtaactgaacttactgagaagattaaattaaatagtgcatgtgaagtgcgtggtacgatgcttagcacacattaagtgttcaatgttagctactatgattattatccttggtgtgttttctgtttttaatggtgttatgatcctgaagcaagggactcaataaaggaagaatattatggtttcataatgaaatcctcttaactcattagtgaagcattgcaatctgtaatgatgcaagctttgtttgatgctgtaacaaattaggccagagttaatgccatttcctgttaaaccttggatagcttatcttagtacttgaccaatgttttgctggtggagtcttctttttcagtgtgacataattcccagatagtgggctggttgtcctcgtgaggattttaatgcccaggtaggagttggttgattctaaatggaagctgttgtgttttatgctgtttgtttattctaggtgtggtgattgagccgaaaagtgcaggcaagaggagtctttggggtttctcatttgtgtcctgtgacatgagtatgaaatctctctgtgagcaagtaaaaatatttttccaactgctcacttagtgcctccgcatgggattggaaaagtcaagctgttttatactg

SEQ ID NO: 121191 - DNA, 1474 bp, Homo sapiens
aagaaaatcaactctgagcattggtctcttttcctttaaaatgaaagattaaattttattttcatttttgcctagagcaaattttattttttatttttgttttgtttctgtttggccagggatagagaatgaaagtgagatcatttagatcttagaaaggtagatgttggctgggcacggtggctcacacctgtaatcccagcactttgggaagccatggtgggcagatcatttgagctcaggagtttgcaaccagcctgggcaatatggcaagaccccatctgtacaaaaaatacaaaaattagctggatgtggtggtacatgcctgtagtcccagctccttgggaggctgaggtgggaggatgacttcagtccaggaggcggaggttacagtgagccgtgattacaccactgcactccggcctgggtgacagagccagactctgtcccaaaataaataaagaaagaaggaaaggagggagggagggagggaaaatgtcagaacagttgatggagattgcagcagcagcagcaagctgctggttttctctttatgagattaaaacatcactgctggagatgttctggcctatcctgacctgattttcagtttctgcaataggaaccctcaccaccaaccccagtttcaacccgtaaatgttattaccagcctttttggttcccactggcgtgtttgctccatggtaacatttttagtggacttgtaggcattcacttttagaattgtgtagtctctggatttaaaatattcatacttggtgaccttttagaaagactaaattcccactcttgctcctccatcctcttctgccagttctgtgtgaagtacagttgtaattgcattcaggcatgagtatgtcttagtattccttattattagattggacttttttaccttttatttgatgtctgctggctgactgggatttagggaaaaatttctgatttattttaagatttttagtgctgatactggcatgctttctctaattgggagaataacaattttattgaaatatacctgtgattttaaactgtaatctttatggttatattaggtaggcaccctcttgcgagcacaggttccatctctgttaagttccacatttaccccatccttttcctcatgtcaacaatttcatcctgtcagaattaatctcttataagcccatgctgaacagacctaattgaagccatgctggcgaattggccactcaggtctgtgttttatgagtttctgaaccccagagtagtacttgttcctctttggtcttggcacagcaaatgctacaacaaagtgagtgttatgaatttctccttccctgaagaatagttctcatgataccaaattcagtaattattcatttgcttccaggggagtttgaaatgtgatgtatctccctaggggtagtattcagggtacttctgcttcagtctttggcagaagaaataa

SEQ ID NO: 121192 - DNA, 1101 bp, Homo sapiens
tcctttatcttgttcaactgcagaccttcactccggcggtctccgtgggcatttaaccctttcagctttaacgatgaagtggatccccttcagcatgacataactcatagaggagaccgtaacgagggtgggcttctgccacccaaatgcggccacagactcctgccacgcctggcagtaaaaaaaccagagttcagggcatcgacaacttcaccggggctattgcgcaggctctgcgttccacgcaggcttattaggaagaaaggggaaaaaaatttcccagagacacgtggaaccgaggggccaaccccggcctaggctctccaccgcatcggattctggaatttacgatcacgaaagttctattgtcccgcgattggctcccgggccgcatgacatcatagcgcttgattcatccttcgggtcccgattggctggccgcgccattgtgacgtcacggtcagcccacgttctgattgtagatagccggcgccttcctcttcccatcgcgcgggtcctagccaccggtgtctccttctacatccgcctctgcgccggctgccacccgcgctccctccgccgccgccgccttgctgctgctcaaagctgctgccgccccttgggctaaaaggtaaagccgtcagctccgggaaacttcgtcgggggccgccgctcggccatgacacccgcgcgagcgcgcggccgggaagcggtcagagagaactgccgttaggtctcggacctggtgccgagaaagagctgccggggcaacccgcgctccgcccgcggcctccagctccgccggctccggggtacagcccggctcctcgggcgcggggaaaggggtgcgggtgcgggcgcgggcggctcgccccacgccgaggctgaggcagggcgctcgggagcgttctctgtgctgcggtcccacctgtgcgcgctgacaggcgccgcggggcacgacaccgtgcccacaccagacgcggagggatggatctgtccgcctgggtcctcccgccctgcgggccggagcgcgcggcgggagagccgggggagcgctctcggagggagcgcgctttctttggagtcggcgaaacccgggtg

SEQ ID NO: 121193 - DNA, 1294 bp, Homo sapiens
cttgtacatttttaaattcttactctggagcaacctactgtctaagcagttttgtaaatgtactggtaattgtacaatacttgcattccagagttaaaatgtttactgtaaatttttgttcttttaaagactacctgggacctgatttattgaaatttttctctttaaaaacattttctctcgttaattttcctttgtcatttcctttgttgtctacattaaatcacttgaatccattgaaagtgcttcaagggtaatcttgggtttctagcaccttatctatgatgtttcttttgcaattggaataatcacttggtcaccttgccccaagctttcccctctgaataaatacccattgaactctgatggctgttatcaaaggaacttttctttgtttaaatttgctgatgcaggaattaagtttaaacacaactctatagaaagaaaggagattattacccagaattcacatgtagtgattattaaggacaatttttttttttaactaaaaaagttggcggcaggggtggggggtggcaatcatttttcttcctatacatacaaaggatattgtcaaaaatggcgttcttctcttgtggcctgttattctgattgctgctgtatacagttttgtcactctttagtttttagttaagcatactgatagactttcctctaaaagccattcactccagattttacctggggaatattctacatactgcttactttctctataaaactcatcaataaatcatgaaaggcactgagttttgtaaatcaggaccctaaatgtttaattgtaaataagtttcagataattattatagctttgcgttgaagtttgttgttttttttctcaactagttaagtcaactgcttctgaaataactctgtattgtagattatgcagatctttacaggcataaatatttaaactgtaatatgctaacttgaagagattgcaataaagctgcttcagctaaccctgtttatgtttaaatactagggtttgttctatattttatacatgcattttggatgattaaagaatgcctggttttcgtttgcaatttgcttgtgtaaatcaggttgtaaaaaggcagataaattgaaatgtttgtggtatgaggaaataaaagaatggaattagctttcattcagaaacctttgagtgtgtgtgagttccacagctaaacaaatagtagaagagtttggtttttgtaattaacccaaataccatgaaattattttttcatcattgcgacctcagatgtttctagaaagaagcata

SEQ ID NO: 121194 - DNA, 1026 bp, Homo sapiens
acatgaatataagttttgggttttaagtttctcttaaaattccctgattggttgaaaaatcacataccaatccatgattgagtgatacagtcctcacataaataaaaagcctgttcctcccactgggaagcatttgagcagaaagtagaatccctaagggaatgagtcctaattgcaaaggtgaggaaggtgctgcaacttgtatgtctgatcaagaatattttgacttagtcgtgattctttttttcccttaggttgatgagaacatgaaggtagcacagaaaagagatgctgtcttgcagggaatgttttatttcaggaaagatatttgcaaaggtattacattatcttagatttctaatgtcagcttatgctgcaacaagctgctaaagctcccctgaccctcttctccggcaggtggcaatgcagtggtggatggttgtggcaaggcccagaacagcacggagctcgctgcagaggagtacaccctcatgagcatagacaccatcatcaatgggaaggtaggagggtggccctgtacagtacccctcactgtgcacatcccccggcagggagttcataaagtgtcctgcttcttgtaggaaggtgtgtttcctggactgatcccaattctgaactcttaccttgaaaacatggaagtggatgtggacaccagatgtagtattctgaactacctaaagctaattaagaagagagcatctggtatgatatctatttttcttaatctcataatatagacagcatggtataatcttagaatgttcaatttcttaaagtagtcttttaaaataatgctgtattcatgcacagtttcacatttttatatttctgcaattgtattcaccttataatctttgacactcataatttagattagtagtgctttttttcttatcagttcataaaataggggtgcatctgaaaatcactggcatcttagatgatgaaatggcatctggattgcttacttatcatttacgtccaactgtgttgatcttacatcat

SEQ ID NO: 121195 - DNA, 1421 bp, Homo sapiens
taaataagaatctctaggatgggacccgaacaagggtgtttttaaaggagccctcataagtggttttgatattctcaaccagggctatactactactgctctggtcttcatgtaattgttcataaattgttgaacatgctttctaagtagaaataaactttaaaggataattattttgataggtttatcttacgttatagatttatttatttatttgcttttaaccttagtatttattttccctagcttaataagaatgaaagtgatctgcttttaaaagataaaagtatatttaaatcataccagaaaaaaagggtatttaaattgccttcagattttaaaaaacataattttccttaataatactttttagggctcactaactttttttctgtatcttatgttgaggtttttatataattatcatatataaaaatatattccactcattttatatagcatattcatttatatatatttttaatctttagccattgaagaacaataactataggatcagtaaatcccgatatgactcaatagacagctatttatctaagtgtggtgagaaatataatgacatcgacttgacgatagataaagagatctacgaacagctgttgcaggaaggtgggtttctactccatctttctgggtttgaatgtacgcctttagttcttcaaagctcttttacacttttttgctgactcctggtctggtttctatttttagtgcaaagtctttaacttctctcatgaggctacttgttcctaaagtttcaggttccaaatacttgtgagattttcttgatttttagcaaaaggagcttactttggaggtctgtgtctaggtccacaccagtgccccagcaggcattgtgtaagtagtgaataaaacgctgacactcccgcagtgtccgcaggataaaatactgggtgaggtgaggatactaatcaaaccagctatttcaagcttctagacaccctttcttcaaacttcctgagctatcctgtcgtctttctggactaagaggaagtggtatctctcgctttgcagtgagttcccatgtgatctctttttgcaggcattgatcatctcctggcccagcatgttgctcatctctttattagagacccactgacactgtttgaagagaaaatacacctggatgatgctaatgagtctgaccattttgaggtatcttctcagttttatttttatttatttatgtattgacttctgagagtctggaatcctctgttttatatgcatttcacttcacaaaccaacatggggaggcagttttctgtacctgtggagaacacaaaagaaatttcataagactttcatttacccagtgcagtaaagaacttggacaaataaaaaatcggtttcaagtactcttattttacgattcttac

SEQ ID NO: 121196 - DNA, 1688 bp, Homo sapiens
gtaaggtgcttctgactgagggaatcaaagcaggcttcacggaagaggtggcatttaagctgagtctatagcagcactgcccatagaaacatgtaattgtaaatgttctcatagccacattaaagtaaaaaccagatgaacataattttatattttgtttaacccaaaacgtccaaaaatgttatcatttgatccatgtaatcctttactcacaagtaattttacattttttttgtacggagtcttcaaaatctggtgtatattttactctcacagcatgtgcatgttttcattaggacaagccatatttcaagtactcagtggccactgtgtgcctggtagcttctggactaaacaagcatgagtctggaggataattattaatcctgcagagatgagggagggaggagcaaggtattggggctccagagatgcctgggcaaagtgggtactaaagtttgaccaaagtctttggagttaatttgggacatgttgcaaacagtgaaagcagaccatggcagactttgaacacctgaattgatttggtaagttacagggagccttgggagcaggggttgagcaggagacagaacggcattctcgagcaggagccaaagaattgatactaatgcaaaatctttaatcacaaagttcccttgtagtgtcttgacaccacagatacattttctgttgagttgtcttagataactaatttgaggtatgatttcattccacttacttgtatgtaatcaaattcttcttttacacgatgactcttaggtgaccaatttatgacgtttggttgtctgttttagtaccttaacaagaaatatccgacataggagaggagaaaaggttgtcatcaatgtaccaagtaagtctactgagaggtggtggggtgggagagagacatgttgtattgttgtttaatcctggattctaaaccatttttatttttgtatttttataatacagtatttaaggacaagaatacaccatctccatttatagaaacatttactgaggatgatgaagcttcaagggcttctaagccggatcatatttacatggatgccatgggatttggaatgggcaattgctgtctccaggtatagtttcaaatatacagagaggcaaagtgttccatccatttctgttttttaacttctttatatatgcatgtttcctgttccaaaaatcacattttaatgaggttgaaatggtagctggtatgcctttctgaaaaacatgaagttatattagtaaattcattggaagctgtctatgactaatagttctacagactctgttgttcaccacaaaggtatatacggtatatatacctttataactgtaatttcagttaacttaaaatgcaatatattctgtcattgtttcccttctctttttatatgcctagtttttactgccatctcgtgacaggctagtgaggtggtttaaatattgttcaaaactctgaaaatgagctctgatggaagtattccaatgattttgtgatccaagggatttgtgcaaagctgtctagcggtacaaaaagaataaatatttagcagcttgtgtttgtcttgcccctgagtaaagtatacaggagcctgtctctgtttacccatttaaaaattttcctggatctgtttaaatgatggtgcccctggcagtgagtgtgtcca

SEQ ID NO: 121197 - DNA, 2435 bp, Homo sapiens
tatagtgtggaactctagtccaaaacagtaatcatgtgactatttaaaattaaaattatataaaatgaaaattgtagttcctgatgtgactgaggaactagcctcatttcaagggctcagtagccacgtggttagtgactaccacatcggtttggatagtggagatattaaacatttccatcactccagaaagttctgtgggacagcactgctctagaatgaagcagtgccgtaggtgtccgaagatgcaagttctgattctaccttctcccttccacacaaacacattctcattctctcttcatccaatctgattctggtgagcaaggaatcccctcagatttaagtttattactctcccaaaggactattcctaaggttctaggctcatagtaaataatgcacatagcttcaagaattctcaagaacccttgtagctgggaactgttttctagataagatcactaccttcaattgtttacaaggtggatttgggcaggcaacagatactttattttatattaagaaaaggtaggggttaaaaataaggcattgatggccaggtgaggtggcacgtgcttgtaatcccagtactttaggaggctgaggcagaaggattactggagcctaggagttaaagaccattctgggtagcatagtgagacctcgtccctggaaaaaaaaaaaaaaaaaaaaaaaaaaaacttggtacagtgactcatgcctgtaatcccagctactcaggagcctgaggcaggaggatgacttgagcccaggagttcaaggctgcactgagctatgattgcaccactgcactccagcctgggagacagagcaagaccctttctcagaaaaaaaaaaaaaaaaaaaaaaatttttttttaaaagatatgagctagtcttgatcctcaagccaaaagtttcttcccactaatttaaaactcctcccttgtttggctttcgcttagtctttgtcctccctcacagcacatgtaatattgacctcaaattcctaacttggaaaaactggggccatcactaaaagtgatgtagaatttgagctttacacttaggaataaatatggagcttcatttttctgtgttgaaattagagctccttaagtcaagtaagagaataggattgggtttcagacttcagagggtgatctcaggggtagatggggacacctgcagagacactccctaatcttgagggactcatgaggtgacctatagaggcaaaaaacaggctccttccagattcagagcctaccaggaagtgggaggcagtggtgccatgcagcaggtccaaagataatctgagagtttagagatggaaaaggaagacacctcataggccatgtaggggacacctgtcacccatgacagctgatgtgaccaagggaaatgacttctgtgctatcagtccttcctattagatgaagagatggagaggacccgagtaagtgctgtgtggtttgtgagtgagtggagacttggataaagttagtagtgggctggaattaaaagaagatccttgtgagcaagaagtgtggggagtggttgtaaaggggcacagtatttacacaacatctgttttgtaaacacaaagccctctgaaaaggggatactagaaatgaggtgtctttggcaggtgcagtgatggcaagactgcacacaattaattcttgaaaacaaatcccatctatttagttcttcaatttgttgtagattaggctgtcctgggttcacactgcccgaggtcaaacccaacccagtggaaggaggagcttccaagtccctcttctttccagatgaagcaataaacaagcaccctcgcttcaggtgagtatggctttgtgttgaaatgcagatgcccttcactagacccctgacttctgagagtatagtatttctgtctagaaatcctttttgagcattaactgagttttggctctcttcctaagtaaccagagaagatagcagatgtgcacctgttcacatcttcagtacccccaggcttcttggttgttgatgcgtgcaccaggcttgatttgtcaattctccaagtcgtcacaaagttattcgctgagccactgcgaataactcttttaatagggagattattttcagtcctaggtctgtaaatgcctactgggattttttttttctcttagttatttctccttttttgtcctctctaaccatcagtatctgtgatttgcccatcttactctatataacttataaaataggtgcagtacctgatatatataataggcactctcttccattaacttcaagttctgttggtttgttgttcaattctgaggttttaagttgctttaaggctctcactagcctgatcttagctttgtacaatgcatgctcatctgtcatcctgagcctaggctcctgatccagagtgggaacat

SEQ ID NO: 121198 - DNA, 1048 bp, Homo sapiens
atgctctcatgagtgaagacggacagctctgtctctgtggagctggggggttgaagaacaatcaaatacccatagattcataagcgtcaaagtggggctgtgctagcaggaggagatggggagcaaagagtacaacctaggtatccagtggactctggtgggtggagggggagggggtgggatgtccaaggttccaggaggagtgaaataggaatgaggagcggaggacagtcttagggagggggagcagtgtgtgtagaagtcctaggatgaaccaaacaagcggggacttcctgggaactagaagaaagcaagctggccagtgtgactaggaggctgaggaggaagtgcaggtatggggtaaagggaagctggcaggtaattggcaggccaggtcaggttaaccataaattttagttgttctcctaaaagcagttgaaggccttggaaaggttgggttgggcagatggcatcccctttttgctttgcagccctcacttgggctgtagtgtgagagtagctgtggagctggtgccagggcttactaggaggtgagtgagggagctccctgaggggagacaagggctgcctggatgcccgtgggtgctggtgataggaaaagtgggtggtttaaaagatgacagagtcagtgaactgctggggagagaagacacatcaaggcttttgctataggtcattgtcctgaaaaccttaagagtactagagtagaggccaaggagtaggttacagatgttaaatgacaacttctagtgaactggaaaatttaataccttatatgttcatttttttccccttaacattaagagggttgtacatttcacttagcaaattaagaaagtgggaggggatttgtaacacaaaccagaactgttttatatattaaagctgaagaatatataggattgatgggcagtggtgtttccttctgggccagaaaataaagttttgggttaagcctaatgtgccctttaccttgagaatggttccatatgggatagttgcctttttaaaaaagatttagtgtctg

SEQ ID NO: 121199 - DNA, 1419 bp, Homo sapiens
aatcccagcactttgggaggccgaggcaggcagatcacttaaggccaggagttcaagaccagcctggctaacacggtgaaaccccatctctactaaaaatacaaaaattagccaggtgtggtagggcacacctgtgatcccagctacacaggaggctgaggcacaagaatcacttggacctgggaggcagaggttgcagtaagccaagatcgtgccattgcactccagcctgggtgacagagcgagactctgtctcaaaagaaaaaaaacattttggacccaatacttgttgacccttatgtagttgaatagctatggaaaagtaataatcactgagaactgtgaaggacttcttagcttcatttatacctaatggtttctacacttttaaagcaactttaaaaacttaaaaattgagcagactatagcaaaagaataagatggaactaagttatttctcctccgtagccatcctaccctttggagaccagagtatgggagttacatgattgaagggacaccaggacagccctacggaggaacaatgtccgagttcaatacagttgaggccaacatgcgaaaacgccggaaggaggctacttctatattagaagaaaatcaggctctttgcacaataacttcatttcccaggttagttcctatattaacatgccccagcagatctctcagagatacaggtaatgaaaagagcaagtcacgacccgggcattccaccttacaatcctcatacgttacagatggtttatcttttatagactgcacttgatagactctgtaacagtagagctgcagacacagttgcatgccagcttctgtcagctgtggtggctgcaccgtggtgagtgcactcagtgggggctcagtgggaaagaccaggatactgtgatgacagaccagcagtgtggccgtgtctgccgcaggcgagggtggagggagcagcacgcctgccacacagttctgaccctgtaagcagtagccaaagcttctggaatgctgtcccctggtgactgtgacagttgcgccctcatgcactttcaaaaagcagcatttacctgctagcatatggtggcatcagtggcagatcagaggatctgcagtgctcccaaagcactatcgataccgatgctctatgaacaacgtgagtcattaggtccttgcatattgttctgaaaagaagatttagggtttgtcatcaaatctagttatgaccaaaagtacataaaagtaaatagtgaaattatgttcttcgcttagaatgaggtacatgaatatcatatgtattatacatagaacctctatgtaaaaatacatttctgccaaaacatgaatgtgatttatctatgctagatgtctgtcagatggtgacagtatacttagctcctcaaagttcaaaggagc

SEQ ID NO: 121200 - DNA, 1111 bp, Homo sapiens
acttggcatgatctctgtggggtggatgcagtgatctgcgtctttgacaggcgagagggtgattgtgctgcagtcagtggtgcagctcccctgggggacgggatcctatgggaggttgaattttatgttgaaggatccctagaccctcacctttgcctagccagtccccatgtaaggaatcaacttaaatttaaatggcacttcctctgggaagccttctgatcttctagaccggcttagactgtgctgttacatatgcacagctctctttggtcattttgagcactcgttcagataattcagcaatagcgtgttattggctgtcagtccagccagtgtaagcctgagaacaggagccacatctgcctggctcttcacagtattcccagcacctgcttagcaaagagctttgttgaatggatgaaaggacaaaggggttagtgctgggggtggggggcagggagcgtgtccagcaagacagtgttttttggcactgagtagtcatcaactctaactagagccttagtcctcaaaatggttgcaggcttgtttaggagttagtgtaaggagaaaactaagtctctgagaagcaacagttggttctagcaaaaggatcaaaactattgtttgggccattgcaagagagccagcagtgtggaatggaggagctggccctgaaccccagatgtcagtaggggtctgaagaccctgccctgcacgcatactctacctggactaggtcctggggagcccttcactgtcttgccctccttggcctgaccacctggatagagatccttcccagggtgtaaggaggggaaagtcctcatgctgtctctgggaggaatgtaggacctcacagctcatagtccctgaagggcttggtgtaggtttcttctcttcagaggtcaagcatatgatgggttaaatagtttgagagggaaaattccttccttctcatttacagagaaactgacaaaagaactttctccctaaatggggaactgcctgtaactgctctgagtattatagaactgtattgtttcctaattaagcattgtttttacctctaggagtagatattaagaaattagtatttcataaaataccc

SEQ ID NO: 121201 - DNA, 2596 bp, Homo sapiens
aaggctgctctgggcaggataaataccttgtacaactttaggaggcaccagggtgggtagcaccccttgagggtggaaaggggaaggagttacagtgttgggggttcagcaaaggtctctgaaggagtggcacttgacttgaagcacacaagagccagctcttgaaatactgaggtaaaaatcttccaggcagagggaacaaaagtgtcttaaaggccttgaagtgattgttgtagagacagaaaaggccagtgtagctgcaacatcgtgtggggtgggttgaaatgaaggaggctgagaagattggtcctaatgctctttaggagggatgttggagtttctgctgagtgtgagccatttaagagtttcaaggagagtgacttgacctgcttgctgaaggaccatggtcttcctgactgtagggttagacagcattccatgccagtagctttcacctttgactaaaacaagcgctctgtgaaacaacatttccacgaaacagcagttcccttcccatgagtgacatattctgatatttctattctaccctattaacgattattttttgttatgttgatcacaactcatcatggcccacaaaggagctgtaaccaatgtttgagaaacacaagacactattctgtgtcaatcagtgtatcactgccctggagctagaaaatagtaaccactaacccctgagtggtacagtgtacttaatactgttttagcactttacatgcattgttttatgtaatcctccccagcagccctgtgaggcaagtattacctccattctgcaaaaactgaagcatcgagaagttaccaagattcaaactgattgactccaaagcctgcactcttagctgctcccccacctattaccgcccaaataggcaggaggaaaagagctctgtgacagttttaataggctccaaacagagatgagattgagggtggcgaggaagagaagaaagaatagagaaagggatggtggtaatgcaggaagtaggctttttgttttttaatgaaaatatgaatatgtcatcagccacagatccacgcttaagcattttttggtaccccatagcaggtaattctcttctagtgaaatgccagcactctttcaaaacgacaccattgaatatgcttggtaaaattctcggtctgcaggacaaatgctaacaagtttagtaatgtgactgcagccttcccagctaatctgctggcaagcgagccctgtgaaaaggcagatgcaggacgagccctttctatgaaaatcaggctgacctcatttgatagttatgcagcctgtgtcgatctcttcccagggcagcaggtagcaggccagaatcagaaccccaagtcaggagctttaacttatctgagattttcatcctttagcatgaatttcaaatatggcagggaaggagattgaattcacaaaaacctaaatcttccaaatcccacaggttacagttactctgttggtgggatccactataacacccaggtacgattcctgaatgggaacctgatgctgcctttgtgagatgtggttatgacacagtgtctgcactcagattcgtatgatggtggaatggcattaaacttggaggtcttgaagccctgtcgtcctgtccctggaggcataggtgacccccagtgagcactagcagtcactttggacttagaattcctgtatttagcattgactctcacttagtctctttagaaaactctcttttttctctctgttaggttgattagtctaacttcagttcctaggaactaaaatcctgaatttctcataggcagtctgaatttagggcagcctaatttataacatgccttagaaggaaatcatgtgtgcattcttgcttgctcagcccaagaagtgtatcaggccctgagcggggcaccgcccactgggggatgtgttctctgtcttgtccccatgctaaagccctaaactctcctgcacctagagggaaccgctgcagaaattctccatgattctcacccactacagtgccccagctctggctactgcagggcagttgatccaaagcagcttctgtctggggatcaggatactgtttcttgtcaaccacgtggtgactagaactctagcaggggaatacgttcttaggaaaaagccaaggaattcatttgtctttagaactcagaacctattgtactgaagtacagatgattggaggtaaataaggactattcatacttacaatgttgtttctttaagagaaaatgtgttctggtttaggtttctaaattacagagtacctgagtaatgctggtggccataagcagacatccccattggcaacttgatgtgctgtcttttctgaggttaatttgtgtgagatgactggttaggttttgctagatttggttcagaaataaagtaggaatgccttaatggtctttataattatcagaaaattaaaactaacatatgcctgaattgtggtagcatgatgtttttaaaaaaatcaaccaatgtaaattcagaggcccagaaaatgtctcatgcatccgtggagcatgaaagagcaggtctacattcaaggatttcctt

SEQ ID NO: 121202 - DNA, 1150 bp, Homo sapiens
ttcttgttcattcattcttttgggttttccccttcattccataaacacggattgggcgctgggagggcgtgagcatgaaaaagtgacattaggtgctgcgagtcttcaacctagtgtatctgcagaccggcaactaccatgatccaccttacaggctcaaaattcgcttttgcggtcaatatgaaagagatttaagttttcctagtaggcctgctgcttttagaaatcaggtcttcaggatgtccacttctgccctacctcatgcaggtgtcttttccttaaacctctccaacttctcatcttccctcccctccaaaacacacacacttcatagctataaattgaaaccagtaaattacggctcagtttcctacatgggggaggaaccttccctttcctgtttaattctaagtgggaatgcatttagagtttcaacattaggatttgcttgtgtctttccatggcctaggtccagcaactaaactttacaaaccagtgttctgcctagagatgaaatgtctctagattctcagtaggttgaaccattgtttattggaatgatctggaatgcagcaatgttaaaactgttgatttagtgtcatctgccaaaactttttgtgccttccctttctgtttttgaaaattacgtgtgtatgcagtacacattaaatgacttcttgagaagtccatctctgtttttgtttttagcttttgccttagatggcttgccacctgtgtaaattgtttatcttttggccagtgttgttatcaatcttggcctaagtgctgacgtgctgttacaccagtgcagaatatctcctttcaaaaagttagttttttttttttttctaagattgggattctacctcctacagctgaagaaattgtgctgttttaaattaggaaagtatgatgactagtaattcacatttctacaaaaagtggtttgtcacacttctttgaacagaaaaagcacagcatgtgttttggtgatgattcttcagttttactgtaaagttcatagtttctttacagcatctgccattttgtatattcatttttgtattgtgtgtcacaggaaaatgtaagacgaaattgggcagggacattatgcttgttcacctctgttttcctagagcccagccttgtg

SEQ ID NO: 121203 - DNA, 1020 bp, Homo sapiens
gccccccaggctttatttagcttagaagcagcaaagccatcaagttccctcaggcgtttattatttcgcaggcattttcaaacacatgatttttttctggccttttacgtccttgaagatttcttaccagtcgtcagctccctcactgctttaagttgtgtaattttaggcagtgatatcaccaggaatatagaatatgtaatttaatagttttcaggggcttcaggatgacattattgaagatggagtgaaaagttattcactagaaatgattcattgctctttgtggtatttgtttttttgttttcttttgtagaactggaagatttcctttgactggattggcttttcactcccttctgcagggtttgtgggttttcctgtaatgttggggaattcagcttggcatgggaaattacataatttcccatgccaagccgaaatgtcaggtctttctgtgatcctaaatggaaacttgtcagaatctcaaaatatagtctgatggcactctgtaaatatggtaaataaacaagcttttcaaaggttacaggtgatcttgctaatggattattattgctctaacagctgttaaattagtattaaagtttttaggttgtgtaaaatctacttctccctgacttattgtgtgtcttggtgcctgggtgtgtacatgccagacatgagaaccaccttgcaaacatagatatctgttccatcccttccattctttccttgggctatctgttgtctcacctctgagatctgtataacttattaccactggtctctgctgctcctgctccaaacccctgtctccttacctgccacacacaagcgcatctgttttgttcacaagcctcaaaggtccttattttggtggccataccagctgtatgttctcctctctataatttgtttggaagcacagcttaaggggaagccggtaccccttaccagggcagcaaagatgcactctccaggtttcagtgtaataacagccaccttctttccactgaaagg

SEQ ID NO: 121204 - DNA, 1053 bp, Homo sapiens
atagactaacccaggaggatagcgttagcattttgagagccaggaaagttgttggcatttccattatcttcataaataagtgacttggagcagtgaaagcatgtcttactaaaggttgttggggagggtcagttttccagtgctcatatagttgctgggctttaggccaggccctgataaatgcgtggacggtgaagtggttggttcacgttttgactggttcacgcaggattaccagacaaatggccacctcatctgtcactggcaaagaattgaaatctcactgactgtaactaaattctctctcactcagttttttcctactcttggtcctggtggaatatgctccttcataatgtgggggaagaacagctacataaagaattcattgtctgtgactgtttatagacatttaaccccaatgtatattcttgggagatgtaggcatattcccatgagtgaggaaggctgagtccagttaaggtgtaagccctcccgcgtcctggaaagggttgtcagagcaaacgctgtcatatgataccgtccttgcagctcttccagctgagccatcacaaatacacgaaaatagcttggatatttggacacatctcccaactttaagctattaaggttttcaaaattctccaggtcccttgatcctcactgtgactctggagtgtaagttttggataggctgctattggtctgagcctttcactcagacatgtcattaccagtcacaatgctattcttttctgtgaggcttgttttttgaatttaaaaagaaaataagctcctattagtatggaccatattgataggaatcaaaatttcatatttaaaagttctttgtaactcatgaggggattacatgaactcccttattaaagaacttaatatattgcagcatggatccttatgaaaaagacaagttgataattgccttgcaaaagctttcttttctcctcctttctaatactcatgaaaagtagtgctagggtttttctacctgatttggtcaatgcttcctttatttttcttctaattaaccag

SEQ ID NO: 121205 - DNA, 1050 bp, Homo sapiens
gtcgtacaaaacatcaataccaagaagttgaatgatcctctgtcatctggcctaagttcctttttttctcagcagatttacctttttaaaacagtttttctccctaaaatttctattacattttttaataaaataggacttatactgtacatatatacaattttacatttcttttttcccttaaccctaaaacatagtgtttattatattattaaatattctccagaaacatgatttttaatggccatataatagttcattgtatgcatttgccatcctgtgtttaatcattcccctattgttagtttcagttcgatatcttttttctctcctcatagttgatctttccctctgaggtaccaaccctgcttggtccagctctcatcagttctccatctgcaccatcagtctggtcctcccatgtcaacagctcatcccttcagtcaagttaccagtaaagtaatgctgtcctgatccattttgcttttagtaaaagcttcttttctccaagtgattgcagttgccactaccagtctgatccacccttctgatcatagcacaatacagaaaacatgcctggtttcttggttttcaaagtgattcacccttgagctattttaattatggggggcaaccttggggcatttatatctttgtttaggatcattaatggtgacagcttaataatgcatgaaagcaccttggaaacattaaaatataccagcaaatgagaggataaaggtattaggggaggccagaaaaattagaaagataaatattttgaacaaaataaatgtaagcatctttattataaatgctcaagcacacacatgctaacactcagtggaaactaatttgcttctctgaaatttggtcatgcaaggaaaggagtcagcactctttcctttgttgcataaagaaaagggtacttgtgcctctgaaacatgaacctattaaaaattatattttagagcaggagaggccttttttccccctgtgatctctttcatgtatttgtcttctgggcaaatagatgggcagggagaaata

SEQ ID NO: 121206 - DNA, 1061 bp, Homo sapiens
acctgcaggcttgctgctaactttccttcagcagcttcctgtggttaggagcccacattcactcccctcaggcacccctgcaccctcccatgtggaagataggagatcttccggccattccttgttaaagggtaagatgctggagctgactttagctcacgtttgctttgattctaaaagcaaaactagacctttctggatgtttccttgctcaagtgaggagaaaacccaggttttgcgtttctctttaaagacgtttgtaaatgaagagagaagtttttacagcctcactttctgggccaagaactgccaagaccttcaaacactgacttttgtggctttgttttctgacattttaggcgcaaagtcaagggaattgtgtgctgtgttggaaaagagaagcatgagtttagggaaaaagagggcagtgcttatggattatctaagctgcaaggatttatttattttttttctgaaggacaagtagagagccttgggatgagcacagtgcatatggtctcttccccagaatgactagatgtgctcagcagagaggaccctggctcggagccctggctctgctgtcagcacgcggtcgactttgggcaggccccttccgatgccgctgggccttcttttgcggagtgggacaagaccctgctccctgtatgagcccagtgagagtcaaggaaagtgacacacttctcttgtcttaacttggtggatttgtttttttaaaacaggcaaatgtctaaaacatatatgagaaaaaaaaactaggtgtttcccctgaacatagattagaggatgattggagtatatgaactagatatctgaatttgctggtaacattttgtctacaaaaagtgtacagacttagaattaagttctgcaacagttttctgtggtgaaatgcgtatgcttcaatgcttggaacttgtatctgctttctctgctaactgattattagctgcttgaggaaaatgacctctgattatgtgagaagtggtattatcgcatagtaggatcttgctattcaagaatctagggcagactttctt

SEQ ID NO: 121207 - DNA, 1082 bp, Homo sapiens
ttgagacgaagtttcgctctgttgcccaggctggagcgcaatggtgtgatctcggctcactgcaacctctgcctcccaggttcaagtgattctcctgcctcagcctcctgaatagctgggattacaggcgctcaccaccacgcccagctaatttttgtatatttagtagagacggggtttcaccatgttgaccaggctggtcttcaactcctgacctcaggttatccacctgccttggcctcccaaagtgctgggattacaggtgtgagccactgcacccagcgtgtaaatcttttatggctagaaatggggtatcatcccataaaaagtagaagagctttcacagaaagatctgacataacatttctggggtaactgttgtgctgtcttggcaaaaggttgaagcattgccagaagtgtagtgataatcaggaaagacaaatactaggaatgtattggttttacctttgaaggaaaagtaaagggatttgataacatgagtgtcccaggtcccttggaagcaggtgtagctttcttctatggagatgactttgtccatctctgattactgatgatgaaaatcatcccgtgatcctttctcaaggtgtggatattcactaagcactgtgatggggcatctaattttctgatatgggtgctgaggagaggtgatacactaacgtgatgacatcagtacctagttccattagcattcacattggtcacaaggaaattttcttagtgtggcacatttccatagtcatatcttctctgagcaaaccaactgacctggcaactggtcaactctgacctggttagccaccaagttttgtctcactggtagtgtactacacgaggctctgcttcaagcagccaataagcttgcctctttgaagttcttctttgcaatatagagtagcgttaattcagcaggtttccttgttttaacttggtatcaatgaagtgagttaaatttgacctatccctgagaagactaagaagagcactccaagaagggtagagaaatcagttattaggatcatttattttctggtttatgttctttaaagtacatgttcttt

SEQ ID NO: 121208 - DNA, 1049 bp, Homo sapiens
ttataaactacaggaagaaaaattatgcagtagctgtcctgtgttttattataatctcatgggctgatgaaattttctctttagtttctgctaatcaataaagtatttttactcttaggcacttttagctgcagcaataattcatcattttctttcatagagtattcagtagtctcaacatttttttgcctttattcttagagcttgcatatctttctactttaattatttctagatcaccataacaatgtgtttatcatgcccctgtacatctattatgtatacgaagtcttgttttttccttacaagcgtcttatatataggaagacaaggcaaacatgccatatataatgtcatttttaggaggttatttcagttagcacatagaataaatcattatatttatgcttggtatacactatacatgaacttttttaatttacagcgttttgtttgtttgtttgattttaggttgccagaaagctttcctgaattacagaatttaacatgtctttctgtaaatgacatctcactacagtctctacctgaaaatattggcaagtaagtttttttgtgaagtttgggtggatcagggtgaaagggggtttatatcatcagctctagcctccttcccttttaaagctcctatttgtctactcagaaagccatttactcattctttaatgtgaccttcaagaaagattatagccagcctcctatgtttttgcatctaattttccctaaattttattggttaaaaagggtactgctacttgttactagtaaaaaccctaaattgtttggaagtgctctttaaactgatgtatggcaaagtagttaatttaagccaagtactatgtgtcatgtaggtggtcagtaaatactggtagaaacaaccactcagtaattttaaaccatgctggagagccaacaaacaactccattaaaaacgaaaagtatgtgcccctaaagaacagctatgtctgacagtatttgtgaactgtggatccaagaatagggaatgagaatggtgtatttggagagtggga

SEQ ID NO: 121209 - DNA, 1022 bp, Homo sapiens
ctgatattcagcaagaactattgcttctgttgctggatgagattatattctttaggtccttgcaaagatcttatttactgtgagccatgttaaaaatgtgtgttaaattaatagtgaaattgttattttaacagaccctgcctaaaagcattggaaaactaaagaagttgagcaacttgaatgcagacagaaataaattagtgtccttaccaaaagaggtatgtgcttttagagaaatcacatgataataattatgaagaaataataataatacataagggatcaaaaatgtcaaatgctttgaaaagacgcatgtgttgttttttaaaggtgtgaactctaaatctgtgagtatagagccaactggaggaattatgtcaaagaatgatcatcagtaacattaaggagagttggaaaaggtgaatttataggattttaaatgggagaaagaaagagattgacattttgggtttgatatacagagaatggtgacaccattggcagaaattgataatttgggagtttgacagaggaagtggatgcctttgggtttgatttttgaatttaatgtgaaattaagctccatcccataagcaattggaattataaaaattgatcttgatgcaaccatatttctgggcagagatttacattgggccatgctcatgtcttggatgaggttgaacaaactgttcacaaaggcatacacatagaggaaggtgaatgggaagctaaagccagcttcctaggactttttttttggttagtagtctaagcacgagaaaatgagacatcaccatctgttgtggagagtagctgtatggactgagaggcatttaaattctggcaagggaggtggaaatgctgacaatgaggaggaagcttatagtgggtcaaacaaggaggtgtctagtgtgttgtttaaaaagaaggcttacaattagccaggcgtggtggcgggcgcctgtagtcccagctactcgggaggctgaggcaagagaattgcctgaacccgggaggct

SEQ ID NO: 121210 - DNA, 1049 bp, Homo sapiens
gtctggtatgctgtgtagttcttcctatattttttcctttaaaaaaaacaacaacatttatagtattgtgtgttgccagttttagggcacagctccttagtctgtagcagcatttatttgcattttttccccaaatggttgaggggaagatgtttgtaccatgtgggtcacaatatggattctgtttgtgttttgtggtgttatttgtagtaaacatttgcaaatcaatgaatgtcttttgttttcttaattgttagctgcttggaaatttagaaaagtcaggtaaacttgttatcttgtaagtattgttcagaccacagttgcatctctaacttccattctgcttcttaaatgcatgaagattcacattggctgactgctttgtgtgctcttcattgtaaaatattggacattttcttctaaattcattttttttttttttttaatgactgcatggcctggaaccttactttgttatgtgtttttcaagtttgttcagattattcactctcaaaagaatgcttttctgtgaattacattttaagttattcagaaatcctgaaaggcatcatttggcagctcatctgttttcactaaattgtaagtttgtcggcacaaatctgtctctaatggaaaggctagatttgctttatttgctacacctggcatgcctctgatttttcaagtcacttatttgtgtcttttatttttcatcctgttgcttaagtatatatacttctgggaaaagatttcttaaaaactcatagtgttggtggagaggagagttaaggaacatattgtgcagtagtatgattgattcatggatagatggagttggtggtatatgtgtgagcatgagtatgatgaatgagagccagaccataaagagtttttggctagaagaaattgagcttatatccaagtttagggtcctgttttctttttgtctccattaagtccaaatgaaagagacgccaactaagccacacttacccagtcagatgaggcaacatagcatttgcagatcattcatcaaagcttttttcagt

SEQ ID NO: 121211 - DNA, 1008 bp, Homo sapiens
catttaacagatgcagttgcgttagatatcagcagtggaaaatgatttcttctttagaataaaattttttaactgtatcattgattttcttgatttaatttagaacatgtacatctaacattttgcagagatttttatgaacatatggggctgcgttttgtaagatttaaattaatgattgttggtcatcagtgagaccggtgagttatgtggtataagtttatgcatcctttttatactgtttggtaaacaaggtactctgatcctactccatctcccctagaaaactggaaaaaagatgtattttctttctcaccatagatcggcgggtgctgcagcctcactgtgttctgtgtacgtgacaacagactaactcggatacctgcagaggtgtcacaggcaacagaacttcatgtcctggatgtggcagggaacaggtaagcctgttgtagtttgctttgcttgagggaaacaaatatacatacatcccaatcttggcagtgcatcttcaaatttttgtctttgctttatcttacagaatataatcctgatttttcaaatgacctaggcctcagggagttccttcataggggggctagagtgcttgagcccaatggagcagagaaggtcagggaaaacctgagcatgggttaaagtgtcagtggacactttcgtagaaatgcttcccagaatgacagtacagtgatgccagggaaagagcactgacctgagaatggggagacttgggttgtgacttagctcttctaagtagcttttgtaaatcatcatgggcttcagagtttcctcacctgcaaagtgagtgcaaatgagtttgaactcagttttaaccaggggaccttgatatactctgctggtgactctgaaccccctgaaaatacaaacagaattgtgtatttagggaagtgtttacagctaatgtcagaatctccaaatgattcataatacaaaaaaagttcagagccgccagactagtatccccaaggtcac

SEQ ID NO: 121212 - DNA, 1050 bp, Homo sapiens
ttatagtgactttaatttaggattttttatttactcttttatctttttctttccccacaccctgtaattatatcctaaattttaaaataaatgttcttgctgtttatggagcctttttattttatagtaatttcatatttttataagtattcttttattctgaaagtaatccttctatagtaactaggtaagttacatggaacactttcccttttccttaactaccagtgggcagttgatgaatgcacatacatccaaagaaagcttttccacccattttaagaatttctaagaaggtaacatttgtattggaatgctaatgccttgaagctgcatgttttgaaaaaagtagtggaataaaaccaaaacactcactccactgtttgtttttagagaacacttctaaggcgagccactccacacccaggggagttaaagcacatgaaaaagacagtggagaatttacggaatgacatgaatgctgctaaaggactggactcaaacaaaaacgaggtcaatcatgccattgaccgagtgaccacttctgtgtagagtttcacctccaagttttacctcctgtgtcttcctctgctgtcgagacgttcctgtctgcttcccgggagcctcacgtgctccttgtcctaaccagcccccgcgcgccatcttcccgtggagtgtggggaagctgctgtctcccaggaagtgccttactcatcccgcaaccagtcagcgcaccagtggtctcccggtgtgattttttttttttttaatttcagttgtttgtaataagtagaatacactactgtaaacatacgacctttgtttttgtcttatgttggggtaaaggaaagcaggaaggggaatttttatcctcctcccttccgtaaagtgctgggatattttgaatcccccaagttcccttggacctactgatgagagatagttttatgtatggggaaaaatggatactttttaaaccttttttggcagctcagatggtgtaaattttaaaattttgtataggtatttcataacaaaaatatgtatttc

SEQ ID NO: 121213 - DNA, 1046 bp, Homo sapiens
ccttcactcacttcttgtatgttgtcctgggctaagggctgtggaaatgttcatggggtctttgttctaccatctcaaactatgtgcaaatcctaagaaacttgtgagataaagtatttggctagtgggaaaaaaaaaattgataacgtttttaacattaactggagtgacagtttggtaattggctctctgagaaagcttcagcatattctgaaaattggcaggtagctccagagtgagctaattagttaggaatgacttttaatactcactacctttaatagcctacccttggagaaaagacagataatgaacactgggaaatctatggtgctgcaacttgacctttgtgccatttgggggaaatgaggaagatgagtcataatttattatttaaagtcctccttttataatgtgttgttgtgaaagatttgacaaataatgattgctcctttagggactaatttaatcaaagaagcagaaaacaggaagaatagaaaacttgtgtgactaagcaatgtttaattttatttgaaactggctccaccaccctggtgataggaacagaaggtcctatggagtcttcccatagcaagaaaccaggcttgtaacagggtgtaatagagtgacaccccacacctgatgccctgtaaatgcagagtctgcaaatgcctctcttttgatgctttctcaaggtaagtcataaatgaagtcttactgctttaaaaaagtagcttgccaacagttgcccaggctccccatgggactgcgcttcactgagcacctgaagaaagtattcactggaaatgggctctcctgggagactgtctggatcccgagtgtctggcgttcatgttcccacacctggctgctgcttcttgcccttccttggctgcaggtgtgagtgcttgtttgtttaaacctcgctcagcactgcttggaaaaacaaaacaacatggttacttgtctgggcattgaatgttcttcctgaattttggtcctgcccattggcccagaggcggaatgggtggggcaagtttcggtgt

SEQ ID NO: 121214 - DNA, 1046 bp, Homo sapiens
tgttcggggtttggcgtgccaccacttgggacttgttgtaacccgtctccactcccgccccctccagcgctgcaccttgtctcggggaggcgcggttcgagccggaatcagcctccctccgcggacctgacgctgggcaggtaactcccctcccctccctgcccgcgcccaggcgcttgctgcttcctgggaggcaaaccttcggcggccggcgctgtgcggcgggcgcggttgcgcgcggcttggggcaagtaagtggggtttgggctcccttgccccggacctcggcggacgggaccccagcgggtgcagggttgaggtgcttggggtactgggggggcccggggcttcacccgcccctggccggcgcggcggacgggagggataggggactctcccttgggagcgcaggcgggattggaaattccacagggtgtaaagctcagttgcttcagtcttttctacgtttctttcattgtcgtgggggttcgagtgagttgagaagtttgaaaagttgtctcgggcggagtcggtttgggtccccagaggactggcgccgcccctcgtggaggctgcatttgtttcctcttttccagtgtaggagtgcgccgaggaccccgggaggggaagcgggaggagagaccgctgggaaaagtctcgtgggaggaagtccagggtggaagcagagggcatgggggtggggggttccgggaaaaggtgggagagcttaggtcgctgaggggcgtgggtgttctttagatcctgagtggggagcagaacttgaaaagacagttttttcacacaacctcttaattgtacaggatcccgtttctgagtgcagactggtagcgacctgtgtttttcatacttgggtcggcctgagtctgggtctgtgtgccctagcagctctccaggagagcctgtacctaccaaagtttgagaaccactgctctagatcctggtgagtgatctagaagaggagagtaggcctagagcagattgctcctggaacgggacttggagacttttggcctattctgtgtgat

SEQ ID NO: 121215 - DNA, 1054 bp, Homo sapiens
aaatagctcctttcttagaaatttagatgactgaatcgaactccatagctgatagctgatgcttaatatatgccagttatgttccataactctggagtccaaatgcaaataaatcaagtttattcctaaaaatttcaacatccaagggttgctacattgagtagctgccacaattcaactagtcacccaaggcaacaaaccaggattctctatagaatttaatctcactatggattccatgtccaatcagttaccaagagctgctaatctgactttaaaatattttggttgtccttcccttactacctctgctatgactacattgatgcaggtctgcatctctttcctgggtgttcatcctatatactggtcgctggctccagacttgcctttaaaatctatcttccatgctaccatcaaagggttacacctaacatataagtatgaataggctctacgtctgcttgagcaaggatcagtggattctaatttcctgaaaggaagcctgtgctctatcacataatctggcctattattaccttttccagggttaatggtatattttgcctttatccatatacgccatggatatttaagatatcttggactgctcttctctctgcctgcatacagtgccccatatatcctccatcctcttttatacattttgtataaacctcaggtcaggctttacccttcttggcacttttccctgacacattcctttctgcatttttttttcctcagtgggttgatggcctcatatctctgcctccgtaataacctgggcatatctctatttgtggctttaactatggtacagaattttctgttgtgagtccacattgcttgcttgaacttgaaggcagaaaccacattctacgtgaggttcttgaaactccagaatctatcatagtatacgagacatatttaagcacccgacaaatgatttaagaatacatgcagtgttgtttcataatgatatctactggttaaataaaatggtagagaaaagccaaaacaaaattcttctttggtgcgatatcaacaaatt

SEQ ID NO: 121216 - DNA, 1094 bp, Homo sapiens
tggcatggcaacttatttccacatgcttgtacgtaagaagcctggaatgacatttggtttaaacatttgcaaaaaaacatgaaaatattcacatagaaaaaatatattttgtattacatggaggcaatatagttgatgtacatgtgtaggaatacatagaataaatgtttttacacgtgtcttaaagtgagacctttattagttgatgccataatttcacttcagaaatgtggcttattagaagaagcaatgccttgagttgaggaagaattacctaatttatagacaaggattccaggcaaaaagacattatggtaaggccacggaggttagaaacagtgtaggggaatttacaagaaattttatgttgttgaagcatcaagttcaagataatggtaacttaaacaaagctaaaattatatcatgtaagacaatgataaatgatgaggctgaaaacacattctgatgccaaaacttcaaaggcctcactagtaaaggtaaaactcttgaactttatccagcaggtgatggaggaccacaagagttttaagcagggaagtgctatttgcacttcagatttgtattttagaactctttctagtatatctatagaaagtagatttaaggaacataggacaaaacagatcagatcctagactctttcagtgaatcaagaaagaaatattgaaggccttgtgtgtaaggtgtgcatagtacagaggagtgaagggcatattggaaattcatttaagaggtagtaggacctcaagattgacttaacatggaaggccagagagagggaagaaacagctgagttgcatactttttgcatgagtgactaggtgaccaatgatcaaatgttgtcatgtagagacatttgttaaatgcatagctgtcctccagagcagacacttgggcctaaactatgccaggggcagtagaaataaaagaggcaaagcataaaggtcattgcagattctcaaagcagattctcaaagcggattctcaaagcggattctcaaattagctcaaagaaatggaacttggtcatcagtttcctgtggaacttgacaaagctcttgttcttgatgctg

SEQ ID NO: 121217 - DNA, 1035 bp, Homo sapiens
cccacccaaatctcatctctaattataatccacaggtgttgagggagggacctggtaggaggtgatttgatcatgggggcaattgtcctgatacagttctcatgctagtgagtgagttctcatgataactgatggttttaaaagtgtttggcagttccctcttcatgctctctctcctgccaccatataagatgtgccttgcttccccttcaacttccaccatgattgtaagtttcctgagacctctccagccatacagcactgtgagtcaattaaagctctttcctttatgaattaccctgtctcaggtattttatagcagtgtgaaaacagaatacatactcctatttcttaaactgcatggtgactaaaattatgttcattttattgtattgtgttttaaattgtgtctaccttaaatataattgttatattaatggtagcagaaatctaaaagttaaagaaaaaaatgaaatatgtcaatgtaaccattttgggactttttgccaagatttcctgaaccaaagctatcaattacaatattttaaaaaacattgtgctaactcctaaagttattttagaaagtgtccatctgatatctttcagaccatggtcatttgagaacacagtgaagagaccaacagagtaaatcaccaggacctgtttacacaacaaaaaatgtggctggtaaaatattctctactgatgtttctgtaaccagagaccggaaacgtacagtggaaatgaaaccctgtactattctagtgccaacacaaacaacaattatagtgcgatgtgagaaaagttgtaagaaatatttctgggtttcagtggttcaaccaagtcagcatatttctgtaattgtggcagattggacccaaaactttagagtcttcagcaaggaacgactcttagacattaaagtgatccctgataaaacaaccccagggtcatgagaaggctactctgccaatttcatttcactgtgggacccactgacatctggctcagctgcggaagctggaaaactttaaa

SEQ ID NO: 121218 - DNA, 1075 bp, Homo sapiens
ttgtcaatttgtaaaatgctagctattatttcactagccaccattaattttaagagagttctagacatttttattgtctttatatcttcataaatttacttctgtctttaatacagtctttgctaatttcacatatttgattattgctggagagaaactgaataggctgatataactttagaattagtgttaggaaagataatagatttcgctaatattatttgatgaatattgaccaactaaagttatatttcaggtacaaactgttgctagccctctttgaaattcttttttgtttcctcagtggttttataaagctgcctacaaaatagtctttcctatagtaatgttcatggccaccttctagtattatgcaagagtggaaattgatgatagatttttaaaaactgatttaggacatactcagtgacatttagaaggataaggcagaaataatttttagaaggctacacttcttgcatagctagttaagagaaaagatggacaaaaggaaaaaaaaaggcagtccctttgtgagaagtaattggaaaatgcctcctgaccttacattaagtagatacatgggataggactataaaatgatatgatttattctaggtttgttcccaagttgagtttagggcttaaactattcaaatttaatgaactcttccaaggctcaaagtattatcgaataagtgcctgaattcccccacatagcttttgaggacagctgtggtgagaggaagtgcttccgaaattgtgtccctgttcacattctgccttgaacttgagtaagtgacttaacctctctgaaccttggaaatcccagcagtgatgcctgcagtatcagagtgttggagattataaggcacgtgaatggtccctgagtgtgaatgcccacagtccaaagcacctgactcctgaccagtgctcagtactgttatttaagggaatgcctgattagtagacatactgatggatggatcttgggctctacacaagttcactgccttttctgataactagcctttattctgaagattaaagtatgtgtatagttacaatattgagt

SEQ ID NO: 121219 - DNA, 2133 bp, Homo sapiens
tctatattatgtctacttagagtaagcctgcatacccttgtgtaatagagaaaggctgtgaatccacaactgttttctgagtgcctactacacaccaggaaaaaaagttaagattaaaggtggcatcgggtttcaaaaattagttgcagatggacccaataataagggtgagctgtctctaccttctttcctcagattccaagaagactcccagccgaccaggaagtcgagctggaagcaaagctggcagcagggccagcagccgccgaggcagtgatgcatcagactttgacatttcagaaatccagtccgtgtgctcagatgtggaaactgtcccccagacacacagacctacaccccgagcaggttctcggccatccacagcgaagccttcaaaaatccccacgccccagaggaaatcacctgccagcaaattggacaagtcctcaaagagatagtgcaattggttctaccaaggcccttccttgagcatttattatttaagtttgaacgatgtaaaatatggtgtagaaattcttgtgaaatattgcaagaggcgagtttaaaattctgcagatggccttatttgtgtatttgtctttttattttatctgtataattttttttgtcagatattctggggttaaagtcacatcatatgtgaggaggaaaagtttaacatgaactaacatttctgcactgtaacgtgccgggcacacactaaactcagttactgtacctacaggtaagtctacatcctctctgacagccacagcactacatcaatccctgacgttagggatacctcatgacattttcctgtttttatggaaactctgagaagctgaatgatacatgcaggggatattttttgagatgatttaaatgtaaaccaaaagatggaagacaaaaagacaaacacacccacacgcagtctttgcagtatctgacagagaactcacaggaagttacttcaagcacttgccagtactatgatattcaagtaccttgcagcatttctctgccattgctttcaatgaggccagaggcatcctggatattagacctattatactgtaagaatataagtataaagtgcgttcatatacatgtgaggttttcttttgcttgagtggacagtagcacctgtatcattgaactcattttgtatcagagcaattttgcttgcagaaagctatgaaataaaacacgtcccttaactgcattgctatggaattaattttttttccccagggaaaactagtgtatttttttatgagcaatatcaatttggagtgaccaaaagatacttaaaaatgggtttattttgatttctcatctgaaataatcatgttctggtattatatctatctatatttaataaatatatacattttaatttattatgtgtactcacatactatagaaagatattagtatgcatttaataaaacatattcacttgaatatatggaatacctgattatttaaagtgaacttcttctattatttgttttaaataaaggttatatgtatgatatatgtttactaagaaacaaatagggtaaatttgggggacatcaaaaacagggagttataataatgttaaccactctttcaacaaatatttctaataagtattagccatgcaccagccattgtaagtgacatgaaactataaggttcctgccctcccctcttcaagagggaatcagttaataagtcactaaaaagcaagggatgtgtggcaggattacagatttaattaaggtaatatagtagtattcttctggcctctgtacatttaaaagtcaaattgtaaaattttcctgaatatgaaaatagtatcagatatcctcagaaggatggcaggttgtaactttaggtatgagggtcccaacattctgcataactttgtggatttgctgtagcaaatgtcactgatggtgttcagattcaagggaacattattacatttttctttcttggccttttcagtggaggccaacactgaagagcctggagtttctattggcataaattaggtgctatttttaagcaatagtaatcccttctttgtccaggcatgggtctcaggtgggagcccttgatgagaaggggaattctaaccta

SEQ ID NO: 121220 - DNA, 1050 bp, Homo sapiens
gtatatctttttaagaaatttcactgtgaaacaacagacataggtacaaaataatcagatattttattagaatcccaataattagtggggaaaaatccctaaataccttttcttgaaattgaagaaggtatttcaccttaatgataaaggacgtaacttaaaggccaggatcctcaaataaaagtaatataataacttttaaaagccctcttatgcttttcaaaacactttcttgtctgttacttaatcctcacattaataataagtgacaggcagagaaaaaatgtgttaccttcatgactccatggcaatctcattgctgagaagtgggagaattggaacaaaaacaacccattctttagcgtttcctcatttcttcctcctcattttcccaagcccctcatttccaccccttcccaccaactgggtgatgttagtattatatattacctctagagatgtctgtcaattattatggatctattatagcaaaaacagagaaaggttcaaacaacctcaagggacatattaacatttgctttaaatattgaaggctatgatgctgtgttcaaaattttttttaagtggaaactctctcaaagtctaagtagttattttgactagtgcaaaactgtgtttcatttcaaataacgtgatgaaacaaaaaaccaaaaaacaacatgtttctatgggagggactgtgaaataaaatcaaaacaatcaaggcattctgagaagaatgattttggtctttcacggttatgaattctgccaccttgagtggtatgtttcataatttgtggcttctcactccctcgtgttgttgagattctgtttaagttaggaatttagctagatcagcattgtcagatcttgggcaaatcatgtgcctcctcaggctcttgatttttcacattttcaaggttatgattaggtgagtgtgaggattaattgtggttatgtgtgtaaaagtattttgaaaacttgaacattctatgtatacaaatcacatatagatactacacttaagtgtatgtatagtatacacat

SEQ ID NO: 121221 - DNA, 1799 bp, Homo sapiens
acaaaagctcctgtttgttttatattttgaaaataatgtagcctaaggtaaaatgcaactccatttatgaagaaatcagaatacatagtgttctgttgggttgcttaggaaggttagcatggctgtggcacagtcttccaaatacatttttcttattgagccaatcccttgagtgcttcttttcctgatgcaacttttcttctaaaatgtgtgctaaaggccagatgtgagcaccctttgcatattcaactactgtactttgtttcttcttctgctaacagtattctttaatgtgattggtatcctgtgtcattttttctagttcatcatcatgggagtaaaatgttacgttcggaatcaaactcttcaattactactactcagcctactataggttggcaacctctctctttgcctctcccctctttccttttctctttcctacttttccattcttgcttcagtcatttgttttaaaataacatgcttcatccatcgcgtatggcttaactcatatccagctgagctggtgcttccaaatttaaattctgaaaatttgatgactttggttgtgttacacatgcaggtgttataagtgatcaaacacatgctaacacgttgctcaccgggttcttgtggagtgttctccgtgtgcgtatgtgtttgtatgagtgctgcatcactgactacctcacagatccttgggtctggtgtttgttattgcatgttggtaaaacagtttttcaaggcataaaataaaaatactagctgcctcatttaagtgaaaaatccagaagtttatatgttgtcatcatgactaacaagccatcaatcattgtgtgtaattatattctttaatttatccccatgttgaaatactggcattctctttacctcaatagtacatgcaaaagacacagtccctgccttactggtctgtcttctcagtgtgatgagagggtaatgaaaccatgtgggcatctgtagctggtggattaatgatattttagcatgagctttccattttcatgctgacactttctttaatagtggttattcttgctggtgtctagtgttagaataagcacactttattttttcctccccgaactcacctgtatccaaaaggaatgcattgtaaaggaatgcatttaactttttgttatgctgagttggagttggcatggcaaaaagatgttcttgaaattctcaacgtgatctctggtgccaggtggccgttcttcccattaacgattgagcgcctcttcttttccgtcttttctttgtgtgcattgttgtgtgtgtataacccagccaaaggaaggacaaacatggaactgcgtgagaagttcattttagcagatggtgccagccagggtatggctgctttccgaccccgaggccgaagatcccggccatcatcacgaggcgcttcacccaacagatccacttctgtgtccagtcaggctgcgcaggcggcctccccacaggtccctgccaccaccacacccaaggtaagactcaggatgaagacttttcctccacctttgcaatcaatgtcccaagtagacttttgaatgttctatttagggccctagaatttgtaggaccagctatctccatttgtgcaccttctcatactgtgggaaatacaggaatttttttttgaatgtatgcttttgcctagtggcccacatagagatgatctatttaggaagcctttgtgatcttccagattgatttttctttttaaagcttcattcatttttttggtgtgtatgatttgccattggatcttt

SEQ ID NO: 121222 - DNA, 1201 bp, Homo sapiens
tgatcagaaacctggaatctagaaatttattcaggacttgcagaatttgtagcatatctacattattggagatctattgaaagggcaagaaaaagatgattgcctgttagtatcaacagttatggtacagacaactatgagagaaaccttttagatttggcagctgtatcattaataatgtgtcattggctattctaatattacagtaatctaaaatggcatattaatccagcctttaacaaattggtttaccagatcattagggatgcagaaattttagttgactgtgaaatttatatgagtcatactcatttactttattctttttaagtgaaaactgcccttacagaaaagaaaatgagtttataaagatttctcacagagttcagtggaaaacggttttactgtaagagagagtttaatgaagaagaatcaaagcttattaaatttttcttagaatcattttattttggataagccctgggcaagtgggccagtgcttactttcatggctatgtttaattcctagaaacattttaaaattactgccttactaatattgtttctgtcataagaaagaaaaataatttttagaccaaagctttggtagtatacttgataacctttgtaatcttttttttttcaaactgtttcctttgggctaaatcagcatgcagccgtctaacacaaatcattacaaacccccttttctgagattttactaatcgctatgaactaagcaagaaattaaagtcggttgctttagctactgcaaattgcacatcatcctgtagtttagaattattattgacaactagaggttctttctttcttcactgaacagtttggagactcccagcaactgcgactggtccggatcctgcggagtactgtgatggttcgtgttggaggtggatggatggcacttgatgagttcttagtgaaaaatgatccttgcaggggtaaggagatgcttatcatgataacatcatgaaagtatttcaattttatattatatccagcaccaaaacatactgggcataattttggtcatttattccaatagtgaatgtttcacattggtctgtcagcctaaagttcccaaagaacctgtggcagtcatgtaaaccatattcttctcatttttttctttcttttttttttttttttttactttttctggataaatatggtgggcggg

SEQ ID NO: 121223 - DNA, 1058 bp, Homo sapiens
ttcacaagaaaatactcaaatctcatatatttaggttgcttcatattattttatattttgttatgattagaggtaagttttcagatttcaaacaagaaagctactctaatccagaaccacaaagttaaaaatatggactcattttaataaatatgaaaagagaggataatgtcttctccacttgtgcagtaatttttgcttttattcaaaatctcaattaactcggttcactctcttcaaaacagaagaacagtgtgacttcattactctttctctatttttttttttctcttttggaacatctcttatatgtagtagctagataagaaatgtgctgagtttccccaatacagtgtgctacttctaaatgaaatattatttttatttttatacttaaaaaaataatcatcaatgtattcaaaattttaacttaaatttgaaatcctaagattttcaaaaatatgtgtacagaaaatagtctgattatttggtttgaaattgggacaactgggtgcctgcacatctctaaactagatactacatccagaagcacagagtgtgagtatgtgtgtatgttctagagtcatacagaaagtttcctgttgaactaattgtgtctttcttccatttttcatttttatcagttcttcctgggaaatcaggtataaaccagtggaatgtattctcaagttcctgatgatttttttttaactttaattcatagtcattaaagcttgccatggccaatctttcccatgctgtctccctagctactacattgttggttggcgtggtgtttctgtaaacgctataagggtccttgatccaggattcctttttgccttgtgtctctcagatgaggagattacttttaagcaaaccagataatgaattgtagcttggcttgctacaatgttacgaatgcaatttttaattcccattttttataatatgagcatatattttatgctagtactcattggaacacaaatttgattctccacacatctctgtgttaggctcattggtgtttaactgtttaggacatacggtctaca

SEQ ID NO: 121224 - DNA, 1588 bp, Homo sapiens
taactttgattttgatatctggcgcaaaaaatacatgcgatggatgaatcacaagaaatctcgagtgatggacttcttcaggagaattgataaagaccaggatgggaaaataacgcggcaggaatttattgatggaattctttcctcaagtaagttccaagacagatgactatgactgatacaatttttaaaggaaataagcacattttaaaagtgtgggtctggtaaacttgtgttacaataaagcattgtcttataagttgcctaggaagtcacgacccttaaaaaaatgtttttttggtaaaatttgtggctctggagtcaggaacactcactaactgtgtaatcacagatatgttgttccctccactgaggctgagaacttgttagaataataaagttaataatatatgattcttaaggtgttttctgtgtgtgtgtgtgtgtgtgtgtgtgtgtgtgtgtgtgtgtgttgcctggcatatgtgtaataggaagtcaataaattcaagtccctttttcattctaattcacattctgatctaactttgtcattagtaggaaattagaactctataaaacttcttaagatacttatcacctttttgtttgatggcccaatcatttgtatgtgatttccctgacagatgttactagatgtcattcttaaggtaaatttcatataatttattctttgactagcaattgacccatataaaattgccagtgttaaacattttcaacctaaaaaaacagcattttatatgattcacctaaatagtaattaaagataaattaagattatatataactcttcatttgctgtgatgtaaatcagttttttaaaaaaggattttaatatatttgatcactgatgatttaaccagctacactgagattgaaatgtgcaattgagaatgtcttgagaaagaactaacaagtcactacttaccattgttttcaaaattttagagtttccaaccagtcgcttggagatgagcgcagttgcagacatctttgacagagatggcgatggatatattgactactatgaatttgtagcagcccttcacccaaataaagatgcatataaacctatcacagatgccgacaaaatcgaagatgaggtactcattatcttcccattgcgtacaacactgatagtatgttctgccacgatatcatgcacaattcatacaaccattttattttcactctaattgttgtgtcaaagttttaaggattgtactatgtaatattgacattaaagtaaatatttcatcattgtttttggcaggtgacaaggcaggtagctaagtgtaaatgtgcaaagcgatttcaagttgagcagattggtgataataaatacagggtaagttttcaaagtaatgttgtagttcctttaaaggacataaattgaaatctgtatacaatttgatctccattgttttccaggagtcttatttatttacttttttacctcatgtcaaaatttaatggtatatgaaactcttacatttaacattttaatttgtataacggcagcctgcattttgcatattaggaaatatctttgacatctacatca

SEQ ID NO: 121225 - DNA, 1514 bp, Homo sapiens
agagtctcactctgttgcctaggctggagtgcagtggcacaatctcggctcactgcaacctctgcctcccaggttcaagcgattctcctgcctcagcctcccaagtagctgggactacaggcgtgcaccaccatgcctggttaatttttgtaattttagtagaaatggggtttcaccatattggtcaggctggtctcaaactcctgacctcaggtgatccacctgccttggcctcccaaagtgctgggattacaggcatgagccactgcacctggccacattttatattctttagaaattagtaaatgcctgcagtatgatggtttagattttttttaccctaaagataaagcatatgatttattcttcttcagaaataataacatggttcttttatccttctgcttttagttcatttctaaagacggttttctgtagtaactcttatttgattgacatcatttctttcatttcagaccttcatggaggaaatgaccagaaaacagcctgatgttgataaagtaacgaagacctataagaggagagctgctgatccttcctcattacaatcccatattccagtcttggataagggacgagcaggaagtaagcagtgatcaatttctttaaaatgtcaataaataagggagctaattttcttttattttgaattatttgaaatttgggggcaattggtgattttacatgagcacttgatatcatgaaatactttctagaaggaatacgtgtgctcaagtattgtagaaacttatttaaaaataaagaaaaaatatacccaggtttctatacgtaactttattgtcttgaagtgtatctttcatattagctagaagaaaattgaaaaaatttacagtaagaatggaaatcatcacaccctttgcattgtctcatttgtcttccattatatatataacattaaagctgaacataacaaaaatgaccatgacgtggataatcttcatgacttagttgttcattggtgaccagcaatctcatagcttttgcccatgttcatgtgacttcaggctctatatacttcttgagctactttaacaacatgacatgacattgaaaacaatcatagttagcttggagaagatttaaaaagaaacacaatttgtgttatatgttttatgcgtttctgaatagaaatgcattttgcgtattacttaattttttaattaaaaagaaatgatgtcggagctattgtaattacttactacacaaggagacaaggtaaactattaagagccctatagccagactccttggctgtctccaacacttaccaaactgagaaacataaccctggacaagttacttaaactcattctgaacctcagtttcctcatctgtagaagggtataattataacttcattggactgcagtgagaattaaatgagctagtacatacaaaatgcttaacctacttccaggcatatagttaaatgctcaagtatttgttgtactataaatcctagctgggacact

SEQ ID NO: 121226 - DNA, 1199 bp, Homo sapiens
ttttttccttgtcattattacctaaacaatacagtataacaactatttacaacaatttacattgtattaggtattattagtaatctagagatgatatgaagcatatggggaggatgtacttaggtcatatgcaaatactacatcattttatatcagggacttgagcatcattggattttattatgcacggtatcctggaaccaactccccttggattccaagggatgactgtacttgtattttgaagtacatgttagaaagtactttgttttctattttgtccccttttcctccccaattagtagatgattttcactgtgaataaaccaattgaagtttttgtttatttgtttaattctggcagtcaaacaaatgccaccagagttttgttttcagccaatgccaacagttaattgaagtctttgtttctgctgtaggaattcatgaagaaactggaagaaaagagagctgaactaaataaagccaccactatgggcgacaccgttttggctatctgccaccccgactccatcactaccattaagcactggataacaatcatccgggcgaggtttgaggaggtcagtgtgtctcagataatcttcagagtagcaatagctttgagagttgaggggtgtgggaaatttcaggaattaagatgcacttatggccatgggaaaatgagacctctacatagaaaacgttcttttaaatacgcttcttgtatgcattacaatctctgcaattcacttttctttaaaagctcaaagaaattttgcagctatgtccctggaaaattagaaggcaaatatttagtacactgtataacattttggcctccttccacattgtttctgttgaataatccagcagttggatggtgtttcggagcagtatatactggtggagtgaattggtatacataaagtgaattaattctgtatttaatatcttagcttttttttttctttcttttgacggagtctcgatttattgcccaggctggagtgcagtagctggatctcggctcactgcaacctctgcctcctaggttcaagcagttcctctgcctcagcctcccgagtagctgggattacaggcgcgtgccaccatgcccagctaatttttttgtatttttagtagagatggtttcaccaggttggtcaggctgatcttgaactgacctcgtgatccgccca

SEQ ID NO: 121227 - DNA, 1038 bp, Homo sapiens
tttcaaaatatggtcttcttaggccttccaaaaagagttggggaagaggaccagcagtgtgcaggccctgaagcgctcagcccgagaactcatagaaggcagtcgggatgactcctcctgggtcaaggtccagatgcaggaattaagcacacgctgggagaccgtgtgtgcactttctatatcaaagcaaacacggttagaagcagccctgcgtcaggtaaaaaccatgtaaatgagagctgggtgtaatgggaaaagtattgaaacctcaacaagaactattctagtaaaaaattgtgaggccctcgtgtctcaatcaggacagtctgaagaaggaaattctaatagcaacattgccttgatccttctcccaccctccctcatgaatttaaattactgctagagggaggcattctaatcttcacatacaagtgctgcgtgagtaatgtctcagcttggaagtatgatggactgccattcatctaaaatcaagttgttaaagtggtaaatttttcttcatataggctttttttttaatatattaagtgttttcttgtaaaatatgtgtatctctatcttcttaatgggagtaatgaagcaattaaatttaaaactttttttttttcattgaagggatgaatccactatacagttttgtaaattgtgctaacaggcatatttgggaattttgtttggggtgtgtgtgtgtgtgaactcttaggcagaggaattccactcggtggtacatgccctcttggagtggctggctgaggcggagcaaaccctgcgtttccatggtgtcctcccagatgatgaggatgctctccggactctcattgatcagcataaagtgagtaatatataaatgctatgtaaagctaaattagaaaatcaaagcagggaaaatagactcgggattacaaatatcaactgcatgaatattttccttcctgagaaatacttaaacacctgatacatttgagagtgtacttctgtccacattgcttacatatgtatgtccccatgcacccacacaca

SEQ ID NO: 121228 - DNA, 1545 bp, Homo sapiens
caaacggatcaatgaatgctaggggtttgaaggcgggggcagggcgtgtctataaagagacagcacgaggaagatttttgggatggttgaactgttctggatcttgattgtggtgatgattacgtgaatctatacatgtgttaaaatgtatagaagtgtataccaaaaaatgtcaagtttactgcctgataatctaaaacaaaattttaaaaatatttaaacagtttaaaaggcttatttttatgaagaaacatgaagggtccatggtttccaaaggtgggaattttcctggaacagatgccatgtatttaaggaataagaaagaaagtttagaaaagttttgtctttttcctaagaagagcaaagaaacaacaatgaataccaacatactgctcttccccttgagtaccactcaaccttcatcaattaattttagatgttcagatatatgagtgacgttttttgttgcaaggatcaatttttctacctttttccctagacaaaacaaattggaggaagccctgttattttctggacaattcacagatgccctacaggctctcattgattggttatatagagttgaaccccagctggcagaagaccagcctgttcatggagacattgatttggtgatgaatctgatcgataatcacaaggtattgttatctgggacattttattttatcttgtttgattattctgagtgtacaggaaatgtaaaccatttaaattagccttttaaaatcagaagactatagatcatactacataacagtctttattgttgaaatatgtgtccgtttgagcagaacctggaagcaaactttaaaagtgatggggaagtattatttagtgtcagtgaaatacttttgcttttaattaccagatctaaaacctttttagaacttggaaagtgatttcattctctggtgctttaaaacagatttcaagaatgttttactatctttagttatgcacttaaacaattatgtaataaaatttaaaatcattcattcagtgacctgacactaagtcattgcataagtatgtagatttgtgacatgacccatggtggtcatgaccaactgcttttaaaaataccgaaccaaaactgttttaaccttgccccttgaattatagcagtttatgagtcagcagcttatgctataagggatttgattattatttacttcgagaaaactggcttccttgaaatctcctgatatgcatgtaaaactgtcatgtcatgtaaatcaaaggtaatattcaaggtgtccaactaagtgtaaggtccaaaataatgaccaaatgatataaagcaacttagccttggaaacaatatgaagcatagtactaatgtagaatagttgtattggagttgactttatataaaaatgtcttacatcactctacttaaattcatcttgtatttcttctctctagtatctgagttcagaaaacttattccatttataatgttctctttatattggttatgctattttgatcttaccattctttttaaaagtcttattacatatt

SEQ ID NO: 121229 - DNA, 2073 bp, Homo sapiens
ctggaaaaattggggtgatataaaatttgtcatcatcaggaggaaatcctggccatcatcttcacataggttggctgcttgcatcagtgggtctaaccttaggaggtcatgattagagggatgggaggaaacatattgagcatctgttccctggccagatgagggctaatgaatggcttgctctgctggcaccctttgcctgtgagctgccacattcaatattgggagcacagtgacagtgaacagcaccttccttccttcccctctgatggcgaaatgagagcttccttctcaaaacagaatgctttatttgaacttgaatgtggatgttgtatcgtgtagtcttatgaaagtatattacatattaaagttagagagtcctataaataagaatatctacctttttaaagtctctatttggcaacagtgacctgtattcaaccataacattttttgtatatctgctttgtgaagaaaatctctgtcaataccatgattctataacactggcattctgtttagcataatatgaaaaaaaatttatggataactgtagaaataatgtgattgtaattgtgttgtctattacttagaaatttccagatgtagttgcctattacccatgacaaattaaataatttagtcatattaaaacactttaaagtatgtagcttttaaaggccgtaaaaacttcttaggtaattataaccttgagattattttagaaaagtgtacatttgcatagcattttactatctagggtaattttaatttgctacaaggattgagaatcactgtattaatgtttccattatattttgtgagtttgtaagcttcccattaagttgacctttctttgttctcattcctgctattgtatattcagtaacagttatctcattctttctactcttcctattgaatatttataaacatctactaggtgtaagatgataatgagaggcctacaaagacaatgtccctgctctataaaagcttatgattgagttgtgtagaaagactatacagatgctcctcaacttacgatgggtttttatccccataaaccctctgtaagttgaaaatacggtaaataaaaaatgcatttaatacacctaacattagcttacaataggacaagatcatctaacccaaaacctgtttctataataaagtgttgaatatcttaggtactttattgaataggtgactgaagtatggtttctactgaatccctatggctttcgtaccatggtaaagtcaaaaaatcctaagtcaagtcattataagtcagaaagcatctataattcatctccatttattagggatgcctctgttaatgcctcttacctgtttattagtcccaagaagaaattcgcatttttttcttgttaaatatttaggagtttcagaaatcactcggagccaagcattctgtctacgacaccaccaacaggactggacgttctctgaaggagaaaacctccctggctgatgacaacctgaaactggatgacatgctgagtgaactcagagacaaatgggataccatatgtggaaaatctgtggaaaggtaaaatgttctttaagacagtttggttactctgtagacctctttcaaatacacagtaatggtgctttgcggggacatttcgggaaccttaaatatttcctttgcctgaggaacttctgcttgtcctaagtatcccacacacatagcacttgcattgagaagtctttgctgttcattaatttttaactactcattacaataaaaagtgatatcattgtccaagcttctgccatctcagacttgactacacccactgcttctgactcgtcttcccatgtccacttttatcacttctttgacttaatttctacataactactggatagtcttttaaaaatgtaaatggaatcttgtcattcccctccttcacaccctttggtgacttactactgggcatgcattgaaacacaggcttcttaatgtgacgtgcaaggtaccactgatctggccccagcatttctttccaactccatctacccctttctgatctccctctttct

SEQ ID NO: 121230 - DNA, 1773 bp, Homo sapiens
aaccgcaaaactgacaatctaagaaatctcaatattgcatgaaaaaaacaataggcaagaaatacaagattatatgccatcactgatggagcataaagtatgtatttcataatattttgagtccccaaattaattgtatgaatgtcaacttttctttttacagattatatttagtaattgtgttctttggttaatttccaaaaaacatgctttagcgtatattaatttttttttagttacagtgagatgctgcttactaggcttaaagggttttggtttgccagtattttagtgaggcccattacatttataagatatttagttaatatattaatagatatgcataaataaagtggggataggaaaggaatctgccagagaatatttaaactgaaacaaacaaaataaccaaggcccttaaacatcacatactaaacaatctgtccttgcagactaaactggaagaggctctcaacttggcaatggagttccacaattctctccaagacttcatcaactggcttactcaggctgaacagaccctaaatgtagcttctcggccaagtctcatcttggacacagtcttatttcaaattgacgaacacaaggtatgtagtgagtcaaatagataggattctcttttcagacaccaggcttttttttttttttttgagactgagtctcactcctctgtcgtccaggactgtggtggtgtgatcttggcttacttcaacctctgcctcccggttcaagcgattcttgtgcctcagcctccccacaggtagctaggattataggtgcccaccagcatgcctggctaatttttgtatttttagtagagatggggtttcagcatgtttgccaggctagtcttgaactcctgacctcaagtgatccacccacctcagcctccaaaagtgctgatcacaggcgtgagccactgcacccggctgacagcaggcctttttaaagtcaaaagcatgcatttggtatttcgaaagctttcgtttgtcctttaaaataatttcaggtttatgacaccagaagcatttttaagattgatctgattttcatttgtttctacttatttcctttttttctgggaaaggtttttgccaatgaagtaaattctcatcgtgagcagataatagagctggacaaaactggaacccacctaaaatattttagtcagaaacaagatgttgttctaatcaagaatctacttatcagtgtacaaagtcgatgggaaaaagtggttcaacggttggtagagagaggaagatctttggatgatgcaaggaagagagccaagcaggtaataaccctttagaaaaattctctgaacttgtcaataaaccacttcttgctgttgaaatatatgttatggatgtacttttatcacaggctgtattaggcataacaatcatggcatggtgccatggtggttctttcctaaaagggctgtggcctcagtttggatgctgacatcactttttgacctggcagcaatttcagcccctggggactaatcttaagaagactgattatagcttgacttcatagacaggctattatcattgaggcccagaaagaagctcagaatttttttttattgggtttgttttctttttctttgtccttttgacctctgttctcataatcagagtgagacatcatacttcattgtattgctaccttttgtttagttcctaagccagactttcttcacaagctatcagtgctgagagccagacatgtagccctcccgacagc

SEQ ID NO: 121231 - DNA, 1044 bp, Homo sapiens
agattatgcacagtagagtttatcctggcattcaacaatctttcatagactttgacattcacattaatagtgatatcttcagagtcctaaatcctaaactaaaataaattttccttaactatcaaataggaaatgtttgattattttacatattgattcacattttttaaaaaggtaggtttttagcactgtatgctgtacagtttttgactattcttgcttttgttcttcttctttcatagttccccacagtaattgtttcctagtttaaaattttatttttctattaccttgtctatctacattgatagtcattgcccagccacatttgattaaacaatttggatttattttgcacacttaatgttgacatagaagcttgtttcattatttaatgtctacattatacatttgcttaaagccctaatgactggtgagaccaactgcctagcaacaaaatatgtttattctcatggtgtgagtttatagctgcatttacatttttataaacctatcaactgtcttaaaggtaacatacatcaggataggaactttgtataatatggtagaggtggaaaaatgaggcaccctgatccagttattttggtgggggataggtaaagacctcttacttctgtttgtctaattttaagtactttgaaatggccccttttctcttctctcttttctttccattcctcaaagatcaaaattagaggacataaaattcccagcagaattgctggaggaaggggcgaatgtttccgttcctttcctgctttcttctcctactcctaagctctgactttgtagcaggactcagaccattcagaagaatgaattttatagaactctcttttatattttggccatgaaaacatttaactttttgattctgagagtgatcctactcttaacataccaaagtgagtgctttctataaagataacttcttactcagttggttttgttggcttttaaaaacactccctaaccagatgcctcagaatatgagtgaaaacagtcagagaaacagtgatgtca

SEQ ID NO: 121232 - DNA, 1068 bp, Homo sapiens
tattttggttattttcgtataggtcagtgatttttatatagcagcctggttagaagtgctcactctgaaatcaggttatctgagtttaggtccaggttcacccacttagggcatatggcctcagtggtcttactggtcttactaactggttttactcctatgtctttagcttacattaaggataaaattatttccccaataagtgggttgaaagtaacttgaacataccaagtgcttactatacctttgttattattttcaaattattattcatgtatttttgaacaaagttaagggacttctagccatgaattttgtactgttacatattaaaataaatattttatgaaaggacagttacctattacaagcaactgtttgctaacctgttggttggcaaagccaagatgattaactatgtcagtgacttagaaagtagaaggagagagaatagcattctgtgtcagcagtgggtgaggcataggaatattaatgaacacagcacagctacagaaaacataaaattatcaggggatacaagatgtgtgtgtgtttcagagcaggaaatactaatttgagtttcttaagacttttttggctttcatatgtgtcaacatatgtttcattttcttttgtataattttaaaactcatttttcaaatgcatatattggaataagttcagccttgaaatttatttttttattgtagagaacaaaatgaaatgaaatgtcaaaattataaatagaaacatctatccatccaaaaatattgaataaagagaaaatattttccttattttttttgcctataattcttccattggtaagcctcatgtgagatttttactttgcgtcacctcccctcagtaagtagtgtgaattagaataatgatataaccaatagatttctttgtttggagttagtgatttttaacaatattttctttgtatatctcttttaaaatagcaatttaagtctgaggcctatcaacagcagatagaaatggaaagactgaatcatcaagcagagcttttgctaaagaaagtaacagaagagagtgacaaac

SEQ ID NO: 121233 - DNA, 1553 bp, Homo sapiens
atgataacttaaaaatccaagatttatcgccctactatatggtttgtaaacttcattaaagtgcaaaatatcccagtgctttgggaggctgaggtgggaggatcacttgaggccaggagttcaagatcagcctgggaaacatagcaagatcctgtcaaaacaagagctgaagtaccccatctacaatttttttttctttttttattagccagccatggtggcatgtgcctatagtctgagctacttggaaggctgaggtaggaggattgcttgagcccaggagtttgaggttacagtgagctatttgattgtgccactgcactccagcttgggtgacagagtaatggcaaaatgattttattttgtattcagtacctaaaaaaaatgtgacttgagcctttttagactatttttattacctaaataaataagaaatgcaggagagtctgaaacctgttataattcagaataatggtcttaatgctaataatttatatgtgcaggatcttaatgctaatctaaataatatgtaagggtttgagtcaaatattttgcctaagttctaaacagtaatttcttgcttatttgaatgaacaaatagatttgaatcttttcctttcagtatatttatacaagctgccttttaagcacatgtaatgaagaattccatgtgattggattctataaatgttttcaaatgatttttttagaagttcataatatatcaagaatctattgaataaacaatttcttttgcaaacttgtatgtatctatttcatatttgggacaaccattttggtatattactgcttttactaatttaggtgaaccatgttaattttttataaaatagtctaattctataatatcttttagatttatgattgtatttttctgtagtacttgaaatactgtagcaatttcaaatgtactgttgtaacaacacgtgggcgaatgtgtctttcaggcggtatttgactgggtagatattgcaggtggtaaattagcttcaatgtctccaattggaacagatctcgaaactgtcaagcagcagattgaagagctaaaggtatgtgtgggggctaatttatcgaagactcccttgcagttttaagtccttgattcacataattttgtacataaatttattttacctaatgtaagtatgacagcttaattataaagctagtttaatgtacatagtgctttcacatgctaagcaatatataagtgttctttaaataaaggaaagaaatactattaatagttttctttttatagtcaattaataactgttcgtatagaaaaatcagaaaatgcaaataaaaaggagaaaaacaaattatttcaagtcacccaaaatgttatatacctagagatcacctttcttagatttgatttatagcctttctgatatcttcatgttagggacatggggtgtgtgtgtgtgtgtgtgtgtgtgtgtgtgtgtatgtataggtagagagagagatgtatttagataatagtgtaaggatttttataacttgtttaacttgtttattcagtagta

SEQ ID NO: 121234 - DNA, 1700 bp, Homo sapiens
agtcttctctctagatctgctcttactgtgttgctgcctaaaccccgtcagaggcatcccctgccatctggatcaagcccaaactccctagagcagggcatgcagctttttgcatgccagcctagctcatgcctatgtttccaaagttatgtttttctcttgctcctttaccaaactccctccctgctactgattagaaagggcgtttcccaaaacaaactgttttgctctttctagcgtcagtgcctttgcgcatcttatttcctcactctagaatgtccttcctgccactctactggcaaagtccactcagggttcagttggatcattacccccatgtaaaaccttttcttgtatacttagcagagttagtgcatctgtgttcccgtaatactttattcatgcaaaggactctgcacatagtatggtttactgttgcttatgcctctgtctttcctgctgtagtgtgggccccttgaggggaatagccatatctatttttctttgtatccccagtgcctggtttagggcttggtttatggttattcagtgtttgttgaatgaatgaatgtatttaaccaagaagatgaaagcaaaagtaggatactgcctttctgttgtggtatctttgtaccttacaggtcctacctggtcctgcctagggtaatgacataaaatgtaaatccaaagctagattattctaaatctactaacaaatatattaatttgtattgtttttggatttatattttacttgtctatgttaaatgtatattggtttggaaaccaaaatgtctttctaagccttacagtattgttgatatttttaaaaatttgttttggtatttgttaaggtatttcttatttatcatttcttaaatatctttataataaacatttgacatttgttactaaaagggtgctgtttttcttttaaaatatttcttgttgaaaaaatttattgcagaaacttagaaaacagaaaaatgattagaatgccaccttctagaaataactaccattgatattgttgtgtactttttaaagttttgatgtggttttgcttaaaattctaaggctgtcattttcttattctagaccataagggaagaaatagatggactacaggaggagctggatatagttattaacctaggttctgaactcattgcggcatgtggggagcctgataaacccattgtcaagaagagtatagatgaggtacaactggcttacttatcagaatggcttttaaaaagtttttagttaactaaaatattttgttaacagtagttgaaagtttaaaatatggcactaaaagaattctaacatacatcttgtagttaaattcagcatgggattctctaaataaagcttggaaagaccggattgacaaacttgaggaggcaatgcaggctgccgttcagtaccaggatggactgcaggtaaggggattacagtgtatgtgctggtcttagctggaaggaggaatcgtactaattgatgtctacatattggcaccacctcaagatctgccagtgcatatgcaattgtgggcaaattattcctgcagttgcctgtgtatctcatttcatgttttgtcttttagaagatatttctgacctttcagatatgtgtagatttatatacacatctaaacacatttctgtatacacattcagtgaaatttactttgaaaa

SEQ ID NO: 121235 - DNA, 2300 bp, Homo sapiens
ataatataacttttcaggatgccataatagttcattaaaaatgaagtaaacaatccattgtaatagacaaatactcagcttattgaacttgatttttaaaattaatttgaattatgataacaggatgaagcagcaggtaaagagacattgctgccatgtcgtcctggtccaattacatattaatatataccatttcttaatggatacactcaaatattcataagaaactaagtctattgtacataggtagtgtgacagaggtgcatatacttcatgattttaggcatgtcttcacacaccaggtggatgtaacttttgaatgggtctgttgataaagaggctaagatttattcttaattctgacattaaattgtaaaaaatgttttttcatttaaatttcacacttggtattacagatcttttttccataaaagatctctttgttttgcccctagttccatgacaagatagatcagatccttgagagcctggaacgcatcgtggaacgtctgaggcagccaccctctatctctgcagaggttgagaagatcaaggaacagatcagtgaaaataagaatgtgtcagtagacatggaaaagctacagccgttgtatgaaactcttaaacagaggggagaggaaatgattgctagatctggggggactgataaagacatatctgccaaaggtaatacttttggaatagggaaacaaattttaaagcattctaaatgtttatgcggtttactcaccgtccaattggataacaaaatgccgcatcttaaaaaagatactacaaatgtgatgtgtttagggttgaagggctgtgtatgcaaatcccttgttaatgtcttcctgtgtttgtgaaattatttggttgaatacaaagcgtgccattatacatagaccatgtataaagaccatatgttcaaagaccatgtgtattcaggccttttaaatcagtaggttgaagcatattgctaataaggccatatctggggttttttcctcattactgactctgctaccttacatagcatggatcctgcatcacatagccacaaaaatgggaaccactaccacagccagccatctttgagatacgagctgagggtcaaaagggagagcatgtgcgtagtggaaattcacaatgagagtactctagaagcaagcccaaagtacataccatacattgttacattcctgggactgaacggacaattttactcttgatttggggagcataaaagtgtacctaggtgattatttcactccctttgggattaaggatagccttaatgaacttgaaacttgataaacttggttctactctgagctcacttttgtcaggaagaaccttggtttggcaagaatagcagacccagagatattatgttatttggcatagactcttggacccactgatatccactggactggggtcattcaaaacttggtccagttttagatacttagcaaattggatcactactttctgtgtgaactataacattctgctttgttggttacgtggggctaaccagtcgccttgtggatattgttttgcttcatagctgttcaggataagcttgaccaaatggttttcatttgggagaacatacacacactggtggaagagagggaagccaaactactggatgtgatggagctagcagaaaagttctggtgtgatcacatgtcattgatagttaccattaaagatactcaagatttcatccgggacctggaagatcctggaattgatccttcagtagtaaaacaacagcaagaagcagcagaggtaagcagaaaatctcatttaaagttagaaaaataagttgtggcataatgaaatccagattccttgggtaaatgttaggagttactctgttaacatttatatttggttctgaaaatggaatgtgcagtgatacagtaggagatagagtatacccacaaatttcactttgagattgtatgtttaaaacaatttctcaggcctgcgtggtggctcatgcctgtattcccagaactttgggaggccgaggtgggcggatcacttgaggccaggagtttgagaccagcttggccaacatgacgaaaccctgtctctactaaaagtacaaaaattagttaagcgtggtggtacacacctgtagtaccagctagttcgagggtgaagcatgagaatcacttgaacctgggaggtggaggttacagtcagccaagatcgtgccactatactctaacctgggcgacagagtgagcccctgtctcagaagacaaacaaaaacacaaaac

SEQ ID NO: 121236 - DNA, 1129 bp, Homo sapiens
agcttctttctattcttttttcttccttcccttctccctccttccccccgtcttgtctctctctctctctctttttctttcttctatttttgtatatatcatgagtgtgcagaaaggaacaccatcagatatgacttggtgtctgtaggttggggacatagcgagttcagaatacttttatataatatgaccctaggctaatgctcttgtcaaaatgtgctactcttggtatgagatgcataataaactgggattcattatttcactgaaccagcatctttgtaccctaaagggtctttggtgtgaccagactgttgtttaatctttgtgtcaggaccttctcttcctggcaaagagctgtatgagccatcatgtgttaaatgccttgtgatggggaggggtttgtttggagtttcttgccagctggatgcattgcaggtgtagacagctgtaatatggaggtgtgaccctgagatactgaaaagctgtttggtttgttatagcaactgcgtgagttgatagctgaacacaagcctcatatagataagatgaacaaaactgggccacagttactggaattgagccctggggaaggcttttctatccaagagaagtatgtggcagccgacaccctttacagtcaaattaaagaagatgtcaaaaagcgtgctgtggcactggatgaagccatttctcaatcaactcaggtaattgtttacactagatatagaattgggttcttgcagacaacagagcacagaaagacattttcctggatttcctgattaaattttaactaaaattatttcaccacattcactcttgagtattgatgtctgtgtccctcagaggtgatgtttgcttgcatccagcctttatctccttatctttctctgcctgcttatagatataatacaaataattttcaatgacttaagaaacgtgcagttgtcatcattgtctgaatatttaattcagtgtccatcctgagtagaatgtaatatttgccattgggggagataaaggaaagtgttataattattaataaagtactctcaagaaggcaatgagaagaaagaatgataggctaaatgaaaagaaaaagaatataaagttggatattgatggt

SEQ ID NO: 121237 - DNA, 1065 bp, Homo sapiens
gttctcctttctttaaaatttagtcattatcacgaattattttaggatgccatgaggagacaagctcggattttccacttgtgtaataaggatatttcaaagaactgtagataggtattttctggcatcaggaacgggaacgtgctgacctaattatttatcttttgtttagtttgaccaagcagctgatgctgagttatcctggattactgaaacagaaaaaaaattgatgtctctgggtgacatcaggcttgagcaagaccagacttctgctcagcttcaagttcaaaaggtgaagaaatacatttccaattgccatatgaattatttgctggtgtgctccaactctataaaatgtgcttgtatgatttactttttaagacccctctagtgtaacgtgatatttttaactacttagcctaattgttttcattttagtcatacaatttcttgttttattttttgtctttattttggtaaatcacagacattcaccatggagattttgagacacaaggatattattgatgaccttgttaaatctgggcataaaatcatgaccgcatgcagtgaagaggaaaagcaatcaatgaaggtataatcttgtctgtggactggtagtgggactcttgaaaaaacagcaggtgttgagctttcagtcctagaaaaacacttctccgttatccacagctgccatttaagcagcaaaaataattagtttaaataaggcatttttcaagtttatagaataacagtgaaaggaatatttcttaagagaatcactatgaggacaatctttttgaataggcacaaaggctattaaggtttgagaccttggttaactggcacgcattaagcattcagttaatgttagctgtattattaccattattatcagtataaattattgttttttatatgtatcaactattgtttatgtgcttcagagacatttgggcctcttaataaaaaccaaaatatgtggctctctctaatgctgaaatccattttgtataaagttacagtaagctatatagggaaaatatgatctgagtaattaaggaa

SEQ ID NO: 121238 - DNA, 1062 bp, Homo sapiens
ggctgctttaaaatcattgtcaggtaattctaacatgtctgccatctgggtattggcatctatttgattatcttctttaattcagtttgagattttcctggctcttatatgatcttatgagtgttagagcttaagctttctgttttagctgccttcctcttaccactctggcagaaggtgggggtgctaccaggtgaagatagaagtccaggttcccaattccacctctgttgacacctaggagatggctcgtcatttctgctgagtgggagtgggagttccagctccctatgtggtctctactggtaccacagtgcaggtggctgtgatggtgacacactgagtgatgatgaagatcctgactctccactaggccttctctgatatcaccccagaggagtggagggaggggcagttcgttattgcttagtgggggtggaagcccagcctccccacatggtctcaactgacaggatgatctggggatgaaaattctggctccctacttggcattctctaacatctcccggcaagagtgttggggaccttgtcatggcattgcaaggatagaagtgtaggccccccatttgtcctttcttggcatgagtgtgagtggagcaaccattttttctgtagtgtttggttggaatagagtggttattgtttaaaagttgtctgttttgctaaactactcctttcctggttctttggctagagagagcaggcttgttttgggactttgtacccgtttagtgttgtgtggttgctagtttttccagtatttagtcttagatacgtgaggcaaaaagaaaatcccagagaactcaccactgtgttcttccttgtggcccaaggtccatggtagttctgtcctcttctctcccctttgtggaatcttcttatgtatgttttatatataatgcctgggatttgtaggtgtacttaccacgaagaacagagaaaagctaatgtactccatcttcccatgagttggcatagtgttgcagagtttttaaagtatgaatttttaaaaatctagtttcttatctccacccatctttc

SEQ ID NO: 121239 - DNA, 2192 bp, Homo sapiens
aacccagcttttaagccatgcatgaagtcagtatttgaactcaagcagtttttaacctctcttctttgaaaacaaagtctcatacagatagatacaaaagtactgctttccacatagctaaagacatttagccttttccagttcctacatttgtattttcagagtgatttagatttgctggaaatcttgggaaagattaaaatttagaaaagggcttctcttgagtaagattatctttagaaaaatgtctccttttgttctgtggaaatttcatcagtgttccataatatctgaagaaaccctctccctgccttttttttccttcataagaaataacgtgactttgaaattttaggtgatgaagttttaataattcaagataaattggaagccattaaagcaaggtacaaagacattactaaactgagcactgatgtggccaagactctggaacaggcgctgcagcttgcaaggcggctgcactccacacacgaagagctgtgtacctggctggacaaagtggaggtggaattactttcatatgaaactcaggttctgaaaggagaagaagcaagtcaagcacaaatgagaccaaaggtaagctctgatttctgcattttggattagtcttttatcttttaggcagtcttattcacacaaaaataaaattatatttgtcttatgtcattacatatgctgaaggatgccttggtgggtggagacccaatagaaattggcagcagatcaactgtttaaagttttaggagcccagagatgaaaacagtatgttataattgttgcaagagtcttatatttgggagtatagtttattacccaagggacagaatgatgaaaacagaaaaaaaaaaggaaaatgatcattgtttcagagacacacataatttggttggaataccaatatttctataagataacatggggtgggttttctaattatatcacaaacgtaatacactgcatggtaatcattcctcttttccaagatatcagcctctgtttttatcatccttgaagtatgatcacatgtgggtgaaagggagttggtgaggtcaggctcactgagcctgtaatgattctactgtcatgatataaagccagtttgtcatcattttgagggtcacttaattctggcttggaatatcctcttcattttacttttctgttacctgattacttagaggttcccagaaagcaaagaataatacaagttaacttgcttgtttttgcttctgaaattttaaatatttatattaaatttcaaagataaaatcttgccgtgtcgacaaatgaattgttctttgaacttctcaggaaacatttttctttttgcaaaatagctttagataaaaaaggtttatttaactcgactgaaactaagggagggggggagtggggcaaagcatcacattattcgcctgcaaaggacttgagctccaagaacagttaaaggaaaagtctgttgaagctcttaagtgttactaacttatttgtatgttttcaggaactgaaaaaggaagctaagaacaacaaagccttactggactcccttaatgaagtgagcagtgctttgctggaactggtaccatggagggcaagagaaggacttgagaaaatggtagctgaggacaatgagcgctaccgattagtgagcgacaccatcactcagaaggtggaggagatcgatgcagccattctgcgatcacagcaggtagggaaaaatggtttgttgtttaggcaataaattttctccagctgttcttggagcttttacctgaacaaagatgactgttaatactgtttccattcatttgctgtgcttccaaaatgaaagagtggatttgaaaagaagttgactgggcttcttcgacgtctgagcaccagggcaaggctaatctgcacattgttcacagccatctgcctcattgtttcacagatttatccttaccaagtcagacactgcgaagatcagcccagctttccaaacaaaatgcttttgtctacacatatgcatattgctgatattaatttttatgtattgactaagtctaatctgtatgtgagtaaatactgtgaattgttatgtaagtcagtattaactgttcatttacagaaagctggggcaaagagaatgttttctttttaaaaaggaagcagttttgttggtaatgtga

SEQ ID NO: 121240 - DNA, 1589 bp, Homo sapiens
ttagcgaggttcagtttttattgtgtggttttgtgacataaatttgagttatgtactattgttttgtttaattgcaaactaaatccatttaacatgtcatgctttagttttatttatgttttcatttttatttgtccattctttttgtttttcttctttatttttttaaactttgcttaggccttagaagatgacatcatcaatcacaataaacatttacaccaggctgttagcattggccagtccttaaaggttttgagctccagggaggataaagatatggtgcagagtaaattagacttctctcaagtatggtacattgagattcaagagaaaagtcacagcaggtctgagctcctccagcaggccttatgtaatgctaagatttttggggaagatgaagttgaactgatgaactggctgaatgaagtgcatgacaaactgagcaagctctcagtccaggattacagcactgaggggctatggaagcagcagtctgaacttcgggtattttgatttattttattttatcttattttttcatttcaattgtcattatttcttagtccttatttctgtacaattttatgtttatgatgatttcgatgaattgctgtacttaaaaaaagactgtttatacagattacttttaatgaagtcattttaaagaaaagagtgactctatccaattagctggatatttcacttttcattttgttattttattgttgtatacaaagacctgtattaaccagtacttcagtatgtccacaaagcccattttcatagggccctaagtattttctgaaaaggaatatgctgtgaattatggtagatgaacatgggacatgggccacagaggtgaaaagaagaggtctaaacatgggaacaataagaacatttgaaaatgtgagatatttactcaaatatgtctctgtgaaatctaattaaagttctctgagattaactaatgttaatgctaacttaaatgtttttccccccacataaaaatggtacctgtgttttcaggttctgcaagaggacatcttactcaggaaacaaaatgtagatcaggctttactaaatggtttagaactacttaaacaaaccacaggtgagatatctttcaaatcaaatcatcatgtggtcagcattttatattgttttcaaaatattttagggatgggaaaaaaccaaaacactttataatttttggtccattccaagacttttattctggagaatgctttgaagaccaatcaagggggtggttaggatatgatctcacttttttctcatgatctcacttgagttcttgatggaagttgtgtgtattactcataacataaagcactttggcacaggagctcatcagagaagcccaggacagagtcacattacttttccacttgtggaaggcagatgaacacgtaggttgtagacaatttctttttaagatagatcgcattgcagtgacacacagtatggctacgtgcatagctatacatgggcttcatttcttcatgtctgaatcaccaagaaaactgatacatagtttagtatctagatgagatttttaggacaactca

SEQ ID NO: 121241 - DNA, 1816 bp, Homo sapiens
agccaacaaaacctattaattgattttgcttttttaattgctagaagctttattattaaaatgtatcaaagtaattagttctccttgctgccaaagcacctgttgtactttgattatatcatgactttagtatataaaaacctgtgccaacacagtttgtatgtcttacccttctctttaaacaagttcctcttaccttctgccttggtggtcctgatctcaaaatactcttttagctttttacttctgggtaactgtcaaatctttactccttaattagcagtcaggatcattaaggaagcagtgaagcatagtgtttcatacacttacgccttcctcattgctggtagcacagtgcctgtgcacagcagttgctcatgagccatttgtttgattagattagagcaaggtaaaaggctaattatagcaaacatttcatttcaggtgctttgaaatgtttaattagaatcaaattgaattttgtttctggtgctaaatcctgaaatattagtcttatttagccagctttggagatttctgacatcttctaccctctcttcctgttgccaatgatgtgtaaaagctgttttagtttgcagcctcacacagattttaggagccagttccacctagtaaaaggagccaagagcctctcgttttagccttgttaacttgtgaacttgggctgagtcttaacttccttgtctataatggattgtttaacgtgggaaagggttttgaaaacagtaatgatttataggaaccttttgtatcttgacaggacagatagttgttgaatgtttaaggcagtcttatttcattccgataatggagattttgcacttttttcatgattcattggagttatcctaagtggcaccttctaccgtattattctatattaaaaaattagtaatgagtttagtggccttaccaatattagttttgtctactgtgaaaagcccctgccacagtgtctgacccaatagtaataaatcattaaacaaatgagttacctttaaaatctcgcttttcagatcctttcatatgtgcatacatacaaaatacatttttgtcatacttcaaatgtacttagaatacattgtactttatattcatacaattattcccttgcttttttatatttaatgttttgtctcaagcttctccagagattgttggatgaccgaaaatctacggtggaggtaatcaaacgagaaggagaaaaaattgctacaacagcagagcccgcagataaagtgaagattttgaaacagctcagtctcttggatagcagatgggaggcattgcttaataaagctgaaacaaggtaacttatatacttccagttcttttgaaagagtagcagtggcctctgtctacaaaactgacattttgtattttgttaatacttcaaatcatgattttcctatgtttatcatgtatgtgaacagagatagcaaagattgtagtgcctctttcctcattcctctaatggtaatggcttgtcaccgctatatcccaactttttaagacaagcatttcccttgggagtgattacttcatttgtttattacatagttactgcctgcttaccatgcatcaggcacagagttaggtcttgtgttataggggtgagctgggcagatcatctctgtcatcagatagggtacagtctaagagggtttatagccattgagaagtaatgataaatgtgatgtctcaaagttgaaatacaggttgctgtgggagcatatcacaggaagaacctagcctaggggcagggaaatgacagttaagctaagttttagagggg

SEQ ID NO: 121242 - DNA, 1042 bp, Homo sapiens
tccagagcttggagctagcagaacttaattggatacttttgttattcttgcctagcaaaatataattctgattctctctgctataatagttctgtttattcttaatcttttaaaaatcattatctctgatatttattagaaggaaataaaatgcaatattgataaaaatgactaatgtgctgttttttacgataactctaaaatatttgaatcattcattgctaatcataaaacgtattagacaatccaaaaacctccaagattgagtgctctatgttgactgtgatggtaaccttattttcatgcctacttgcttaaagtttgtctccttttcactgctatcctgcctactatcgatactttgggtaaattttaagtgaaaagtaaaagaaaatttgtgaccacacgggaaaataagcatgtaaaatagtgatttgtgctcagattgcattattttgtgaaacaaataaataagtggaaacaattggcactttgcaggtggctcagcgagcagcccagctgcaggaggccttgctgcactgtgggaggttccaggatgccctggagtccctgctcagctggatggtggacactgaggagcttgtggccaatcagaagcccccgtcggctgagttcaaagtggtaaaggcccagatacaagaacaaaaggtaagttagtcatgcttttgtattgcgtttcatattaaatcttaataacaagagaaaaaatgcaaattgtgactcttttaattaataggataacctagttaaccggttgttgctgctgtagacattattttgttagtcattcgacaaatatttattgaacatctaccatgggccaggccttgttccagttgctgggaatatatccttgaataaaaaagatgaacatttctcattgagttcaaagccaagtgggaagggtgtgccaggattgaaagacaataagtaaagtaaataaatgaatggtgataagttagcaagtgatgaataaagcagggatcggggagaggcatcaggaagcaatagagcaaagatg

SEQ ID NO: 121243 - DNA, 1596 bp, Homo sapiens
gcccaccctgatgaaaatttcaaaatgattttacatgatgtttctccactagaggaagcaaaacatgtaaatggtcaaagggaaatccacgatgaaaattgttgcctgcagaataatttgaaagagagccctgtgaagtgtgacccattaattatgccaagaaatagagaaaatgagcatatttttaaccttggagaagaggacgaaacatacggacctggagaatcccaaatcacagcacaaagtagggaactcttgaaggattcccctcaagatttagatctctctcacacagatctaggggagagtgatgtagattgtggtagcaccagcttagtagaaaatgtgacacttttgacacaatatgattcaggagaatgcaacattgcatctaaagaggaagtggaggctcctctttctgcccaggagagcgaaatgctctataagaagttctccctgaaattcgtatcagcaagaaagaaagcagcacccagaaaaacaggggcccaggcaggaatattggacacagtctgcaatggctttcagttggttcaggtaattcatggaaatatgaaactctgcagtgtcaaaagtttgcggttctgctaaaagtttgtggttctgtttcagagtggtcactagtgtttctaataataatgaaatccacacttttgttttggaggtttgactagcaccctgcaagatgccacatattgataaatggataattataacaaattaatagggactgttttggagaagaattgatattcccagctgttcagggtcctgttattgattgtgcagatggtggccattccccttcatttagaaggcctccactgtgaatatatgttaatgttaggcttttacacaaattgtggtaaagacactgccatttaagagccattatattggatttattaagcttgaacaggcttagtcatgaaggtacaaacagtattatattgttatggcctgcaaagtactctatccacattaaggactttttttaataggttgaaaaatttctctcaggagctctgcatgtgagagtagagttattatgctgtactttgcaggcattatagctcccaactttttgtgagtggtgaatgaggtaagaaagtaaagggtgcagccttgtaataagtagagattgcttgtcaagcctgtaatttttttcttcccactcagattgaagttcagctgttttggtacttttactaaactcttctggtaaacttggcctcaaaggtagttttattttattttaaacttctcttcatgcttgtgtgctgtgggttagattagggggaaaggctctcttcataggtattttgttaacattgagagataaggaacttagacaatatcagaaccgttcctcttctcagtctgtgaaataattgttcttgttagttatgcctttttcttagacatgcagtaaatggcatgctaatttaaaagcttagcaaattaatttttttctgtaaaggatatttcagtttatttgtagaaaacaattaaatcttaggggagtatatactctttagtagttatctttttaaatccttagtatatttttgggggcac

SEQ ID NO: 121244 - DNA, 1010 bp, Homo sapiens
gaagcttagtagtacaccatgctttctgtttactttaaacggttgctggattgtactgccctgggtgtctaaaagtctggtgtttttttctttcttcctttgagtagttctgaatagcattgaagaagcttaaaacaggaagaaaacctgccttttcaatcaagtttatttatagctactcccccctccaaaaaaaaaaagtaaaagaaaaatgtaactttctcataacgttagacttaacttatttttctctgaagatttgttctgtgccttgatgtgaacaataccaggtccctgtgtttgtcttttaaatttctggagcatggtttatttaccagaatggtggagttctgcaagccatctttaagtggattacagttaaccagagctctgccgaaattaacattcaggctgttaaaatgcttgctcatttggaaattttaatctggaaatatcagactaaaaagggaaatggactgacaatggaatgttctgagtgtttgagccactgttaagtgtgtgtttgtttattttctgtgttttggagtgtgtgaacggggactttgggagctgggaaaggtggacaaaggagatttttgttctctgttattgatgcactttattgtttagaatcatcctaaaatcaaccaggtaaaaggatagttgcatttatactgatgcactgctgatgaccttaaacacctcatgtattatgaaatatattatttgagcatgtgtctttatgctaaagacactccatagctctgttcagaagtatacttttttggaagatgctttatcttatttcttatctgtgtcaagagctgcaatatttgttttaactatctgcaaaatggggaagccactcagcagaccagactgtttacgtcagaatcccccatgtgtagggaagggtgaagaagaggaggacctaaatatcgaagactgttacgtcccacagcggtcaatctatgatactgttagactaaatgaacagatagactctggtt

SEQ ID NO: 121245 - DNA, 1053 bp, Homo sapiens
tgcatgatttaatttcaatgaaaatcaaagagacttgatgctttaatgagtcctagctaaatctgtaccttccccacctctatctaggccaagcttgtcccacccatggcccacggcccacctgtggcccaggatggctttgaatgtggcccaacacaaattcataaactttcttaaataacatgacaagattttttttgccatttttttaagctcatcagctgtcattgctgttagtgtattttatgggtggcctaagacaactcttcttcttccagtgtggcccagggaagccaaaagattggacacccctgatctagaccattgtgaaaaaatgccttacctcagaacctgcttacagtttatttctggccactctgttgctgccccaattgtaattcattttgtccccacaaatgagtacatctccagtacattctctctgaggatttctttttattttcaaatggacatagaattacattgagcagaggatttttaagccaagttgaaaccagagacaaagagcagaacatatgcctaattatactgtaataaattttctctggtccaggtgaaggcattgtttaacccaggcatcattattttaatattcggtaaaccaaaatgccaagtagcatgaggctaaggaagacaggcagtttgagcacaaattcttattatggtgtttatcaaatgatccagaaacaacctctgatgtcaccatattgaaaatcaaactgtccaaaaactgctttaatagtacttttaaagtgttcatattgttatatagaggtcaatgacaaattattttccattttattaagaatggggaaattagataaaactgttgcagaagaggtttttgttagggaaaattccttaatagattggatttttgttaatgaagctaccttagcaaaggggttgcatgttcccttcctctggtatttttaatggtgaaaatatttccactatagacactgtaactagatgcatggcttttataggaagatcacattatttaataaacccagagcaaagtggcattta

SEQ ID NO: 121246 - DNA, 1056 bp, Homo sapiens
gtcttagaaactgatgttatgtaggtgccgtgatatgataagggtgatgatgataatgatgatgttgatggtggagattccagtgatcaccactactgctgctactgagatggagccaaacatttcattgttttagtgattatatctttcttggttaaagtagtaaattgacttgtttacagttcagtatttaatttagtttctgttgggccttagacttttgttaaacattagttttaacataatttttggaaagttttttaaattttttaaatggaatgatttgtattgagtgaaaagctagttataattcctaaaagtgaaacagaaaagtagtgaaggactgagtctgtcttccttattgactttgaaatataatctagtttgacattaatctatctggtagctttagtttaacctaatgtcacagataaaatcctataatagtttttcttaatacaaaataaactgccttctgagcagaactgagaataatagctattacccagttactcagcagggggtgccttctattcactggacccgtaatagaggatttaaagcaggtttgatagacttccccgattctgtttttctttctatagttcaagaaatagctgttaatagttacttgaggttttcttgtaaagacaaggacaaaattcattcgttcatgtttaagataccaattcaaacataatacttaaagcaaatgctattctaaaccaaatgtcctaactcactcagtgaaaactatcctgagattttgaaagtagattggtgttatcttttgtgttagttagcttgacgttttaaaactattttgattatatataagttctgttgtacataagtttttctacttctgaatactagtcattggactaacatgtctgaagggtgaagtgttttctatactgttggtaagttagagtaccattttccacttacacttatttatgattacggttaaattctatgcacactgttataaattggtggaatgaatagcagggcgattctgtttgtctctaggcaggaagaaagaaactcctt

SEQ ID NO: 121247 - DNA, 3701 bp, Homo sapiens
aaaggtttaatcatttgcctggggtcttccaactctgaagaggttaaaccaagatacaaactcatgtagtttttatgtgctacattatgttgcctccataatatgtaaaagtcatagacgtggccaggagcggtggctcacacctgtaatcccagcactttgggaggccgaggccggcggatcacgaggtcaggagatcgagaccatcctggctaacacggtgaaaccctgtctctactaaaaatacaaaaaattagccgggcgtggtggcgggtgcctgtagtcccagctactcaggaggctgaggcaggagaatggtgtgaacccaggaggaggagcttgcagtgagctgagatagcgcctcaacactccagtctgggtgacagagcgagactctgcctcaaaaaaaaaaaaaaaaaaaaaaaaaaaaagtcatagacgcgaaaaagtcatatttaataagagatggattatttatcaacataattaagaactttgccatcatcacttctccatactggaatagagaagacaccagcacagcaggcgatgtgtggcatggccactccctgcaccttgatgcatttttacttatttccttattctttgttttcccctctcatctgtatcctgcatcttttcttgattgtgtattttcttctgcctacttcttgcttcttttcccctttgtcaataacttaagttcacttgtagttcttatagtcaatgctaaaagcccttgcttttcaacaattctatatattcattcagagatttttattttggcttttcatagattaaattaacattttgatgtaaaataaacatatcttgtaattttatttctagagaatcatgtccagcaccttcagtcggcctgtgcaagctctcatcaatttcagcaaatgtctagagattttcaggcttggctggatacaaagaaagaagagcaaaacaaatctcatccaatatctgccaaactcgatgtcttggagtcattaattaaagatcataaagactttagtaaaactttgaccgctcagtctcatatgtatgaaaaaaccattgcagaaggtgaaaatctgttattaaaaacacaagggtctgagaaggcagccttacagttacagcttaatacaattaaaaccaattgggatacatttaataagcaggtgaaagaaagagaaaacaagttaaaagagtcattggaaaaagcccttaagtataaagagcaagtagagactctctggccatggatagacaaatgccaaaacaacctggaggaaataaaattttgcttggatcctgctgaaggagagaattctattgccaagttaaagtctctgcagaaggaaatggaccaacactttggtatggtagaattactgaacaacacagccaatagcttgctcagtgtctgtgagatagataaagaagttgttacagatgagaataagtcactgatccagaaggtggacatggtcactgaacaacttcacagtaagaaattctgtctggagaacatgactcagaagtttaaagaatttcaagaagtttccaaagaatctaaaaggcagcttcagtgtgcaaaggagcagctagatatccatgattcgctgggatcccaggcttacagtaacaaatacctgaccatgttgcaaactcagcagaaatcacttcaggccttgaagcatcaggtagatttggctaaaagacttgcacaggaccttgtggtagaggcctcagactcaaagggaacctctgatgttttattacaagtggaaaccatagctcaagagcatagtacactaagtcagcaggttgatgaaaagtgttctttcttagaaaccaagcttcagggcattgggcatttccagaataccattcgagaaatgttttctcagttcgcagagtttgatgatgaactggatagcatggctccagtggggagagatgcagaaacattgcaaaagcaaaaggaaactataaaagcctttctaaagaaactagaagccctcatggcaagcaatgacaatgccaataaaacctgcaagatgatgttagccacagaagaaacctctcctgaccttgttggaatcaaaagggacttggaggccttaagcaaacaatgcaacaagttactggaccgagcccaagccagagaagagcaggttgaagggacaattaagcgccttgaagaattttacagcaaattgaaagaattttctattctgctccagaaagccgaagaacatgaagagtcacaaggtcctgttggtatggaaacggagacaattaatcagcagcttaacatgttcaaggtagggaactcttcatttttacccagtgtttttattgtcaatgaagtttctaatttgcttagaaaggagattgcctattttgtagaactttttaataatgattgtcatacaatatttgagccagaatgagcatatatgggggtaacacccaggcaggtggggcagttacaaggccactggggatttgggcctttgtgggataaggtctgagataaaatcagaccaaagggtgcttggcaaagttccaggcaagccagaaactgacatcatagggtccatttctggaattattcacaattgccatctgtggtgaccgtggctgtgttttgaactctattgcagatgtttatcttccagcaatttcttcaatggtgaattaccgtcttttctgccctttctttttataattatcttctcatccttcttaatttcttccacagacatttttcttctaaaagctcatatttttaaaggcaatatggagttccatgttgtaatctgtttcattaaacaaaggtcttaggctcatgccccagaggattagaggtgaattttttttttattgcatgacataagctcctcagtgccaagaaatgactgccactcaacagtgatcaatgacacttaatgaatgaaacatttgataaaaatggtgggccagtttccgtgtcattggatttggccttatttatgatagtgagaacagaagtcacatctgtataggggacaaagataggtttatccctggaaacaaagggtcctaaatagcaagcaattttctatatggggctgatataaacctttagggtttcacagctcctgttatatttatgaggtgtgttttactggcaaagatatattgcaccattagtgcataaagaataaactaagaccaaataaaaacagtttataaaaccacaaattattttctttgagagatgaatatgaatcaaatggacttccaaattctgtgcagttatagttgataaactctttcatttgcttgtctttaataacattatttaggtgactgaatcttgaaaaataccttctttttctttgtattgttattagttatgattatttgcagtttattaaacgcctttgaagcccagttccttcaaggctcacaaagctgtgattctgtatttagttcttgattcttgaaggtgaaggaaacgtccttattgttgacttgacctccttcattgctctgtcaaatttttgtatttctgatttgcaaaataaagatttcacgtgagagaatcctctattagaaaaacatagttctgtggcaattgctgcatcaaagactgggagagatcttgggagcaactcttccttcgtcagtaaagtttggaattctctctagaaccctgt

SEQ ID NO: 121248 - DNA, 3169 bp, Homo sapiens
gttgagtttaattggtgagacttcctacgggaactttccagcagctggttgttaatgtgtaatttgaatgggaaagaataattggggatagatatacaaatttgggagcaatttgcctagaacggataagtgaagatttgatattaaaaggattattgttcattgttctagtaagtcatagtttaataacacactctataggacttatagaaggaatgagagatcccagaatgctgtctgctttaatgaatattcgatattctacgatatcttctaaagtcagattcaaaattttttccctatactttagttgacatacaaccatcagacctataaaatcgtaggttagtcctttaagtaactatgtaacaagagtcataaaaatgggattatagccattatatatcattttaaatcataccatacagtcctcatagacatagtcatgttaaatgcaaaaaatgtcaaacaccagtttcattttttttcttttagattctaagtggcaagaactcaatcaattaacaattgatagacaacaaaaactggaagaatcctccaataatctaacccagttccagactgtagaggcccaattgaaacagtggcttgtggaaaaagaacttatggtcagtgttcttgggcccttgtcaattgacccaaatatgctaaacacacaaaggcagcaggtgcaggtgagtattacctaataacctgtctctcgtgcatagcaatttgacttactgagaccaatgttttcattataaatatattaactttggtcagtaggtgttttatttaactgctttgaagtatatatgtaatgtttcagatgcccataagatactgtcctgatattagtgggaatccccaaagaactaaagctataaggcatcttagaggcctcctttgaatcccatgaatgggccaagtctcctgattatttcagtcatattgtgggtggtacagatctggttaaaagggccttctttgaagtattaatgcaattaagtaatatctttatgagaggctagtctatactttttactgtttagaaattactcctttgaggttttatttattttgattgtggtagtagataatgaaacttgtaaaactcatgcatttgagtcctgatggaggagagagagaatgagaagaggacaaagaataagggaagcagagagggaaccctgaaacccagggtgttagttagactagtctagttacaaagcagataaatccacaagggaaaaaaatccaaaaaaatgagttttatttttaatgtttaatgttttacagtcaggcataatagcagaagctctgtggtgatttcagttagttttttaatgtctgagtactggctttagagcagggaggctgttttataagctgaaaattcaaataagtttttgtaaaagtcagatgtttgaattcatatctgttcataatccaaagacaatgaaaacaaaagataaaagtaaatatctggggagaaataattgcctctagtcttggtagtctcccagagatagatagataaataaaatatagataaaagtataaaagatagataaaatatgatactaaaagaatgagatttttggatcattaattttatgagtcaagttgagcctatacattctgagcagcatgatttgttgactaaaacctttataataaagactgtaaacatcaataaattttatgttacaaaaacctttgcaactcaatgcatcatgagttaatatattctaacacctttatcactgtgcattttctttaatataaaattctatagggtattccaaaaatcctacgaagacaaaaacatgagtgggtaaaaacaaatttggtgtaagtgcagtgtgaacttgtttaacagcagtgtttctctttttatatgaaaatttacacatgaatttttgttcattttgtccatatttttcctttagggggatgggattagtttagacaggatatctctgtgaagcactgtggctcttcggatttaagagaattgtactgccctttaagtaaaaagtaggaaagtgataactaaaaaacaaaaactggagaaataattaccatttctgtctgtttggacaccaaatctgtgttttctacaatcaattatataataatttgcgtttgtttacccttgttaccttagattttgctgcaagaattcgccactcggaaacctcaatatgaacagctgacagcagctggtcagggcattctgagcaggcctggagaagacccttctttacgtgggattgtgaaagagcaactggcagctgtgacccaaaaatgggatagcctaacagggcaattgagtgacagatgtgactggattgaccaagccattgttaaaagcacacagtatcaaagcctgctgagaagcctttctgataaactgagtgacttggataataaactcagcagcagtctggctgtgagcacgcaccctgatgctatgaaccaacagttggaaacagcccaaaaaatgaagcaggagatacagcaggaaaagaagcagataaaagtggcccaggcactctgtgaggatttgtcagcactggttaaagaagagtacttgaaagcagaacttagtaggcaactagaaggcatcttaaaatcatttaaggatgttgaacagaaagcaggtttgtctacttttaatacatatatttcctggtcagaaataaatgtcatatattgcctatttccaagatgttgccaataatccaggaccccaaagagactctgccccactgttaacatcagtgaagaggaggatgaatacaggagctcagagagcagttttgtgttcataggcacatggaatgttagggtcattctacacacataatctgttggcaaaattggcttcctgaaggcctattaaaatctcaggtaccccaaactggtttttaaaaaatgtaaatgttttttgctgtatgaaagtcttatttagccagaaaaaaacatgaatagttagtaaaaggctttgcatcatcttctcatctgctgttactttatctattctgtcatagaaaacttttctagagaaatgtgcgaaagagaggcatttgtcactattttcctctctcactgtggctataattctgtggcatatgtgatgatatttgtcagaggtagcagt

SEQ ID NO: 121249 - DNA, 2773 bp, Homo sapiens
ctgtacattctgcacatgtatcccagaacttaaaatataataaaataaataaataaaaataaatacaaattaaaaaaaaactaaagctccacttactgctctaaaatacaatttaataaatatgattcttcctagaataaaggaatttattggataaaacacaaagcaacttcacaaaaatttttatgaattaatatttaatgattaatttatataatataaacatactgaaatggtagtgtttaagacaatactttaagaataaattttacatagaagagaggatattgtttgatatttacattttggaccttcatttgattttgaagttgagtcagtgttttatgtgtgattactgttgatggggtttgatttaatgccatctactgttaatgtatagaaatactatgaaactgtgattattttagtgttactatttttgcaggtggagcagtattaaatggtgaaggaacagccacaaatactgaggaattttgggcaaataaaggtgagtattaattttaatttgttactgattaatgtaatttgatgtttttttaataagagaaaatcttagaggcaaacagtagttatattgaaatttcaagcctgaattacaatggtatttaatctaatagtcacaatctccataaaaattatatttatataacattttttgcagttttgtgtatctgaaataagtaaaatcaagttgttcagtttgacacttggttttgttgctttctttttggttaatttgagatattttgtcacttgggataacgttatttgacctaatttattgagtttggtgcttgagatattgctaagtaacattttgtggtttgttttttgttacatttaaaatgtcttttttatttcacttgttatgcaattttcttgaattatttgtgactaaatagcattataagatgatccaaacttttatttctgaaaagcttatgactttatctactaggcttaataatgacaagctagaagtgacaaaataccatgtaaaacaaacttttatttctagacctctgctccaaatgtcctgaaaatgtgtcagtatagttgtttttcttactcctaggtttaacatccattaaaaaggacatgactgacataagtcatggttatgaagatcttggcctcttactcaaggacaaaatagcggaactgaacactaaactctccaaattgcaaaaggctcaggaagaatcaagtgcaatgatgcagtggttacagaaaatgaacaaaactgcaacaaaatggcagcagacacctgcacctacagatactgaagctgtgaagactcaagttgagcagaataaggtatattctgtgggtgcacctatggaagacatgaaagagaatggattagcagttggaacggagctctggtagtcagaagctctgctctgttttcttttctagctctgtaacctttagcacataattgacagttttgtttaatgtgcctttctataaagattgataataatagttacttttttttaaatttttggcacagccatgtcataggttagcaaactgttgggtgtaagccactttgccacctttaaatcagtttaagtctaggatgttaaccagtcaactactggaaaagatttatttaagggctaaatgtatgaaggatctgttctctgtagtataaaaatagggtagctaataccttccttttctttaatagagggtatttctttctacagctgccaaggttgggaaaatggctttatatggtagcagtgatggcaagatttctacaaattaccaacctacatttgaattctataatgtgttgcccaaaaaaagtgtttattcacatgtagattctccacttctggcagcctttattaagactgattttcttatttattataattttactgatatcatcttgctttattccagagtggcttgtttgaatatatgaaattctttctcactaatggggacaagagtcattatcttcatagtcatagtgttcctctgtggggattcctgtatcacacaattgaacactagctaagaagaggaaaggaaaataattgcaaaatccaggccctcacccaccacaacatttaacagtagattttttcctcttttcattattctagagaaaaataatgctctatcattattgtatttttgtcttttgctgtacacatgatttattattatttttcccttgttagtcgtttgaggcagaactgaagcagaatgtaaacaaagtacaggagttgaaagacaaattgacagagctgttggaggagaacccagatactcctgaggcccccagatggaaacagatgttgacagaaataggtatgttgcgttacttagatgaatgcctatgaagaaaagtgcaatcatttttcatgtttatcatgatctttatcagaaaacattcaacagtcacttatttttggatttgctttaatgtttcagaatctattttttgcataaagtgtcatttcaaattatattgtgcagaaaattggcatatcttatgttttttatggtaaacacagtaattaaatctatttttatgaagaaggtagatactagttaatgaagtgctgtgcatggagtacctgttttcattaatgtttctttttcctagcttttggtgctttattatgctttatatatttttaagctgtattatattgtaaatatttctttcattcatctggaaaagctgtgctcccttctccttcatggagttacttctgggacccctcct

SEQ ID NO: 121250 - DNA, 1026 bp, Homo sapiens
cttccaaagtgctaggattacaggtgtgagccacctcgcccgaccgtgtgtgtgtttttaaaagtaattgaaatttttaggattaaaatatgctgtaaaatgaagttctgaattcctatttatttttattgttcctagtaccttttatttgtgactggtctcttacctagtacagttttacagacttacagttgacagttattttggaacccatagcagccaggaatagcctgactcccactttggctaggattttacttgccacttctgaaacctttgaaggcagaatgggccatacatacccaaccgttaactgagataacagtcacctgggctgtgggaacaaataggtgcctttttctttcatcgactccctcacaaatcagggtctacaattattactactttaagatatgtttaagaaactgaattataatgtgcaactctgaaaatattaagatggaaaaataatgtgtttttatatctcaagaaattacaagaaaagtggagtttaaaaacaccagagattcagaaagtaaacaacagtgggatctcactatgtaacttaataagtgctgtgaccacccctgcaaaggcaatagcagcagttaaatcaggtatgagctttatttacatttatggcaaaaactaagaatcaggtttactcatgtcaattttgtgtatgttattttttaaattaatgcataaaataacctcagaaatacaaagtgaaagtgacaagaaacatggcatctgtaagcacactgtgctgggaatgtatctgtactaatcaaatttcaaatccttcttatgttttattttattagactgtatttaaaatgtagctaaattaatatgtaagaataaggaatgttatattggggaagggaacagatcatattcaaatttgtttgctttttaccttaattaaatggagatattgaaattctatttaaaatatttaattataatatttgataaagaaatgagtctgggcagctgggaaagaagtgagggaaggaaata

SEQ ID NO: 121251 - DNA, 1050 bp, Homo sapiens
atctgccaccatctcccatcacccccagatgggactgcctagtttcaggaaaacaagctcaggctcccattgattctacattatggcgagttgcataattattttaatatatattacaatgtaaatataatagaaataaagcacacaataaatgtaatgcatttaatcatcccaaaaccatcccccctccctggcctgtggaaaaaattatcttctacgaaactggtccctggtacctgaaaggctggggactactgatttagctgatttcagttgtcacctatgaaacctttcctcctgtatcaaagggttagagtacatggaagatggtttcttaacattgtgtgacatgagaataataatttatttattcttctttctgtgacttaaattcttgtatgatttttgttatgtagaaaagaagctgtaacttcttgtcaagaacagttggatgctttccaagttcttgttaaatcattgaagtcatggataaaagaaacaacaaaaaaagttcccattgtacagccttcttttggtgcagaggatttaggaaaatctttggaagacactaaggtgaatcattgttatctaatactaaatttccatttgtgtcaataatgaaagattaaaagactaatggtagttttctttgatctaatatcatctaagttttatcctcatatatgtactgtatattttgttgacctttggaaatcatggcatggggcttaactaattcttttggaaaaggacataaattttcagtggatttgcttttttaaaaaaaggtgaattaatgagttgctgactattctagtaatcaagtttcctttcctaccaaatctctacttagtttcagtaattttttataccacttctcataatattaagcaaaacatcctcttcactcagcattttactctagcttgtatatattactataaagagtatttggaaagagaagttatttgaatctcctgcataaatagtgcacaagtcttttgtcttctgactcaaggcttatgccttgaccaatatggcatttttttt

SEQ ID NO: 121252 - DNA, 1141 bp, Homo sapiens
tgagatacttgtatttacttatatagataactgaaacaattttgaaaacttgagaataagcatagggctactttatagatgtttttatattttgatcattttttgctattaaagttaactgcattatttggtttaacatttagaaggaaaattcaatacttcttacataaaagtggaaaatgttgcataagaaaaacgatggcggtggtatattactgaaaatgatctaaacttgctgtagtctctgaagcctagggcaaatatcacatttttatttgcaaaggcagaaataaccttgaacaacagctcgtggttctttgctttctgagctcaactcagaaacgatgtgcaatttcaatatggcctttttaatataatagtttactttttaaagagcagtagatgagatatgaacctgtgaaaaaacactattagaaacaagtgaatgaacctaagttgagctaaaaagctgtacagggccttgtgattgagcttttgtgtttctgatctcacgttagtttagaatatacatcggattttgctaaagtttatgtagaaaagcctcagaacatagaaaagtcatttctcttccaactactgttctttatttcttcagaattctctacctaaaatgtttgagtgctgcctttacttctcacagagctatatgttccatcctgtcatatggtatttaattcacattgcgtagaagaaatgttcttggttttcttaggtgatctctaggttgtttcttctttcaaatgggtccaactttaaaataatgtagttatcagtattagtccagctgcagtgcattcttatctgccagtattctgcacgcttgcatatatgtacgtgtcatccacatgccagatgtaactgtcctcacagttgttcatgtgctgggcatgtgcactgcctccgtggtgcagagcatacagaacgacccatacagttcaccagggagtttcctgagtctctgtaggggaggcacacatgaaaattctctagtcactaggtttcaactcattttgggagacttgaatctggactacctgcagcagtttatccatccataaacgtgactgtagtatagtgtagaaaccagtaggtggcattatgttttcctcatgtcagtgat

SEQ ID NO: 121253 - DNA, 3138 bp, Homo sapiens
ctcaaatctgttaattatatgaaaatagctggctttccttcgaaagtcacttattatggctgaacaggtcactcattttacttaccctgttgatgcagttgcccaattaagaagtcgctaacctgccaacttcaagctgccattcagagcatgtgctcttgtgagtttccaaattagagctcattttttttcttcaacttttattttagaatcagagggtacatatgcaggtttgttagaaaggtatattgtatgatgctgaggtttggcatatgatcgaacccatcacccaagtaatgagcatagtctccaacaggtagtttttcagcccttaccttcccacccctctcccccaactagtagtttccagcatctattgttgagagcttatttttgaacccactgcttgtttcctctgccgatggcattttcgtgcatattaaatgctgtctccctccccactcagtatgctgatgggcttcattgagttttagtaagaggagcatgattttctctttaaatcatccaaacttaacctctcactccagtgaaaattttcaagatgttttctcatgttgtagcattagaacaattatattattttgttgtatagattatgtttcatgggccaaatacaagtcagtaagatgttagagatgtttcaggacacagcttgtccctactgaagcgttctacaatgtataagactaaagcattcagaaataattaaaatatttttcaaattctcggacaataagtgataaataaatttaaaacatcattttccagagagaaagagatgaatacattaaaaaccattgttcaaacttttcattggtctacaatatagaatgtaggatgttaacatgtagggctttagtcaagtgaaaactggacgagaaagggtttttttttttagcatcttgaatctttagaattgaagataaagtttatcctcatatgagataggttagcctgtttatttttctcttttgtctgctgttaaacttttaaataaattcaattagtgtatattttagaagcataatcttaactttaaatggattttcattgttgcctgttttcttaattacttgcatctgccagtttctgtgcatttgagtgatttgcttaagttgtgaagtatgacaaaagcttagcatgcgtgtgtatgaaggagggagatagggtgataatttttatatgtaaaagttaattcttcagaaatctttgtaactgtgtattgtcttgagaatggctgtgtgtgactcacctttttttcctccgaaagtaattttcaataagtatggctaatgtgaaatgtcagattgagaaccagtatttatttcaaagatttgctgttcggactactcttttgtctctctgtgacaattcaaatgtttatgcatccaaaaaaatctcttttcaaatgcagatgggatatatattaacttttaaaaaaagatttcaattttcagtatccattgggctcttttctttctttatattttaacattttaggtggtgttctgattatgcattaggaatttatcattgaactttttattttttaaattttttgtgtggaaattgtatgattcaccttcatgtgtttttgaaaagggatagggcaaagagaactttgtggttaatattcctgatctgtttggagtagatgacattgttgggagatatgaggatctgtccaagtctgttaatgaacgaaatgaaaaactccagataaccttgacccgttcactgagtgtgcaggatggcttggatgaaatgctggactggatgggaaatgtggaaagttctctgaaagaacaaggtcaagtgcctttaaactctactgctcttcaggatattatcagtaaaaacattgtaagtgactttaaaaaaaagtcccattttcagttttttaaaaaaacagttttataagctcaaagtgtagttagatttaagataaacttaaggacacaaaaaagagacatttactgaatatgagtgtggaaagtaatgcttgcacaaaatcaagtgtgtaaaatggtttatctgtgaagaagtgtaggaaggactttgtgtactttttcttgaatattattcattatagagggcttatgcatacattgagtcttatcttgtttatcattgtttcagccagctgcacatgaggttaatcagatcagtcttgtctagtcttttaagaattaggaccatggctaatccccaggctccattagattctaggggttgctgagtagcagcagcctcctgcctctttcgaccaactagccagctgttcttcactctctcagagagatttaagatggcattcctcaagggacagaccaaacttgtcattcagtttcaactgttaaccttcctaggcacaggttgtgcaagcttatgttgttaggaatagtcatttaaaaaaattctgtcacattatttataagcatcataataaaagatatgcaatatttggtttattttagatgttggaacaggatattgcaggtcgtcagagcagtataaatgccatgaatgaaaaagtgaagaaatttatggaaacaacagatccatccactgcatcctcactgcaagccaaaatgaaagacttgtctgctcggttttcagaagcaagtcataaacacaaagaaactcttgccaaaatggaggagctaaaaaccaaagtagaactgtttgagaacctctcagaaaagctccagacatttttagaaacaaaaactcaggctcttactgaagtagatgtgccaggaaaagatgttactgaattgtctcagtatatgcaggtatgcctcccttactactcaggaggctaatcagatagattaatagttagggcaaactcatatacttagtgccagaattataattggcaatcattttaattgcttatagattagtaaagatctatgttttactcctttaagaatttcaaaccttatcttttccttgaagcctttgctgattgattggaaataaatatcatttatcacatgtatcataggtagtataagtatcatcttacgtaccagaagccacaaagagacaaaatatagaatgcattttaaattaaataaggtttactgtgttccctttcaaatagcctat

SEQ ID NO: 121254 - DNA, 1839 bp, Homo sapiens
ctctaactaattccaccttctcagtccaaacagaccgaacggtggaattgtcttcagcccttggccttcagtagtcctcactgctttgttactgctgaagttgtccccagctggtatctctcctttatttcgtttccattggacttttcccatgcagtgctacaaatttagccttcctataggacagccctgagcatctcaaccccttacccaaaagccctgcataactccccattgctatgggataaaatgtaaactccttagcctgatgtttgaagcctttccaggcctatttctatttactcacccataagcattgtcaaactggatgggactctccccttctcctgtgattcttctgtcctcatctttgtgtcttctgtttgttctgcagggagtggttctcccaaatccacactttcttaaggagccatctcagtgtcattaccattgaggtggccctcatttccctcccatttttttcctgttaacttccagcagcattttttcagactcacctgtggcacttaccacttcctgcctcgaaccataaaatccctgaaagtaagctttgtgtctgtttttatttttgtatattcacaaaatgtagcaaggctttttgaatttgttagatgttcagtaacttttattgaattaacagaaataaacatgactcagtattgagtcaggatctactgatttgggcgagcttatttatctcctttcctggagtcagaagtggtctcaaattttggttgttgtttgttttagtagtagttggggtattgtacaaagcctagaagtaggggttaagggtataaagttagagggttgtatgatcaggaaccagggaaattattatgaacatatgctcaaaggtttatttcaaaacttaatttgtgttatccagactggctgatgcttttgctaatgctgctttataactggccttattcgaagaactctggagtaagttgatgatgaaagttggtatgatgaaaagtttattctgtccaattttactttatcttattagaaatcattttttccacattagaaatctattatttagtcctgctgagtataattgaaaagcgtttaatcctacaggctttgcaaggacagatatcaagtcagcaggttgctgtagagaaactgaagaaaacggctgaagtgcttttagatgccaggggatctttacttccagccaagaatgatatccagaaaacacttggtaagatattcatgtccttgcttcctgtctcacaggtaaattctaaagaaaggtgtcctaatagatatggagaaaaatgttcactagttatagattgtgttctatgtgctctttctctgtgaaatggtgttcctgcatctgggaaaaggcatgccttctttggcaggtatattagaatcttagaggcgggggctatgtgtcttgaaaagagtatatttaaatttaaatttgatatttagaaaacataacaggaactcgctatgtaatgtccaccacaggaagtagaacttcacaaaattctcttggttgatgggattgggcagagttaggccttcaacttaaggccaaagtagaatctctgagggtctttatcaatagtgggaacgtgggtttaagaggttgagaaatgtgcttaattgaattgaattgaatttatttttagagacaggggttactttattgcccaggctgagtgcagtggcacaatcatgtctcactgcagccttgacttcctgggctcaagcagtcttcctcatctcagcctcctgagaagtaaggactacaggaatgctctgtcatgtgcagctaattttttaaattttttt

SEQ ID NO: 121255 - DNA, 1097 bp, Homo sapiens
ggcaggttaatatcaggcagagagaaggcccgtgaaggggtgggaagcataggatgagagcagggaaggaggtcaagctgggaggtcaagagggtggagggcactgcttctttcccaggctgaagagtttatccagcccttcactggacactagggagatgatgtgggccaggtcagcatccccagatccatgcagcctcctcagggttgcttccttttttccaatgtgcattttcagtcctgtttttttttctttctcctttccacaggtacaagaacaaatctatcttaattaagtttttatatccccatgtattgtatattcaaggacaagatatgtggtgggggtagaggagatactgtgacattaaggtcattattttagtaggaaatacgtatcatttaaaataattattgattgcatatattacatttaattaggaagttattttaagtatagaaaatgcataaaatagaaataacacattttaagttagatctatattagtaaacagattatactgcatataaaagtaatttttatataactagagcagaaaaagaataaaacccaaagaatgtgatggttttttaattaaacagatatgtggataaattttaaaacggaaaaacctatttagtaattgctgcagaagactcttacagtcctaagacagttaaagaaatatgaaaaagaaagagatctcaaaggagaatgaattctaattaagtcatagcgtaatttgaaaaattaaatgtacaattaaagttgttgctgataatgcacatatttttctctcagaagatttcagaatgtatcaaggataaatttttatgaggattaggtggcctccatttctttgatgtttattaacattttacaattacttttaacaataatataaacccatgagactactacaaaaaatcgatctttctacatgtagcatactatcttctacttatattctgatgaatcataaatgtaatttttggggcatccaatttgttcatttcatttgaaatgcttttggccaatagcatgttgttattagcattattattcaaagaactgtgaactgtgttgtcaacaatct

SEQ ID NO: 121256 - DNA, 1037 bp, Homo sapiens
aacatatagaaatttattaagcacctttaaaacccttccatcaaatcgatatctatacacatggtgtatcaaaatctccttcctctgatgattgatgtctttatcttttattctatgttaagactcagctcttgtaaatatgtttttgaattggtataaatccagaactatctctttattttatggttactttttggcttcttatagggtacctcttcatataaaggaggaaatcttagcccaacagagtttttattaactttggtggaagtctggttttttttccaagttacatattttataggtcctaagattatttgatgcatatgaaaatagtgggttttaatctcctaccccttttctcttttgattgttagtgcaatgttcttggaaataatcttaaagatctggtggataaatatcaacactatgaagatgcttcatgtggacttcttgctggactccaggcctgtgaggccacagcgagcaaacacttatctgaacctattgcggtggaccccaaaaatcttcaaaggcaattagaagagaccaaggtaaaaagcgagagaaagatccacatttccagtagtcttactgaaaggcttccaatttctcacacttttgtgatagtttcagctaagagaggggaacaaatgatgtgaaaagtatacttctgcctccagaggtagttttgactctatttctccacagtacattctttttttttccgaattttttttttttttttttttttgagatggagtctcactccatcgtgtaggctggagtgcagtagtgtgatctcagctcacggcaactgccgcctcctgggttcaagtgattctcctgcctcagcctcccaagtagctgggactacaggcgcccgccaccagctgggactacaggcgctaatttttgtatttttagtagagacggggtttcgccatgttggctgggctggtcttgaactcctgacctcaggtaatccacctgcctcagcctcccaaagtgctgggattacaggtgtgaaccaccgc

SEQ ID NO: 121257 - DNA, 1021 bp, Homo sapiens
ttttaaagcttaaagttacagattctttttccctatttaaaagtttttccaggatcatttcgtaataaaaaatattatacttgtttgtccaaaaattaggtaaagacattcttttttgggtagttgtgagaaagcagggaataaaatgagatcagattatagacacttattttaaaattggaatagaaattggtttttctaaacttctgaaaaatggtgtctgtcctatctgattaagtacatagagaagattggaaattttctttaaaataagattagcatgctcaaaatgccttgttattctgaaatccaccaataaaagggagtacggtatagcttgaaaaggggaatgagaagcaagttgtagccctgtagatcattgaaacctgtcagtcttgaggcggcaaggagctccctgcaggtgttaccccgttactgcttgaagattatgatcaatttgttttcacataggcccaacacgagaagatcatctctcagcaccaagcagtgatcatagccactcagtctgcacaagtgttgcttgagaaacagggtcagtatctctctcctgaagaaaaagagaaactgcaaaagaacatgaaggaactgaaagtgcattatgaaactgcactggctgagtcagagaagaaaatgaagttaactcactctctgcaggaagaattagaaaagtttgatgctgactataccgagtttgagcactggctacagcagtcagaacaagaacttgaaaacctggaggcaggtgcagatgacatcaatggtttaatgaccaaattgaagaggcagaagagtttctcagaagacgttatttctcacaaaggtgacttgagatacatcacaatttctggaaacagagtgttggaagctgccaaatcttgcagcaagagagacggtggcaaggttgatacttctgcaacccacagagaagtgcagcgcaagttggatcatgctactgatcggttcaggtctctctactctaaggtaatgttattttgatttt

SEQ ID NO: 121258 - DNA, 1805 bp, Homo sapiens
acattacatattacagattctggtgtttagaaaaggaaagtatcttagttcactgggaaaattagttcatttttatcctgagtgataaacacattaaaaaataaaagtttagaaacaataaatattagcatatatttacaagcctttgtacatgtgctcatataatattaaaaaatctggtgtgtgcaaatttatatagatcatatactgaatacttatgtgttttcagtgtttcactgactgcattctttcgttaaacatgaaaattcatgcttttctttaatattgtttgagtttcaaattatattaagtattgtgattgaaactcaaattaacatactcaatatgtttattcaagctacatatactagactctctctgtactcactctgtcttttagaattacaactctggaagaactaaataggtaataatttaataaaatatattttttccttttgtgttataaggaattacagaaagatatgcaaggaagtgcacaggcattggctgaagtagtgaaaaacacagagaacttcttaaaagagaatggtgaaaagctgtcacaggaagataaggctttgattgaacagaaacttaatgaagctaagataaagtgtgaacagcttaatttaaaagcagaacagtctaaaaaggagctggataaagttgtgacaacagcaatcaaggaagaaactgaaaaggtccttattcaaatatgtggtgcactattgctatgtcaaaaagcttaacagctacttgatttattattaatatccagtggtagtaaataaggattatcactaaggattattatgggattctgggtttccaggtacataattgaccaagtactacaaaaggtttgaagagttggctttgcttaactttttcttaatatttaagtgaggttgtgaaactttcttcttgtgaaatgtgtgatcactcatcaattatagttaaaattttggaatgtatttttaagaacaggggaaacttcaaagtaactgcctgttgctctgaggtttaatttcagttgttaagttttcaattgtgtcagtttttagtaccctcattctaatttaaaatgttctaagtatttacttttggaatgtcttaaaactatgccttggcccacgttctgaattcctcctgtgaactttcccttcccaggtagcagcagtgaagcagctggaagagagcaaaaccaaaatagaaaaccttttggactggttgtcaaatgttgacaaagactcagaaagggcagggacaaaacacaaacaggtaatcgaacagaacgggacccattttcaagaaggtgatggcaagtcagcaattggagaagaggatgaagttaatggtaacctgttggagactgatgttgatgggcaagttggaaccactcaggagaatctgaatcagcaatatcagaaagttaaggtgtgttgttataaacatatgatatcgttcaattctatttccaggttggtaaagagagaaataacctagcacatgagttcttttcaaaccttactgacaaaagaggtttttttctgtgttcatcatgtcagatataaattattatgagagttctaagcaagtcaaaaaataatgagaaataaattgtagagttggcattctccatgtaagtgaagtagaattattataaagatttaataataatagttaacatttataggacagttaaagtgggcactcttctaagttctttccattttaactcattttgtcttcccagttactccttggggtttttattttcatcttacagatgaggaaactgt

SEQ ID NO: 121259 - DNA, 13335 bp, Homo sapiens
ttaacaaagattccttgggagagttagtttcttttgagaaattttgattataaacccttggtatttttatattctgtagtttcatgtgtatatatatatatttttgagacagggtcttgctctgtcacccaggttggagtgcagtggcatgatcacagctcactggagccgcaacctcccaagctcaagtgatcctcctgcctcagcctcctgagtagctggactgcagacacatgccaccacacctggctaattaaaaaaaatttttttgtagacattctttagttttaaattctctaaaacattactaagtcagatttagacctagtaccctagatacattcttaatgcagataatggcgttaattataactgtctaagaacagctgatggtcgttctgttaaaggaaattttagttaatataagtatgtccttcaaaaatcaatgcagcctcatgattatagtcatgaaaaataaactttaaattgactctaaatagacttcatgggggaaaatatatcttttcattggcccattatttcctcttatttctgctaatttaaaagaatggcaattaatttctgaaataagggatttggaaatgatacactgaggaattaggagaaagtgtgtgacctcttgcttttccccaaacagatcaattttatttctctgacagatgacagtcacagatgacttttacaaagtgggtcttagcattagaaattatttgttctttttttcaatagttaaaaagtttcttttagataggatcttactctgtcgcccatgtgggagtgcagtggcacgacctcagctcactgtaacctccctttcccacactcaagcaattctgtctcagcctcccgagtagcttggactacaggcatgagccaccaatacttggatactttttgtatttttcatagagacaatatttcaccatgttgctcaggctggtctcaaacgcctgagctcaaaacaatctgcctgctttggcctcccaaagtgctgggattacaggcatgagccactgctctcagctagaaattctttattctgggtctgcatacctacagattattactttcaccataattttttcaaaaggaacattgtgtctaggagcttggcagaaggaagatgccctttggaagtagtgtcccacagtcatgtgtctttttgaggactgcagtgcgcaaggatgacactgggccagtgctgagtgcccacctgcgggtggaggccacctttatccacggctggactaggacagatgcaggaaacgtataatgtattattttctcttgaaaatgacggcattaaggatagagagaggagctttccttacggattctaaataaaatactcttatctagctctatagactgctaataactgataggttattcacttgggtcacccagaaaatagacttgggtcttgactaaagcttgattaatttcttttttttaaaaaaaatactgtttactccttttggaggaagagtttgaatgtgccttctttaccttacagatttccagtgaggaaatatcaaccaagaaggaacaattatcggaagcacttcaaactatacagctttttttggcaaaacatggagacaagtatgttggttgtagttagctcttttattttaagtggggaagtattcttaaaagctttcagcaaaacagaggtggtaaattttaattgcaatgttaaatatgggactcaaactaatcacaattaatatagtaatgtaaagagtatcaacttagtaatttaattgtcaattttagtctttattacaactttgaaatattcttattatccccatgtattaccgataaggaaacaggctcagagaggtaagaattaatagcaagtgagaggtagagtgcagactccgagtcaagtcttaaatctaagtagtactctgtgagacttattctttggaaaatatgtataaatatggtcttcattttcttagctgagacctatggcagcctcgtttctcatattttgtccctactttttgcagcaaagcactttatatatttcagtcagtgtttcactcagggaaggaatccacctttttcttaaattctttttggatgtcctcctaggattatttcataatgactttatagtataccttagcaaattaggttaatccccttataaatttcctctttgtttgtgctttagtctaaacaagtttcatcttgagaaatggtaccttattgtcccttttccatgttgggattaacaatgagaccttaccctctgtcagatagcagcaattgttattttggaattttgtatgttaaataagggtcaatacattagtttacaccctttccttcagtccttttctcaggcaagggaaagatccttagatattttaaggccattcttaattttcatatacagtcatactgagacctgagcaatatgtatgtgaggctatattttattttaccatcatatgacaaaattattgaacctaatacatctttatctcttgaggacgacttgcattagtctttttatcatttctggttatttagaatgacagatgaagaaagaaatgaattggaaaaacaagtgaaaactcttcaggaaagttataatttattattcagtgaatctctgaaacagctacaagaatcacaaacctcaggagatgtaaaggtagaggagaaggtaatattatttatttaaacatgaggctgtttcaagaagcttagtttgattgcatggctctggaaatctatgtcaataataaagaaatgaccttgaattttgtacgtagttaaaatagggattgagtttatttaaatgtttggagattccagtgttgtttattaaatgcaatcttacacatgctgaccatcagtttctgtgacatcttaatctctgccttgcatggtaaaagaaaagtatcattcattcttctaactcttctctttaaaagccattcttctagtatagtaggtattttattatattataggctataaaagagcctgtgggtcatctctaaaggtggcattgatgtgttagagattgtttgactttcagagatatccatgagacttatttgagtaatacaaggccatacattatagtgaggatgccctagcatcttcttaaagtataaatcatttaaaatttggctggtacttaaacttttaaaacttgacagtgtatatcaacaggcctaacataatattcaatattcaaaaagttatctttatatttaattccttactcctgggaatactttccacataatttgtcacattttgggggtatgtaacaatttttccagtttcttagtttttgactatctttgaagaagtctgtatgctgtaaacatcaatagcatggggtttgatactctctttcctgccactagactctaatctcacctaaatgcagaaagcatggtttgccttctagatatgtgttctgttttctcactatcatcatctactctgttgtgtcctcactaaccttgtcaatatacacgatatcaagttttcaattcacagatgcatgttgttttcaaagcttttatcacatcctgtgctgttgaatagatcactgacatagatcacttgtgcatttgaactgcctaacattcacagcattgctgcgccttggtaagtagaggatttttatgttgaaatgtattatttattttttaaaaaacctaagttgcatgaaactccgcccacccttgtgtaacagagtgacctgagatttttgcattttcctttcagctggataaagtgattgcaggcaccattgatcagacaactggagaagtcctttcagtctttcaagcagttttaagaggcctcattgactatgacacaggaattaggttgcttgagacacagctaatgatttctggtctaatttcaccagaattaagaaagtgctttgaccttaaagatgccaaaagtcatggccttattgatgaacaaattctgtgccaactcaaagaactaagtaaagctaaggagattatttctgctgcgtcacctaccacaattccagtactggatgctctagctcaaagcatgataacagaatccatggccatcaaagttcttgagatactgctttctacaggctctctggttattccagccacaggagaacagttgaccctacagaaggctttccaacagaacttggtttcctcagcattattttctaaagttctggaaaggcaaaatatgtgcaaagatcttattgacccctgcacctctgagaaggtttctttaatagatatggtacaaagaagtactttacaggaaaacacagggatgtggcttctacctgtgagaccacaagaaggaggtagaataacattaaaatgtggaagaaacataagcattttaagagcagctcatgaaggtctcatagaccgtgaaaccatgtttaggttgttaagtgcacagcttctttctggaggtctgatcaattccaactctggccaaagaatgactgttgaagaagctgtcagagaaggggtgattgacagggacactgctagcagtatcctcacatatcaggttcaaactggtggaatcatccagtcaaaccctgccaagcgtttaactgtagacgaagcagtacagtgtgatttaataacttccagcagtgctcttctggtcctggaagctcagcgaggctatgttggactcatttggccccattctggtgaaatatttcccacatcatcttccttgcagcaagaattgattacaaatgaattggcctacaaaatcctgaatggcagacaaaaaatagctgctctttatattccagaaagttctcaagtcattggtttggatgctgctaaacagctaggaattatagacaacaacacagcatcaattttaaaaaatataacactgcctgataaaatgccagatttaggagatttagaagcttgtaaaaatgccagaagatggctctctttttgtaaatttcaaccctccacagttcatgattacagacaagaagaggatgtttttgatggagaagaacctgtcactactcagacctcagaagaaactaaaaaattatttctatcttatttaatgataaatagctatatggatgcaaacacagggcaaaggcttttgctgtacgatggagacttggatgaggctgttggcatgctactggaaggctgtcatgcagaatttgatggaaacacagccataaaagaatgtctcgatgtcttaagctcatctggtgtatttcttaataatgcttcaggtagagaaaaggatgaatgtacagctacaccaagtagtttcaataaatgtcactgtggagaacctgaacatgaagagactcctgaaaatagaaagtgtgctatagatgaagaatttaatgaaatgagaaatactgttatcaatagtgaattttctcagtcaggaaaactggcaagtacaatatcaattgatcctaaagttaacagttcacccagtgtgtgtgttcccagtctcatatcatatttaacacagactgaacttgcagacattagcatgcttagaagtgactctgaaaacatacttacaaactatgaaaatcaaagccgagtggaaacaaatgaacgtgcaaatgaatgtagtcattctaaaaacattcaaaactttccaagtgatttaatagaaaatcctattatgaaatcaaaaatgagtaaattctgtggtgtgaatgaaacagagaatgaagataatacaaacagggattcacctatctttgactattcccccaggctaagtgccttgttaagtcatgataaattgatgcacagtcagggaagttttaatgatacacacaccccagagagcaatggaaataagtgtgaagccccagccttatcattcagtgacaaaaccatgttgtcaggtcaaagaataggagaaaaatttcaagaccagtttctgggaattgcagctattaacatcagtttaccaggagagcagtatggacagaaatctttaaatatgatttctagtaatcctcaagtacaatatcacaatgataaatacatttcaaatacttctggtgaggatgaaaaaacacatccaggttttcagcagatgcctgaagacaaggaagatgagtctgaaatagaagagtattcctgtgctgtgactccagggggtgatactgataatgccattgtgtctcttacttgtgctacaccattgcttgatgaaaccatcagtgctagtgactatgaaacgtcactgctgaatgatcagcagaataacacaggaacagacactgatagtgatgatgatttttatgatactcccttgtttgaagatgatgaccatgattctttgcttcttgatggtgatgatcgtgattgcctgcaccctgaggactacgacacactgcaagaggaaaatgatgagacggcttctcctgctgatgttttttatgatgtctcaaaagagaatgaaaattccatggttccccagggggcaccagttggtagcttaagtgtgaagaacaaagcacattgtcttcaggatttccttatggatgttgagaaagatgaattagattctggtgaaaaaatacatttaaatcctgttggctcagataaggtgaatggacagtcactggaaactggatcagaaagggaatgcacaaatatccttgaaggtgatgaatctgactcattgactgattatgatattgtaggaggaaaagagagcttcactgcatcattaaaatttgatgacagtggcagttggagaggaagaaaggaagagtatgtaactggacaggaatttcactccgatactgatcatttagattctatgcaaagtgaagaaagttatggggattatatatatgacagtaatgatcaggatgacgatgatgatgatggcattgatgaagaaggaggaggtataagagatgagaatggaaagcccaggtgccaaaatgtggctgaagatatggatatccagttgtgtgcctctattttaaatgaaaacagtgatgaaaatgaaaatattaatacaatgattcttctggataaaatgcacagttgtagctctttagaaaaacagcaaagggtaaatgttgtacagctagcatcacctagtgaaaataacttagttactgaaaaaagcaaccttccagaatatacaactgagattgctggaaaaagcaaagaaaatctgttgaaccatgagatggtacttaaggatgtattgccgcctatcattaaagacactgaatctgaaaaaacttttggccctgcaagtatttcacatgataataataatatcagttcaacttctgaattaggtactgatctagcaaacacaaaggttaagttgattcaagggtcagaattgccagaattgactgattctgtgaaaggtaaagatgaatattttaagaatatgacaccaaaagttgactcatctcttgatcacatcatttgtactgagcctgatttaataggaaaacctgctgaggaaagccatttgtcattgatagcctctgtaactgacaaagatcctcaaggaaatggaagcgatctcattaaagggagagatggcaaaagtgatattctaatagaagatgaaacatcaattcagaaaatgtacttgggtgaaggagaagtgcttgtagaaggtctagtagaagaagaaaataggcatctcaaacttttgcctggtaaaaatacaagggatagtttcaagttaattaatagtcagtttccatttccacaaatcacaaacaatgaagaacttaatcagaaaggaagccttaaaaaagcaactgtaactcttaaagatgaaccaaataatctacaaataatagttagtaaaagtcctgttcagtttgagaatcttgaagaaatttttgacacatcagtttccaaagagattagtgatgacattacttcagacattacatcgtgggaagggaatacacattttgaggagtcattcactgatggacctgagaaagagcttgatctgtttacttacttaaaacattgtgctaaaaatataaaagcaaaagatgtagccaaaccaaatgaagatgtcccaagccatgttttaataactgcccctcccatgaaagaacatttacaattaggagttaataatacaaaagagaagtccactagtacccaaaaagactcacctcttaatgacatgatccaaagcaatgatctttgtagtaaagaaagcatctcaggaggaggaacagaaatttctcagttcacaccagaaagtattgaagccacactttcaatattatctcgtaaacatgtagaagatgttgggaaaaatgattttctgcagtcggagcggtgtgcaaatggattaggaaatgataactccagtaacactttaaatactgactattcattcttagaaattaataataagaaagaaagaattgagcaacagctaccaaaagaacaagccttgtctccaagatcccaagaaaaggaggttcagattcctgaattgtctcaggtatttgtggaggatgtaaaggatatcttaaaaagcaggttgaaagaaggtcatatgaaccctcaagaggttgaagaaccttcagcctgtgcagacactaaaattttaattcaaaatttaattaaaaggattaccacatcacagttggtaaatgaggcatctactgtgcccagcgactctcaaatgagtgactcttctggagtttcccccatgactaactcatcagaactaaagccagaaagtagagatgatcctttctgtattggaaatcttaagtctgagcttctccttaatatattgaagcaagatcaacatagccaaaaaattacaggagtatttgaattgatgagagaattaactcatatggagtatgacctagagaaaagaggcattacgtctaaagtacttccactgcagcttgaaaatattttctacaaactgcttgctgatggatattcagagaaaatagaacatgttggagactttaatcaaaaagcatgttctacatctgagatgatggaagaaaagccacatattcttggtgatattaaaagcaaagaaggaaactactattctcctaatttagaaactgtaaaagaaattggactagaaagctctactgtgtgggcatcaacattgccaagagatgagaagctcaaggatctgtgtaatgatttcccaagccatttggaatgtacttcagggtctaaagagatggcttctggagatagctcaaccgaacaagtaagttgacctatacattttatacagaaaaagctgcatgaaccatgtgagaataatcccatacatttgctttaaacatctgcataaaggttattgaattaaaatgtccaactttgtttttagttttccagtgaattacagcagtgtttacagcacactgaaaaaatgcatgagtatttgacattgcttcaagatatgaaaccccccttagacaaccaggaatctctggataacaacttggaagctttgaagaatcaacttagacagttggaggtaagaattgtctactgcctctttatggatggtagtcagctgatgtatgactgggaaaaagaagcagaacacttctatgtttcatgtttatatttgggtttttcactaaatagtaaataggtccgggatatatttctttgcagacatttgaattgggattagctccaattgctgttattttaagaaaagatatgaagttggcagaagagtttttaaagtctcttcccagtgactttcccagaggccatgttgaagaattgagtattagccaccagagtttgaagaccgccttctcttccctcagcaacgtgtcttcagaaagaacgaaacagatcatgcttgcgatcgactctgaaatggtaggcataaaatgtcaaaattttgatttatgaagaaaattttattatttgaggatttagtcataagctggagtattttagttttagagtgctaactcttaaaccacagtcattatttgtaagaatttgacattttggggaaagataactgaatgcacaatttttttttctagtctaaactagcagtttcccatgaagaatttctgcataaacttaagtcattctcagattgggtatcagagaagagcaaatctgtgaaggatattgagattgtgaatgttcaagattctgagtatgtaaagaaacgtttggagtttctcaaggcaagtatcaaaacaaagatgacaaaatatatttcaaaaactatgactttaatatataacaagtgtttagaaaatatgactttgctaaggctacaaaggattatttcctttctttgtctctagagatgtctttattcatagttgacacaactataaaataatcacaactttaagggtatcattctgatgctatcccaaaagccttatcatactcttacaccactgacatgttgagatttttatttatatatttatttatgtgttagtcacataaatatataatagtatgaattagccatataaaaatcatcatgtaaatacataataatatttgtagtacagtcatgcatcacttaatgatggagttacattctgagaaatgcattgttaggtgattttgtgttttgcaaacaacaaggagtgtacttacacagacctagatggcatcctttactgcacacctaggctatatgatatacctgttgctcctaggctacaaacctctacagcatgttactgtactgactactgtaggcaattgtgacacagtggtttttgtgtatctaaacatagaaaacgacaggaaaaataaggcattgtaatcttatgggaccaacattttatatgtgacctgtcgtatgtggctcatgactgtgtttatatgttgtcacttttggcatactttttttttttttttctaagttcttaatttcaacagcattcctcatgaacaatgattaggcttctggcctgagagtcagaaaactgaaattctggcatatttcattcatatttcaaatccctcaaagtattatttatatcttaccacaattacatggatgttgtaaatgttagcaagtcatattttaaggtagatgtttctcttcagtgtgctaaatatacctaagttaggtctttgccttttgtcagagttatattttaagtgcaatgtgacaggtaaagataaaacatttttagagggattatttgtctttttatataatactaactaccatggtatttaaataattaatttatcatttattactagatgataaatagatttttgatgaatagcaaaaaaattcataaaacttccattccctgatgtgagaaatgtatttacaaaacataaatattattgttaatataaattttatcatggcttaactttctactgatagcttgtactacttttttaacagaatgtattaaaagaccttggacataccaaaatgcagctggagactactgcctttgatgtgcagttcttcatttctgaatatgcacaggatctgtctcccaaccaaagcaaacaactgctgaggctcttaaatacaactcagaagtgttttcttgatgtacaggagtcagtaactacccaggtggaacgtttagagactcagttacatctagaacaagatcttgatgatcagaaggtttgcctttcttcgtggagttggcattcattgtttttagtgtgaaaccataatgtagatacccaaggagtatagtgtgacaggaaagattttctggaaaggcattaatggataagatacagtgtacatacaaatcctacagtgtataacaatattgttttcactaatgatgctataatttagttgatttgaatttttgtgactcccaaaaatacttaacttcaagtgagagtcttgattgcctcccaccccaagactaggaaatttgaatgcacttagaaatttaacacattgaggaacatatgactaaagaaggttaagagtttcgttttcctctgggaaccaatacagcacagcaattcagatcatgggctctggagctagattgcctgatttcacatcccagctgcactactcattcattctgtgaactagggcaagttacttaacctcagtttaatcattggtagattggaaataacaatagcgcttacctgctagtgttgtgagcattgataaaaagaatgtatgtaaaacatttagtaccttgcctagcatgtgttaggctcttagtaaacgtgatctatggctataagatgaataattagtgtatacatagtaggaaaatgaaaggtgcaagtaattagtgttgacttcttaatcttttagaagatttaatgaattatatgagtgctatatctaatagcaataacgagcaaagaggtgagaatgcacttagacatagtgattaagtaaaaatattgcatgcaatgttccttttattatttcttgaagcaccagacattgtctctagcatgataacctatatacacatatcaaatatgttaacctacaaatcacaactaacttctcttttgatgtccttttgcagaattaattctatgtgtcgcaggtttcaacagcttaagaaaatgggatgtttcttcctgttggtcagaagttccatctcttacaaatatgcatggccagtattctcttgagcagtttcatctaaacatgatcactttctttgtatatgggatatgctcatattttctgtctcaccttgctcagtttgtaccctactgctatcatgtttacagcatacttataaaagcttattagacaaaacttggaaaatgtgttctaataagaagctatcacaatagcgattttgtgaccaccatacatttaagatgttttgggttttcttcactttagattgtagcagagcgtcagcaggagtataaagagaaactccaagggatatgtgatcttcttacccaaactgaaaaccgcctaattggtcaccaagaagccttcatgattggagatggcacagttgagttaaagaaatatcagtccaagcaagaggtagaatttggttttctatcagcagatctatgttgatgttatgttcgattactatcatttggaagtcagtgaagattattgaaaataccagtaattttagctttttagaagcaaggcatacccaagacgccctgggcttgagctttaaactttatactaaaagttagatttccaacttcaagcaagctaggtaatttttttgactttttttggtaagagatattgagtggaggaaatattaaaggggatttgataatgaaaataccttgt

SEQ ID NO: 121260 - DNA, 1041 bp, Homo sapiens
gctttgcatagaggcctggttgatgaggggtttgcccagcagctgcgacagtgtgaattagtaatcacagggattggccatcccatcactaacaaaatgatgtcagtggtggaagctgtgaatgcaaatattataaataaggaaatgggaatccgatgtttggaatttcagtacttgacaggagggttgatagagccacaggttcactctcggttatcaatagaagaggctctccaagtaggtattatagatgtcctcattgccacaaaactcaaagatcaaaagtcatatgtcagaaatataatatgccctcagacaaaaagaaagttgacatataaagaagccttagaaaaagctgattttgatttccacacaggacttaaactgttagaagtatctgagcccctgatgacaggaatttctagcctctactattcttcctaatgggacatgtttaaataactgtgcaaggggtgatgcaggctggttcatgccactttttcagagtatgatgatatcggctacatatgcagtctgtgaattatgtaacatactctatttcttgagggctgcaaattgctaagtgctcaaaatagagtaagttttaaattgaaaattacataagatttaatgcccttcaaatggtttcatttagccttgagaatggttttttgaaacttggccacactaaaatgtttttttttttacgtagaatgtgggataaacttgatgaactccaagttcacagtgtcatttcttcagaactccccttcattgaatagtgatcatttattaaatgataaattgcactcgctgaaagagcacgtcatgaagcaccatggaatcaaagagaaagatataaattcgttcccacagccttcaagctgcagtgttttagattgcttcaaaaaatgaaaaagttttgcctttttctgtatatagtgaccttctttgcatattaaaatgtttaccacaatgtcccatttctagttaagtcttcgcacttgaaagctaacattatgaatattatgtgttggagga

SEQ ID NO: 121261 - DNA, 2367 bp, Homo sapiens
caaaaagtagaggagcttactaggcagaataatgaaaccaaattaatgatgcagagaattcaggcagaatcagagaatatagttttagagaaacaaactatccagcaaagatgtgaagcactgaaaattcaggcagatggttttaaagatcagctacgcagcacaaatgaacacttgcataaacagacaaaaacagagcaggattttcaaagaaaaattaaatgcctagaagaagacctggcgaaaagtcaaaatttggtaagtgaatttaagcaaaagtgtgaccaacagaacattatcatccagaataccaagaaagaagttagaaatctgaatgcggaactgaatgcttccaaagaagagaagcgacgcggggagcagaaagttcagctacaacaagctcaggtgcaagagttaaataacaggttgaaaaaagtacaagacgaattacacttaaagaccatagaggagcagatgacccacagaaagatggttctgtttcaggaagaatctggtaaattcaaacaatcagcagaggagtttcggaagaagatggaaaaattaatggagtccaaagtcatcactgaaaatgatatttcaggcattaggcttgactttgtgtctcttcaacaagaaaactctagagcccaagaaaatgctaagctttgtgaaacaaacattaaagaacttgaaagacagcttcaacagtatcgtgaacaaatgcagcaagggcagcacatggaagcaaatcattaccaaaaatgtcagaaacttgaggatgagctgatagcccagaagcgtgaggttgaaaacctgaagcaaaaaatggaccaacagatcaaagagcatgaacatcaattagttttgctccagtgtgaaattcaaaaaaagagcacagccaaagactgtaccttcaaaccagattttgagatgacagtgaaggagtgccagcactctggagagctgtcctctagaaacactggacaccttcacccaacacccagatcccctctgttgagatggactcaagaaccacagccattggaagagaagtggcagcatcgggttgttgaacagatacccaaagaagtccaattccagccaccaggggctccactcgagaaagagaaaagccagcagtgttactctgagtacttttctcagacaagcaccgagttacagataacttttgatgagacaaaccccattacaagactgtctgaaattgagaagataagagaccaagccctgaacaattctagaccacctgttaggtatcaagataacgcatgtgaaatggaactggtgaaggttttgacacccttagaggtatactctgtgttctgagaccttatcagctacctaatgtcaagtttcctcatttgtttcctttctctcctagactaaatttttaaaacaattttgaatgtgattggctcattgtagttctgacaggaaaataatgctatactctttctggtaacttacttgaatctttatcataaattaactttaatttttgaatgtttgagattaaacatacagatgtaatagatatactgttatatctgtggagatacattctgaaaaatgtgagtatcaaaaaagctagaagaaccaagcagttagctttaacttctaacatattctgtggctagactttgtcttagtcttttttaaagatataattttaatacctttaattgtcatctaagataaaattcagactctgaaaataatataatacttattcctgaaccctccttggtttgaaatttttcttcttttcactaatcttgtctttgtaattcaaagaattatgtttggattgagaatggataaagtgacataatgttcttgaggtgacttttaacattttataaattcctgttacagatagctaagaacaagcagtatgatatgcatacagaagtcacaacattaaaacaagaaaagaacccagttcccagtgctgaagaatggatgcttgaagggtgcagagcatctggtggactcaagaaaggggatttccttaagaagggcttagaaccagagaccttccagaactttgatggtgatcatgcatgttcagtcagggatgatgaatttaaattccaagggcttaggcacactgtgactgccaggcagttggtggaagctaagcttctggacatgagaacaattgagcagctgcgactcggtcttaagactgttgaagaagttcagaaaactcttaacaagtttctgacgaaagccacctcaattgcagggctttacctagaatctacaaaagaaaagatttcatttgcctcagcggccgagagaatcataatagacaaaatggtggctttggcatttttagaagct

SEQ ID NO: 121262 - DNA, 1302 bp, Homo sapiens
ctttgtttttttaaccataagacatgggaatataagtatcatttttaatttctattaggttagaaaactaaattctttagcatcatttggttcctatgtgttgggtgttcttcctacctcttaggattatgttgcatgcaagagaagaaagggcaccgtcgtgagagttttatttcccactttgtcactcacccaatgtgagtttgcaaaaatatctgtcctcctcgtttctccctttcctcatctgttgtaaattcccttcttgctataaaattctaagctagctaatttttaaaataaaattattcctgaggggcaaaaagatattcttcagaaaacctgtcgtgaagggttttttgtcctcttctgctgactttctgaggcttcctctctgaagaaggtgatgctgctggtggtggtgatagcgcttgttctgcatttgagttcacttggttttgtaagtacttttatgaacattgattcatacgttgtaagatattttgaacagaacaggcttgacactttcaaaatgtcttttgtagattaaaaggtgtaaggagacttctgaacatggggcatattcagatctgcttcagcgtcagaaggcaacagtgcttgagaatagcaaacttacaggaaagataagtgagttggaaagaatggtagctgaactaaagaaacaaaagtcccgagtagaggaagaacttccgaaggtcagggaggctgcagaaaatgaattgagaaagcagcagagaaatgtagaagatatctctctgcagaagataagggctgaaagtgaagccaagcagtaccgcagggaacttgaaaccattgtgagagagaaggaagccgctgaaagagaactggagcgggtgaggcagctcaccatagaggccgaggctaaaagagctgccgtggaagagaacctcctgaattttcgcaatcagttggaggaaaacacctttaccagacgaacactggaagatcatcttaaaagaaaagatttaagtctcaatgatttggagcaacaaaaaaataaattaatggaagaattaagaagaaagagagacaatgaggaagaactcttgaagctgataaagcagatggaaaaagaccttgcatttcagaaacaggtagcagagaaacagttgaaagaaaagcagaaaattgaattggaagcaagaagaaaaataactgaaattcagtatacatgtagagaaaatgcattgccagtgtgtccgatcacacaggctacatcatgcagggcagtaacgggtctccagcaagaacatgacaagcaga

SEQ ID NO: 121263 - DNA, 3442 bp, Homo sapiens
tttttttttaaataagtaggagtacactctaaaacaacaactaaaagtatagtgtggtaaatatatagaccagtaacatagtcatttattaccaagtattacatactgaacataattgtgtgtgctatacttttgtgtgacgggcagcacagtaagtttgtttacaccagcatcaccacaaacgtgagtaatgcattgtgccacgacatcactaggcgataggtatttttcagctccattataattttatggggctaccatcatgtatacggtctgtctttgactgaaatgtttcatgtgaaacacgactatattttctttatttaaacttaatttaatgaatctaggttctaatgatctgtgtcaaatcactaaagttattttagtgaatctaggttctaattatctgtgttaaattattgtagaatgaaactctagtactttgcttcaattcattttatcttattgactcctttatacaggactatgaattacaaacaatgacctaccgggccatggtagattcacaacaaaaatctccagtgaaacgccgaagaatgcagagttcagcagatctcattattcaagaggtaataaaagtatgagagaaagaggggaaggggcataaaagaaagaacacttactttttaaattttattttttgttgtggtaaaatatacatagtataaaacttactattttaacaattttaaatgtacagtttaatgacattgcagtatatcacaatattgtgcaactggtaccactgtttatttccagaaccttttcgtcatcccaaagagaaagtctacacccagaacaatacattctattaagggtttttaaaaaccctttaaaaatgtttattcaagattaattattaactatggagataaataaatgtacttatgtacttcatggtgaaatttagaagagaattatcatttgccatgatttgcataatagtaataataagctcattcttatcatttattatggggggagttgtgtgctttgctgtctgaaggcctagttaatgtaattattattcaaaattcattcaacttagtaagagtaactggaggtaatgcttttattatttttttccttacttgcagttcatggacctaaggactcgatatactgccctggtcactctcatgacacaatatattaaatttgctggtgattcattgaagaggctggaagaggaggaggtaatcattaacagtgagcaccctgtaaatataaaggagctagagatgagcagtaactacagtgtagtttgggaaagcaaaacatgtttcatgataaatttatgtggccggtagcagatgtacaaataaatattgaattataaaattacaatgaaaatgactgaaggcctaagatttttgtttgtctttaagattcattcaaatagaaagtcatttcacttcatgactttacattttcacttcaggactctaatatggtggggttaatgtcttaaataaattacgaaattttggcagtttggcagaatatttttcggctttctcacagctgagaggtatacttctttgaagtatagttactgctggtatgatgtctacaggaataccacacgaacacatttgtcttatgcattttaaattaatttgtatctcaagaagttaaaattattatacataatgtaaagatgctaacttagaagtagtagacgtttttacaaaatgatactttttaagaattttggagttttttgttgttttttttttgcaaaaagatatagcacatggcatttaaaaaggctatttaaatgccactctgatttggagaacttctgcagctttgattctgcatttaaaaatcatatttctgcatttataaatcatatatttaaaaatcatataggaagagtaaggacttatttataaagatcagtggtcaccaaaggctcttgtatgtaatctaaaagggagtatgctatgctttgttatcttgatgtactttctattccccagaacagacaaaaatagtagaatgaatgttgaaataaataaattgtgggccattagctattttaaattggactgttgttgaaattctaaaggtgattatgcttaatgtaactccatatgagagctgaaacagcagtaaacatctattggatgttactttctcagtttcctaaaaatgtgaccacttttataaactgttttagtctgttcagagttaacagttttctgcagctaaatcactaacatagctaattgcaagactttataaccctcttcctttgtgcttaggagaaccaggatatttgtgaccatcttaaatgcatgcatctctcatctatgaaagaacatccataattttcttatatttttagtttttgagagatcttattccattttaaatggtatacagatcttttaaattgaatatgcagtagttaaatataaaataaaataacttaagttcttttctcatagtatgtatctgattatacatatatgggccacttactcgatttatctgatgaggcagaatgctaacaattgatagaaacaaaaaatattttagaaggccttaattgaatgcaagttattattgtccttaaaaatgtcaaagatttgtagttaattgaaaccagcaaatacagttatggaagaacaagcgaaggctataatttaaaataggttaaaaaaaactaccacttaacattacgttaatggaatgtcgtgtaaaagatacatagcttaatttttagactcaaaagattggtgtttctgcaactgaggtttgaagacccacatgaaaaaccttggtctaaagcagaattttccataataaacataaaatcaaagatggatgcaagttaatttcagaagtaatactgatttagttaaaagaaatgttactaaaatatctgtaatagatattagatattagagagagatgctttagtctgtgctgagaacaaaatatgctaagtattaatcaccgtgattaaagggcaagattgaggaagatttagagaaaagttaaggaagttatttttatgcaaataagtttgagatccacaagaaagcaagtcagcaattggactaaattatttctagtaatttttctcacatttgctaaaaaagtcaagagacaacatgatttttttttttttttttttttttttttgagacggatctctgttgcccaggctggagtgcagtggcgtgatctcggctcactgcaacctctgcctcctgggttcaagtaattcactgcctcagccttccgagtagctgggattacaggcgcctgccgcctgccaccacgccgggctaatttttctatttttagtagagacggggtttcaccatgttggccaagctggtcttgaactcctgacctcatgatccacccgccttgggttcccaaagtgctgggattacaggcatga

SEQ ID NO: 121264 - DNA, 1915 bp, Homo sapiens
atgatacataggtttaatgtggtggttttttaaatcatagagacaggtatgtaatcacagctcctggaaaatactctctgagaccatgttgaaccattcattggactaccttatcgttatttcaaaactgaactgccatttgatgcaagccttactattcaagacactgtaattgataataattaaggttaagcttccacttttcttgctttttaagtttagcttcttgggcttgtccctagaataatcactgtcactaaattgcacaactcagggagcagaatgtttatattcaacccaataaggaatgcccttgggggtgtgcctcagggtgctgcagccttgagttctttatacatacccgtcttgtgcttagttcattgcagtccaattattttgtctctcccatctctacatcttccaccctcctgatggatatcgctggacaccgtgactattcggttactattctcttaggttacgggacttagagggcattggcaaatcactgaagtactacagagacacttaccatcctttagatgattggatccagcaggttgaaactactcagagaaagattcaggaaaatcagcctgaaaatagtaaaaccctagccacacagttgaatcaacagaaggtatgtaaaaataattccctctactgaggttatgtctgcatttggtcagtcatgctcctcatcttcctttcctatgttaaatgaaaaagtcaccaactctttagaggaaggtggagagtatataaaaaatattaaaatcttgcaacccaaacctacatacatgacttatttttatttcttggaagtaatttttgaaagcatgggtaatcagaaagtggagagtgttgggatacttttcaaattcctaatgataatttatttaatcataggtatagaaatctctttgacactttgctggcctcaatagttttctaggttcctaaataagtaaaaatggttagcaatggaaaattaaataccacatttgacagaaagttgaatgctttgagatttttgttctatcttaggggccaatcatctctagctctattttcttcagaaataggtggtggccaagggcatcaagtctgcttttggataattcctaaggagtttagtaatttctgctttgaaaaccacatggggtgggtcacttctgtggcttaatctgaaagtttgtaattttcccataaggcaagttgtgtattaagtgcaaagggctaaggagctgtactgtgaagtgatgtagatatgtcttagttactgagcatcttatgtagtagaatagctgaattccttgtcatttttgttctaaactgtgtatatttatagatgctggtgtccgaaatagaaatgaaacagagcaaaatggacgagtgtcaaaaatatgcagaacagtactcagctacagtgaaggtaggaagattcattaactttagtaaaatttaatattcaggtttgtgattctacatgtactgttaaagccatgcaagtcatttcactcagtgtttaaaagaatcttcatttgaacttttttgacacttatctaataattctttgtgaaattagtcacatgacagccccccagttcattcgtcttcttctctctcacatatgtacacccctgccactcccagccaccagaatacatagctctgtagttggtttcttatcacttttctttcttttttctttaacattgttagggtatttcatgggagagcttctaactttctcacttagggggacacttttcatgcttttcaagttgtcattgacaacttttcagttttagccctccagatccatagttccattgcttagctggaggaaaggggggctgcatagggctacactattgttacatatattttcatgagcttctaaacagacttg

SEQ ID NO: 121265 - DNA, 1076 bp, Homo sapiens
agtggtgaaactattgcaaagcaatttttaaaagttatctcagtgatttttaatgcatgtatttctttttaacagtgggattagtaggcacttaaaagcagacaatgaaaaagacatattttattaatggaggtagcaaacttgcttatggaatatattttattttgttgatatgcaaattttattaggctgaacgttataaaattgtcattaaaaaatcagagtacaaatattgaaaatttcataaggtttgaactaatataatattgtgcatatgaaagatattctttcctttatcttattttctacctgtcatttgtaaataaattgtaaaattaggtaaataatatatttacccagtgagtggttaacatttttataacttttaccaattaatgtattttagcaatggagatctgaagtagatgaaaagagacaggtattccatgccttagaggatgagttgcagaaagctaaagccatcagtgatgaaatgtttaaaacgtataaagaacgggaccttgattttgactggcacaaagaaaaagcagatcaattagttgaaaggtggcaaaatgttcatgtgcagattgacaacaggttagtatccttttttgttcagttttagcacagatttaatgtctatctatggtaaatgagtaaaatctacacatatgaggctatttttttacttccatagttaatttgttaattacaatacctctacttagccatatttctttcttacttggaggactttagtaagacatttaacttaaaataagcattttttcaactctgttactattcatgtattctagcatttatatagttaatctgcttgccttttctgaaggaaaaaacaatgtagttctctaattattaccaacttataatattcaaataaccatgacttagtaagagcatgaagcatgcatgtgatagggctgtgtgtagcttctatactggacttaagaaatgtaaataaatggaaatgccctgatgttcattttaattgaagatacaagaaagtcaaaattctcagttactgaattaaaaaaggttttagggttcat

SEQ ID NO: 121266 - DNA, 1992 bp, Homo sapiens
ttgggaaaaaaactaactctcttaatgaccttatgtatcaactcttgtgacttcttaatgttcagttttgcacactcacactagccagtctagtgtgaggtgaggtctgattgtgtaattattgctgattataaactaggattcagtctacctctgactcaggtaaacatgagaatatgtacacgctcaccttcattgtgatgaaggatataaggacttgtaataaaagtcattatacacctgctgtgtgcaaaagtactaagttagatgttgaggctaaggagatgaacagtaagggaattattgattgtaaaacttgaatgctatgatgtagtttctttgataacaaacaaagaatatgtagatttctaagtcattggttcttaatgtgaaatgtgtgtttttcaactagtttaagaaaaacacctcatcacaggtgatggcctgatacctttgtttgttctctgttttatagaaactaaagaaagagctggaacgacttaaagatgatttgggaacaatcacaaataagtgtgaggagtttttcagtcaagcagcagcctcttcatcagtccctaccctacgatcagagcttaatgtggtccttcagaacatgaaccaagtctattctatgtcttccacttacatagataagtatgtaactgctatctcaatatataaattgcttcatacaactctcatttttatttactattaatttaaaattttatttttattaatataaatattaacttttattttgtcttaagaaatacattattggctgggcgtggtggctcatgccggtaatcccagcactttgggaggccaaggcaggtgaatcacctgaggtcaggagttcggtaccagcttggccaacatggtggaaccccatctctataaaaaataccaaagttagccaggcatggtggtaagcgtctgtagtcccagctactcgggaagctgaggcaggagaatcacttgaacccgggaggtggaggttgcagtgagccgatatcgcgccactgcactccagcctgggtgacagaggaagactccatttcaaaaaaaaaaaaaaagaaatacattatttttatggattgatgacacttctctatgttgatagtggatgtgcttcagagatgagtgtgtaatgtatggtcctcccacattttgcatgtaatttgggtagctcagcagttgtagccaatgaattttcatctcatacttaaacaaagttagaaagaaaccatcttatgttgcagtctcttgctgaataccacttgtggggcaggggatgggttggagcacatactctctattaagaagaaagccagaaaaatgtcagtttcatagtaaatgtatcagtgttccaaggtgaagaacatgttatgtcatgtgtcataatggtgcttcaggactacattatgcaaaaataaacatttaaccataggtggctattgtttaatttcctttttaaggttgaaaactgttaacttggtgttaaaaaacactcaagctgcagaagccctcgtaaaactctatgaaactaaactgtgtgaagaagaagcagttatagctgacaagaataatattgagaatctaataagtactttaaaggtatgagactcacttttggatatttttaaatatcgtattctacaagtatttctctagcacttagatcttcaaacatcaagtgttaaatatcttggatttttgaatggatttattccatttgtgtctctgtgatctcacagtttactctaagtatgttcagtcattttagtttgaggagagttctcatttgaagtttgaacccttttgacagtagcttttgatagtcaattcatgttggcagcaggaggagtcgaagctaaaaattaaattatttgtaatagattaacttgctgaaaaagaagttaatttaagatatcaaggaggtaaatagagaagttaatctgagaaaggaaaaagacttgtagttcaact

SEQ ID NO: 121267 - DNA, 1023 bp, Homo sapiens
tagggatgttatgtatgatcttttatataaaatacggttttgtgtctacatgaaatgtcacatatgaatgttaaaaacgtagaagagtagggaatctttagggaaaggagagtaatggagggcctgggatgtggttttgtacactaatacactaaaaagagtatttcttagggtggagagatgaaaactgttaggaaatactattatgggccaagaattttgatgggaatggaacatgtgaatgtcactctgatcacttttatgtaaaaattataatttaattaataaaaaatttcttaagaagtaaaatgaaaccttagtcatctttatgatcccatcggcctgtcctgtgtcttgtttgggtacatggataatatttagttaattatcaatactgtttcatattttatatgaaaaaaatatgatacatcttttatagccaatttactgaaagtagcttaatttgaggtagaatatgatcatgatatgttgccagatattcaatgctgcatcatacattccattcggaagtcctgcctaagtatagctcagcaggaatgaacttttccaaaaggagggaaaatgacaggcttacttaaaatagtcattaaagcatctcgagtgccctcttctggaaatcaatgaattgcaccttaaatagaaaagagtatttcatgtttccttgaggaaggaggtatcctttgtacaatattgtttaccctcatgaaagatacactctctattaaattagaagttcaagaaacacatttttaaaataaaaattcctagtattatcatcattataattccagaattacaccaatttgggagtacacacattttcttttccaccctccccaaacctcatcccagcaaaaacaaagagaaaccgacataaccatatatttctgtgttagaaggtatattttatgatctagcaccgtaaaaattcagagaaaggagagatgaatgtgccacgaaagaaaacatatcggaggattccacaaagcagatgtaagagtt

SEQ ID NO: 121268 - DNA, 2239 bp, Homo sapiens
tcctttgactcagtaatttcacctttaggaatctatagtaattctaaatatgaaaaatatatacataaatgtaaaaatgatcatattatgctatagtaattgtattcattataaatcatagttataaagacaaataagattgaaagtcctcatagtacaatgctcattgaaaaaaatcatgatgcaaaattttagcaatgtgatttcaattgcctcctcattttgcttgtttgtatttttgagccgtttaggcatactgaaaaattgagtgaaaaatacagagttcccatatgctcccttatacctccctcttcccctgttatttacatcttgcattagtgtggcacatttgctaaaactgataagccaacattgatacatcattattaactaaaacctataattaacattagagttcactctttgttacaagtgcctttatatttcaccttatccctttggattttcttttcagggttgcaaaactgcgtgacgaaattatggccttaaggaacgaatgttcttctgtgtacagcaaaggacgcatactgacaacagaacagacaaagctcatgatatcaggaatcactcaaagtttaaactcaggatttgcacagaccttacaccctagtctgacctcagggctgacccagagtttaacaccttccctaacctcttctagtatgacttctggcctgtcatcagggatgacttcccgcctgactccatctgtcactccagcttatacacctggtttcccatcaggattagttccaaatttcagttcaggagtagagccaaattcattgcaaactttgaagttgatgcagatccgaaaaccccttctaaagtcttctttgctggatcaaaatttaacagaagaagaaatcaatatgaaatttgttcaggatcttttgaattgggttgatgagatgcaggtaaaaaaatgtttactttacctgagtgtttcagtctttattgttatcaatttcttttttaaacttagtattttactgtctgaaggtacaactggaccgcactgagtggggctcagatttgccaagtgttgaaagccatttagaaaatcataaaaatgttcatagagctattgaagaatttgaatctagtctcaaagaagctaaaatcagtgaggtatgtgaatttaaaatttgtatatatttcattttagtttactcttgttttgctttttacatgaagaccctgtaaatcaataatagatacattaagtgtgagtcagaattccttcagattcctgactggagtgtctttttaatctcatgttatagattcaaatgacagcacctcttaaactgacttatgcagaaaagttgcacagattagagagtcagtatgcaaaactcttggtaagtttttttttttaaaccttctgtttcccttatctatatttggcaaaaacatgattcttatgatgattttccttactaaagaatacatccaggaatcaagaacggcaccttgatacactccataattttgtaagtcgtgcgactaatgaacttatttggttgaatgaaaaagaagaggaggaagttgcttatgactggagtgagagaaacaccaacatagctaggaaaaaagattatcatgctgtaagtacaccctttgtacttgcatactagggttgcattttaggtttatatatttttctaacacacttcttaattatttcttgaaggaattaatgagagaacttgatcaaaaggaagaaaatattaaatcagttcaggagatagcagagcagctacttctagaaaatcatccagcccggttaactattgaggtaaagctggaaagtgtaatggtgttggttgaatattgatatgattatttcccttcagattcttttattgctgagaagttgaaaattacaagccatctaacttttattaaaacctggctcagaaatgtttctgacaaattgtactgattgccttcagttctctggctctaagtatgtcacccatcacttagaataaaagtacccttgtcagcctctgtggctgagaagatgtattgctgtaaatatgaagtaccttctctgtgtaagcattgccatattatttatttctgattgtgtaacattgcacaagtgacatagtattgccaagcctcattttcctaccaagaatgggagagattacctctaatccatagagttgtgatgagaataagaaggaaataatttactcttactgct

SEQ ID NO: 121269 - DNA, 1580 bp, Homo sapiens
gcatatcctttccagtgacgcccaatctgcctgctttgttcatacttgtagggttttaatacaagctacaaaaggcaaacctcagctagcaaacgaatggctttaggctagattcttttgaatagttatcagcatattatttgctgtgtgttgcatatgcatgttgaagcatatttaaggagccactaaaagctgtaatattcagctgccacttttcaccgttagaagtagagctttttccagacctcctaccttttagtctactttgaaaggtgaaagaaagaacatcgtttcaggaataaaaatgcacagtagtagttatagttaccgtagcagtgattctgtgtttagtaacactaccagcactcgaaccagtcttgattcaaatgaaaatcttctcttggttcattgtggtccaacactgatcaactcttgcattagcttcggcagtgaatcctttgatggacacaggtattgaatcattggtgtgggattgtgttttactttttgatgggcagcacttttcaggaatggtgagctctttgacttcaaagggagaagctttattttattttgtctcatcttttaggttagaaatgttgcaacagattgccaacagagttcagagggacagtgtcatctgtgaagacaaactgattcttgctggaaatgctcttcagtctgtaagttaattttaggagccattggggttgtggtagaggagtcactgtgcgtttggatgaactaaaacttttacataatgtttggttgattcttcgtaatactctccactgaaacttaaagtttgttaaagattatgattggtgtttgctctcttgagagacaagaagagggaaaacatatttttgaaccaacaaggaaaactaaagaaagcccaagtaggcttctgttccaatatttgatgttttatatttcaggttgttttgaaacttgtttcacagaattaatactgagttcttttaaaatacaggattctaaaagattagaatcaggagtgcagtttcagaatgaagcagaaattgctgggtatatacttgaatgtgagaaccttttacgccagcatgtaattgatgtacagattcttattgatggaaaatactaccaggcagatcaattggtacagaggtaagagtgctacttattctttctctgtcctttttttgtgtaactgtttcatgggcatttgaaataggaatgtagagtatgaaaattttatgaaatatatttctttgctgttttttagttgaaaatgtgtgtcacatttttatatattttggtgtttaagtaggtacttgtcttttaaagattagcaatagaaaaaatattttatggtgcgtataatactgctgcagtaactaactcgttaaaatgaataccctagatatagatgtaagttacatgcatacatttacatacatttaaagtattcatgggatgtttgaaagagaaaaaaatctaagaaaagtgtctgttttttgttctttgagatgcagttttgctctctcacccaggctggagtgcagtggtgtgatctcggctcactgcagcctctgcctcct

SEQ ID NO: 121270 - DNA, 1289 bp, Homo sapiens
tttagccctttctgctaagaagttttttttttttgaaggatagaaccatgcaatagaagagagtttttttattgctttctttatgggaattgcttcaaattatttttccaaagactgaaagctaaagtgcagcatttgggaagtgcatcttttaaagggtatgttttcttgtttggaggatgagagatttttagtagagcactagtaaacactgaatggtttattattatccagatccccctgtggcactaaatcatggctcacatcaataattacaccctcatcaaattttagataacccacgtcaccagctggctggaaattggtattgtctttgagtgtcggtttaacaaaggaattccactgactgcatatgatacagtacataacacttgaagtggtggcttagtgagatcatgaaaacagatcttttaagtttggtccttaatttcttgtcctttttattttaggcactttataatcagtatttacagtttaaagaaacagaaattccaccaaaggagacagaaaaatcaaaaattaaacgtctatataaattattagaggtaagctcaaatttgctttgtattgtcaagcatagtctttgttttgttttgttttcatttttgcttcacattaaagttttttgttttctcaagatttggatagaatttggacgcatcaagctccttcaaggttatcatccaaatgacatagaaaaagagtgggggaaactcattattgccatgctagagagagagaaggcccttcgtccagaagtagaaaggtaggccagaggtgttttctgccatgaatatcaagtggggagggggcctttgtgttcttgtgaaagaacttaagttaaacctctgtttacttggccttggataagtctcttaatccttttgatcctccattttcttacctagaaactcttctaagagattttaaggaggcaatcagtgaagtaatgtatataaatgaccggctaggctggattggtatgtgaagtctcatctaataaggctttacagttttaaaaccagtcaaaattacttgtaatttctcatattgaccttaagtcaccagggcctggatctaaaagcttataggacaacagctgattttatttcttattacatttttttgctatagttctctttccaaggggcattggaaaccaaaatctagcttgccttcatttaaagggtgttggatggcgtctagaacacactcagtaaatgttagttcaggttccctttctgccacgcttctacaagtggatttac

SEQ ID NO: 121271 - DNA, 1048 bp, Homo sapiens
caggaagcatcttttgtgcaggaagaggtacacagtatttcaccatgaatttgaaaatacatgtctgacttccagtataagtgaattcatggtttagtaaaacatttgctaatactgaaaaacttagggcaagcttttgaggcaaagacattgcagatataaaagccattataggccgggtgcggtgggtcacacccgtaatcccagcactttgggaggccaagatgggtggatcacctgaggtcaggagtttgagaccagcctggctaacatggtgaaaccccatctctattaaaaatacaaaaatcagcctggcgtggtggcacacacttgtaatcccagttactcaggaggctgaggcaggagaatcgcttgaacctgggaggtggaggttgcagtaagccgagatcgcatcactgcactccatcctgggcgagagagcaagactccgtctcaaaaaaaaaaaaaaacattacaaaaagccattacaaatatgtaaacttattaaagagtaagttgtctcatttgtatatttggttttataatagcaaagtggtctactttatttctagaagctgataatgcgaatattgccgacaaagccttaattctttggtttgtaagctttattttcatgatcaaactgggatagaaaaaactgtaataacctagggtgagctccattagagttattcattgtgctcctgcatccgtacagaatatctgtagaacagctttcattctcattgccacggggagtttgtccttggcacgaaattacttggcatctgatgatatgatactttttaagtgttctcaagctgtttgtgtgatgtttccctacatggacatgtaattttccagggcaggaaaacttttccctacaacgaccatgtggtgccatgaacagtgtttagcacacaggagtattcggtgcttaatgaccaacagacgtcctgaaacattgcattctgatttcaaaaccattttcagatttcatgttcaaatacacttatttccaaatggatttccattgtccagacccttg

SEQ ID NO: 121272 - DNA, 3440 bp, Homo sapiens
tgactaggattatagaagacaaagatgatgtgaaagggtatggtgcaatggggaggccatggacacagcactgaattaagctacaagctttttgtcttagaggaaaaacattgacaggatgctggttggattggaaagatgctgttggagtagcgtagcttaaatcagttgaataggacaaatactcatatatattctgactatgatatatttgtagactttgttgaaatttatatatgttcaaattgttatattttcattgttatatttgctttcgatacagaagtttctgagataagtgagcaatgttaaatgtttgatgaaagtctctgcattttaacgcaggcttggtgttaatattagcagatgttgttatgtaaatggaaacctatataattatataatgttgaattggcacatgagaaaacctaattaacacagtgaattttttcctaggccggacctgatagatatgaatactgttgctgttcaaagcaaccttgcaaatttagagcatgctttttacgtagcagaaaaaattggtgttataagacttctggaccctgaaggtgagttattttcttgattatatgtggactggcatgaaagtctgatcaaaagtaatttatcaacattgtgaaataattaatttatgttgctgtttttagatgtcgatgtctcctcacctgatgaaaaatcagtaataacttacgtgtcatctctctatgatgcatttcctaaagtccctgaaggtggggaaggcattggtgcaaatgtgagtattgatttttccacaccggaagctgttgattcagtaatgaccaattgactgcatttattgataatgatttttgcagtttttgaatgttgaatatattttaaagaatttgagttaatatgctgtttgatgaattgatattctatgtatttcatgacattattctaccattaaatttaaagtataactcattaaaacttttgtgtcataaataaaagaggctatttatagttaccgatcatcttataaataaaaggtttaactttctgaaatttagagttttccatttttagctggctgccgttttacattgctgtatttgctattcttttgtatgtatagaatatctcagttttgaaaacaatttcaaatttgttacttcatacgattctatgaaataagttggcttgataacatttttgtgatttaaaggaggactccagaggaaaattattggatttggccaaattagcagagccacttagtaagcagggaaaggtctctgacacatagctttgggctgtttattagtctactatttcttaaaggtttgtgtaactcacttcagtgatgctttttttttttttttttttttttgggtggttatgctaacaagtgcttatgcatttctgaagagaacaggaagcccagtatgtgtcacatatttggggatgatccccttcacttggatttctgccttcctctttgcagacaccttttttcccctacattactttgaagatttaggagctcatctttgattagctcccctggattaggagctcccttttctgattgcttctgtcagttctctgtgctgtttctagacctgtttccatattcttcctcaggttcttcttttcaaaggcttcatgctctttgatccctgagtagcctgttcccatgctcacccctgatgattcaatgttgagcgttgcttcagaatgtttctttggccatctcttgctgctgcttctcccaaccttcatgctgatcctgctgcctattactgcagaactaggccgatagctttcctacagctttctgtctccattttgttcttcttcccactgcctcggcacactgttgccaaattaatctgtctaaaacctgatgtctttggcttgaaaattttcagtgtctacatattccttgcaaagttaaatgcaatctagatattctgacatttaaaactgcaaatatttattctgtttacctacatgttttagctatgatttcccaatatgaactgtttactggtagccaggacatttccatgtcaatgtcctgactcacttgggactccccttttatccactctttcagcacccccactcacctccccccatcaataattacttactggtcattgcagaacatctcagatactgcctttcccaagaagcctttagaaactattttaaggcacagatatgcttgcctgattcttatctcaactagcatgtactacccgttttagttatttcaacatttcaacacttaattaaatactgctcttcattttgcctgtttatattatgtatctctcttgcctctgcatttagacagtaactccttgacaataggtattatatcttaaagtatttttttattataacactcaacacaacctttgaacataataataagcactcatcaaatacttaaacagagcagttggcagccttccaagtttcctccatttttaaagagtttgcctactgagtacttggataatcccaccatatacatttcctgtagtttgtgtacatatctggtttcctatatattgggtaagtcttttgagtttgagatacatagtagatttagatctaaaatagttggcaaagatggcaactaacttggcttatgcaagttgttactgcccaatcttgagccctggtaaacaccccaaattgactttggatttttttctgctgtgcttagattgagccccaaaagccttctaaatacaataccccaggcagccactttctttggatcagaattggcactcataaggctagtgttagtggccaaatgttgatagcaaattttacaggtgtttatgtgacagggattggggctgggtgaaagtaagaaaacatttagctggttctgtctgtcaggcttcaaatacatacatttacagaatgacttctgactaaattgtcttagatatgaatgttattatctacagatgtgaaccttttctatcatttgattgttctaggatgttgaagtcaaatggattgaataccagaatatggtgaactacctcatccaatggattagacaccatgtgaccacaatgtctgagagaacatttcctaataatcctgtagaactgaaggttagtgtcactgtagaaattacataggattgattcaattgtaaacccttaagtaatgctataataattctgtaattttagaagttcaacaaaagttgcccttggaaagccattaataagtaggcaaaatttgtattactcatttctcttattatacagagaaaatggaggtaaaacattaacaattaaaacagattagctgtagtcactcagctttggttgagaggttaaaggtttaatttgagagagtctctgaaactgacattgtcagattgattttagtacatgggaaatgcttgcagcccccga

SEQ ID NO: 121273 - DNA, 1087 bp, Homo sapiens
cattttttgtttaactaattttctttatctgctgtcttttagtggaggaaaaccatttcagtttttgttccattaaagtgttaaacatcatgataaaagagatgacttactcagactcattgtattctacagctgcttttgtgttgaaatgactatgtcattctgaaggaagttttatgttttattctcttagctgaaaaacttgattcttcaatgactttattcattccctctaggattactcagtgtttactttctttgctaatggcagggttctcataataacatgccatgtcttgttctgagatttggcagacttacaaagtctgttttttatttccctaaaaggtgcaaattttacggaaacaaaacgattttttattgaaagaacttcagatatttgtttttgtctagactgctatacatacctgtttactaatcttgaggttggcagattcttcagatgtttctatgtgaataaaaaatgttacttttggaggtctgttatttacttccatagttgtcaatggatttattgttcctataataattgtagggtcacttttaaaagagtggtcatattggtggcaggttgaaaacattaaaggatttcctaataatttcctggaatatgagcatgtaggtgatggtaaccacattcccaggttatgaacagtgcaaagtgatataaaagtataagattttcttgaaaggtctgttttctcaccataaaagagtacaaattgccacttagctttctaatattaatgatatattttcaaacagcttttcatataagcagcctgccaagtagtatacaaaataatctgcatttcatttctcccacactacctttgagccctcccactctttctgtggtttcccaaatgattattttgagcaaacaggaatgcttgtggagcttgtagagagcctttctttgtaagctatcaacaggttcttactcagtgatttttttgggtggtgagtaccactctttgaaggctttcctgtttccacattgttccggtagtctttcaatgctttgtttttgagatccaagtttcctgactggcttctagccttg

SEQ ID NO: 121274 - DNA, 1002 bp, Homo sapiens
tgcccaaatatgagcatgaagggatgtctacactgagttacgcaggcctttttttttttttctttttttttttttggtgattgcaaggtgaggtgctttttgcaccaataagaacagtaaggacatgctaagtctgagcatgatttaatcgaaacagtcatcttcaggaatttgttacggtaacttctctgctatcataggataagtgaggcatatgatcttttgaaaagcagatgttaagtggcatatgtgtcttcagtcacctctgtgtgggttgttctgtagtatagagggtgttctaaaaatgatctttaggaatggagtgaggcttgtttttgtttttgttttgttttacacttccacacaatcccttttcaattccttgcaaactgctgagtatgtactattttgccagcaaaggctgagcctgtatgaacccagccatgtgctttgtctgtgcatgtccccacacaggaagcacaccagagaaagcgatacttcagggtagattgatttcattagaacttcattatcaccagcctcaaatggttctggccagcagtctttttctatctgtatgattaacccttctcttcctcacagcacctcctcccaccaccttttctcagtgttaacaggtgatctagactcctactctcagagaaaattgaagccaacaagtagaaagtcttttttgctaccaaagacacaaacctatcttcttctgcatccatcctcacccccgctgctgctgttcaacacaggagtcctctctccacctacccaaagcctgtcccctcctgctgtgccctggatcttatctctgtcattgccttagaaacctttcttgtatatattcatctttttccttcaatagatctttcttattggattttaagcatgttgcagcctcttctgttaataaaacaacaatcaacaaaaacactctcccttaactgcatgctttattccagctactaccttatatcattcctttccttc

SEQ ID NO: 121275 - DNA, 1912 bp, Homo sapiens
tgcctcagcctcctgagtagttgggactacaggcatgacccccccgcccccatgcccaactaattttgttgtatttttagtagagacagggtttcaccattttggttgggctgttctcaaactcctgacctcaaatgatccacctgccttggcctcccaaagtgctgggattacaggcatcagccacctcgcccggccaaaaaagatctttatagatgtgatgtaaggtatagcccacattctcctacttccatttttgaagcagaaaactgaaaaagtgacacagccacggtaggaagatagctcatctggttgtcctcttcatgggagactggcaaacctagttgcaatttctacagcaggcacttgttaccacagtcctactttttcttgtatctgtgatttttaaaaaataccatatggtattctattgtatgtgtataacattttgtttagagtgccttattgatggatattatgttgttttttgcttttaaaactgttgtactgaactttgtatgtgtctttgtgaggcatgtgaatatatccataggataaggtcctggaagtggaattgctgggacaaagggtattacatttaaaattttgagacgtacttctgaattgtctgccaaaagagttgtactgatgcatacctcttctgcactgtttcccctccatgatgcctttgagaaagaaacacttcttaacttgttaattaccttttagcaggtctaagccccactcttttttttctattctttcttttactttgccctttcattcataaaattatttcttttcagcttttaaagatgtgcccgtgatgaaattgaaggcctatgtttcactcagtttgatgtgcaagctgttagtctaagcatgcatgtattacgagtttagggggaaaagtgacgaagtaagttgacaaatttcagtgatgtgatcatttaaaaagttagagggtcggccgggcgcggtgactcacacctgtaatcccagcactttgggaggccaaggcgggcggatcacccgaggtcaggagttcaagaccatcctggccaacatggagaaacggcggctctactaaaaatacaaaaagttagccaggcctggtggcaggtgcctgtaatcccagctactcaggaggctgaggcaggggaatcgcttgaacctgggaggcggaggttgcagtgagctgagatggcaccattgcactccagcctgggcaacaagagtgaaactcagcctcaaaaaaaaaaaaactgttagagtggggctgtcttgagttagcttatgagagtgcctatcactctcctagagatttaggaagtatgtaatcaacatgagtttcccctccccccgcatgctgccactgatccactaacaatagggctgtaaagcttgagggaagatgggttttgatcaaaactctccttacttagaaacttgacaagtcctgcctttgtcatgtttccctttagcattctcttacctttctctcacatgaagatttcttttacattacaggagcagccggtatatgtaactctatctgtttttctttgataggttcatctatttgttttaacacttcttgtattttgacttgattattcacattatcatcttagcctgtgatatgaagtagtttgagatttagttttctaccataataaaaataaattgattcccactaccccctttttggggagggtgtatttatccttattagtcactaaagtttacttaaattttccttttattcactaaaatataggtactggaggagttacttctctatcaacatcaataccattctctgtattcattaaaatttaggctgttaatgggattgattgttctttgtgaagtgagaaagtcataattcattagatatgttttaattatt

SEQ ID NO: 121276 - DNA, 1087 bp, Homo sapiens
aactagaggtgtgtgtgtttgaagagattatttctgcttactagtttctgcctgtcttatgcttgtttttaatttatctcattcatttatttaaattgcctttaaaaaataaaaataaaaaagctaaacataaataaataaataattttccttttaatgtccctggcagtcttttcataggtttgttttaaatatgttagccaattaagactcaaaattttgggaataggttgtatgcaggagcaaagcagtcaaatgttttctaattaagcagccaggaacttttcacttgtctgagtatgtagttggatagcaattattttgtccattgtttgcattttgaatgagaatataatagggccatcatatttcattatattaaagtttaaagatgctgtaattgtgaaggttagattgtaaagctgtggtcagagtcatcttgtttaatagcatgacctggaggccggtgattcagtcacatgcgtgaattcagtcacaccttagaagctaaactggattggactggtttaataccgggaggaggccctttagggtttgaaatgttcccataggaagttggcttagtgttgacttagccttcaggctgcagaatccagaggtatgagggtgtatgtatgtgtgtgcatacacatggccatgggctgtagtttggccacaagccagacacacacagagcctgaaagttatcaattaaaaagtagttaacagtatttcagcttgtgtagaaaaaatcaaattgcttatttaccttgccaagtgaactcaaaatgattgaactttgagaacagaaatggatgacttctaaccattatcacattttaaaattcttagagttaatgtacactgcttataatgtagtgcgtctgcatccaagtgaggtgtaagagttagtgtctacatctggtgaccatttttattgtatctatatggttttacctacagtttgggagatgtaatttggcatgtaatatttggaggaaatatctgaatatattactttctttttatgttcctggccttcttgcctagattaatttacagaaattctctgtaatatgaagcctcc

SEQ ID NO: 121277 - DNA, 1655 bp, Homo sapiens
ttattcaaacctatgagactaggaaccaggtctagaagcctgtctcatgactctggtcaagtgatattttccctgtgacagaatgatttgttcttcatatgccttgcttcccatctctgacttgctcattctgattctggcgtgcagcctgtcttgttgatcccttggctttgcgtcttgcactgattgagggaacagttgttggtggtgttaatctcagctttggaattactgtgtgacccctggtaaagtcactttgtgccttaatataattatcagcagattaagtaggacccttatcaaagagatgcttttgggagaatgtaaatcatggaaacttgtgacttgttttatcattattcagtggaagagacttttagaaaacttcatgaaaacaaaatacaggagaaaaaaatcagttgataaaggtttcaggttgagcaagccaagcaaggactcatgagaaaattagaacttctggccaaattgttatataggagagaatactatttctttcattgttctttacacagaatacctgttggatcaaattctgctctgcaggtggtagtatagagtaatttataggttttacctctgatctacttgaacttggaaaacacctccttaagttgtattaacaaatctgattaggaaagaagaacgtagaattttcaatactgtagagttttggtttagtaaaaagagaataaatgcttttaaattggacacaaatgagttaaatctgactttttcaatctgttgttaacctctttgaaactcagatttcctatatgtaaaatggataaaatttatttatttcctatatgtaaaatggggaaaatttataagggagaggtatgagggctaaataaaaataattatatagaatagctaatggtttgataactttctacatgtggcacattctcttaagtgctgtacacatgttatctcattcaaatctcttaacaatctcatgaagcgggaattgttattatcctaatcttagattttggaaagtgcttggcacatagtaggttcttaatctgagttagcttccttccttcctaaaggtttaacactttctgttatatctagatatctgatatccatgttactggagagtcagaggatatgtctgcaaaagagagattgctactctggacgcagcaggcaacagagggttatgctggaattcggtgtgaaaatttcactacctgctggagagatggaaaattatttaatgccatcattcataaatacaggtatggaatttgtgtattttttccttatacaactgtaagacacatttctttcatctctgaattttaaaattatcttttattattatagaagcaaaagcatggcaaaaaattagaaaatacagaaaaattaaaataaaaaattggccaggtgcagtggcccatgcctgtaatcccaggacttagggaagccaaagtgggtagattgcttgagcctgggagttcgagaacagccttggcaaaagggtaaaaccctctctctacaaaaaaatacaaaaaattagcttggcatggtggcaagcacctgtatttccagctactccggaggccaaggctgcggtgagctgtgatcatgtgactgcactgcagcctgagtcacagggtgagact

SEQ ID NO: 121278 - DNA, 1768 bp, Homo sapiens
gcaggagaatcctctagattgcttattgaaaaacaccttgcttgagatttaatttaatcagaatatcttctgtcatgagacagtattgtatatgttttaggcacctgctcgtgtgtttttaaaaacacaccagatttagagaatcagcatcaccttagcttagtatttgccatttcattttcttcttaatgtaggttttctgataagcaatgtggactacgggcctggcaggcagaagatcgaagttcttctagtcaggctttgccaccagacagctgcatgacttaggcagtcttctttatttctctaggtctcagtttcattttctataaaaggaggatactgtactagatcatgattctactgctaataataatgctatttgttgagtcctgctatattccaagcactccccaactacatttatcttcagagcaagtctctgaagtgttctgttatgagctccatctttatagatgaggaaactgagtctcaggaaagttaagtagcttactcaactcacttaacaatgagtggtacagctttgatctaacccaaaattgtctgccaggctgaactgttacctgaggcaatttaccctccttttcctacatacctcttttccagttttaaatttctgtgaattcatgtgcataagtgtatgcctttttgtttgtccagtgttattactcctctctctttccctctcttcctttatttctttatgaaacatttattatgtattgaacccaaactaggcactcagagataagtaaaacgtagctcttttccttgtgcattatatctcattgtttgttcataacaaatgacagggaccatggctgtaaagttagtcacctgagaattagtcacctggggtgatgatcaggaataagtttaacttctcagcaaaccatgtggtgactctattaagtaatgaaaattgaactgcatttctgttcctttccatcctttggtgaattgctaatgaatagtgcagtggcctaaagtaaagaagccgaagagagaaggttaagaaatgagtgtggctgttgtacacaatatattgtcagtctctgaataatgaagaattgaatatttttattaccttggcttttgtatttaaaaaactttgaaaaaaaattaagagctatctcagaatgtgagaggaattacattcaacctacctgaaatatatttattcattatttttttctctcaccaactcttttatgaagcttagactataaaatttatgattggaattcaaggaccaggataaaatctgaatgtgtttagccttgctccacagatcttgaagacgaaggtcattcattctataattgactaactcatttcttgctgaaccattttatctctttctttaaaaatgaacattcatattgatttctcttgactatttctagtcatttagatttcataaccagtttgtgaaaatatagttttagaataattgtatagaatttgggtccctatcatcatgatgcctttctctgccttttaagttaaatgaaggacatgcacagtttaaatccttggctttacaaaaaaaggtagcctttcccctctgtttgtataagtaaatgataatttgttcaaagtagttatcaatttagagcattagcacttggactttatcagctttttaattacttttgttctccatttcacccttcccttatataggcagtttgtaccagttaaaattttaaaaatgtttgtgctgtctttacagttaaaaatattt

SEQ ID NO: 121279 - DNA, 1037 bp, Homo sapiens
gttattttcatattagtgtatgtaaaagccatagagtttctgttgcgttttgttagtagcctcaggtttgattgttatgattttatttttgtgctgtgcacattctttgaccacactttaatctaaaaatcctgtacattttcattattggtggaagactttaaaaagcactacagtaagagagtgcatatcttttgaatttttctggttcatgattcttgactttgcctgtggaatagcctgtggaagcttagttggactgtaggtaaaagttcaattagaaatagtcatgagaagacaatagctttgtaacaaataataggatactgtaaaattatcagtcaataccgacttgctgattcatgagtttgaaaagccagattctggttctctgttgattttcatgtgcagaaacattcacataattgctgtcaattctgtgcatatgttttgagggctagggtacatcttttcctttatgttattccccagccccagtctaaaatcagaaattgttagggtagcatgccataggaatttgaaaatgacacagactactaggaagttgagatctttattcctaacactgatatttagctttagacaagttacttatctggggtttttacttgtctttaaaatataattagataggtatttatttaattgctcaaaaaatgtattatccacataacctctacatgttactactcaggagttgatggctttttctttaagctattcctaactttatcttttaataaaaaatctgaacataaagaatatttgtgatgttaaacattcttggcaaggtcattgtatcaatgagcagagatcatttgcataatgatagaatgaggttttatgagggttagtgtgcgccatcatcactgaccttggtttctgagttctcctgaaggtgtcctgtttatatacaccgctacaccttgccaatattatgccatcagttctgtttatattttacagtggttatattttaaaaagaaagcattcagtctgtgtcattatctatgtag

SEQ ID NO: 121280 - DNA, 1091 bp, Homo sapiens
acaatgcaggatctgttattgacaaacatctacagtatcattgctaacttgactaactgagtattcttacttagtaaaatataatgagttccatcttttgatcagtctaaagactacctagtgaaaggcaattattaatttttttagtagtgaaatgatttgtacttatgtgtaaatccatttcatgctattctaatttttttttttttttaccatatctatgactcagtgttagaaatatgcacaccttagataatcaagtctcatactgattcattatttttccagcaaggccctcataaaaactgtataatatttaactagggtatgattataaaagttacatataaagtttaactacatatatatatatgtatatatatatatatgaatgcacatatatttccttttgctaaatctttcatgctttaaattatataatttatctatttggtatcacattaaagtcctaataattagataaggtcatggcttggaaatttatattatttgaaaagtattataaactattttaaaagattgattttttttagaaacaattttattagagaattataagcatttagcacttatctctcctgctagctattgaatcagcttattattttttatgacttgttttgaataagagtcttaataaaatttacagagatctttgagcttttgatgtgtttgtgtgcaagtaccaaaattagttggtatttcttaagaaaaaaaaatatatggtagagggtagagagtctctgaaattcaatttgaaaggcactttgaatccaaatttgaagggcactttcctaaatctctcctgactggtgtttgctttctttttgctctcattcgttgaaccaccaaatagtttcaaaggttaagtgcaaacttcattagtgtatctgcatttcagaaaaccgaaggttaaaaacagtcataatcttctcatacagtgaagctaagggtttgccttgagagctcatcagtgttgtaatttgacagtgagcagtaatgtttgtctaagaggattggtggccagaaataagccacagtgtctaatgagacacggaccggctgggcag

SEQ ID NO: 121281 - DNA, 2065 bp, Homo sapiens
tggctggtgggaggagtgggggttgtttcagcatgaaactgtttcacctcggatcatcaggcattagatttttataaggagtgcgtgcgcaacctagatccctcaaatgcacagttcacaaatagggttcacacccctataggaatctaatgcagtggctgatctgacaggaggtggagctcaggtggtaatgcttcctgggccgctgctaacctgctgccatgcagcccagtccctatggtataggtttgggggttaggttggggatccctgctgtggaagacaagaatgcaataatacttgctctttctttgttgttaccatatgatttgtaatataaaatgattgagaataagggtaaaacaatatttagttgactactggtgtttaaattattccattttttctttgtataattttagaattgcttttatgtaggtaaagataactggttcaggtttgataaacagttggttttatctcttcttcacattcaaaacaggtgaaattagtgaatattagaaatgatgacataacagatggaaatcccaaattgactttgggattaatctggacaataattttgcactttcaggtaagcccaaattttcttaatttcagcatctaattgctagttttcaggtggttcctatgaagggtgaatgatgcattcatgttctatggaagaaaaataaatttcaagcttctttctttaagtaatatatttgaattgttcttttaagcaacatgctgcttgtgaatctggcaactagtttcctgttcttgataaacttaaatgtagttttaaagacaatgtctgttatctcagagttggaagacatatttctttttattgactggagacacactttttttgctcattagaaagtattacctgttttagatacttaaatgttttatgattagtccttatttagaatgttttttagtaatacaggttcttagcactgtcaactatttcctcctttgatagacactagatggcagcataattataaagagatgtgaagaagaaaagtattcatgttttatgcagagctgtgctttctctctttagatttgaggaaaatgcaaatttattgactgaattattatctaataaacctgagccaattgaggaccgattttgatttagttttggggaagtgatacattaaaaagaatcttcatttgatttaaggagattcctaactttagaacttgctttagtttactaactgctggtctgcttaagaaatgttctgctactagaggtgggaaggagggggaaaagggcatgggctgaaaaactacctattgggtactgtgctcactatctgggtgatgggatcatctgtaccccaaacctcaacatcacgcaatatacccatgtaacaaatccgcacttgtaccccctgaatctaaaataaaagtttaaattataaaaaagacccagaaatgttctgtgtgcagcacagagcctgacccacagtaggcactcagtacatcttaccaatagattactgtacagttggatcttgaaggaggaagtgatcctttgccagcttcaaaaaggacctggggttttgaaacaaatctggtgaggaataagacttttttaaaggctgggcgcggtggctcacgcctgtaatcccaacactttgggaggctgaggcgagtggatcatgaggtcaggagatcaagaccatcctagctaacgggtgaaaccccgtctctactaagaaatacaaaaaattagccaggtgtggtggcatgcacctgtagtcccagctactcgggaggctgaggtgggagaatcgcttgaacctgggaggcagaggttgcagtgagctgagattgcgccactgcactccagcctgggcaacagagcgagactctgtctcaaaaaaaaaaaaaattttttttttttaagttggctgaaatacaggttacgtagacaaatggtggagaataatgtacctggggggcttgttgggaacaggatagatttgacaggtatggagagctacaggaatcagagtctaggtaggtctaggacctgaac

SEQ ID NO: 121282 - DNA, 1044 bp, Homo sapiens
tcattaatatgccatatgtatatatatatgtgtgtgtgtgtgtgtgtgtgtatatacagttataaaaaccctcttgctaatagtgttcaataagaaggtaaaatgatgaatgatatttaattatttttgtgcctccatagctaaataattgtaggctagcgttgttttattaccaaatattaagtgtctgtatattctgtaacatcttctcttttccttttgtttaaacaaaaaatttgtcataaagtatatgtttaaataaaacatacttggaaaaaaatccctagtagtttacattcaatctcagacaatataaagaaattgaaaccttcttagaaaatcttatggccttacctaaacggtaaatactgttttgatatattaagatgaacagaaattatatttaaattagcatggtctgtgataacagaaactctttttcatacctgcatttttctgttcttagcccagagaaaaaggtcggatgcgttttcacagactacagaatgtacaaattgcacttgactatttgaaaagacgccaggtatgatgttttgaaaatactgtaatcatataaatatatgttactaatacatccacgtagaaacatgtcaaggaatgacaaggttaaatttgcctgtgaattgtaaccagtaagcttgtgctttggtgaagcaaatatttaaaaatgtttttaaacatttgctcccaagaaaagaagttaatagtagggataagcccagaggaattataagtgactacatttccatctatgtaagaacttgtgattttctttctgtttgaattggattgcatttgcctaggaagttaatgacattttagtagcaatagaatgttaagaatgcctatgaacagttcttaattgtggggaagcaatacttcattttttacacttagtatataaaaatagttaatttttataaaaatactttatataatacttttaatttagtataagcatttttcatagtagggataaggaaatcttttgtttttataagtagataatattggaaaatttat

SEQ ID NO: 121283 - DNA, 1048 bp, Homo sapiens
attggcggttagtatagtcatctgtgaaggaaagttaccaggcccaatgcctatgactcactcctagggtaaaataaaagcttttctatgtaggcttagctgtctactttcccttcttttctttcccttaaatttcttgctcgatcagattggaaccccaattctttcccctcagttcattcccgaccaccctttacccataatgttgatttttaatttttaatagcatcctcttttattccactcatttgtgctgaggaaactgactcagtattataaagtacttagcacaaggttaggcatctagtagtaactcatggtgtgtgtgtttttgtttattattgttagtgacatttgcttttcggaaaatgatatcttatattttgtaggatgttttccatatacagtatttctgtggaccctcagaatagtcagctgagacaggaaaagcaggcagtattggggatagccagtgtctttggatttttttcaagcattatagaagttaaattagtttatttctgcattttcttctaaaattcttaaaaaattaagccataagtcttaagagtagcttttattttatacattttctaagttgacaggtcattgattttttaaaatgataataatttgatttaaagattacagactttttgttctctaggttgaactaggagttttctgttttccaacctttattttaaagataaaaaaaaccctgaagcctagagagtttaggctgttggtacaaattcataaggccaagggcagaagcaggactaaaatgtcttttcccttatcacaggttttctcttttcctaatttagagggagtctcactcttttgcccaggctggagtgcagtggcatgatcacagctcactgccaccatgcccagctaactttttgtatttttagtagagatggggttttaccatcttagccaggttggtcttaaactcctgacctcatgatccacccacctcggcctcccaaagtgctaggattacaggcgtgagccaccacacccggccatcttttcctag

SEQ ID NO: 121284 - DNA, 1501 bp, Homo sapiens
gagctattgtcctagttaatgggttttaatattatcctttcttttacctcatagtttgttattgttcccaaatgtcttaaacatctaactttaattttatgttaacttaaaaaacttaagaaacacacttaaggacactttgattttactgagcagtatatataatagagcagttttaacatgtcttccaggttgctaaatagaattcaaatttaatttctgattaatactttcttgctgaattttaaaattaattttccagtgttgagaagattaaataaaaacatgttttttggaagggaaacagcagttttcaaatcaggttcccaggaacaccggtgttgtgggataccctgggttgggggagcagcggaggaaggtttcatttgccaaagagattggaaagtagcattttctggttgaagagatttatggtacacattagcatactaaaaagagaaaaattctgtgggagagaaccctgtttaatccaatgtttcctaattcatttggtcttggaatcttttgtcaaagagtatctattaatctccctttgggaaatcctgcagtagagttttaaagtgagtgctttcaagcaaatttaattaatattgtattaatttgagttacagatctggatggggcctagttaatttggtggtcattgcagaaatgttttctcacagcccttcttttttaaattttttttgaaacagagtttggctctttttgcccaggttggagtgcagtggtgtgatcttggctcatcataacctctgcctcccggggttaagcgattctcctgcctcagcctcccgagtagctgggattacaagcatgcaccaacacgcccggctaattttgtatttttagtagagacagggtttcaccatgttgttcaggctggtctcgaaccactgacctcaggtggtctgcctgcctcagcctcccaaagtgctgggattacaggcgtaagccaccacgcccagccctcacagcccttcttataggtcaattattttctaatttatggatgacttacccttttggttctcttgaattataactgagctatttctttaattgtctaaaattctcataccctaacttccacctacttatcttgggccagccccccagaatgatataaaatgtatatggcagctcttgaatacctgaagaaactattttgtcctccttcaccacgtttttcttttaacttgtcaaccagatagttccatttcctttattttattctcatgtgataagattttctatcatacatttctaacatattctctttcagtttttatatttgaaatttttaaggctactgagttgaagacagaaaatgagttgaaggaaagtctgccatgtaatcagagctatacaatgccagagcatgcacagaagttacctatgttatgatctcaactatgtttatattatcttctacctttcacctccctgcctttgtacatgttcagctatttacttacct

SEQ ID NO: 121285 - DNA, 1034 bp, Homo sapiens
acaactttaattttcacagctttaaactgaggacagtactacccaactcagaattattgtgaaatccaaatgaaaatgtatccataaggcatacataaagaaatacccaaaagtggttttctcccagaaggatgtatgtctagcctataaaggtgatccttccaaatcatgttactagcacacatatcagggataagttaaacaagttaggctggattttttttatttttattgcagggaaattctgcctggggtgttagaagagagaatgtgatgagttagttcagctgtgaaatctaacatcctattggttcgcctcattgcaaaacaaaaaaagggaattaaaactttttttaaaggacttcttaagaacaactttaaaatgaaaagaagaaatagacaatttggtttctttttagtaacagttgtatatatcccctacaaaaatagtagaggagtctggctttgttaatatttgtttaaaaggaggtgttgactagttttcagcttgcaagtaggagtgtctagtcagtgttttcttttctacatagaaagttaacaggactctgacacatcagagtttgtacggagagagtttagggaactgctgcacagatttcctgcagaatgatggggcagctcatgaaaaatgatcaagattggaacgcaaagctggtgggactgatgtgctgtatgggttagtagtatcacatatactatcactttcatgttttcagaactgggaagggaaagttgcactacctgctttggtttgcatggcgatagttcagctgattgtcgggcatctttcgaaaacctgtactgaaatcaggacaacttctgaggctccctggagagaactcccctgcctattgttgtccacagaatatgtatttatataatctcaatacttactgcgtgtgtggtactgagtgagtttagctttgtttggatttcactgaaaaccagtcaatatagattgtaataatcagtactctttttgcatttatttgttcccccccaattctgttatt

SEQ ID NO: 121286 - DNA, 1015 bp, Homo sapiens
cataaaatttcaaagaaacttgaaaaactgtatttattccttataatttgttgattttatttttatctgagttactggaggtcctgctttaataaattttgaaggtatcttgtatgaatttgatttttaaagtgaaaactgttctgtttatgtccttacatatatgtagtgattataaaagttttcaaaactgaatactttaaaacaccaaattacttaaggtcttcataatataatggatttaccttacatataaataatgtagaaatgatgcttattgaatttattttcatcgagttacatatctctgtgctttggggtatattcttatctagagctctgaatctagaaagaaaggctgatagtgaaaaccttttaaaaaagtctaatttcttaaggttagcatgttacagattaagagttgcagaagctttctgtccttaaacagtgactcagatcagcagaagttagattatatataatacttaaatgttatagcagtataactataattaggaatctctttatatgtttttaggatgctcaggtaggagaaggtagattctaggagttttatattcaattcttagccaattgtgagaacagataccagtaaattccttgtcagagcagaacctgatcccctagatcccagccaacaataagattgaacctcagctgctcagcaactgcacttacaggaaggcaggagatctgatgactgggagagcagatagtggtagaggaggagatacacaaaaaagcatttgtatggagagatttatggcatttgtagtttacatctcagcttacctagcacattctaccattctactcttgtcctgtgtctggattcatgacaaatgctgacaaaaccatttgttttgttctgtggcaattaaactttgaacaaggagactcttcacgcagtataatttctgactatattctcagtaactgattctcctttcagagacctcctgtgccttcactgttttgtatctcagactgggca

SEQ ID NO: 121287 - DNA, 1077 bp, Homo sapiens
gtatggctagcaaggctatgtgtcttgctgaataatcctattttataaaccagaaatggttattcctgtctttttatagaatttctataatctcttttttaggctgataaacacttcatgccaaaaggcaaaagagaaaatgggaataaatttcaaaatattattttataatacttgccttaaagtctaccaaaatttttgtcttcttaaactttacatcatcaaagtcagtctctgagctagtagtgtttagcaagaataggggatttggtaatctgaagacctgtgatcaagccttgattacgagatcagtgataaggataagctgctctcattgagtagtacctcagtttcttcatctttaaatgtaagtatctgccttacttacagagtatatgtgaatgtaaagtggggtaattacatgaaagtattctgccaatgcagtgtgattttattaatactagtttccttgtctcacattatgctcatttccatttgtgtatttctgctactgctacctacaattgtcttcttaaattttacataatcaaagtcagtctctgagcttctagctacccacaactgtgcaactcctgtacaactcctcctgcgtgcccacaggtctgttacaagtactcagggttacactggtaactcttctctcagtccctattctgcatgtagtcaaccggtttcctatttagtgtctaatgtcttgttttttttttttttattttcttcattagatttgaaatgacttgatggcaaggaatatatactttatatatgttttatacatttcatacattttctggtattttttatagtcctggaatgtacttcggagctgaaaaaaatagacattacttggtattactataagctagtgaaatagaagggataatccaattatattttctttataatcctgttgtttatctcattcctttctgattctgaagagtacctaacttctgaataacttatactaactgaaattattcaggacttatgaactaaagaacatatgtttaatttaaatactttatccatatctagttttgactgttagaaaat

SEQ ID NO: 121288 - DNA, 1068 bp, Homo sapiens
ttgctattaaattatttgcctctaggtacatatttcaaagttagatatgtgtctttgaatatatttagaaatgttcagacttgtgcaattttcttttaaatttgtgttctctcaaagttattttcttttttgcttttgggggacatggaagaaccaaaatatcctttatatgcttttattttttgagtgggtataaggagatagaaatcctattatttgttaatttaaaaaataaaaggattttgacatatgcagtgcatactctatggttggaccacaaaatgattctgtgaaactattagattcttcaaggactcactttgcttagaggacaagaatggcaggtggaaggagtgctctttgccttgcctagagtgtagtgtctttgatggggagtagctgtttaatgagaggctttaggacacatccagtcagattcacacgcgcctctggaactctttgttttcaggctgcagttccttggctgtgtcagcatctttattgtctgagctcagaaaccccttagtgcaccaaaccaggaagggaaactggcagcatgcaaatgactgacaaagggattgtaatatattagaggtctctgatagtcattaaaaattttgaatggaaaaaaatatgccagcagttaataatatcaaataaattaaaactacaaagtcattcctgtagctgtaaaattagtttcttgagatagacgtttttgctacttgtggtttttgatttatttatttatttattgggatggagtctctcactctgtcacccaggctggagtgcagtggtgcaatcatggctcactgcaacctctgcctccccgattaaagcaattctccttcctcagcctcctgagtagctgggactacaggcatgtgccaccatgcctggctaattttttttgtctttttaatagagacagggtttcaccatgttggccaggctctccaactcctgacctcaagtgatccgcccacttcggcctcccagagtgctgggattacaggcgtgagccactgcgcctgggctgatttatttttaaatattggggtacat

SEQ ID NO: 121289 - DNA, 1878 bp, Homo sapiens
cctggggcacagataaccatcactccggggttgctgtttgcctctttctgtgtgagatccctttctgctggatcctgtggtctcaagacttgattacaaccttgttttgacaaactgtcttctctagtagtaccatgaggaaagatgcatggaagagaaattttgtgtgtcctggaaaaattttttattggtgctcttgcacttaattggtactatctagattggaaataatttttcctttagaattttgaaagcgctgattgatctgttgtcttctgggctttcattattgctattacaaaatctcaagatcatcctcccttctctctccctcccccactctttcttgacattataggattgtgattcttaaccctggcttcactttagaattatctggggactttgaccaaatcctggtatgagagattttgaagtaattggtctggagtggagcccaaacatagatatttctgaaaagctccctaggtaattctaagatgtagccagagttgagaactactgttttagtgtcttttctttgtctctcattgctgaaatttcttgatgatatgctatgatgtaggtccctttccatccgttgtgttaggtacttgattgttccattaatctggaagtttatgttaattttggtaattaaaaattttattttctcccgttcttctgatctattattttaaaaatcttgttatttgtagttcctctgcttgtctctctgattttctgtaactttttccttttgtttacagagtgatttcctcagtttgatcttccatccctttcactgagttttccttttctgtaatcctattttaatttttctgagaattcatttttttgtactctaattattctgcttttatggactcctgtttgtatttaaggatgcagtatcttccctcctttctaaggatattaataattttttgttaactttttatctcccttccttgctctgtttcctctaaattactttttgaaaatctgttacttgttttggcctcctggtttttcctataaggggctttgctcagaagccttccttggctatgtacctatttatgtttaaaagctaattatggactcgctatctgtgtggtggacttctcaaccttagcctttaccataggatctggctgggtcattgcagtgggggaactcctgggatcagaatcttgggatcttttctcttgggctggtcatattccttagagagtactcttttcaactccacttttggaagctgatttggcagaagatggctggaggatgacttttaggatgtgaaggcatgcttaatttgcctttctcatttatgtctcttgtcatgctgattagagcccctgtctctttgactctctccagagaataaacctccagcctcctgggggttgggcaagggagaggaatctctgtcttagacttgtcctttctgtgtcaaggcccaccccaccccagctttcatggctacctgctgctatccttttctggtgaggtttttgtggggtttcaaggtatgaatcagattgcttctctcagctttcctggctgctggcttagtggtcacctctctgttgagtcaggtacaacttgttcttgggttttccagctaccaaatgcccttgttcttctcaactccttttcctttctccttgttggtaagtatgtaccctaaacacagattccattactgtcaacgtaatgtgttttcaggagagagtggaggtaagctaaaggtcatctactctgtataatcagaactgaataatatgattgtggtaaatgaaaaataaagagatggtaaaaggcttcagattgtcataatgattctattttgcatgtcagctctgaggttca

SEQ ID NO: 121290 - DNA, 1057 bp, Homo sapiens
tagtttctctcttaataattattatgtggacggctgggtgtggtggctcacgcctgtaatcccagcactttgggaggctgaggtgggccaatcacctgaggtcaggcattcaagaccagcctggccaacatgtccaaacccctcctgtactaaaaatacaaaaattagccaggtgtggtggcacatgcctgtaatcccagctcctcgggaggctgagtcaggagaatcgcttgaacccgggaggtggaggttgcagtgagctgagatcataccatcgcgctccggcctgggtgacagagcaagactccatctcaaaaaaaaaaaaaaaaaaaattattgtgtgacttgtattagtaagattagaacattaaatacattttatattatcacttctttagacttacattgtgatttttttccttggggcttctcaaacattatatgtaagtcctttatgaacatgtcgagtctttgggttctccatgtagttataaagatgaagttacatatttggcgggttggggtggggaagagaattttaattctctctggacattttataagagaagacattttagatccttgactagcttgtgaataatatgtattaagcaaatatacactcccagtatgaaaacagtttatagggccttttcatattattatcttattagatattctcagatagcggtatttcctcattctacagcaaacagacctgagaatcagagaagttaaatgttttggttaaatttatacaaatgaccgtgcttaaacaagtatctcctgagtgtaagtgaaaaacagcctttgagactggggagatacgacaattaaatgcattgtcgtcctggatgagatcctaaaacaaaaagaggatattaatgaaaaactgatgaaatccatataaaatctggagtttatgttttaaaaaatgtggcaaaggttaaaaattctttggggcaacataatgtaaaaagtttgaagacaaccgaacagattaaaattttgcacatgtgtgagtagataggaggtttttttttttttttttttttct

SEQ ID NO: 121291 - DNA, 1064 bp, Homo sapiens
ttgttttttttcatattttgcagtctccttaacatttaagaaactgaaggtgtatttaatcaatagtgtcactatgatagatattaagaaagaaaaaaacaacgccgatggaaaactaagcaaagttaccaagtaagattgcagcataaattttaaaagtgatttcccaaggaataggctatatccagacacttggctaatattattgcccttgttctacagttaatggtaggtacgctgtagtattttaggagcacagggttttacagttttggttctgccagttaacctaagattgactttcctcacctgcaaaatatggataacatccacttccctgatttttgtgagaatcaaatgggatgatttatgtaaagcatttagctcaatgcttaacacattaaaaacagcccccaaatggcagctattattgcagattttcatctcagctacagtattttggattatttgtcagtactgtactatcttttaatgtatgatattctttctgtgttctgggccttcttaaagtataatgatttcccttttctcgaattgaatttgaccttttcaaaagtctggaatttactgaagacaaagaattatccagtgctttatgaatggggatgtttatattggtttggctggcttccaggtggcaaacaacattcaaaagcagacataaatttttcccttccaagaggccacatggtgctcctttcctgcatcaggctcccatggatatcaatgggtgtaatgtgtgtaaagcaagggaaaggtcttgctactaaaaagtagggcactgtgctatatcagataaattagtacgttcccatgagctcatgctttgtcctaaaagatgtctttgtcttaatgtcctgttagagtctagctggcagttaggagtcaatatttgatataattctcagtggttgaatcctactaggatgttcatagtttgtgtatatatgtatatatatatacatgtataaaactagtagtattaaagcccaaacaaaaatatttattaaaatcttacatgctacactttgttaaagtgttat

SEQ ID NO: 121292 - DNA, 1001 bp, Homo sapiens
atgatactagtacctgcctgttttgaggattaatttaagttacactcttagaatggtgccagtaggcacatggtagataataaatgttagcagcttattgtagttctttgaaaagtgacatcccatgcttgtcttattcaataaaaatcatttaaccaaattgatagtttaaccagttgttttgctctttaatcattctgcttaactaggaaatactgaaggtgtttttttttgtttgtttttaatgtgaatctgttcgtttttacttaagagctggtataactactgtagtagttcagggatagtattttgactccatggtgatattaacttcaaatttcagttaatagtaagttcagttttattttttaagataacatggaaattttgtcttccaatagtgaatgtgattttccaaagaccttgtattttaccttgtttctatataaactaactcagtcataaggaaggtatttgatttgctgacacccacataggaaatcaaaactcttggctgcctcgtttgtttccccagtcccagatgattcagtttctttagaaactgcatgatgcacatgatttatgaattatttatcaacttagcttgagaactctgtcagttgtttagaccttgttttacagacaaaagtaatctgagtaattttaatgaataaatgatgatttgtagaatatatatttatttaaatgtttaaaattaaatataaaattaaaaatatggaaatgatctttatataatcagaacactcacaattttgtaccctaaatgaaatttaatgaaaaatttagaattaaaagggatataatttttacatcttgtaaagtgagttcaaaattagttaagcaacctcagcttgaaatgacagcttgaaatgacactatagtagcaaaacttgctgattctactttttatgaatcagtaatgggcgagaagtgttcttgtatgtaagggattactgataattattatcaacagaataaag

SEQ ID NO: 121293 - DNA, 1052 bp, Homo sapiens
tccttttacgtaattgttttggctagtctgttcctttatatttccatgtaaatttttaaatcagtttatcagtttctataaaaatgtttgccatgattttgattgtaattgtgttgagtctaaagatcagttgggaggctggatgcagtggctcacacctgtaatcacaacactttgggaagccaaggtgggtggatcgcttgagcccaggagttcaagaccaatctggacaacatggcaaaaccctgtctctacaaaaaacacacacctctagtccaggctacttgggaggctgacatggggggactgcttgagcctgggaagcggaggttgcagtgagctgagattgtgccactgcactccagcctgggggacagagcgagaccctgtctcaaaaaaaaggtcagtggggagaaattcacaagtatcaatattgagtcatttgatctatgaacgtagtatatatttagatctcctttaatttctctcagccatctttataggtatatagagctataggtatattatatagactcatatctgggttcaaatcatggctctgtcacttatggagtgaccttggtcaagtttcttagcttctgtgagcgtcatcttccttgtctataaaatagggataatatgtcattggttttgtctaagggttaagtgaattgatgtatgttaaaggcctaatgttatgcctggcaaaaagtttactgcacaatacaagttgttgtcattattatcatcattgtcatctttaccatcaagtaatgatggcctgttggatccacctctgccaaatagttattcttgcccagcaaccagatggttagtagcagctgctcagggctccctttatggtcagcatggctgatgaacactgccacacgcttgcttttagggcctctcttttctctactccacactaccattcattctccagctgtagctgtttacacattcttcctttggattatgttaataccattgattaggccacagctttccttgcatttagtccagtcttcctttgattttccaatattgct

SEQ ID NO: 121294 - DNA, 1383 bp, Homo sapiens
aataaagtaatactgataggtaaaaatgctatatttaaaattcctaaaaatttgcatatcaaaatttaagttgttcatataatttcttaggggaaaatgaagcagaaagaagtttatttaaaagttatacccttgtgattgaaaatctgtctaaaatatatcagtttcttttcttgttctagttcaaggtggtaaacataattaagctttattgagtatcttgccacagaatgaatcatgaatggttacgtttactatgattttatcaatgatctatgtggaaggtgggagattaaattaaatgtgtgcaggcatcagccaaaaatttattaaatattttaatgctttacattttttctttcaggtagaactatgagagatagtatattgcaggctctaatttctttggtttctaatgtttgactatataagaatataatcatcataagatggcaatattcattattaaatttaatttatgctaccactcaaatggttaggttgtgaaataagattgtttaatagtgtttgaaagatttgtatacccctgagactctagctagcaccctgactgatgccctgacagaaaaagatgattggagcattcagaagttatgcctcactcggggaggggcagttgagatttgttccctgataccagacccattccttgaatactttgtgactgatgagattgactttggagtgggagacagagaaagaatttggggtgcggtagtatcttggaggcttaagggagagcaccaagaagcagatcacagggcagaagagggatgagtgcctttcaagagaaggtggggaggtttgagaggagtgagtcaatagtgtagagtcctcacacaatcctgcctcccagctgttccctttgccatcagatgctgagtgatttgacattacagatgaccatggagggcagtgtgggtgatgaggaaggctgcaccgcactgtgggattcacattaggcagtccaatataaaccagacttacaccagactcatgcaacaaatttgcccactagccattattcacaaattactgaagttatcactgactgataaacacagaataccagcaggtgggaggaaatgttgtctagtttctattattagcttgtgctccatctgctgattataaaagtttcactggttcatttattttaacctctcaattgaatcttactgcaggaaaacaaattgtagaatacatcttactagttgtgggaaatcaaatttaatttgaatagcaaaaagtaaatagaatgatattttatgctgaatctaagtagccacatccgtagtcttctttattaaaggaatgttgggttagctcaattgtggataattttattattttcatttagga

SEQ ID NO: 121295 - DNA, 1090 bp, Homo sapiens
aatctactttcagggtcagctgtgcttgtttaactttagttgcactcctggtgtcctctgaaatggctcaagctctgaacttaggggaggcagaggtgctgggacttgggcttcagaggcatcttccatatctctttgtgaggatcatctttaaagggcatgtgcacagacctttcacccagttctaaaagcagagtatttctgtgatttaaaaattgcttgaattggtcataatcctttttggaaaaagatgacaaactcaagctagataaatacagtgcttaattaatttgctcagtgtagatatgatatactaaagctgtcctgccctataaaaataaagtggttataaatgcctcaaatttaaaatttgtgtttatacgtataccttggtgtgacaggcaactatgaataaaagaaaaacaagtcttatatatactgcacattataggaagctgtgtgcattggccttatttatagctccattttctattcataccctattctcctccctacttttccctttcaggctaatgtttctgtaaaactttctgcttgccagatactgttctaaatgctttatatatgttaaattaatctgcatagtgcagtaaacattataatttttattttatggatgaggaaatgggtgcacagagaggataagcgacttgcccacggccacaccgggattatagcgagtggcagagcggtgattctaacctcggctgtgtggctctgcagcctttgccccctcatgtctcacctacactgtgctgtctctgccaccgtcctgcctctcatttatcttgctgtaattttgtaagtgacttcaaatcatttttggaacatggtgggagtaccactgaacaaacagataaaagctttcagtgtatattttgcctctctttttgttcaataatattttgattcagcaattaaactttaaatatatcattagttatttttgacgaagtatacctctagagttacctttggagtcttctgccaaacatcttaagagtagagagttcattttcatttttcagggtttgcttttaatagttctgtggcgtggtgcaattaggct

SEQ ID NO: 121296 - DNA, 1475 bp, Homo sapiens
taagtcgtgaagttgcttttattaatagaactatttctattcttgttcatttaagaaaattataatattagatcagtaaggttacctgaagagacactagaaagggagatgccagagtgaaaagtagtagtccttgttagtttttttataagtatttttagtcctctctttttccctcctcattaaaaaaaaaatttaatttactttgtgtgtgtgtgtgtgtgtgtttaagtggcttaaagctacacccatttatctcactatttccatgggtcaagagtctgggcattccttggtaggtgagttctttgaccagggtttcacagaggctgcatttgtagttggtttttggaacattgtgaaattataatctagcagagactataaagatcttcaggagagaattttaaacataaatatgaacattattgctaacaagctgtactttatatatggtaggaatattctgaagagcatagaaaaagcaaaaaaaaaaaaatcagcctatttaaaatagctttctccttctacttagaatatatttacgaacataggaaatttgaaattaagggaaacatagaccaacccgactgcgaactttgaggcttgttgagtgtctcctgctaactactgccacctcagtcctgcacgcgataggggattcctatggtattgtttatttcatagataaggcttgttaataaactgccaggatgcttataatgagcaacgagaacaatcacaaaagagtgctgttgctatgcagttgaaccataggcctataataatacattagggacaaagataagtgtgcttacacatgccacagcttttgggtgctcttctaaatctctttattggctgaatctgcatgaagtggatgaagcctcttctgtgtgcagaagagggcatattaaaggggctgtagaaacaggtctcactattctcctcagagtatcgaagtactttttgcattagtttggcgctacaggaagcgaaaaaaatatcaggtaagcagtttgtcaaggttcttaaattttcatcagctgattaaaccctgtgactttgggtttacctcatgttattgaaccgacttcagtaaagggggatataaaattggaattaagtcagcaggaagttttaggggagagattgtgatattaatgagattgagggagtactcctttcagggtgtttatttttctaccctaaagttgcccctttgatcagagatgctttgtacggacatttatggctagaaccctaaaatctcacggagagtggaggaagaaagaaaagtagataaattactcaatcttactttttttcagagtcagggaatgagaccatgatctttcatcattttgttatcagatacccaaattgtatgaaatcatctttgtgtcctgaatgccttatgtctatttagatgctagcaaatatttgctaatagtagattaaaacacattttattt

SEQ ID NO: 121297 - DNA, 1933 bp, Homo sapiens
tctcaagttgttatgagttggctctagcatactactgaaaacaggtaacacttacagaacatgtacactgccttccaagcatagtataagtgttttctgtgaattatgtcatcctcaaagcaatgacttgaactaggtacttaaagtatccttattttgcagttgctatagttgaatcacatagtggttaaataacttacctgaagttacggtttgaaaacggcagagctgggattctaaaccaggccatctgtttctagagcctatgctcttaaccagcttgccatactgcctgttgaggttacagatattcttgaatgtgaggcagtagtagctatgataaattttaagtaaattactcatggttcagaattattttatgacttgtttcaataattgtttggattttatttgagttttatttatgacgaaatgttactatccttaatatatgaatgcttatataaatcaacaagaaaagctattctctcttcagtaggaaaacagaccacagacttcaataggcagttcataagaaaagaactaacaatggccagtaaacattgaaggcaaggacagtgtccattttgttcattgcaacattaacccaacccttgcagagtgcctctataaatgttattgtagtacctgttaattttttatacattttaataaagtacataaatatttcctgtccttttgcttatactaagctattttctaatgttgcctttaaataattgaatttttaaagaaagtgtttctgattatatagttagagacattttgttattaaaactccctaagttcaaacaaggatgaagaggcctaataaattacttttttcctaattataactaatcaatgtatgccgttgtatataatttcactaagtaaaatggaggttcttaaacttaagagacctactgaaattatgagaaatctctgtgtaatttctagaagctttaagttacaagtagtgatattttaatgcattgagctattttatctacaaaccttgttgaggaacagtgtaccctggaagttcagagactgatgtttttcctttgcggcttttcccagtttgccatctctttctcctctctggtagatgttttagccgtgtcagagctcaaatatacttctgatggatgttgtgaattattttgagaaataataaaatgtatcagaacaatatttctggtgctgacagctcctttttggagtttaggaatttgaaatttctgaaatggcttaaaggaagtgttttagttgcattactagacttgtcatccttggtatagataagcccttgctgtagtattttttttctgaagatggaaaagtcagtaagggtaaaggtgggaaaaatggacaaacattgattgaatgatgatccagggtcagacccagtgctaagtgtatacatgcgttattcatcaaagtaaaagctttcttattcagcaattcggaaaaagcagttggcgggggtggtaggaaaccagttcctatggaaagtatgcagttcactaaaaggtaatagtattgctctgtgacattgtttacatatcagagtactttgaaacctttgggatcagaacccttttctgtgttccagaaacatcccaaataaagttggccagaatattaagtttttggctgaagttatattactctgaattttatgttgatcagcatatatctgactgacaatgcagtgtgtcttatacttactaaaaaggaaaatcaattattatttattatgtttagttcatttgggagatgacacactcttcaaatcattggagctatgaaggatggagcatgaggtggagtaaaaggggtgtttactatggaaaaggttaatgattgttgctccatttggtctgtcatatgacttctcatgccatcacagatcaatgtattataataa

SEQ ID NO: 121298 - DNA, 1065 bp, Homo sapiens
tctagaacctctaaatataaaaggtctagaggtatactgctagggtcagcacatatatagcaacttcaggtaacaggaaatttaatgttacctattctatcattttaatgatttatttgaggatctgggaaatttttgttgctgtgaacttttactttttacttcagaggcaatactcttgattctgcctactcctttctgatggttcttcacctggcttcatacagtttctttacacacatatacatggtactcaggtaagaatgcaaccccttgcagatctctgggatttgcttttgtgcagtctcttttggttctctgctctgcaaattctagttgtcttgacctcctcagatgaactgtctcttcacctgagggagaactgctgcctccccctgcgtcccatcccctccctggtttcttcttcctgtaccatatcctggaaactctccaggcagtaagctgagggtaatagtaggactcaccttgtctatttctcttttctcagagatgacactcccctgtgctgcgtgttgtttattgccccaaaactgtgatttcataaatttgtgtctgtatatttagttatttacagtggagaataaatcccgtctctgtcagtatcatgctcagaggtagaatgtcctccttttctctttaaataaaattcacatgtacataaaatttgcatgaattttctttagaattagatagactatagaaatgttgtgggcttataatccgcaaagtctttaatatactctctatccacatctctcttaataaacgtggataaagtgcatattaaagactttgatgaaagtctttgatggaagacttggatggaagctctggactgagcttggtgatggtatagcagggaaaaaagtctagtctgagttcatgtatttgcctttgtgttaagctaaccctaaaaatattaaagttgggtcatagctggataattaagacatgataggtcagatttctatattttcctactaatgtgaatgttcctatgtgatatttaaatttggatcagtttagtaaaactgttttcatagg

SEQ ID NO: 121299 - DNA, 1061 bp, Homo sapiens
ctccgtctgcaatcccggcacctcgagaggccgaggctggcggatcactcgcggttaggagctggagaccagcccggccaacaaagcgaaaccctgtctccaccaaaaaaatacgaaaaccagtcaggcgtggcggcgcgcgcctgcaatcgcaggcactcggcaggctgaggcaggagaatcaggcagggaggttgcagtgagccgagatggcagcagtacagtccagcttcgactcggcatcagagggagaccgtggaaagagagggagagggagaccgtggggagaggcagaggcagaggcagaggatattttttatgtaagtctttttaatacttctgctgcttatcatggtgcttggcatattgtaaatactcaataattattttttctaaaaaggttgaatgaatttctactgcaggttttgggcttttaagattttctgaattcagtttcttaaccaagctaactctagataatagttccagtcaagtacactaccttcactaattttctcccagcaatttaaaaactgccaagcagatgaagtttgaagtaagttttgtaattttcaagaattatacaggccaggtgtggtggctcacccctgtaatcccagcactttggaaggccgaggtgggcggatcacaaggtcaagagatcgagaccatcctggccaacatgttgaaaccccgtctctaataaaaatacaaaaatgagctgggtgtggtggcgtgcacctgtagtcccagctactagggaggctgaggcaggagaattgcttgaatccgggaggcggagattgcagtgagctgagattgcggcactgcactccagcctgccaatagagcgagactctgtctcaaaaaaaacaaaaaaaaattatacacatttccttatttcatgctacataatttctttacgtggaagataggcaaaatgaactgttgccatagtgaaggacaaaattctagagagaaaagatgcaatttagataaaagtaacatagtgctggaacatgtggaacaaaaatactgaggggaggctcagaataggagtg

SEQ ID NO: 121300 - DNA, 1020 bp, Homo sapiens
aatgttaagcaactaataagtaatatgaattaaatctctaaatattgacttctaatatctctgccatgtagtttaaaggaaaattaaaaggcacatgattatgtgtttggctttcttgtaaaaaaagaaaaaaattctatatgcaaacagagagagctatgaaaatagagaaaccaaacttaagagtggttagctctcaagaacaagttttcttttcatctctgaatttgacattttaaaacatatttattacttctataataaatataaataccaccacaaataaagtagaaagtttaaaataataaaattattaaatattttcatgcatataaaatattgccagtttttgagaaaagcttcttccatgtgattctgacaggtataatttataagcaacattgtgggtattaagtgacattgacttaatagaccatctggtactttcataaacaatttatagacttattgtttgtgtggtcatttatggctgaggtgggccattatggccctagctattattttcagtgtctgatttgatcatacacttgcaggctgtctttctaggcaaagtacagtgggatgagaagacactgccttgcataattcagacatgtgtaatattggtccctaagaagggccatcctaagccaaaggatccgtttgttttgtttcttatctaactttacttttttcattcatttatttaataaattatatatagtgttattgagtgccatgacatatacaaagatgaaaaaagatgatgttgctttcctttaggagatctcagtctgttggggaaaaccagcatggtttgtcacaggacaattaaggtgctgtatatgcagtacaaatgaagtactctaagagccactttcttaaaccctttacctggtgagcccagtgtgttctgtacccattatcttgtttcacagttttaattatctgacagtagggatcaagaagttttagtcctatatagtacaacttctttttctgcgaattgtaatagaaatt

SEQ ID NO: 121301 - DNA, 2045 bp, Homo sapiens
ctcagtctttccctggaaaaactgggaagagatgaaggatttagaaccgggagaagcagatcttcaccagtttggaacatgtggtttaattccaaatacttattgatcctatacattaaaatatgctaaggaatcagggcctacagaaggaagaggaacacaggtttgtagcctctcaaagagcagagtttggtgacgaaagtggaccagctacactcattatatgtgagtgctacacaagaggagtgatacgagcatccaggggtttcacaagcagggctggcatttgaaggaaggcagaatttcagtgggagctggggaagggagaggctttgtgttatgtgtgggtggatggtgcagacagagatttttcttggttttaccatgtcatttggacaatctgaccttgcatttcaccttttgcattctaggaaaagtattatcacaaaattgaattactactttaatataaacaagatagattttgcttatacataaccggtgttgagttgaagattttatcctccatttttaagaactctgctttatcatacatatgttatgaaacctgagggtttagtactgagaaataagttttagccatggctcagcaaatgtaaagattggatgtgacactcttaatatggtgtaggaaactctcaattagattgatgatcataataattttagcactttatacttttttttacatatatgatacaatttgattcttataacaattctctgagatgggtaacataagtgccagtgcccttattttataggcaaggaaatcaggcttccatgattgcattgactaggtggtggactggggctagaattctggtcttctgatagccagtctagagaacaccatactgtaggtaattgtggctcatccttatatgcagtcaaagttatcattaataatgtggactataggtaatatatgtggtgagaagtaatagtctctgtttaagtaaacagcagttgaatattgctgttgttctggaattacagtccatagttaggaagaagtatggcttaccttttgtttaatgtggttttgggctaccacgtccataaactttggtgaaaagttctgttgctgactgtagaggatttagttacttgagggaaaaactccattattatctcttgctttcgttgttaattgaagtggctcttaaaattagagggttgtacatttagacagaaaaactatcctgttgactaaagatgtaatttctgtagtactcagtgacaaaggaggaaccatgtaagtacttggggaaaatatggaaagaaaacttatgacatatacttggtaacatttttggaaaataaagaagtggacaaaagtagacaaaatgagtaaaaatctgtaattcaattacctatatacgttaattttatgacatatgtccttttccatttcttttttctccataatatataacatttaaaaattgggactactgcgtgtacagttccatatcctgcagatgcacttaatatatcacagcattttttaatgccatgaaatatcatttcaaaccattttcatgacaatgcacaatgtgtggtaaacagtctgatgaaacatttaagcagttttgtatcctgacagtttttggttaatattattacattggtatttttccatgtaattacaagcttcagaaacacagtttttcaagataagaaagaagtcatatgggtgacataaaccaattagcaattaaatatttataagatagtgcctagttcatgattaagtagattcttgagttatatatccaattaagaaattctaatcactatgaattttagaaattcaacaataaaggaagcaactactagtactgaggagacctgattttcattcctaactcatgctaagtagctagttttggatggcttatacatgaaaatgaatgattgccaaggttctttatcatcctgttatacctgccttaattaattacttcattatttatttatttcttgagtgtttcttgtgtgccagcaactattttagattc

SEQ ID NO: 121302 - DNA, 1059 bp, Homo sapiens
ttaaaattgcaaaacagtaactaccatttatatgtcaacctactcatatgcctggcatgatgctgggtattgcatatgaaatacatatatgttatgtatatatgtaagtttaaagagtcgcatagctatagtggtagaaatggcatttgaacatcaaatgtatatttggcctaaactatatatttttagtgtcattatattgactgggagatactgcagaaatagttatgaaaatatatttattaagattctgattttgattaatactacaactttctcagatatgttaaatgcatgaaattaaagttaatagtttatacatttatagatattacttttattcaaatattagattttggaagtcaaactgttgtgtcttagttgtattatcaattctaatgattagttataaaaagacaataaaattttaacatgagcatttccagtgtgtatttgggtcgagaagattttgaaaagaactgtttttgtaaatgttaccaatgaatgtgactgctttgatacatgcctgaaatgtttcctggaaagaattgtcaaagagcgttgacaaagtcttgattttactctagtgggtgaaaatatttcccagtgaaccctggtattaaagatattatacaaacatactattgttctagtgcccctgtattcagtgctatggttttccatgctgggcatgccagtgtaatgatgtattttcttgattttggtgtgaaatactactacttgtctagtgaggtagatagacactgggttaataaaggcgggataaaatagggcatatggaatattctgagcagtagagattatgtaggtagtcaatgaattaggtagatctaagaactcaagtactgtggctcttcctacaccagtagtcttttaaaaaatgcacacattattttttagagcagttttaggtttatagcaaaattgagcagaaactacatagttcccatatactccctcttcctcccccatagtttctcatatttatatcggtactggtgtggtacatttgttggaattgatgaaccaatattgata

SEQ ID NO: 121303 - DNA, 1560 bp, Homo sapiens
ggttgaatttgctgagtgttagttaagattatgtttgactgtttgtaacagaaaacaaatgatactgcttagccaaataggtgttttctttttcttaggtactgagaagtcctaaataggcaaaactgggttgtagggtacccccatttgccagtagggactcagactcctctatttctgtgtggctatttatagtgtatcttgtggttgttttgtgatcacaagatggctgctcctcttccagcccttatatctccattccaggggacagctgttccaggggccatctctatctgcaggtagactaggaaatgtagatttttaagccggcttcatttagtgccctgaacaaaattgaagttttgtttgtaaagaataaggaaagaatggcaactggttttgcaatcagcagtgtctggcacatggagggcaaagtgtgctaaaattgggaacttaaaatttggatacatattaacaatcatcacacaatatatttgacttcactaaagtttgaagaagatctgagagcaccatgaggtttcttagtattttcaaaatgacgcatttgaatgttttatgttacaacatgggtttgaaaagtcattctcaccaaataattacgattaaattgtgtttattgcctcacacaataaggagtgtatatgagttcagaaatgtgggaaattattaggtattgttagtgaatttaattttaaacttctactgatgctcttttcagtttcttttgttcttagagagttatctcaacatttatttagcccagagactttaaaaagaaggcttatgctttttaaaacttctaggttttttttttgttgttgtttgtttgttttgtatttgaacaatttggagatgcttgttttctggctcaataactttttaggtaatcagtgtaaggacaggtggtgaaaacaatttattgtcttactgctatcttgtagtctgacaaagaagtgcttgtatttctgccgttgggtcatatgtgcctcaggatcctggctctgtggggagctggaatatttgaccaaagcatcttcatgcaattggagattatgaaaatatctgaagctatagaggtgataacaagatggaatatctaggctgtcatgttcatttctgttttagttccacaactgagtataaaagtgcacaagaacacacccaaatcatgtgacctggtggactaattgggaagaaaagatgatttgtagtttcgaatgtttgttatttcatattaactaaacacagatgcttctgtttcatggaagtctctctataatggctttgaataaaaaacaggaaagacttctgtgtccatttcttagctcttaatatttcagggattacattctacctatgtccaaggaggaatttcaggtaattatttgctgaagtatgtcattgtttcagtaagtgatcaaatgagaccccttcttattcattttttttttctgcttgtcctttaatgcaattttgtttgcttttgttttctgacttgcttcatctctcccaaaagaagaagcaaataattctgcttag

SEQ ID NO: 121304 - DNA, 1029 bp, Homo sapiens
tggtgacttgctgtggggactgatctaatcagaaaagaattgtaggctttgaatagggagtgtcagttcactaaacgttcagagtacggttgctcactttctgaaatcatgcattgttcaaaacattttatgttctcatttaaacttaaagggaagtcattttgattttatttctgacagagttccttggttacagaatgagtttgcattcatctagaatattatcaggttgccaagttatcatatgcctcagctgttgagtagtgtaagtggtggagtcagctggaaccaattcaaaatctgcctgttgtcagaaatgtagaattgtaataatctataatgttaggaattatgagcattagatttagaagtcgagagttttgttaggtctagtcttcagacagccttgagaggagttcaaatcagactctgtagaaaaacaagaaaagtggagagtgagcgctaattatttatggtgtagtcagtctattcttgtatcttgttttggtccattacttctgagcaaaaataggcaactgtttgctgaattagaataacacagaaagagctatttgctacaaagaagggtgcagtgttctgattcatattcgagtcctgttacttgtaaaatatattcatggaatattcagggacatctgattaaaaaaacatatttcttcagctgataccaaacttcggctgaataaaggcatttatttttgagtaaaacataattctttattattgtttaggctagaaattgtctacatcagaatggctttcttttatatctatagtaaattatccagtgtatataccgtgtaatacaaaacattcttagtagcttagcttaaaagatacagtagtatcttattttttttcttaagtgtaaggaaactaacccatatgctgttattataaatgattaattagttctcatcttatgaaattctgctttttgagtttatcattggaatatttgttttcccaacacattgttactttgtagtatgatgttaagtgagaaaa

SEQ ID NO: 121305 - DNA, 1022 bp, Homo sapiens
tccgtgcttctccccagcgtgctgctccttcctcttttccagttcccaaggctgtgtcttgctgactgcgatactgtccgggggttacgagggggagaggggaatttgtcagtcatcgcttagataaacttcggcatggcgggttacctctcccctgctgcttacctgtacgtggaggagcaggagtatctccaggcctacgaggatgtcctggagaggtacaaaggtatgtggtccctgccctggggctgcggagcttggcactgatcagagaggcaaccgctgcctttccttaatcagagccaccactccttgggcacgagtaaacaggtgtctggaccagtcttgggaatggaccaggtctttttgcacgggatttagtacccccagcgcagggaggatggtggggtgggcgacagtccggagacgcccttagatgagcggtagagaggggggaagggggttgtttccaagaagcacattgcgttttctctcccttgtaaaagctcttaagcactacgcgtaatcataattcttcctgggagggtggataccgattattctctatgggattactaaggcattgctgctgctgcttggctagggtattggttagccctgtagaaaaggttcagcatcactagatcattttccttaaaatgatctttcttatttgataaagtttgtgactatatacttactctgatatattgtaaaaattattttatagcgtgatggataaaagactttagtgagtttgttgtaaatttaaatgtaaagaatgtattttgagatttttttctgcccatcctttatgttcaggaaattctatgccaatctgatatttatgttttagtataatgtttacttggacttcatagttgaatataatgatgaaatacaaattgcagctgtccattttttaagtgtttttgtgtctggaaatgtatttttaagtgtgtgtataccatctttttattgtggctcccaaaacactccgaactcaagagcagctcacagag

SEQ ID NO: 121306 - DNA, 1037 bp, Homo sapiens
gtgctactgggtgtcagtctctgatgaaggctcagacgtgccttcaatgaccttactcattgtaaaggagacatttttgagagacctatgtctatacatgtgtggtctgtaaatgaatgactttcagggacttaattgctaacccttttatttcaagaaggtgtcccatatgatgcctggttgttactttatgaactaatgtgcatacaaatgcatatcgagctgtaagaaaactctagtaaccttaaagacttactgggacagtggttcaaactcagattataaaccagtggtcaggatagaaaaaagagatgtggtcttgctttgtttggagtaacagaagtaggccaattgctgaggagtgctccagttctatctcaagtcagtttttttttcccacgagtacacaattttttctttcaagaggaactcatccctatctaagcattaatggaaaatggtccatagttcacaacacccaacgctaacaaagaaataaaaaatcatggagggcaaaaggtcagtatatgtgaaaggaggaaatagggaaggaagatttagacaagacgtgaagttgacataggtcagactgtcaacaatcagctgatttatctaataatagcagtagcaatgaggtatcatcctgtcactgtactccagcctggatgacagagtgagaccccacctcctaaataaagtagtaggtgcagcagctaatccttatataacaccagacattattctaaacttcatttactatacaactttatgagttaggcactactatcgctgttttactgatgaagagagtctcagagaggataagtaacttgcccatgtgacacagtaaggagtgaagattctatgtacagcagcctgacttcactgttttttttttttttgagacggagtcttgctctgtcgcccaggctggaatacggtggcgtgatctcggctcactgcaacctccacctcccgggttcaagcagttctctgcctcaacctcccgagtagctgggattataggtacccgccac

SEQ ID NO: 121307 - DNA, 2479 bp, Homo sapiens
ttagtattttcatttgtttttaaggtcctaaaaatagaattgattgtgaaagtgtctattgagtcaaaaagactatgtggtctgtgggataccttaattcacccacatttagcaactacttattgagcccctgcaataaaatgaagattagcatacagttctgcctttaaaaagtcatagtttcaaaagagattggtgaatggacacaaacttacagttaaaagaaatgagtcctaatattccatagcagagtaggatatctatagttagcaataatatattgtatatttcaaaatagctagaaggaaggacttgaaatattaccaatacatagaaatgataaatgcttaaggtggtggatacctcagatactctgacttgatcgttacacattctatgcatgtaaaaaatacttgcagtatggtgccctcattaatatataaaatatcatgtatcagtaaaataaaaaagaataagctggaaaataaaggtcatagtctaatatgataaatggatgtgttgttaaacagttacaacgcggtaattattagttgttacagggattagttgagatggctataagcacctaaaattaaaagaacccagaggacagtgtaattaacctgaggggagaagggaggcatgggaggttcctgaaaggtttctgagaggaagtgccacttgaattgagatttaaagagcttgatggaattagggtgaaagggaagcccactttagagggatggaactacaagaacaaaggtagggagatgggtgtaaatgggaactgcaagtaaagtgtgttgctaagtgtgggatttggaagggaaagacagaaactgtaaagatgtttgtgtacaatcctgaggcaactggactatttatgttgtaagtgctagggaaccattgaaagatttttaagcaatggaatggcataatcaggtttacggtttggaaagtcatattagtgaaggcgtcacatgtcttaacacttcttattatttatttgtttatttaaaaatttatttatgagttgagggtttgctctgttgcccagggtggagtgcactagcatgatcacagctcactgccacctctaagtcctggactcaagggatcctcccacttcagcctcctgagtagctaggactacaggtgtgtaccaccatgcttggcttattaaaaatttttttttatagagatgggttctcattgtgttgcccaggctggactcgaactcctgggctcaagtgatcttttctgcctgggcctcccaaagtgttgggattataggagtgagccacagggcctggccaacttcacttttttttttttttttttttttttgagacagggtcttcctctctttctcaagctggattgcagtggtgtgatctcagctcactgcaacctctacctcccgggctcaagcgatcctcccaccatagcctcccaggtagctgggactaaaggtgtgtgccatcatgcctggctaatttttgtatttttgtagagacaggcttccaccatgttgtgcaggctagtttcgaactcctgggctcaagcaatctgcccaccttggcctcccaaagtactagtattacaggcgtgagccactgtgcctggcccaacttcacatttttagtctttagtgcttttgtatctgttgtggtttcatcatattaaaatctgagactatagtatgtttacttcttatctcctagggtcaatgtgagaataaaacaatgaaatataaggaaaggggcttttaaacacccattgtataaatgctttttacatatgagcaatacagatctgctgttgttagctacaggatattgtaagttgggtttttcagtcataaactacctgtaaagttacatggtttgtcagtgataatgctattttaagaaaaggatttttgtcctatccaaattcttcgaagttggaattgaaggatcaaaggagaatcagactttgaactcaggcagacttggttttaattccttctctgtccatgactagttgtgtttacttggacaatttaccaaacttatcttagcctcagtttccttatcaaagggtcatggttgtggtgattaaatataatagtgaatgcaaacaattctgctacctccttggcacatcaaatgctttataaatgatagcttacccatggccagatgttcttctaagcacttaatatggtatcctatttagacctcccaagaaccccatgaagtaggtactatgattttctccattttcagttcagaatctgctgagaaaggaagaaaaactttgccaaggttgtagtgtcaagaagtagtagagctaggatctgaattcaggcagtctttactccaaagtccaagctatttactgctacgcttttgcctcttctctatggaatacactattattattagcatattgacccaatgttacccttccaagaatgcatggggtaaaggctgtt

SEQ ID NO: 121308 - DNA, 2868 bp, Homo sapiens
aataaggacagataggaagccatttttaggaagatagaaagcagccaaagaaacccaataccctcttaaaagtctttaagaatgtcacccttttatgcagagccagccaaaaacaaaatctcagaaagctcaagatggattttcagaaaagcatggaaaataaactgggttgataatagcatgctgtgactgacctaatgccactcacaactccctatggattgtagctacaatacagaaaatcaattttatttactttttgcctcaagtttgcctaatgccttattgtcattagaaaaatatacagactgtaaataaataaattagccaagatgatgaaattttatgtaaaataaaatggaagacagcttttttggggggaaagaatagagagctacgtcttacatacctcactttgtgggaaatattacgtgaacttctaaaataatggggtttacacctactatgtgcccacaaaaaagaaaaataaataaaataaaataatggtgttgaccatgcatagccacaggcctaaacagattgaggtaaggttggtagtcctgatgcaattagagtttatttcacgtacctagggtgagtgttttgggatgtggctcacacagcctgtttgtgctgcagttgccactgcttttgtgggaagcccagtgtttttgctcaaattggagcatgcctcactgatttctgcctgtaacttgcttcttaggaatccatggctgcaagttacatttcaggaattcgagttataccagttttgcatctttaccatgagtctcagcgaagtagaattctcagtaggaaagtcaagacttccttttgatatgtcgttatgtttataattttgcagcagagatagtcaacatccttgtttccttagtaagccagtggctctgtaaataatcacaaacacaacccaacaaagaaggaaggaataacatcttgtgccttttccctctatggaagatattaacacttttatgcaagacatgaccctacagatttgctccagctagatgaagggaggactaaccttcaggcaaagtgctttggcaaaagcatcctgtttctcatttcactgtgtaatgaccaggagctgagaagagctctgtttcctgtcactgcgcagcatcattctcatttacattattggcagctgttactttgctggaagtttaaattatcttgagaactctaaaccgagttcagatgtttgtttattggtgctgccataggcttctgaaaacagtcttttgtgttctcccagtcttaagaaaaggctcttctcagaatcagcccttcctccctccttgctcttttctgggaacctgcttcagtctcatgaagaaaattaaataaagaggacaggggcttaaaactggtcagaacggagtctccagtggtgaggtgacttgaagcggaaaggagttgggactcaacatcctgcatttgtgctttgttttcgaaacttcgagttagttgcattgatgaattaagcagcaggctagtaatggaaaatatttctactgtcctggtgggggagccaaatactataggtttgtaacaggaaggctgttgattctggcttcattgttgggccagtcatttgtgagctggtggccggaccacaggccacacacttcttccgtgcaaatcttcatgtattgaaactgcctgtgtattgtttttacgattggagacttggccaagaaaagatggtgagctccgggttttatttttttggtttctgcatattccctcagctccgaggatggtgcaggatatgccagacccagtttgggggcagggagggcggcggtggttggtgggggagatgtttaaatcattgagcatatgtgagtattttgctgttaatgctttttctgtgtcattctctgtagagttccgggaacgcgtcctatcgctgctctatgtcttcctctgcggatttttccgatgaggatgatttcagccagaaatctggctccgcatccccagctccgggagacaccttaccctggaatttgcctaaacatgagagatcgaaaagaaagattcaagggggctcagtgctggaccctgccgagagggcagtgcttcggatagcaggtaagagcatctggggaaggggatggagtgggggaagagagttgcggaaattcgcccatctacctcctggggggccatagcgggagctgatgcactgggcaggaatctgtgctcaaggtgggggaggatgatgaccatgtttactttatgccttgttttaccgatagagccatttgccctgcctgctggtgactaagctgtttggccctgccttctggttggacgaatcgattcctttgaaatgcaaggaaatatttacagacatttgcactaaactttcctaattactgcattagttaccataacattctgaaagtattagctccagtgattgctagtatatttgcgggaagctggaagtgagcagcctttattttcatttttgcccaggggcactgagctacgcagattgagaagatccatggtttttggtacccaggattgcaaagcatattccagcaacttggatgttgtttttctttaaatgtagcatctctgtctgcatcattgtatccatagcagctttctgtccttagtgcttttgagggtttggccatcacgccttcctgattaattaatacatgagatgtgccaatgtttctgttctgtgttacccggtgttcccttgcattggccctaaaagctgaaccagaagtgatggcttgttttacccagctgaaagctgagaacactgtggaaatcaaccttccaacccctgcgtggtttgtgtgtatgtgtcctgtg

SEQ ID NO: 121309 - DNA, 1057 bp, Homo sapiens
gagctatgatcatgtctctgcactccagcctgggcaatggagcaagaccttgtctcgtaaaaaaaaaaaaagaccttgctatttcccctcaattcttcattttgaaaatattcagatttatagaaaagttgaaagagtagaccaatgaatacttattgttagcctattatcacatttaatacttttccttgtttttattgaaacaataaaaataagtgcagacatcttgggtttcctcagcctgcatcttctatggataaggacactttcctgcataaccacaatactattattgcaccttagaaaactaacaataatttcctaatattgtctaataaacaacccagttccatgttcagatttccccagttgccccaaaatgtctttttagcttttgaaaaagaatcaacccagaatccaaccaaggttcatgaattggttgtgtctcttttgtccttttaaatctagaacaattcctcctttttgagtgtgtatgtttcatgtcattgacctttttgaaggatctaggacaattgtcttgtagaatgcttcacaatcaggatttgtctgtttccttgtgtgctttctatttttgggttttttttggtgaatattttgaaatacacatacagaaatgtgcttaagttataaatatgtgggtatgtgggtttatgaaagtttacttttcagcctctgggattttaaacttttggctactttgcaaacccttgtctctgcacttttctccgttgcctgtagagaatgcctattgccaagacaatttcttggcactttcctacagatcagggtgctaaggctgggcggcatccaatttaggcagttccattgtacttatctcagatcccccaccggggtttcagttaaagaagttattgttcagttccccttctaaaaatgttgcattatgtaattatcctggctttaggagatttgggttgtctttataccatgcgaatgaatgggctatcaggaaagtcattttaaagcttttggtgatctaattcaattgttaaaactgctttaataactaggttgt

SEQ ID NO: 121310 - DNA, 1036 bp, Homo sapiens
tctggggtaagaggtgttcccttgtctttttttcaactcacctcaggttctgactccccggtctccatgaggccaggcctggtgttccccatttcttccacctcagaattgtgttaaggttctggggtcctgtaagatgcataccacggtgtcagggaatgggagggaacatttgtgcctccaggttatgcccacctcaaaagattcaggcttgtggaaaataaaagtcaggtattcttgcaggctgtttctgcttcccgtcctgccatatagcttcctctaggggtaaagcaaggaagggacaggtccagatcacctcaggaaagagagataaaatgaaatctactggggcctttagtgcagatacgggggctttgagccacacagttgttccagatggatctcaggtgttctaagaggaggatgtgcaacaaatgtcagggaaaacccaaatattgttaaggacatttggaatgaacttagcatttattcttgagaggaggctgtggttggattggtttgctaccatgcaatatgaagcatcccacctgagcagagttttccaccaagccagctcagagggatcaggcactgatccctggttccgattgggtgcagcttaaggtagcagcagaattgttttcactgaatgtacatggaacagccctgctttcctcagaagagggcagtgggagtgccaggcacttaaagtttcatagactttgcttctgtgcagtaataaaagtttttgtttttaatgaaaaagtaattatttcacttaagtgtctactgtttgtagtgaaagagtaagtgtgtaaaagctattatcaaaagcaattttctgaagtctcattaatgaagacaggtaatgaaaatggaagcataaagaagatataaagacataactttgcttatgtgtcaatagagaagaactgaatatctataattgcttttttttttaacactaacatgtttgtctaagtttttgttgtctccagtaatggagacaatgaatttaaaagaaaaaaaccttctg

SEQ ID NO: 121311 - DNA, 1074 bp, Homo sapiens
agatacagacatggaaataacctttataaattaccctttaaaggagtttgcctaagaagagacaggaatttaggcagtaagctggggaggatataggattcagaaaggtctttcataagatgggagacatttgagatattttagggagatgaaagggggcctttcctgggcctggacagagtgcaggtgagggtaagagtagaaatggatacatttggggatagttagaagttgttaaagaaaaacagtgctgagaacccagttgatgttagatggttggacatttgtcgagggattaagctgcttcattgagtagtgttttcaaagcacatttcagccatttagaattgggagttaaggtgaatgtttcaactgatccaagatagagggtggacttgatagctctaaaggaggcagctgggatattgatgtcaagagaatgcttgaaatgatgcatcatgaggcttgatgaagaagaacaggaaatcttaacggcagtccaggaacagagcattagaggtctggattagcttgaagaggagtgagagagctggagagccaaaaattggaggtcacatttttggattacagtgagaggtctcagagttggttcagtaccaggtgatgtgatcatccagaatggggccatggcatgctgggagaagaagagagaagataaagattatttgaactcaggaggctaggaacttttgtggctgaggtgttggctggcccatccacattgaatgtggaaatcttcccagatgactacactcaaagtgaagaagaagcaatgagtcaggttccaaagtcctcagcaaatgagggagtgtgaccagaggtcagacagtgacaattcagggaaaggaagagagcggcattggatgatgtttccctccgggatttcgatgagacatgcaggagaagcagaagcctctgctggagaggtgcagaggtatagagagcaggcacttaacaaatacaacgtggaatgattaaggtaaggcaagcagtggagatggcactttcgtgaggagttagagcttcctgacaattaaatgaaggtttcaaagg

SEQ ID NO: 121312 - DNA, 1039 bp, Homo sapiens
agctgggataacaggtgtgtgtaccacgcccggctaatttttgtatttttagtagagacagggttttaccatgttggccagtctggtctcgaactcctgacctcaagcgatctgcccaccttggcttcccaaagtgctgggattacaggcatgggccactgcgcctggcctaatatactgctttctaagaaacgtactaaaatggtttctccgaagtaatttcttcattgtagttctatctcttattctgactttagtaatgagaagaattacatcattttagaggaaagagactgtattttgtgttctaaaccttagcaccagagaattgtaagatttcaatatatttttaataatgaatctctagactatttttctgaagagttatcgcttaactttagctaagagaaaattgtaaggtgagaagtcagggtgaagaatggataaaaggaaaatcatacattcagttattgtgatgaattaacaagttgggttgtatgttacatatccaaagtacctttctggatactcttttgaaaggtacctattcattgtgggaatagaaattttaaaaatgtctttatcatatgctacaatagcacctactttagtaatgggctaggcccagtttaattttgcttgagctatgacttaaaccttttagcaaacataagcactatcatggaggggctaagagtgtgcattctggaactatacagcctaatgtgagtttaaattctggtttcagcacttaccagctcagtgcctttgggcaagtgagttacttaatttctctgtggctcaggttcctccagtttagaatgggggtcataactttatagtgagtgttattgtgtggattaatctatttatagatttgaggaagcaagaaaatttaatcatggtatactacttaattaaggagtgaatgatataagatggaattaaccataatatcactgaatatggatgtatgcaaaaattctgtaagaaaggtataattctttatctatcttaatagggactgaatagataataa

SEQ ID NO: 121313 - DNA, 1010 bp, Homo sapiens
tgatgattgtgtttcaaaaaaatcaatctatggaaattgaacaaaatttagtttgtgctttgggagatgagaattcagttctagaaatgacagtaatgtttcaggaattttttttttttttttttttttgagactgagtttcactctcattgcctaggctggagtgcaatggcacgatctccggctcaccgcaaactccacctcctgggttcaagcaattctcctgcctcagcctcccgagcagctgggattacaggcatgtgccaccacacccagctaattttgtatttttagtagagacggggtttctccatgttggtcagggtggtctcgaactcctaacctcaggtgatctgcccgcctcggcctcccaaaatgctgggattacaggcgtgagccaccatgcctggctgtttcaggaaaattatagctttggagtagtacttcgtagttaagtagcacttcatactttcaaagactgctcatattcattatctcctgaacaaacaccctgtgtgttgggtatggcatatattattgatccagtttgacaaaactaaacctcagtgagtaggtgattggcttaagttcataaggtcagttagaagcagacctctctcatccttgcagtctgttgtctcctgtgtttatcctatgtttatttagtctttatctctgacaatgcttagagaattgggtgagaacttccagggagaagaatatagattccatttgactggaggaattattcagtatcccaatgtgactcattcccagggagtagctttacatctttgagagtctgctcacagcctgcattatctgtgttggccaccctaggctacctgtgtattggcaagtccactttggtctaatactatcaagcccatgctgctcctccacacaccctattcaattatgaattggtaaattagataatcaactctgatactgggtaataccactggctaatctacattgacccttgctacatgcagctcagtattact

SEQ ID NO: 121314 - DNA, 1084 bp, Homo sapiens
tatggccaggtgtggtggttcacgtctgtaatcccagcacactgggaggctgaggcgggcggatcacgaggtcaagagattgagaccatcccagccaacatggtgaaacccgtctctactaaaaatacaaaacttagctgggcatggtggcacgtgcctgtagtctcagctacttgggaggctgaggcaggagaatcgcttgaacccgggaggcagaggttgcagtgagccgagatcgcactgctgcactccagcctggtaacagagcgagactccatctcaaaaaaaaaaaaaaaagatttcatttattataggcttgctataataaattacagtaaggtattggaataattaatgcacaggggcacaagaatgtgcaaggtaggtagactgtattgaatgaacagtttagtctctataaacaactcatgaaaccaagattaacttggtaaagggattcatgtgttctgcttggagaaaaataagcatgtgttcataactcatgattcttttttgaggtcagtattttgactgaagcaagacctcttgccattctttctatgtctttcttgtatgtgatgacaacctgttgtcttaaataaaaaaaaccttaaattctttaatctccaaaccaaggaaacttaaagaaaacatttagatagtcacttacactttgaaaattttcatggacaactatggatcaaaggactgaaaagaaagccccttcaaagatggtctagtttattatttcacctctaaccaaagaaatccttaaattgctctggtaagatgggtatagcttcctttattttaaaggacacagccatagcttacctcagaattctgtttggaatttaacagccatctctgcctgaaacaactccttgatctttgccctaaatcccatgccttacaatttaagaccatttcttattgtggtatcctctgtggagaggatgaagcatagccacctgctaccgtgtcactctcagtctttgtgaatcaaagaatgttaaagcttgaggggatcttagagctcatctgacttaacagtttttgtaatgctagattcctctctgcttca

SEQ ID NO: 121315 - DNA, 1039 bp, Homo sapiens
tgattatagcttggagatggagtaaaaataaatcagttatggtgattcaggattacttgaatgactttatatgaagcactcaaggcatttctagtggcaatctaaataagaaataggcccatgagtgagaaagactgaaaacagaagtaactgcaaaggagatgagtcagaaagcgtgactgtgcagttttagctactttcagtcagaccatcctcttgaagtgttatgtgaaatgcaaatactttagcatccttagctgttttaacctatttacttattctggatttgtaagctatatgcaaatatacctataagaatttgtaatggggatcactaataaaaacttaataatatctagattttttattttactccttgttttagatgtttctaaaagtggataaactaaaaatttatcctgatttcctctcagtacatatgtatttggatttatactgtatattaagatatgtcactaggatgcttaggaattttttttaccatcttgaaacagaaaagataattagatccagatctccatttattccttagtattttcacattacaaagcattttgttttgtttctgaatcccaggatttttaaacatcatcatcatcatcataagaactcttgcattactgcatgtttacctcattgacaatacatgggcattgttctctgcactcttctctgtttttctctcattttatcttctcagcgattctctggagtcggtgctcactttccagggaggaaatgtgtcaaggtcatacagctggtagatcatggagttaacatttaaacctaggcactcttggcttgagccgtttttgagtaaggaatggagaactccccatgattacaattctagtgctagacatttatcctcatcagccttcctgaagtattttaattactttgagtctcatttttctaactgcatagatggtagatatggatgaaatctttgtgtttttaaactattacatcaattaaaacctatctttaaaatggtattgaaaaccataggtaaacc

SEQ ID NO: 121316 - DNA, 1031 bp, Homo sapiens
ctacactctacttcaggccaaaatggaaacgcccttcttcacagtctccctgatgcttcagtcaagcagtgtgcccacctgctttttttccctccttttttttttttttttggactggctttactcaattaagaacacttcttaatgtagaataactctgggccctgaaatactggggtgctttaaagaacacttgtggggaaaacttaacttgcacgttaagcctcctccatgctcactttgggagtgcacgtgatctcactgaatatagtgacttttggagctctttgtataactagccatggagaacttccagactaactcaatacaaatctggatttgcttggttgtgttttctgccacagggattcagagcaagccctcggcatcttagaagacgagttgcagcggccgcagctgcccgtctggaagaagtgaagcccgtggtggaagttcaccatcagagtgagcaagaaacttcagtgaggaaacgaagaatcaagaagagcagccgagtccagccagaattttatcactctgttcaaggtgcttcaatcaggaggcctgtaagtagagaactgtcttttataaaaatattaaattcactgtcaaatcatgtggttgttcttttagtttaaaaacattatcagattaactttgaataattaggttgttgttattcccaacaagtggcagcgtactcatatgagtttcagcaaggaatagggtttcatagaatgttctaggatggatagatagttgacaaaaaagcaagagttagtcactgtcaggcagctgatatgaaagctggtgaactcccagccctgctgaagctggagttctagaatgaggatggggacatagagtcaacaaatctaggtgtggtaatgagagaactgatgaagaggatgacaacaaaaccagtgtcaggataggagaagcagtgaaggaaggtggggctggagtcttgggcagtagcagtggctgaactcctcctggaggctcttgagccagtgaggcctgtgcgtccc

SEQ ID NO: 121317 - DNA, 1068 bp, Homo sapiens
tgtgtagtataccacagtgcttataaatagttattttaaaatagtacaagtaaatttgggtataaaagaaataactgaggcagtgctcagatctggagaaaaaatgttaaggtggaatgaagatgcctgaagtttaggaaagactgatttaagtggtttagaatttttggccgcatgcgatggcttacacctgtaatcccagcactttgggaagctgagctgggcagatcatgaggtcaggagtttgagaccagcctggccaacatggtgaaaccccatctgtactaaaaatacaaaaattagccgggcatggtggtgcacacctgtaatcccagctactcaggaggctgaggcaggagaatcgcttgaacccagcaggcagaggttgcagtgagctgagatcacaccactgcactccagcctgggtgacagagcaagattctgtctcaaaaaaatttttttatatcataaataattctgcattgaatatcttactgggcactcttggtagaatttctctagggtagatacagggatgtgaattcactgagttattgttttgcagaatggctgtgacagcatgttttaatctctgtcatttggttactttagcgaagttttatgcagtttttctccctaagtgtttctagaatttgtagtccactgaggactattggtaataataccagttaagcaaaatctggttgcttattactcataagagaatctacattcttaccaaagaaatgtactgaacttactccactattacagaagctactatatcatcaaatattttgttcattctaccagaacaccaaatttctgaattagaatgcagggctatgggagataatgccatctagtggtcaaactaaactctggttcctagagattcttagtcttcaaagtgtagaaaaattatcagagaagcttgttaaaaaatgagattgagaaggaaagacagagagagagagagagagaatgaatgtgtgtgtgtagagggtggagggggcgggtgggtggatggggaatgtccaggaagctgcataaaaagcagcctgtatg

SEQ ID NO: 121318 - DNA, 1056 bp, Homo sapiens
gtgagataatgcatgcatagtatttggcacataggaaatgcttgataagtagaaataattgttgtttatggagctgtaaagaattaaagagagttgaatgtagttaggagctgaacaatgctggaaaagtgttagataaatgggactcagattctgtttggctatgtaataagatgtgtcaatggagctctttttgtcttagttttgtttgaggccccaatagttgtagtcagaaaggctcacattgccagagagaggagtagagccctatgtaggaggtagctataaatttgattttgccaccagctctgtggtagactgtgttttgctcaccaatgtctgtgttctcttattcttggcacataactaattttttagcttcccttgcaacttggtgatgaccttgtaactgggttctagttaatgaaacgtaagaaatgatgtgtgccatttacaggtctgatgtactgaaaccatgcacacaatcctggccctagtttccataatccagcagagtggagaggatattgagaacctaaaaagccatagatggaaggtgcctggtgttctaaatgactctgtggagcagagcaccacccccacttgctgatctatgcgtgacatgagcgaggcataaacttttattgtgttaagctcctgaggttttggtgttgcttgctgtagccgttagtctatgctgatagttatagtcagccatcaccgattttaggtatatggataaaggctaaggtttcatctgtgagaggttaaagaagtgctgttcagtagaactttctgtgagaacacaaatgttttatctgtattatccaatagggtctctactagccacatatgatattgagtacttagaatatggctagcatgcttgagaagttgaaattttaatttaattttaattaattaaaatttaaataaaaatatgtggctggtagctactctgttagacaggtcaggattagagactggggaatgtcttagcagtgtgctgcgcccgaccccaagactccataataattccaaagggccagagactgt

SEQ ID NO: 121319 - DNA, 1097 bp, Homo sapiens
tgaggcaggagaatcacttgaacccgggaggtggaggttgcagtgagccaagatcatgccaccacattccagcttgggtgacaaagcaagactctgtctcaaaaaaaaaaagaaaaaaaaaagaatgtacacctgaacctgaaatgtcataaaaagagcaatgtagaaaacatatatataaaacaagatcccatttttgttgaattatttttataggagaagtcaagatgataggaactaacatcacagtgattactctagagggatgtatttgaagattcaaaacagggacattcacacttatttatagggttcaaaaaagggttgcaattttaggtggatttagtttctaatttgtttttttctgaaattttcacacaagtagatctttaaaaaggaaaaatcaaacccaaagcatattgagagtctattttgtgcccaaacataagtaggagcaatgaaggacacaaagatgaaaaagaagctgtccctccccttcatatccatgataagtcaaactgtggtaagtgctatttaaaaagccacattgaaataaacttcttttaaatcagtctactgggaaaagtcaacaggaataatatgattcaggttaaaaagttcatagctcttgcctaaataactgcaagaggggcaagagaaggtaacaaaaatctcttcaaagcttttagctactgatctggattcagtaacatcatcttaggaaaaggagtcaatacaaggtgacttcttatgcacagtttatgcagatatccatgtaatgcattgtcaaagacagagcagaaatgaacagtaaaaaatgctgtagccaccacaaaatggactagccacaagcatttctcacaaacctttgattaaccatctttgtttaaaacctgctcctgttggctttcccttctgctttttctctgtctttactcagcataaattatcagaagattttaggtcatgaaaatattttttctcctttcttgctaagtgtgtcttcagagtaagcagatttttgagagagaatgtgctgccagaaaaagcatttaagacttgaacacagaccaaatacacatttgatctatgcaagg

SEQ ID NO: 121320 - DNA, 1105 bp, Homo sapiens
gttgggtgataggtacttagggttctttttaaaatctttttatattttggaattttctgtaataaaaagttaacatatttaggaaattaaaaaatgaatacaataaattcattggagaaaggatagttaagtagatgatgttacccacttggcaggaaataaaattagttgtgtctctcacactatacttaaaaattaatttcagatggattaaaatgtacatatgattaattccagatggattataagtgtacatttacaggatttaaaaaaatagaaggtataggagaatgttttataattttgcagttgggaaaagctttctaggacaaacatttaaaagtcataaaggaaaagattggcagttttgaataaaagaattctaaacttatgtacaacaaaatgaaaagacagattgcaacctaggcaaaaatacttgctgcatatatagtaaattattttattcatattatataaaaaacttctcaaatcaataagaaatacatataagttgtacaaaaatgagcaaagcatgtgaacagacaattcagagaagaaaataattcggagaaaaaaatggcttataaaaatataaaaaataatttaaaaattcagacaattcagagaaaaaaatggcttataaaaatatacaaagatttttaactttactaataaataacgcaaattcaaactcactccgtcacccaggctggagtgcaggagtgtgcgatctcagctcactgcaacctctgtcgcccgggttaagcaattctcctgcctcagtctcccaagtagctgggattacaggtgcatgccaaaatgccttttgtccatcacataggcaacagatataaagatttatattatccagtgttgatggagataatagaattaaaaaggcactttcatagtgttgctagaaatgtaatttggtacatttttagagacaaagttggtacctgtagtatctctcaaactttttcctacggactggaaataccacttctaagtaaagaagatttagttgaagatattttgtttattccactgtttatactggaaaaaaattaaaatgtccgaattctagtcagtaggaaaatagtta

SEQ ID NO: 121321 - DNA, 2057 bp, Homo sapiens
gggacttgaaccctctgaagccacagcactctttggggacacagagccaaaccatatcagcccctgagcttccaaaataccctttgcctttctttcccaaacttctaccctcaactccaatcaaaatgccatttctttactgaggaatgcagctagatataattaggagattatcacatcaacctaatttatgccaggctataaatgactgacagtgaggcagcaggaagtgttttgattttgaattccacaatataagtgattgatttcgtgttcaaatttctgactgtgtatataaccttctctttcacattgtatattaatgacatcctaaacatgttttcatgcaagggttttggattttgtcatgcaatcgtgacaaaggaatattctgagagctgcctgcctgtaaccagtttcagcaacattgctgtctttgttcagcagcatttgtgcaattatttgaatattttattgctttttcatatctttcttatataaatgaatgaacactagaaaaattactgataatgctggtgatgggaaattaggtcttatatagcaattcacttcagataaagatataaaaaatcaggtgagccagaaagaagaaattcttagcttcaagtggatactctctgaattaaagcccgtctagaatctgttttattggtaggaaaagaagcaaaagcaaggaactgtatggaattctggaaatctatcattgaatattgtatacaaaaaggaagatataactaaagatttttaatcctatattttagtttttgggccctgaaatccagtttctcatgagattcctacacatttcatttttttgtgtgttttcaagaaaacattttacacacaagacaggctgctgataaaaggttaggaaaaatgcctgggtttccttcaagctgtcccttcttcgaagtcattaattcttgccttagatcttttcaacaactggaatctaggtaatagctttgctgcaactactttagtagatcccaaagttagggccctgaaaaaccaagatacggcataggcctgttggctaggcactgagtgctacaagatgaggccagaggtctgcaaaccatcatcaccttccttaccttttggtgtccttacccatacacaattaccagatcctggaggctagctcactttgtgccattagttctgaagggcttggtcttattaacccaactgagaggagcttctgtcagaaacttaaatggaatacaatcaagttgaataagacttgtctctacctttgaggagttctcttttcatttcctttatcttacagtgatgggtgatcagataagaaatgaatcattcattgaatttagtgttgatgctcttttcttctcttgatgcttcttttcttctcttctttggctatgcctgcatttatctgaaagttttctatacgttttatatagaattaaaggtaaattgggtttattaacattttatatatgttttgtatagaattaaagggtaaattgggggattaaaaatttagtgtggcagcctttgctgttattgtttttatttgtttgatttttgagaaggtaaaacatttacgtgattcaaaaatcaaagcatataaaagtatatcagtgagaattctttatctcattcttgttttttatttctggaagaggaaatctaagtaatgactattcttagtttctcttaaatcctttcattatttttccatacacaaggaaataaaaatatattttattttaccctttttatatggatagtagtatattgtatacactgttttgcatcttgttttattcactcaatgtatcttgaagagctttccatagagaaatacttctttttgtaggtgcatagtattctattgaacgcatgaacataatttagctaatcatccgcctattaatgtatttgggatttttctaatctttcattattacaatcaatgctgaaatgtaaaaccttagccttttacatgtgtgcaaatgttatctgtgggataaattcccagaaggagaattatggaatcaaatatt

SEQ ID NO: 121322 - DNA, 1044 bp, Homo sapiens
agtcttttccaatttcttggctttcatatgtatggaaattacttctaccagacgtttttaggcccaacttagtttttcaaaaatttcagactgggtgctgtggctcatacttgtaatcccagtgctttgggaggctgagacgggagggttgcttgaggacaggagttcaagaccagtctgggcaacatagtgaaacaaaaaataaaaaaattagctgggcatgatggtatgcacctgttgtcccagttactcaggaagctgagataaggaggatcacttgagcccaggagtttgaggctgcagtgagctatgatcatgccactgcattccagcataggcaacagagcaagaatctatctcaaaaaaatttttttttaaacatatatatatatatatatatatagagagagagagagagagagagagagaaagagagagagaggtgtaatttctagttttagaatatttttcgtcatccccaaaagatttctcatgcctgtttgcagtcaatctctgttccaatccctaaccccatgctgctttcagtatctatagatagtgcctctcctggacattgcatataagtagaatcatataatatgtagtctttcacatctggcttctttcatgtagcttaaggtttttgagatttgtccatgttgtagtatgtatcagtagtttgttcatttttattgctgaatagtatttcattctgtgaatataccatacttgatttatccatttaccattgatggacattggcgcttctccctaatgattagctattacaaatagcaccgctgtgaatatgtgcttaaaaccattgtgtggacatatattttcatttctcttgggcagatacctaggagtaaaattgctaggttgtatggtaagtttaatttttaaagaaattctccagttgtttttttaaatggctgtacaatttaatattctcatcagcagtgtatgtggggtccagtatcttgacatccttggcaatacttgttactgtcttttttactatagctattctattggatatgt

SEQ ID NO: 121323 - DNA, 1033 bp, Homo sapiens
attggccaggcacggtggctcatgcctataatgataacactttgggaggccgaggtagtaggatcatttgagcccaggagtttgagaccagcctgggcaacatgacaaatccctgtctctccaaaaatacaaaaattagccaagcttagtggcatgcactgtagtcccaactacttgggaggctaaggtgggatgattgattaagtctaagtgggtgaagttgtggtgaaccatgatagcaccattgcactgcagcctgggtgacagagtgagaccctgtcttaaaatgaataaataaatatttgtaaagaaacaccatacttacatgactcattcacgaagacagactatattctgggtcagaatacaagtcacaattaatttaaaggattgaaataatacagattatataggaatcagtaatatctccaagaaaatctcaaatatttataaattaaataacattcttctaaataattcatgtatcaataaggaaaccataaaggaaatttaaaaatattttaaactaaatgataatgaaaacacagtatctcaaaattgtggggtgcagccaaagcagtgctcagagggaaacatatagctttaactgcttatcttagaaaagaaggaaagtctaaaatcaattaacaaagcttcaaccttgagaagttggagagggtgttggggggaaaagcaaactaaacacaaaataagtagaaagaaggacataataaaggtaagagcaaacatggatataattgagaagagaaaaccaaattagactcttagatgaacaaagtttataaacttgtagctagactgatcaaatcactggtatgacaaatgaaagagagggtataactatggaacccacagacattagaagggtaagaaaactggttgcagtggctcatgcctctaatctcagcattttgggaggctgacgggggaggatcacttgagcccaggagttcaagaccagtcttggcaacacaatgagatcccaactctccaaaaagagaaaaaaaagaaa

SEQ ID NO: 121324 - DNA, 1077 bp, Homo sapiens
aatgagagccaaatgctgtgctttggtaatctgtttaactgattttgagaaatgtggtggtatatttgaataaagagcgtcagaaatggcaaatattggaccggatatggtagctcatgcctgtaatcccagcactttgggaggcagatgcgggagaattgcttgagctcaggaattcgagaccggcctgggcaatatagcaaaaccttgtctatacaaaaaataatttaaaaattttgtcgggcatggtgatgtgctcctatagtcctaactacttgggaggctgaggcggctgactgcttttaagcccaggagttcgaagctacagtgagccgtgatcataccactgcactctagcctgggcagcagagcaaggccctatctcttaaaaaaaaaaaaaaaaaaaaaaaaagagaaatggcaaatattagagtaaatataaagcacaaattataacattgtcctgtggggtgtataaaatatatagatgtttgacacctttagtgtaaagaatggcaggggagtaatggaattcctatacatttgcaaagtttctacattttatgtgaagtggcatattaacttaggtagaatgaaaagttaaggatgcatattttaactctcagagcaactaattaaaaaaaggaaacccaagagataaacccaactagaacttctaaaacatatccaaatgacctgaagaaggcaagaaaaagggaacacaggaacgaaaaaccaggagagacagattgaaaataaataataaaataatagacctaaatctaataatatcaataattacattaaatattaatgggccaaacactccaattatgagacatagatgaacagaatcaataaatagcagggcctaactatatgctatttacaagaaattcactttaagtataaagacatagactgaaagtgaatggatggagaaaatataaatgatgcaaacaataatcataagaagattagagtggctatattaatattaggtaaagtagataatcaaggcaaatggtattaacagagacaaagagggatgttccgcaatgatgaaaggaccaatca

SEQ ID NO: 121325 - DNA, 1050 bp, Homo sapiens
aagtatataataaacacattttttcagtttcttcctcatgaagctagaaataagtaatatagatgtttataataagttttggaaccataactgccaaccctttttattttcacatacttgcaaactttactagctttttagtagtcttctaaatgttcataaatagcatatgagaatgtgaaataattaatgcagctagcaaggcctgaacagtgtaacttcatttcagtaatagacagaaatatgtgttttatgtatgcatattaaacacttacacagtgtttttgttcttgttatgctaaacagctaatgaagagaagtgatttcacattgatgtagcaagacagtctagaaaccaagcgttcattctggtttctagaatcctgttatctaagaagtgtacttttcctgaggatttataatgctttatgctgtgactttaaataatggtaaactgttaccctagattcctgtggtgaaagtcaggctgtgacaatcctgattttaaggaaatttcagaaagtgatatgggtaattgaggtaccattagattataagaaagggtcttgggagtacttcagtagaatggagactattataatgccctttgagaatatccagagtgaatagtggtaaataatccctattcatgagctcagtggaataagggaagccttgtctgacataaggaaggagaagagtgtgttctatatctaccaatttttgagtaaatatctctatttcctgtttcaggcaaaggaaccaaaagagttaagcagttcccaaagactcacataacaagataaggactgagtaacacaagaattatctggctacgtattgtctgtcctctggtgttgaattgtgtcactcacagcccagagaataatatgcccaaaattttcactgaaagaaattgagtttttagttgacatttcttataatactgaactggcaaatcctttagtttttttccagtgattatgtaagttatcctaaatgaaacaatggtccacctaagccctgttgtcctcattatgttcctcaagt

SEQ ID NO: 121326 - DNA, 1579 bp, Homo sapiens
tcagatattttatgccaccctagatgttttattgggttctagttgcttaaaaactttaactgtattattgcaatatcattaaaatgttgcacaaagagtaattctactgtatatagccctggaaggtgagaactctattcagtttaggattcttgagaggataagtgaggtaatcagaggttccattcctggctttacattaactagctgtgtgatacatctcggtgcctcgatttacccatctgtaagatagggccattagtaccttgcagggttatgggagggtggaggaaattacaagaaattgtgtaaagaaaaatcccacttagttcataataagtattcagtatttggtagctatcattatattttgtaaaattgaattttaaaatgtataaaaataaacgataatgtttgcaaatttccaagtctttattaaattacttaattaaagtttatggaaaacatcaaaaaccgggactatcgtaaagcaacaatttttgaatatgagattaattcaatagaacagcccattcagatgtgatgagaagtaaataattgacagagtgcaaacaccaaaatataagattttgattttaaaaagagatacccagttccacacacataaatgatagaacaagaataataatcctgttttggattattatactagccatcagatatttcagctaaagcacaaacaaaaaatgagatacaactatgtcttgtttaattatctctcagttgaatatttttgttctgagcttgcatttggttaggaaagctgggggtagttgtttaatgccttaactcacttcataagattcctggtacagtttgacatctttgtgtggtatttgccttgtctactagactgtgagctccttgagggcaggaccatatctttcttgtttagggctgtatccccactatttggctcagtgccttgtatacagtgggttattaataaatatttattgaatgaatgaatgaaaaaaaaaatctcctagtgggtgctagttcctgaaactgggcaaatagaactcagagttgggcagaaaagaaaaatgcacattctcaggacatcgctcagaattcaacatttgctaaatctcaactcttactggatctttgcaggcttttaaaaattgccctggagtttgtgctaaaaatgtaagtcacaaattgaaacaaaatggattcggtttgaatttttttctgaaaaatttaaatgcaatattagtttaatttgttgatgggctacccatcagcaagctgttttgataaaccactcaaagaatgccatttataagtgaaaattatgggactgtgttgcaaaagaatgtcatgtttcatcactactttgcttacataaatgaaatattttcccttaaggaaaacatagggaatatttttcttttctcttttctatcaagatgccattttctgcaagattttctctttgagaaatacctctgaatttacttggttttaaacatattttaaaaaatagaatttgtgtagcataatgaatattcttgttgctttttagtagtagctgctgcaaaataattattca

SEQ ID NO: 121327 - DNA, 1049 bp, Homo sapiens
gccgtcgagtcgccctcgcctcgcccgcaccatgatcgccgcggctttcctcgtcttgctgagaccctacagcatccaatgtgccctcttcctcttgttgcttctgctgggcaccatcgccaccatcgtcttcttctgctgctggcaccgcaagctccagaaagggaggcatccgatgaaatcggtcttctcgggtcgttcaagaagccgaggtaagacacgccgcgacgggtttctgcgggctaccaggaacaattaagccgatttggagagtgaagcgcggctcgctcccttctcctcggctgcccctagccccatcattgcccactccccaggctgagtgcgtttctttaacgccccttgccctttttgccgtcacctccgccctccagtctcccaggtttgaataaccacggcgatgccgagggcagggaggggaggaaagaactcaaatttttagtcagtttgctaaagccttaagggtaatttgagcgtagtccggggctgcgccagcctcgccttcacgcatccttcgctggagcgtaggggtaagaaagtaaggcatggaaacttcggggctccccaactcccccagaactttcatgcaaacttctcgcggagaaatcacgtagagaccgatggccccaggactcctcctccctcccccaggatgtcccaccgaattccaggagtctgcgatgtgctttcccaaccctggtctcccaggtaagtcatgagtcactcggtaggtgaagaacaaggagttaaatgaagtctcatttatctcttttctccccagatgctgttttgagatcgcaccactttcgttctgaggtaatttatttagcgcgcacgctcaaggtcagaagaagttctctttcctgagtaccaatattaattatatgcgtgttaagaaaccagtaggacactgaatgacgaacatgctgtcccctagccgaaagtggcatgtttccttttaagtgatttcatattagtgcccagcgaacggttttagcaaatttcttgtgtagtggagctgttgtacaaga

SEQ ID NO: 121328 - DNA, 1095 bp, Homo sapiens
acaggtagcactacatcatgtgcatatggctaaaggtttcttgataccgcagcccactgcagtgagaaactattcaacaattatgcagaggttattgaagaaaatcctgagagtttgcaatgtgtggcacatcaggaaaggaagaattctccaccgcattgactcaacaatggcatggtggagtaattttaaacaacaaaactgaactaaccgtgtgcagacattgggggaaataactaacagaattttggaaggtcatctttatgcttctcattgactgaaatttgtaagtgagctgaaatagcctacgtatccttgaacagaaacatgtcaaagacacacagaatagtattcaaattgccccaaacgctatatttttttaacaacaaaaagcaactaaatagctattatggttttctgagctatgactttagcacaactgttatcatcctgcgtcttgctgcagccatttataagtttcaagtgcacacaagaacatcatttatctctcttggcaggcaaatgcttaactgccatgcaataggattatagatatttctttttagatgcattcatttctgttctttccatcagttgtcttaaagatactaataataaacaaaccaaatccttgaaagaatttagtatttagttccattgttattttctgatttgtttgttgctaatttatcattttttccaaataacagcatacatagtattaattgcttctgtctgtgtgtttatgtggtgcctaatgcattgcggaattcaataaatactaaatcagccaagcagtgctttttggaagttaatttagtagaaattataccttgccttcctggtaggtttttgctttaaaaaaagaataattgacattgtataaaagtcacacacaaaaaaaattgttaagtttgaggatagggatggagggggagagccatggcccaaatctttcatacaaaaaaatgaaaattcataatggaaaagtatgtataatttgttgactttttttatgagagtaagttatcattgtcacccaaaagaagacaaaatagttgggaaagatagctaagagagtttgataccacgtat

SEQ ID NO: 121329 - DNA, 1032 bp, Homo sapiens
ttaatatatgatattaggccaggcatggtggctcatacctgtaacaccaggacttgtgtcaaaaaactgtttagaaatattatttagcaaatagatatgttgatgttgttaggagctaggattttcagtgagagagaaaaatgcattataaaatcagaggatctcttgagcctagaagttcaaggctgcagtaagccttgatagcgccgctgcactccagtctctgtgacaaagcgagatcctgtcacacacacaaaaaaatttatatatatatatatatatatatatatgcgatattaacatagtgtataatgggatagatatttcaaaaagaaatgatctcatcttttcatattataattgattagattaatatttgagagttgaatcactcctgatttttatgcataagcattgattcttggatcagaattacatattacattttgtgaatttgcaaaattggtccaaaagttattaatgttgtagaatacatttacttaaagcaaaaagcataataatctcattttgctctcaactttcaagatgaatagaaagttccacattaattaaaaaatgtgaaatagaaaacacttcacatgacttatagtcctcctaaaatagaacttgtaattgattttactcctctctaggcttaactctgaacctgtggtttgttttttgtttgtttgtttgtttgttttttgagaccgagtcttgctctgtcacccaggctggagtgcaatggcatgatctcggctcactgcaacctccatcttccgggttcaggcaattctcctgcctcagcctccagagtagctggggttacaggcacttgccaccacgcctggctagtttttgtatatttagtagagatgaagtttcaccatgttgtccaggctggtctcgaactcctgacctaagatgatccgcctgcctcggcctcccaaagtgctaggattacaggcgtgagccactgcgcctggcctgtttttttataaatatgagggaaggcacataattattgggggg

SEQ ID NO: 121330 - DNA, 1040 bp, Homo sapiens
gaaaatgaaggaagtaaaaacagacagtaagttgaaatgctgcctaatggaccttagtaaaacccagtagttttccctctagaagtcagaacactttggtgagaaagccatgcatttgttttgctcagcagagtgctgtctgagggttggagtgctcagaatgcacccaatcatttacagccatttcaatcttgatttgtcttcctcgagaacatatataactaaaaataaataatataggcatctccttcctccgtgccctatcttgctatgcagctggactaaaactagtagtccgttttatagaaatcattaagccagccactggctatttagaattatattggcactagtttcccgccacttttgaatttatttagaggggagtcttcagttcatattctgacctgagtactataaggggtcttttatgtctatacatttcaaaactgatatatgtataaagcaatccaaaacttttgaaacctatgaaagagtacttaggttttgttgtagtgctgtacttgcctttcaaaattttaatagaattcataatagagaacttatatttaaatacaaaggcagatgagacacctgtattacattttgatattaatctagtttccttaggtttggtgactttgttttttttttttagaatttcagaggtggcttttgaattcctgcattaggtgtgtcattgatttgttaaaattaaacataaatgcattgagaatttatgttttgatttgcttccattaattacaaaactcccctttttctacgtcttaattccgagacactgtgtttttcataatttggatgttgcttaggacattatttttcaaactatggattataatccattaatgggttgtgaaatcagtttaatgtgctatgaccagcactttttttaaatgaaataaaatagagcagacagaatagaaactgagacagtgcattgcatgtagtaagggtaaatatgtttcttaaaattttgttttagttgcatgtgtgtgtgtattttctagatcaaaatg

SEQ ID NO: 121331 - DNA, 2108 bp, Homo sapiens
aatgtaggcttgagttcacctttggtttaaaggagtctttaaattttatgttgaatgtagaggatcacttccgtctttgcatcaagagtaaagaatgtacaatcattgaatatctgacatgatacaacttcttactcttgttcccaaataaaggttcagaggtttgacagttccacatggagaagtgaattatatgttgtaagtgtaattacaatactagaagaagcctattaaaaattttccctttacatttaagtggcaccacttacatgacaataatagcttaattatatttcaaaatatattcagagacagaatctttacttttctctggaatccaatcctatatgtggctcctccagtcagtaatgcttattcagtaaagatgaaaaagtttgattttttcagataaaaaatgagtattgtgatgttacttcttcgtttttacggtttggatttcatagctcttactaacctaattttcccacttttagtccacttggtggcccaggagttattctgtgatttgtagaatacagaatctgaaactaaacacagcatgctgaaggaaaggagtgatatagatatggaggggggtgcaaaaatgggccctctcatttaaattttattgaaatatacataaaagtgcacaattcataagtatacttgttggataaagttttgcaaagcctcatacatctatgtaaacagcgcctaaatcaagaaacagaatgctgccataacaaaaacttcttatttaggtctgttgttcttatttctgtttagtaatatgatcctttattcaactactgtttttatatctttctttgaaattgcagattttttatgtgatttacttctaaaaaactaatagctgatgatgtgatagttcacagtgctgttctagatatgaaggtatacaaactgctgagggaacctatcgtaattttgctaacaaaacaatacaagagattcaggtttcagccaagattattgatatagtgtagcatcattggaagtcagtgaaatcaggatataatttcctaaatagcttcagtaccacatagatcaagtattaatactttagctgcagaagggagtcaggcagaaaatagtattatttggctgggtgtcttggggctgtgattggtttaataaataaaaagtgttgaagctcataatatgcaaagccgtgagttaagttccttagagctacaaggattaatttgaaatacatcctacccttaagggtcagtattttagtgtgaatgatgagataggaggtgagaagtatgtaaatagtccttagaggtagtagaaagttctcttacagaaagtacatagtgctgttaaaaaaggacataagacttgcagtttatcatagtagtagttagtagtagtaataagtagtagttaggatttatatgtgtttaaaagggcattttgagtagaagaaacaaggaaaggcatcagaatgggaaagcagagaggattatgtgtagtcgtgaaagattttttgttgttttttaaggtgggaggaggcggcatgggccaggtagtatagatcttgaatgttggattaaatttgaactataaaacaggcacaattggaaactatttgaaatgttgcctgtcaggactgcacaagtaacctgtgtccctgacttctctatatggggggaaaaatgaattatttagggtttcagatttatgctcaaatccatattctttgttttagagaaaactttggttgtagtaaactacctttttagtagaccatattttggtgtattgatatctctttccaattagtaggaaattggtgttttggcttagagaatcagttttctcataacaggaatgaaagctttttatttcatgaaacatattttaaaacttagaatattggtttaactgttttcctaaactgttttgccatgcttctacatgtgcttctgcccctaaattgtgtggtattgggaatagaattctttaatttttaaattttatttttatttaattttttatttctatttcagagacagggtctcactcttgcccaggctggagtgcagtggtatgatcatagcttactgcagttttaaact

SEQ ID NO: 121332 - DNA, 1013 bp, Homo sapiens
ggatagaacaaatgcaaataaaaataccttgtaattacaggaccatacgcagttatagttgttaaagatataagtagtaattataaatattataccaaattattttttcttgatatttttattataaacataacttcttttgagaaattggtaatttatttttggtcagtgttacaaagtattcacagatggggtaatagaggtagtccattttctcttaaggaagaaaaaatgtgttatttcaggaactcaggtaataaacattgatttaaaaatagtatttatgttttgaactacctcacaattatagtgcctgtacagccagttgtgtttagagaaccaagtataccccactcagttttcccatctgttaaatgggataatactgataattcaatatctcaccttgtaaagtaatttgggggattaagtgaaatgtacattaaaagctttgcacaaggcatggtacagggctcaataaatgttattgattcttagtcaaataaatggagtactaaatgttttacttccgtaagctcattatcatggaagtttttccatattcactgaaaattagctagtgtacactatttgtgtataagtaatcttttcctttggggtacatgtctgtccttatttttccactcaatctctttgccattttagtgattttcaacatgattccccttctcattctactctgtcacttaaagctcagtaattatttgttgaatgtataaatattctaaatgacttctgttttttctcaattttggattttctgtgatactttttttttttttttttttttttaaagagatagggtctcagtcttgcttaggctggagtgcagtggcgtaatcatagctcactgcagccttgaactcctaggctcaagcaattctgctgcctcagcctcccaaatagctgggactacaggcacgcactactgtacccagctaatttattttatttttgtagagatgaggtctcactgttctgtccaggatggt

SEQ ID NO: 121333 - DNA, 1030 bp, Homo sapiens
gttgtgaggatgaaatgaggtaacaaattataacttcttataactacaaaccataaagtaggactatacaactgggaagttttgttattcgtggacagtgaatgacagaattttcagaggtgcctaaaatgactctaatgggggagttttagattttttttcttctcagtggaactttccttaagttctctttgccatcattagcttcttgcatatcttgagtagaacttaacatatcttgaatgggatatttttttcttttattcttatgagtggtctcacacaggaccaaacagcaggccagcatagcaccacgtgatctgagcttgtttttactctctcctttttcataaacagagtcccagattaatgccagtagttgattttgggtctttggggtagtgaagcttgtggatttgacttctctgattccttttgctgaccttgagtggattgtatctttcactgttaattataataatttaaaaattgagttctacttactggacatgaatctctgcacttgaaagttaacatattaaaagcatattttttttcttccttggttttcttgttcatgtggataacccagagaatgcctgaatctaaggtgccatcctctgagaatcatcgcccagaaatgtgctctagctgcaatgttcctcttcccattggagatagcagctccttctctgggagttgttccagcagtccagaaaggatagtttctcaaacttcctctgttgagaacccattggagaaccagaaaaatgatcaaaataattcagatactaagatctctgagacagagacccttaaatcatcacagaattttcagactctgccttcatctccacttctggtcccccaagaatctttggcctcttctgaggtcaaagagaatttacgtatagattcttcttcagcttcacagcatggacgggatgccatcctctatctccagacacaagtagctgaaatgtcccgagtgatacgtgatctgcagtccaggagctgttttagatttcat

SEQ ID NO: 121334 - DNA, 2976 bp, Homo sapiens
aactgaggactagcagattttgaatctagaaataatactagatgtctgtttactaagaccagaggtaaatccttaacttttaggttatcagtgcttccttgttcaggcttcagtttgacagatcttcacaaaatgacacatctgttaaaatgtctttatgtcaagatggtcaactcaccaagagtccgtactactatcaagctctgtgagacttcagaatcagccatgaagctttgtgtcaactggaattcaaatcaaattttgccaaatccagtttgcttccccttggaatggctagatgtcgcaggtctattatggacaccaactggaaaaagacttctacctgtaacatctctgtagaaattgcacagtaactatcttcatcaagactttgatggccaccataccatcactactcataaagctacatgtgagagaattgtttgttgttatcaatcctaatagtctttgacctatcaagctctcgtatcaagctgtaagactgagtcatggtagtctctcactgtaagctgggcctttcaccaagatggccttcttaaacaacctaccttctaaacatttaattcttttgagcttgatagtgcatcacactctaaatacaaaaaagatacgcacatcagtgccctggaaataaaggatgttacacgatccaggcatgcaaatctgaactcctaagaccaagaattccaaacatgcctgacaatcttgtccccttattgtaataaagagggataccatcagtctagattttattgagaatccttaagatttaaagcatagctgtggatgtggtgaagagaacaagccacacagctctgtttctggatatctaagtgatgatatccattaatgatttgaaaggctgaaatcaagatttaagtgatacgctcttggttaattggttacttaatttagtcagattcttagtgtaagagacagcttatctttttgctcccaattggtcccattaatagtttttcaccatactggaactggcagcagatacctcaattatatgtcccacagtatcttctctttagactcaaggtagtggatgtatggtatatcagcccttagatccatgtcttcacagcatgacatcaggaatggagaatatgtcaaatttgaggggtctgaatacatcacctagtattatttgcttggcagccaaaaacagttgtttttattgacagacttaattctgtaacttctgcgttttttcatctgcttgatcaaggcattttggatgtactgctaatggaatatggcactgttttacggtttatgtggcttctgttcttgccacagttgttgcacagtggtaattgatgttttctctggtgccacactttttaataatctattggaagctcattcctcctcccccatcataaccatattcagcacccatttttaaatctacttttcttccttatttgtgctacagaggttgatggcgtaaattttcctacttggaagaaattactttatcagttaatttcagggtactgtattgatcttgtttgtcctatttgtagattaaacttgaactagtcttaataaaggggatattgttttgcaaatttagcccagtcatatcaagagttaatatttatcttatttttctgtattttactcaaaattttatttccacttctgtagaaataggtccatgccagtgttctctacaaagtgtctttcaaactaaactctagaagaatatcgattacctgaacagaaacaaaggcctaagaaatcatacatttttgtagcttatgtgtattgcaccaatcaagcaatcccatgtgctcttgatattggcactgtagttttatcttagaggacttgccactggagaactcagtggtgagagaccttggaaatgttttatgtggctgcacataagtgtttctgactagctaaggctacttcagacttttcactttccatttgtccccttttccttccctgaattagatgctatgtcataaacttggtggtttttgaaatactcttatttcaaaccttaaactaaaccgaaataagttatgcctgagaatgcgtttgtctgaaacgattttggcacttccctttaatatgcttccccttccctttgccttttaaattgtggttaaaaaaaaagaaaaaaaaaggcacataaagctgagcaccttaaccattttttaagcgtatggtagtgttgactatatttgcattgttgcgcagctcctccattcttaaatatttgtaagatgatgttgctgttctcttttcctcctgtgatatttatgttgcccagtaataagtaaaagtatcctttcttagttactctaactgatatgcccaagtgtctccagatactctgttttcctggaagtgtaaaggtattgggaaattatcaaattggtgaccaagtagttctgaaaggatttgaccgtttaatagggatggggacagaatgcagatcaggaagagtttttagtaatagattagtttcttgattgcaaaagaaatatctttaatgtgttaattttttattattttaaaatctctggcatacttgaatgataatgttataaaacttaaagtgaggatttggtctagggagattaccccaatagaatcagaaactcttagtcagataataaatcctcatattatgcctgccatgttcagaacctgcaacaaaattccctactaggccaacctctaacgtttaaatacctctaggttttctaggaggccttggaatagttgcaagtttaatgatctggtattctcaaaaaggatgtatctaatgatcttgattcttcaaaatgttatttcttgattagatatacaatgtatatagagacaatatggtttcttgtagttactgtgtatagagaagtactgtttccatttttatatgaagtgcctttttaattctacacttttctttaaaacttaaacttt

SEQ ID NO: 121335 - DNA, 1850 bp, Homo sapiens
caacttatatttgataagtggatgtgtttacttggttagaataagcaaggacatttttaaaaagcagtaaatttgctgacacttttatctttttttaaaagaatgaatgacagcttccttatcagtataattacatttaaacttttttttttaaaccgtgtggcagcttctttatcaatcagtataattccatttatttacttagccctcaaaatgacattttgaagggagcataaactctttcaggctacttggacagtatttagtattctatattagtactacactaataatttactgagtgctacctaagtgacctgattgataatgtccttaaggacctgatacatccaggataacctctcaggtactgtaaacaaggaggttgaaaaagacacattccggaatccctttgtctggtaaaattggatactgatgtggatggacatgacattcattattcttgaagatataactagttgactgggattctgatgaaggtttgaaattatggattagatctttgtagaagtagtttaaagattgcaataagtgaaatcttttttttttttttttttttgagacagtttcgctcttgttgcccaggctggagtgcaatggcacgatcttggctgactgcaaccgccacctcccgggttcaagcaattctgtctcagcctcccgagtagctgggattacaggcatgtgtcaccatgacctgctaattttgtatttttagtagagacggggtctctccatgttggtcaggctggtctcaaactcctgacctcaagtgatccgcccgccttggcctcccaaagtgctgggattataggcgtgagccaccgcgcctggctgtgaaattttttttttttttttttttatgtgaggcatattttgccacagtctcgcactgtttaggttctcttgtcttttggaatctatcattctgtatttaatgttagtggctagtccaataattgattgtctcatctgtatgcatcttatgcatgtgattcaatagactagatcgattctgtgtggtttatcatagtagatacacaaaccagtctttattttttacttaagaaaatatataagtggaagttatcagtaaactggtgattattgtattgaatgcaaatctttttattatttttccagatatattgagttttataaaccattaaaatattattttatgaaatttcccttcctggatgaacagaatattgttttattaaatcttctcttattagtggaatattttttacttctttgtcttttcatttacttgttttttgttataatgaaaactttactagtgtttggtaccattgagataacttattactggaaattttgtttgcttcctgtgggatatatctggaagtggtcatagtccaaccatgtccttttgatgttgttagcatatcagttattctatgtattgatcttttcttctcctgtattcaacacctctttctgaaaggatgtctgatcttcccataatcgctttgatgtagatgatatttttattctatcagtgtatactagacaggattttgatgtggctttgtatttgtatatttaaataccatgtctttaaagcattattagaagagatattctagtttcttctaatgtcccttttaaaaaaaatatagccagtccaatatctcaaactactttgatttttgaacttaaatcaacttttagtgctaccttgtttaatggtagtagtattttctcatttctacatgttcacacaagtttattatatatagtttatggtcatatgtatcttataaaaattttgaagcccatccccatggatttattataataca

SEQ ID NO: 121336 - DNA, 1344 bp, Homo sapiens
aagtgcttcaagaattgtgttcagttagtagtccttttgtaagactaactttcatatgctatctttgctccatgagctatcatagtactgttttctttcattacccgtaagagtggctctatcacagcatttactgttaagggctacagttagacctcttgttaactctacttttatttgtgatggctgtgtttcacactaccttgatttataaatgtagtaatgtgttaaataactatatgttgtggtcccttaatacctcttttgattggtgaggtaacagtgatgtggatgatgaaataaaaacgtttccccaagtcactaaacacagttttcaattcatttttttttacatatttaatttacatctaactactgttaggtatgcagcccgttcctttttgccttcagtagaatatagttatataagtagtctcatttagattcttgggacagaacggcctgtgtattgatctttctttaatggcttggaacagcttctatatattctgacaggtcttggaagcatgttaatatccgtgtgtttaattgtcatcttcctgcctgggaaggcagtagaagaaagaatctacatttgtatagtctgtagtacaggctctgtgctgattgcaaggcactcttgagagaaattcattcttattttgcagaagaagaactgaaacttcattaagtcattaagcaacttgctcaggtggtggaactgagctttaaatatggactttttccagtctcaattcagcattatactaggctgcctccatgtgtttttcaaagccccattcaagttttacttctatggtaaactaattttacatacacaaatcttttcattttctgaacttcctttatggctttactgtcaccccactagtatttgatgtcttagctattaactaattcctgattatttcacttgtcacatcaggaaccctatcctcttagttctcccattgagatttcactgctggactaagattattcttgattcgtagtcattggtttctgtttccattcattttcagcactgattatgttaatcgtattgcttgagttttttctttgttcaatgttgtttattacattcattttgtttcatatacacacattttttttttttaactggcattttgaggatattggtttaatggaaggaaaaaggaatggtgcaaagcacatggtatttgaattccaaagaccttgaccctcagcattagcaagtcacttgttttctgagcctcagttttcttactctcaaatgaggtaatatccgaaagtactttgacaacacactaaagcctgatgcagatttcctttttgaagtaa

SEQ ID NO: 121337 - DNA, 1157 bp, Homo sapiens
tggtttcagaattataagaaatagtctttagggggaacagaaatgaaggagactaaatagatgatgataaattatctgtgaatatgtactggttcctacatattcaaagtgtgctaagtttgtacagccattacttgtaaggttctaggagttgtctctctaggggttggtttgtaccatagtccattatgtacatctagaacaattctttctttcccggaactgagcccaaggtgggctttctacagtgcacctctggctctggggcagctcaagcaatcagaaagaactgaggcactggtagaaaacaactctgaggatgaacaggataatgttcctgaagtggaatgtggtatcccttcatggttaaatggttgcatacttcagggtcacctatggaaaggtgtcctcagggtagctaaaagtggttaatttccttgtgttttgacttacagatcatttctaggtggacttggggaaaataaagttacttataaaaatattgcttcattggcatttggaggtgttgtattgaaggaggaagtgggttcctatcaccagaaccctctctaggtgtttcagataggaaactgggttgtagaccttgtcccagtaatatctccagcagctccaacacattttgtcaacttcgtattcgttttttaagtttttttccttgctgttggccacctttaccttcttttttttttttttccttctttttcccttattttttgagacagtctcactctggcgcccaagctggagtacagtggggtcatatcggctaactgcaacctccacctcccaggttcaagcgattctcctgcctcagcctcccaagtagctaggattacaggcgcatgccaccattcctggctaattttttgtatttttagtagagatggggttttgccatgttggccaggctggtctcgaactcctgacctcaagtgatctgcccactttggcctcccgaagtgctgggattgcaggcgtgagccaccgtaccaggccccattcccacttttacttttattttctctacagttcatccttttttttttttttccttctgtgccagaggtggaacagtggcactcagggttaaaaaactcccttttgctttgtcacacttcatattcagagttactgtg

SEQ ID NO: 121338 - DNA, 1032 bp, Homo sapiens
ttagtagatacaagatttcaccatgttggctaggttggtcttgaactcctgacctcaggtgatccacctgcctcggcctcccaaagtgctgggattgtggttgtgagccaccacgcctggccgtatattttaaaaatctcttaaggtccagttactgttatattttggtcctgtactgaaggaggatgtaagtcattttcctaaaatgatttttatagagatagatgttggcagtttactcaaaagagaatataggaaaatcttttttaacaggtttggtgggactagccttattcactgaataaagtactttacagaatggagtatatctatatgtgtgttttaagatttgttcatacaaagcagatgttctgtgtactttgtatttgtaaacaactaattgggggtgggaaggagattgctttgtaaaaagagggtttccttgttctaaagctttgctgctggagatggtaagatggtaaataaatattgtactgttatgctgcgtttatctcttctgctttatctgtatttgcatataaaattcttgagaaaaaccattgcttttcaaagtgttatttgggatacgggtttgagttatataagttgagtagaaggggcttctggtaaacagaactttggggggtggtgcaaacttcagaccaaactatgaattgaagctttaggatgggcaataataagcggactttgaaattgggtttttatgaagtaatccatttgttgcaggaattctgttcaaaccaaatgcgctagtcagataccgtgatgatgtgcaaagttaattcttttgcagttggttgttcctttgagctttctttgaacttggagtcccttacatataagatagaggtgatgaaagaaatagtctccagttggtactcctctggatcatcagtgccagctgatgttcagggagatattatgactgtaaataaacctgccttggattgttttgtgtatatcccctcaccttattctttaccttcttccctcctacaaattgcatctttt

SEQ ID NO: 121339 - DNA, 1033 bp, Homo sapiens
cttggactttttgctgtaactctaccaggatacattaaaagataaacgttgtttagaagtgttgctttacctgtgtatgcttaactttcatggagatgtttcgtcaggtgtaaccagtatcctcaatatggctatcatttctaggatacaaccgaaatttgctctgtgcatgttttacctaaaattttagataaaaatgtaaagaagtatatttgagaatgtaagaatttcatagtgactgaaccagaatctgcctttaggcttcttctggctttacatcctccttaattctatgcaattctgggtatggaagaaaactaatgcagaaattgatctgaagtattggcaaacagaagacctccaattttcccaatatttttcctaaggctttcctgtgcttctccccaacactgattggctagcattgatagcttattcactgtcggtatggaccctttaatattatgtgttttatttaaagacattagtccagggtgaccataggaaatacttcaaggaggataaccctgaagatcctatagctgctaatactcaaaatgaaacttaaaaaaaataatgatttttgccatggatcagagccaattcaattctagcttgagaagtgaattcaggtcatatctgaaagccttacctttgttagaaattaggtccaaagacctaagtgataattcaagttatgggctttgtgggagatggcaaatccagcctaaggaaaggagttctggaattttacaatttcacattaaattacacgtcagtatgtggcattaggggaatggtagaaattctcagtgctaagaattgagtggcccctttaaccagctaccttgacccccaaagccaagatttgtaatggaaaaatattgtatgggcagggtgctgtggcttacgccacagcactttggaaggctgaggctggcggatcactcgaggtcaggagtttgagaccagcctggccaacatggcgaaaccccatctctactaaaaatacaaaaattagccgggatggtga

SEQ ID NO: 121340 - DNA, 1051 bp, Homo sapiens
attggaacactgctacactcacttgtttacatattgtctgtggctgctctcctgctacaatggcacagttgagtagtggcagtaaagagtctatggcctgcaaagccataatgaaatattaactagcctttgtggaaaagtttgttaccccttggtctagatggcaacaaatgctttacactggcacatattaagtgctaatgagttatgttattaatattactcagtgaacaaatacttactaggctccttctgtatgtttcagattaaatatggaaaatttgaaacaatacataaaactttaaaaatgaaaataatcctttacatagaaattcctagaggtagccttaataacttttaatacatctattttcaggcttttttttcctctgcagatacagttgcacatggatttgaaattattctttgtttatattttgcctcatttgtttaatacagtttggcgacctacttgatatccaaagtatatttccacacctttgaaaaatttggttaatgtttttaatgacgtccatcaaatgtacataccataatttacttaaaccataccctgttgttaggggtgtaggttgtagtaaattttgtgcaataacactggtatacacatcttagagcgtgcatttttattttgatgtatttctttgtcatacatttctagatgtggagttctggggataaaaagtaatcagtattttctgatcactaatgtgtcaaaatccttttctcaaggaaaacagggtagtaatcttaattgagttttttcttaatgtcttcaggaaaaaattgattttcagcatgctcatgggttacaagaattggaatttattcgaggacattctgatacagaagcagcaagactgtgtgtggaccagtggctaaaaatgccaggtattctttagaaattacactaaggttacctagcttccccaaagccttaaggcagaaagtacgtctgttttatgctattgctaataagcatataagatattaaattttgtttcagtgatactaatatcacctcataatggcc

SEQ ID NO: 121341 - DNA, 1037 bp, Homo sapiens
accagcctgggcaacattgagagaccctgtctctacaaaaaataaaaatattagctgggcatggtggcatgtgcctataggcccacctgctcaaaatgaagggagtaggggcgtaaccttctaatgcatttggtctttaacattttttagctgttgagcttaaagaaaaggattttttttccctaaagggaaaaaagctacttggagctgggcatggtggcgtgctcctgtagtttgagcgacagcaggagaattgattgagcctgggaaatacagcaagatgcccatctcaaaaaaaaaagagaatgctacttggtgatattaagggcttttttttggtcataacttatttacttttaggttattatatcttttataagagaggttttaaacaattataattagcatcatccagttgatgctatgtcataattttcattgttttgtcctaattttgatcactagcccaaaggataagtatctgaaataataacctaagaattcatattctgatgatgcaggactcaaaacaggcacaattaattgtggaacaaaaagttcattccgaagaggaggccacacgtgggtgtctgggaaaccaattttatgtcctataatgcactgtaacaaggagtttgacaatgggcaccttctcttaggacatttgaaaaggtaagtaggatattcataatagtgaatgctgaagatctagtgagctaccaagtgatttcataaaatgaaagcgtaatgctcctttgccattatgattatatagctttatattccaaactcaaattattttgtgccattatgatataattttttcataattgatgaagtcagatttttctagtgggtgtagctttcagctttatgggtatagcttttaaatatttatttttccctgatacagcttataaagttctaaacagactttctccatcaaaatccagataggttagttttagagaaatccagcccataaatgtaaatttcaagagacaaggagcgtgtacagacatttggtctagcctgaa

SEQ ID NO: 121342 - DNA, 1025 bp, Homo sapiens
aagtgctgggattacaggcatgagccatcatgcccagccctactttttttattgtacaaatttgtatggtgtcttttaatgtaaccagaaatatggtaaaaaggaattgagcactttaacttatcagatatcttatttcccattccttttcccagtttgtagaatgtatttgcagctatgccatatatatatatatatatatatatatatatatatatatgtgtgtgtgtgtgtgtgtgtgtgtgtgtgtgtgtatatatatatataaaattttttttttttttttgagagagaggtggtctcaaattcctgggcaaagcagtcctcccacctcagcctccttaagtgctgggattacaggtgtgagccactgctcctggccaagtatgccatatttttgtaataagtatattctaataaaattttatgtagaatcacattttggttctgttgagcaaatcatttaaacaactttatgtgagttcatttataactcacaattaaactaaaaatgatttaatgagtttagggttcttcaagtaggagaaatatgtataaattggtggttactaaatgcctttattgctcttatcatttagaatcttcaaattggaatgaaaatgtcctcctcggtgttatttcttctgtgtggcactcatcaaattaaaacaggaggggagtgtggtggggagggagtagtgaaagcagcatataattcataaccaagattggaaagctgggtttaaatggaagtttgtcttttctatggaggggtacaacttgggaggaggggtaagttggttgacttatcagaacttcaattttctcatttctaaacaatgaaaatggtacctcatgggattattatgaggattaagtaggtaaacatatttagaacctcagtgtggttcctgacatgtgctcggtataaataaaaattttttatctctcttctggttgcatctcataagcactacacaaactatactgatggttctagtgttaatgatagtaaatatgaggca

SEQ ID NO: 121343 - DNA, 2298 bp, Homo sapiens
ataaagtgcagataatactcaagtattttgagatgatagaacatcattatgtcatttgcatctttattgaaaagtatcttttagtgcttatttatacgttggttattttataattcctgcaataaaatgcagcaatggtatatttagaaaatacttctgaaagactttctatttctttttatctaatttagagttcattgtcgaaatgctggacctgtagctgtagctgagaagagcattacccaggttgcagagaaattcatattaagaggttattgtccagattgcaatcaagtctttgtggatgaaaccagcacccaaaatcataagcagaattcaggacacaaagtccgagtcattaactcagtggaagaatcagtcttactctattgccacagcagcgaagggaacaaggatccttcttctgacttgcatttattgttggatcaatcaaaattttcatcacttaaaagaaccatgtctattaaagaatctagctcactggagtgcattgccattccaaaaaagaagatgaatttaaaagataaaagccatgaaggtgttgcttgtgtccagaaagaaaaatcagtagttaaaacctggttctgtgaatgcaatcagcgattcccaagtgaagatgcagtagaaaagcatgttttctcagcaaacacaatgggttataaatgtgtggtctgtggaaaggtatgtgatgattcaggggtcattcgtttacacatgagccggattcacggaggggcacatttaaataactttcttttctggtgtcggacatgcaaaaaggagttaacaaggaaagatactatcatggcacatgtgactgaatttcataatggacacagatatttttatgagatggatgaggtagaaggtgaaactttgccatcatcctctacaacattggataatttgactgctaacaagccttcatcagctattactgttattgatcattccccggcaaatagttctccgaggggtaaatggcaatgccggatttgtgaagatatgtttgattcccaggaatatgtaaaacagcactgcatgtctttggcaagccacaagtttcatagatacagctgtgctcactgcagaaagccttttcataagatagaaacattgtaccgacattgccaagatgagcatgacaatgagataaagattaaatacttctgtgggctttgtgatcttatctttaatgtggaagaagcatttctgagtcattatgaggagcaccacagcatagattatgtatttgtgtcagaaaaaactgaaacttcaattaaaaccgaagatgattttccagtaatagagaccagtaaccagttaacttgtggttgccgtgagagttacatctgtaaagtcaacagaaaagaagattatagcagatgtctccaaatcatgctggataaaggaaaactgtggtttcgctgcagtttatgttcggcaacagcacagaatttaaccgacatgaacactcatatccatcaagtgcacaaagaaaagagtgatgaggaggagcagcagtatgtaatcaagtgtggcacctgcaccaaagcatttcatgatcctgagagtgcacagcagcatttccatagaaaacattgcttcttacagaaacccagtgtggctcattttggatctgaaaaatcaaacctgtacaagtttactgctagtgcctcacatacagagagaaaactgaaacaggcaataaactattcaaaaagtttagacatggagaaaggagttgagaatgacctaagctatcagaatataggtatggctttatagctctatgcaaatttcatatactgatattgaaacttacaatgtacccacctcgattcaattttgaagcaagaaacagggtaacttcttgatggtatgttaattattatggtatatacattttaggggtttgtattcctactactacatttatccactttctaaacttacgaggacagagtatatgttggctttaaataatatatattttagatatcattttattttacaaaaggtgtggagattttgaagatgaaggaagttgatagtttttctgaaagttagatttcaaagttatcctagtattaatatcatttagatttttcttgtaatatttgggttaactaaaaagataaatcacgtgaattctttttgtttctatttggccatattctttagtgtgagacattttaaaggtcatttcagcatttgtatatttttgttatgattaacttggaagaaaagctttaacatacaattaaaatagcaatt

SEQ ID NO: 121344 - DNA, 1050 bp, Homo sapiens
gggagggagaatgagagttggggcatgggggaaggtgaaagaagaatctgagagaaccaagaagatgtgtttatagggggaggtgtctctgtaccactggcacatatttctagcactgctttatggcagcaggattctaggttatcttatttctgctctctagggtgtttaatcctagaactagagggctactaataaatcagtccagactgggaaaagaaccaaattctggtggtgaaaatgttcttaataggtaaccttggaattttatatgggtggtattagtttttgcttatttaaccttaaaacttggttttctagttcttctagtacattaattttttaaaaaaattccttgtataagtgactttttaacaagctttagagttgttggaagaaaatgtttgcaagaaggatatataaccaaaattggtgaaatgttcagattatttttatctgatttaagtgtaaatggtgtcatgtacagatttggatttcacaaaaaggtttagatagaaatgagtaacattcaaggttagtatttttgcatattaggcttctaatactttttggacttgaaatcagaatgattttagcaaattcttactgaactcatgttgatatttctctcttctcagaggaagaaattgttgagcttccagatttggattacctgcgaaccatgactcatatagtctttgtagattttgataactggtcaaacttttttggtcatctaccagggcatctaaaccaaggaacatttatttggggctttcaaggtacggttaataagaaaaacaaaagaaaactttttcccacctcttagaatatagttcagtttaaaaggctcctcttaaaccttcctggatagaacataggaacataattggaatattgttcttttgtattatagttactctgctagaatcgttttctttacatgcctctgtggtaaatgttagctctatctggtgactcaaagtttatggatcttttggccgggcgcggtggctcacgtctgtaatcccagaactttggaaggctgag

SEQ ID NO: 121345 - DNA, 1016 bp, Homo sapiens
gtttacagagaatctgctattgtttgtgtttgataggaaatagcatgtaaagagaaagattgggattaaagatagaaacatactgacctggataagttagccagtataattgctttagtaagttgagctttggtgattgcccatcatttctgcattgaacggtggtgacatctgtaaaaaccacttatgcttacacttatagaataatgccattcaaagaatttttacacacattgcttttgattttgcctaatatccatgtgagttttaagatgagttgacagattcagggaagttggtccactttctcaagactttaaagcaacaagatgttgatgcttatgctaggatggagttcttccacattctgatctagtactttgcctctagaaaaatttttttctagtatgtgttttttcttgataaaatttttggcctttcctctcctgtttgattatcatttttgccttttctaaaattaataggaggaaacaccaattggaagcctccgctcaactgtaagatttataactacctgaacaggattggatgcttcttccttcatcctcgctgtagtaaaagaaaagatgctgctgattttgccatatgtatgcatgtgagtcattgttttattcaaaatctaatgtgaatctcagacccacttgcatttttttccccacttgaattgtaatgagacttatagatcattcttcagtacttcaggttctacctatgactattatgaaggcaggaccccatagcatatttttattgctttatcctcaacttctagcaaaccttcagctatccatagtagaccctcaactatttgtgggataaatgatcaagagctgatactgttttttgggtttgtttttgagacagtctcgctctgtcacccaggctggagtgcagtggcgcagtctcggctcactgcaacctcagccccctgggctgaaatggttcttgtgcctcagcctcccaagtagctgggactacaggagcataccaccatg

SEQ ID NO: 121346 - DNA, 1152 bp, Homo sapiens
aactaaatttttaatggcctgtgacattttgtcatttcatggagttgcctttctgtttaaagtcttatatgtatcacctcaagtcttttagcaaataagtgatacagatttttttttaaatgttgaaacaaatgattacctgtcagtgattttaaaagtttgttgactttctacattcctaagtggaattaacttgcaagttctaagttcatatataaaattcaattcaagatcatgtctagattttcatatttcaaaatactcaattttttagtagagaaactgccaagttatcctgtgtttttccattttgattttactttccttcttgaaaagaatacagtcgatgaaacttaaataaatacagcacatgttgagttttctgccctaagtgttaaaattctatgttttttaatgcagatgtggaattagaagaagctattagaagaagtcttgaggaaatgtaattaaagatattaccacacaacatcaagtggccttgaagagactgagataacgaattcttgagtttgttttctaaaggagaccagaaatccactattacaaatgtatttgaaaacatgtttttgctttcatatgttcaaaatctgatctttgttttgtatttttgtgctaatgtgcaaacatgtacagaagaaatagaatacatgttcatgcaaatataaattatgtattctaatataggtgtaacagtttcccagttaactttgaatttatatatttagatttaaaggattaaaaaaaaggaaagctcttgacagttgtttcccaaatagcattagttctttaattttatttgtactgtacaaatgatgctagtttatttttttagcagtgaaaatgaatataaaaaaggtgacataggtcaagttttccataaattctacttctcatgtggcactattatataatacctttgagatctttgtttatgtttattagaagagggtaatggaaactgatcatggaaacatttaaaattttatcagcaatgttctttgtgggtgccatgcatatgtaaattattgctttaattagagcagcacattgctaaaataaaaaatacaccttaatttttaagaaataatttaaatgaaacaatttccattccttttacctgcttagactttt

SEQ ID NO: 121347 - DNA, 1054 bp, Homo sapiens
ttcataacagtccttttttatatattggtgtaaacataatattcttcaagaaataatgttgaaagcctactcaggaataatcttccttaactctttaaatttttatttcatgtgaagtgttttcagtttagttattcactgaattgtcagtttccttcatttggtattacatatttaattcttaaatattgaggccccattgtgagtaataaaaaatacgacataagtagaagactaagaagggcttgtcatattatctttgtgtatatgcttcatgttatttaaccagaaatgtcttatctctaaaaatttttagtagtaattatttaccaaacttaaaaacatttctataaatataaagcttttctttatatttaagacaaaatataaaggctagaatttggttccttctctgtaacactaaatattttagtgtgaaattgaatttttttattactatagtcttttcaatctataatttgtgtttttaatttcttgatatgtcacttctgttcctccctgcttgcattttttaaaaactagacattgtggcttgagaatttatcaatcatctttccgaaatgaccacattgtgcttttagtttgtatgtttaagtggtcaagcaaggctctaggaggtagtcactgagctggaccttaaacacatctgcaggagctcacaaaatgggagcaaaagaggcattccagaaagaagagtagttaagcagatgtgggggcagggcaagaggagacagcaccttgttgccagagattctacacaaaggtgtgatggacactgatgctctattaagaagcttttgtggtgtgtgtggtagagaataattaaggcttctgataagacaggaaagggatatttcatcatgactgttaagaaaaggtaactgggttgtttaatgttttaattgataattgtcactgatcgtatttctacttgttaaataattaaaaatcatcttaaaattcatactttgactttaatttagacacaaggagatgtaatcgctgtgtaacatcagagaaagctatatggatt

SEQ ID NO: 121348 - DNA, 1917 bp, Homo sapiens
ctacgttggatgaaccttgaagacattatgctaaatgaaataagtcagtcccaaaaagacactattattccatttatataaggtagagtagttaaaatcataagagacagaagatagaatggtggttgctaaggtctgcagggagggggaatggggagttagttactgtttaatgggtatgagtttcagttttaaagatgaaaagagttatggagatggacgggggtgattgttccacaacattacaaatgtatttaataccactgaaccgtatgcctaaaaatggttaagatgctaaattttgttggattttactacaattttagagaaactgtaaatacttgaaaatattactgattttactaacaagctggatgcaacaggtaactcaggcgtgtcagtggcaatcactcttttccctcaatttatacaggtgtctttaatacatctggtggaagtcactccggtcagaattcaggtaccctcaatggtggagatgtcatcaatcttagacccaacaaacaaaggaccaagaaaaacagaaatccttttagcagctgtagcataccctaagatgttttgggaggaaaacaattgaattacattgtgcaatgcattaagaaacccatccagctgtcatggtatgttacaaggttttcagcagactttgctcctaatggctctctgaaagtgacagacttaaatattgctctgcagtgcttttcagaatgtagagtgagacctctggtggaaaaattattgccctgtggactcctttaattttttttacattagacgaagcttctcctgtttgtaaaggaatgctataagaaatttcaaacacaggttttgcggaattttaaatgctggaaaacataaatgaaatgcctaaatatattgttacagattttaatactgtggatcaaggaaagatagcaagcattcttttcctgaaattggtcatgtagcttttctgcgaaatagtattgaatctgaatactttcacaaaataatactgaaaggtaaaccctaaatcttgccagactgcattagtattttggcattgaaacttgtgcaatatctgtgtaatgtagaatgtggggtgtgcatgcagatgtctggtactggagtaagctgaaggtatgtgcagtatttaagaaaatgtacattctaattaattcacttataaaaccatttacatattgtgtatatgtttttattttcaaatgataaactctagacatatattttgcaaaatgagcttgggtttaaaaagtgctttgtgccaaaaatatcatacctaatttttatagtgctttactatcagaatttatattgtttattatatcttttaaaagcagtaagcagttttcatctgacagcgtagataaaagaggagtataggaatttgaatgctagagcatctcccaggtgagccttattgcagatctttttgatatagtcacccataagcatggtgagctcctgctctcataaggtcagccaaagccccttaagaaggtacacagcacatctgcagtcattcaggaggtcctgtgaagtgtggtgatgcatctaacaccttttgctgctcactgagaacccagctttgaacttacaagattacactaaccatttttaaagtgcacaaaaatattattattagtcttaactaaaattacatattttataatgccctgcaactctaaaccatccttttgtttacacatttttgtatggtattttaagattatcaatcacttcaacatttctataaccttgtttgtatagcactttctcaagagctgtcagtcccacatacagaatcatttcttttacaaaatgatttaatatgtaatcatgtgtcaggacataaattttgtcacttgggacagtagctttccagctaagataatt

SEQ ID NO: 121349 - DNA, 1005 bp, Homo sapiens
aaccactgccctagaccatctgatcgtatactcagagggcaagatgcaggcatcaggcatcaggttttttgtttgtttgtttgttttttagacagggcctcgctctgtcacccaagctgaagtgcactggtacagtcatggctcactgcggccttgaactcctgggctcaaacaatcctgccttagcttcccgagtagctgggactacaggctcacgccaccatgcctggccaatttttttttttttttttttggtagagacagggactcacatggtgcccaggctggtcttgaacccctggcctcaagcaatcctcctgcctcagcctcccaaagcactgggattataggtgtgagccactgcccccagccaagtattttttaaagttatctagatgatcccagtgtatagccaaaattgagaatcactagcataggatattggctttgacacttacctgattgtaaaatcacttgggatgtatatccatttgagttctccaggaagtaagtatcaagatggaactaaaagtgcaagagatttattggggaaaatgcctgagaaggataaagaggctgcaatgctagttttttatacttgtgaaaggataaagaaagatggggtggaaagagctccagactgcagtgcatttctgaaaaaatctcagctagtctgatggggagccccagaccaaagaggatccatgttgtgcataattgtcccaactcaagtggcactgcctgtttagtctttacccggggagaatgcggcctcaacaggagtggacagtgcagtggatcctgaaggtgaggtagcagagactgccaggtagcagctcatgaagggagagctaaacagcaccttttatgcttgttttataaaccagattccaaggcttcctgtgaaatttctgataaattatgcctgaggcagagacccagaactgtactttaacaagtacttttaggtgattcttatgatcactcaggtttgtaaagtaccag

SEQ ID NO: 121350 - DNA, 1015 bp, Homo sapiens
tcaagaaaataaggtaggtgtccgaagcggggcaagccctttgaggacactggaagtgtgataactctgtaggcgaaactcatgcggaccgtcattggccgatttctcttttctagagttcacgatctaggagatcctgctcgtctctgatctccccactgccctcccgggctcccttggaggcgcctggaaagctgagccgccgccagccacccgccagaacaggggcggggcagggccgcgggtccgcacagagcatgcgcagacgaagcacggcgcatgctccgcagcgcggcgggtccacagatgaggggagtcgagactcccgcgccccaccacccccggcggagctgctgctgagccactcaatctgagccctggctactaataaagttcgtttaaaaatcataatcattcttaagagagcgaaagagggtgcgaactagccgctcggccccgcagggagagctggcgcgtcgggaggagacagcggcggcagcggttgcgccgcgaccaggaggagccggtggcgccgggcggcgggtccgcggccggtgggggacggtgagtagcggctcgcgctgcggtgcagcggcgctgcactcactcgccctctccaggggctgggggttcgtccggctccactggggaagactcagcttctccccggggtcccgggttgtgccttactctccggagtgggcaggggtatcgagggcaggggcctcccggcccggctcccccatcccccggttcggaccgccgagcgccggctctcccctccctgagcaccgatcccaagttccagctagagaaggtgggcggcagcgccagcccggcgccccctcccagctcccagcggtgggtacctggaattgcctggtgggcgggaaagaggggtggagcgagggcggcgctgcgtccccagtctggccgaacgttcggctttttgcctgccccaagtcccgactggggaaggggcgacccgggctgggccagacaccagtaagggcgt

SEQ ID NO: 121351 - DNA, 1039 bp, Homo sapiens
aaaaggttttagtgactgattgtagggggaatggagagagaagagttataaatgacacccaggtttctagttaggaaaattagtggatggtggtaatattttgagatgtgatatgcaggaggagaagcaagtcttggaagacgtagagtttagttcttaacatgaatttgaggtgcctgtggagatgtctagtggacaattggatatacaggtctgaatatacaggaagacatgtggtgggagtagatttagcagaaggttggaatcatcaggagtaggtaagagcaccctagaaaaatatttgagtgagaagagatgacagtggaagttaagacatgaggaataccaatattgaaggtaaagtggaattggaggaatttgggaaggagaatggaaaggagctttctcagaagtaggagatgaaccaggatagtagtgtcatagaagccaaggagggctagagtttcaataataatgatcatgatattaataatgataatagggaataacagcagatatttatattaatagtatgtttgctatgtaccagattttgttctaagtgcattacatatattaacccatgtatgtaattcatacagcagtcttatgaggtgggtattattatcatccctattttacagatacagcctatttattcacagactgaataacttgcccaagctcataagatggtaaatggtggagccaagatttgaatctgggtattttgtttctgtagtggtgcttttaaccacaatagtttcagaagcttaagatagattatgtaagatgaattgtacagtgtccattggatttagcagctggatgggcccttatagataggggcagagaccagaacaatgacagtggttggagaaggaaggtggagcggtggatatagaagatgtacttttttaaaatgtgtagctgaaaagagaagagaaatagggcagaatataggggttgttttagggaaaagagaagatatacaagcacacacttgtacatatatgacaggagatacttaaacatgttt

SEQ ID NO: 121352 - DNA, 1032 bp, Homo sapiens
gggtctcatgccattacctaggctggagtacagtggtgtgatctcggctcactgcagcctcaacatccgtgggctcaggtgatcctcccacctcagcctcctgaggagctgggactataggcacatgctaccatgcctggctaatttttttgtagatatggggttttaccaacttgcccaggctggtctcaaacttctgggctcgagcaatctgcctgccttgacctcccaaggtgctgggattacgggcatgaaccacgacgcccagcccctattttctaacataaaatgaatattttgcagttacattaaatgcatgaagtattttatgttatttaaaaataatgcagctagtctcgaagcattcttgtatttaatctttttaatttttaacaccccctataccttgtacccaacccatccttagaagattgtgatatgtggtattgatattctccttaccgtgatagaggacttgcatgtttttaactgctgtccattggcatcttgctgatgtttgaatattgttttataaacatttcttagatttaataattactggatttttagtttgtactcataatttctgtcttcatttcagtgaagaacttagacgctggttcattcaacaagaaatggatctccttcgatttagatttagtattttacccaaggataaaattcaggatttcttaaaggatagccaattgcagtttgaggctgtaagtatatttttgtagttatttctaattgttctcaccattcatttttcccttctgtcttaagtgctggtactaatgtgtagtgtgttctctttacattctccaagtacctgcctgaaacagtagctaatagctttggataacaatatatctttccttctctatgactagaagaaaaggactccttaataacaaagtctcacacttacttgctctgttaaatgtgtgctttattaaagcacaagaaggtttagtttataaaggttcatctttaaccaaaattttgtcggccaaaataaagctaataatg

SEQ ID NO: 121353 - DNA, 1175 bp, Homo sapiens
ggcctgattatttttctttttatttaccactcctcttgagacaggtgtgtgcacatgcacacatacataaagaagatctacggttttggtggtatttatagcagggaaaagagatgatttatttgaactttttagtagattactatcggtagtcttaggaaaagtctattttggaatttcactgcctcttttttatttttttattttttggtgagaggttgctagagcagaggggctgtctccaagaccatgtcttcatcagaaactggggtttaatagacgttagaaatggtatatatttcttccaccatctcttaagctcttctgtttattacctgacttttgtttatcaaattccagagttgcttacttttgttttgttagctaataggggtgcttcgggtgggttaagagaagaaatacttttttcaaaagtcaccatcattctgtgtgagagagaatgtaattcctatagagaaaagtaattagttagcttggtgtgttgtaatggcagctttgctatttttttgtactctttctctttcttcgtttcacaaagaaggttgacaagctacttacctttctatgaatgcttttctttaaaactatataattgaatgcctagagaaatgaaccttggctttagcagtactgaatggcaaaagtggaaagaaactcatttttcccttccttccttccctacttctctttctccttccatgctttccttccttctttccctgtttcttaaaaaatgcgatttgaatctagtttgggtaaagttgacctgtggggagttgaatgagaaaactgaaattaagtatttttcttctgagtattgtgttaatttgctccaaatgacagaattagcctaaatgttgagaagtgctaagtttcagcaaatgaaattgagcttaatttgtatttctttatgtttactgtgtatgtggtaaaattagataattaataaaggtttaaagggattctaactgataaactcaccgtttcaccttcttaaacctaagaagcataatttgcctaaattatgcaaaatgctaattaaagggtttaatttgctaatcatatccatttgattagaggcagatgctgattatctgcacaattctaaatggacctttcaaagatggctttcattatttaaaatcaacttgtca

SEQ ID NO: 121354 - DNA, 1048 bp, Homo sapiens
agaaaacatagaaatggtccatcacccttgggtctactcatctactgaagaaccatgacacaattatatatgtaagcaattagtaataaaatatcatatgtttataagtataaaggagacatacaagaaaacattaaatgttcatctttccatacatgtctgtcttcatgttgcattagtttcaagtgaaatgtgtttttttatgttttattactatatactataccttttcatccaaagaagaaataagagattgtctcctttattggaagacatttttgctggatgtagaattctaggttggcatgtactttcttttagcacattaagatatatcactctgctgccttctggcttctcctcttgctgtggggaaatcagctgttagtctaactgtagctcatttgaaggtaagacagccaccctgctcttagtctccttttaagatattctatttaatttacttttgtttgatttaaatattctgtttgtctaggagtagaattctttttatttatcctgcttgagtttcaccagcgttcttgaatttgtagattggtgtcttatattaattctggaaaattctcagccattattgcttttaaacttccctctacctgttctttctcctctctgtctggtgtgttagtcaactgtattttaggtcttcttagtcattcacttttcatcctcaggttgtgtcttccttctttttgttctttctctgctgagttacagattattttttctgaactatttcccagtttgttatttctatattctgttttgtctgttctactcccattgaattttaaattttggctactgtaatttatttgttttttttttttcacatctgctatgttgctttttatggattcctattccttgcagatattttaatatttgcttttctttttcaaatttgttgtaggttgctttttaatctgtctgataattctaagagttaaaatctgtgtggtctgttcctgctatggtttgtgattgtctttcacccatgttgccttatttccttgcgtggttggtt

SEQ ID NO: 121355 - DNA, 1028 bp, Homo sapiens
cagtaaacatttcatcaggtattgtggtaagaactgggaatataggctgtgtgcggtagctcgcgcctgtgatcccagcactttgggaggccaaggcaggaggattgtttgagctaaggggtttgagaccagcctgggtaacataatgagacccggtctctacagaaaattaaaaatcagctgggcatggtggcgcgttagcacgcctgtaatcccaggctatttgggaggctgaggcaggagaattgcttgagcttgggagatcaaggctgtagtgagctgttccagcctgagcagcagagtgagaccatatctcaaaaaaaaaaaaaaaaaaaaaaaaagaactgggaatataatcgttatgacacatttacctgtgcttaggttcatatgttagtgagggagatataaatgcttatagtattgtacataaataatataaaaaaaaactgtatcttcaagcagacaggtatgtaccagcatggaggtgggagtaactatgcctaaggaaatctggtgcaactttgcagaggtaacctgttagttgcatagaaatttgccagtagaaacacagggtatagaaagacatttcagatgtgggaaatatgtgtaaagtcatagaagtgaaagaaagacatggtgcgctataggaagtgcagataggttggtataattggagggcaaagtattttaggggaagaaaattgaaactagaaagagtttaaaggcctgggataaaaaggaactttgatggacacaaagagcctgtgtagtggggataatggagtaagtgagcaggaaggacatggagatgtggttggggaaaatgtgtgagggtaggggtgatgcgttgcttgtgaattgtgctgtgatcgtgggagtgggctgcagaagtggagggtgagtgggtcagaggatgctgacgactgtgaaactagtgttgactggatcatccatatgggtgtagcagtccatttggacagtggcaagaaagtggatgttgtgatgtcgacaagatttggatttgg

SEQ ID NO: 121356 - DNA, 1100 bp, Homo sapiens
tgctgcatagacatgtagaaagatggaaagaatctgagtccttgttgctgtcgttgagttgctgaattaacctattctggaaccaccaaactttttattacatgggataatgaagttttaatttttaaaggcactaacttaggtactcatatttgagtggaattctctttctctagtagcagaaagcatcctggtacctagatcagtgtctgcgttagttagtattttcttttctagttgcaggtaacagcctatgctacattaaccaataaatagaatctgttagctcataaaagtgagaagtctagattatagtatggacttcagacatagcttgcccaatgtttcacccctttctctgaatatgtctttacccttatgtgtatgccttatcctcagtctggctttctgatggttgcaaaaatagttaccatgggatcaggctttatttctatatagcatactatctgaaagagtttctttgtccctgggcagaagtttgaaatcaaggtgtcggcatggccatgcttcctctgaaggtgctggggaaagatctattccacatctgtcttctggcttctggtagttctttgacttgtggcaacataactcaagtcttcacatggcattcaccctgcatgtcccaaattctgctttttctaaggatatcagtcatattggggtatcatttttctaaggatatcagtcacctctcaactccagtgtgacctcattgtaactaagtacatctgcaacaatcctatttctaaataaggtcacattctgaggtactgggggttagtacctcaacatatgattttcttgggacagagtttaacccatatcacatgtctatcactaaagcagctattgtggtttaagggatagcctagcctaagatcatgtgtctgcccctttagatggggtatcatgggagctgagagtcagtgtgttcctgaaaccacaatatcccaaacaaaaatggatgattgttaggaatggggagaggggagaatgaagatggggaggcagacaacaattgtctactacctagaaaagacactgaatatgaattaaatgtacaaagtttttcactttgt

SEQ ID NO: 121357 - DNA, 1027 bp, Homo sapiens
agctatagccagttcttttatttaatggtttatttttaaataactttttatttgttcatccatgcataggtttgggtactagagatactacttaacaaattagatgagatttcttctcttacaaagcttatattctagtgggagacagacaattactgaagaaataaacaataacaatattgtaaatgacatgaaggagccagctgaacaaatatagaggaaactgcattccaggcaggaaaagtcactaatgcaaaggcccccaaagggaggaatcttggcctttttttttagaatcaaaaaggccagtgtagctagagcatagtgagctacggtagagtgctaccatgtgaggctgcaatggctaggtgtagactctgtgagactttgaggtagagtcccagggtaaagagtttgatttttttttagcctaatgtagttgaaagacattggatgattttgaataagtgagtgatatgatctgatttatgttttaaatagatgactgtggctgctgcttgaaagccattttggaggataaaaaaggaatggaagcgggaggactagtctggaagttttcacattaatctagatagtggcttgaaatggattggttgtggtgatatgactgacagaagtcagtggatttcagttagtttttaaagtaatattgacatggtggattggttgtgagagaaagagaagaatcagcataatgatgatgatgatgagagcttaagcatagtgaaaatttaatatttgccaagtgctattctaaatgctttatatgaattaatgcatttagtctttatggtaaccctataaggcaggtaccattatcactctctgaggcttgtagtatctttatacaggtagtgaggagcagaagcaggatttgaatccatacagtctggcatcaaggtctatgttcttgaccattatattacactgcctagaattttggcttgaataatttattagggggtgatgcctttgccaagatgtagaagactccgagaaaaatatg

SEQ ID NO: 121358 - DNA, 1045 bp, Homo sapiens
tataaaaaactgtaggcttatagatattgtcttagtttgggctgctgtaacaaattatcacagactgggcaacatcaacaacagacttttgtcatcattttggaggctggtgggggcctgcttcctggtttgcagatggctgtcttctcattgtatcttcaaatggttgagagcagagaaagaagcagcaaactctcatgaccttattacctctcaaaggccaatggatatatttgcttgttctattattcatggtagtacttagcaaagtgttttctaagaggctgtctataaaacttaccaagcaggcctcttcattttgcccatgaacgtctagcctcagaaaggttgagcggcctgcaagaactcacattgctcattagtgaaagacctgggtcttttgctatatgtctctcgaaactcaagttcattgcctgttctactatagtttgttgcctctcctgctttctctgatttaccctcaagcaggtgtttccattgcatattttaaatacttcagcagctccagggtacagattgtgttatattcaacttagtgatctctgatacccagcacaatgccttatggagtagatgctcaggatctgatgaattaccttgtgagagctgcatgtttgcatactcttgatttgttgagaaaactaaagtaacttggggttgcacctcagtgtactgtttataaaagcaaagattaaactgtatacctgataatatgtgtgaagtgctgtacatgcagaatatttctgaaatcccaattgcaaatgtttatgaactcggaaaactcctgaagaactgttgcagttggctgcagtagttcaagctgttattcactggacagtttttctctgcagtatgtaagatgtgaattttatattttgcttcaaaatttatgatgcagcataaaccaggtttaaagtctagctaccttgcaaggagcagcttccttcttcatggttgaactctccagagtaatccttgggttgctatttttgtggtcacctttgtggatttttttctctttcct

SEQ ID NO: 121359 - DNA, 1021 bp, Homo sapiens
tgacaatattgtttaaattttttaaaatctgtgaatgtgtacttgattacattgattaaaacaatattaagtcaattttgcattcctgggataaacctactatgtcaaggtatattacctttttttatatattactgaatttttgctttactgccaatgagggatgttgatctagacttttcctttcatgtaagggctatctgattttggtatcaggtaatgctgaccttgttaatgagttgggaagtatattccttcttaagtatgcaatttatatagcagcatagtataaataatacaatttaataatgtaatatatagagttgtttaaattgccaacatttttctctattttaaagttttgtctaaaatagatcttaactaggtttgtcttataagctggtttaatattttataattaaaatatttttaatattaagattttttgagaacatagggaaaaagctctgtggttttaacaaatatataagtatgctaattttaaaacactaagcctttttgtagaaaatttggagagtacaagactgcatgaagacaaaatcattatgtagattttattgttgagataatatggaatttaacatttggaactcattttcttaacatgcacaagcattttctcaatattttaatttttattaacagcatgcttatgactgtgtaatctatcacatggatttagaatatttgtctataatataagtatatttgttttatttatctaattattgatattagacttttaccctgttagcaattttctacaatcacatataatgctgtgatgagcacttcctatgtaagcctctgtttttatttacgatttgtttctttaggtagatttataaattaaattattgggtcagagggtcgaaatgtcttgaagctcttgatacatttatggaacggcttttatctatactacttcagtttgtacttctccacatgatatacgagaagagctggttcaactcttcaattattcaggattttacagtta

SEQ ID NO: 121360 - DNA, 1793 bp, Homo sapiens
ggaggagatgaaaacttgaccaaaaatggatttctgtgagcaccacagaatttggtgaggtttagtaggactccggaggaataacattcgggaaggacaggatgtctgaactgtatgaccagtcctgtcctttttgctgttctctccctgagactcttttttcacctggatgattccttccccttttaacccccagccaaaactgtgcttacagtgatcaggcaacagcctgatcattccaaaggaaattttgaaactgaggagaaacaaatacttaaaagaagaaacatcataaaagtatggacttctgaaatatgggcttctgctcctaagatcctgttgaagggactgaagaatttattgagcctcagttctctttctgctagtacctgatgagctggtgtaacctgcctggctgaactttgcccccagtcttcatctcatgggtaccttcttatttattgccacattgaggccatctattgtcaaagataaacataaccagacatttgttaaagtggtacaaacagattttattcagtaagtactgatagtacgggaaagagctgagctcattccaatgtgcacaggtggtttgggcattttaaagggtgtttattcttttaatgcaccaatggggtatattatgttttttgagtgtagtcactgatcatttttaaatttggaatcctctacagctgatgcttgatttgccttgtcagcatttgccaaattacattcagaggctaggaaaattatgccatccccttttcgttgataaaattagttctacattcagcttgcaagttttaaataatttcttctcccatctcctctttttgttctgttaccgtcttctcttttcctgtttatctcttccttggattcattccctcctcttgtgttttaggatgaggaggctaatattagattttagggattttgcttagtttgccaacagtggtattgactgggttgtaatttttaaaaaccactgggacagcttggttttagatgaagaggatttcagtgagtaaaggtatgaataaaccacaccatatcttataaatcctcataaagtcgctaagtctctttcagaacataatgtgatttgtcagttgtcacactttgtgaactgcagatgccatcaatcatgagagagagaaattcctatttaaatgtttgattatttgtcttcagaaaatgtgattttcaactattttagtcacaaaccttataagcaataatgaattggactcccattggtagtcctgaacactggggagtgttcatgagtgaaatacagactgatttaacttagttggatgctgcttacctagctcttaaggctttaaaagttgtgcattaggctggaatgttgatatgcgaaggatttgtaaagaaatatatttctagttagtgcatttcatgtaaagatttaacccttttttgttgttgtgataaacagatttattttcccgaaaatggacattttctctatagattattttcttttatttaattaaattgcatatgccccaggagtctcatgggtatgtacacacttaataaatattattttgtagtttggttttgaaattggaacaaagtgcttactacttaagattctctctttcttgtcactgcagtgttaatagaacataattacataccttatataaaaacttggtgtattagtccattcttgcattgctataaggaaatactcgagactgggtaatttataaagaaaagaggtttaattggctcatggttccacaggctgtacagga

SEQ ID NO: 121361 - DNA, 1115 bp, Homo sapiens
acctcagccactatgctgattcctgaatactggagacaaaagggaaggcaagatgaaaagggaaggttatacttctttattaattcacatagattacccttggctctgcctgccacattttcatgagaatttcttttatttttcagattcctctctttatagtagcctgagaatctctaggtagttactcattcttagaattggtcctggttactattttcacagaagagaaacatgaaaatctgattaccaaaggggttgtgcttcctgcagttcagtgtagtctttgtccactagaaggaagaacattgttctcccagcagcctgacacaccacagtaatgtatgtgtatgctgccattgctggttcagcatttatttctgttggtggagtgaggctcagccatggtctttctagttctgtagttacagcttcttcagaatacacagacacacaaagccatttcttggtaattcactctgaggagtaaatacttcctcagagccaggggattggttgggaggagtttgcagttctagacagccagatagcattgtttctgaaaagacgtcttgtaaaactttagcattctggcccttgagcatagaacagtcctttctgttctcaaatctattgtcttaagccttttcctacctcaggatcatgagtaactgttttttttgttttttttttttttagaagtaatagaaaacttgcctcagaatagcttcaataagaaaggaaatgaatgtgctcagataactggcagaattcactgatagcatgggcataggcctggcacacgccacttctttttttttttttttgagacagtcttgctctgtcacccaggctggagtgtagtggcaccatcacggctcactgcaacctgtgctttttgggttcaagcagttctcttgcctcagcctccccagtagctgagattacaggcacccgccaccatgcctggggctgctttcctagatacacagaaaacaaggtggataggtgagaagcactagaaatatccattcagttattagtggggattaggttcagggctgttgtttaaggagcccttaaactttaaatttcaacacaggaatggaggtccc

SEQ ID NO: 121362 - DNA, 1077 bp, Homo sapiens
ttacttaaagtcagctgattgtaaattgttaatcatctctacaaaaccttcacagtgccacctcgattagtatttgaccaactaactaagcaccatcatgtagccaagctgacacataaaaattaagcacccctaggtgaaaaggtactgcctgcagcagaagagggtatgaggggcacagagccccctcctggtcatgaaacattgaggtcatgcttcacctagtcatgaagcattaaaggttgtggcagccttgttctccatgctttttcagtacatgtgatgttgtatggtgggggcaggagcatataagccagtgtgaatggtttttgttgcagtctccatacagaccaggggtctattttttttttttcaaacttgaaagaaaagtagaacattttacttatacttagagctacaagtggcttgttagatatcagagagtgtactgaattagaaaaaatgttctactgttggccagttgccaccaacagaaaagttaggaagatgtttaagttgatggagtgcttaatttagtgatagtttttggtgagcttttggaaagctttactaggatttaggaatatgcctgagtctcagtaagcttctccttagagaattgaagagtctctgcaattccacagaaggcagtacactcgaaaaccatcaaaaggatattattctgtaatgctcgtaagttctgtctttagccagttaaatatgatatctactggattttaaatgactatcattttaaagaatgtcttttaagagtttactgatttaaatcttttgataggcctgtcttatggctgtcatcctgatttaaataaaaaaaaagcttttcaattgaactttcaggttgaccactagttataacttctaaaatctctatggatttgatttactgcaaaagtaatatcattaattttataagactacttctaagctgtgttttccttgcttttggattttccctatgacaaatggagaaggactgttaaccaagttttattggggtaagatcaattttatgaagcctgatgacttcttattctaaattttacctgagcaatg

SEQ ID NO: 121363 - DNA, 1047 bp, Homo sapiens
aggatgtagtggctggtgtcaggcagtgatttccttatcatcaccgttgtgattatcttggcatacatatattgctgataattgatattctctatgaagagcctgtttaactcacgtctcatcccaagtgaagggccatcttgagcctgagtttccctctggaactctctttatgttgctgagaagcacagtgcctcctggcacattagctttcagtctgtgaaagcagatactttcaaatgggaaaatgccatgcaaggtgaactgttggtattttcacagcaggcaaattcttagcaccctcagtataaaaacactagtgaatcacatttatggttttgtaaccattacaatgagaacagacagtgacattcaaatctcagaaaattgaacccttgatattgattgttaatgtggaaaacttgaagaagcaggtagaacactgtgaccttacgatgtgaattctctaatcagaccatacagatcagtcaaatatttgacttattgatttttggagaaacaagctattttgtatgcaagatatgaaaatactagaagttttcgcccttgattcagaataagcaatgagagtcaaggtcttatgcagtaaatttgaagttatgttaagtagtatatactttcaatattttaacagaagggatcatcagttttctcatacatgtagctacatatttaaaacagtattatttgcatttatattttaatttctgttttatctcatattaatttattaatacagatgtaatgttattaagaaccaaacatactattctaaatatttaaaagatctccaccacacagaattataaacttctgcggcccacatttgaacatacttcttttctgcagtctcatctctgtaaactttgctcacttaaaaaactactcatttagagctttatctccaatttctagtactttggaggctaaaaatgcagttggctgagttaccctgacctgttaaagcagtctttccattttaacttaagttcaccttaagaaacatagattatctttggacaaatg

SEQ ID NO: 121364 - DNA, 1032 bp, Homo sapiens
acacattgtcctttaaaagcttactagttatagctagttttagttacagcctacatcttgtgtttttatttttatggttcaaatagtgcctgaattctagatctgcatgaaaaccatgctttcttctcagcgtttggcactttagttgtccctccctgccaactaccttctttacatatacacttcagaggttaaataagaggaagctagaatgagtctgaatagtagattctaaggcacaattacagtattaaaatctcattcatctctgctccagttttgaaagagcattggtgggaaattataattatagcaatagctgagttggctccttgtgacacagatttataatgttagatattagggatacttattttttttttccatccaaagtctaattttctgagtcacttggaattttagatcttgcctttctccagggaccatctggtttggaaaaggtacaaagattgtgagctgtggtatgggcatgtggaagagatactagcacaaggcactaaacaaatagaggagagagatggctaaggcagaaagagcaggagagccaaggggagggagttaataaggcaagaacaataaaaaagggtggttggtgaagaaggtgttgtggtgaaaaggaagaggagattgaggagagagaatgtagagaagaataaatggtgataaaaggatggagggagaatggattcaaaggcagaaaaattagtaataaaagagcagttaaaggagagtaggaggtagagagtagaggagggtgaggaaaggaaggttacaaagatggtgaggaaggaagaaagaaatggattgactccatatccagtgttctgctaacactggtggtagtcactgctgttagctacatggtctgtttatattgaaggtgaaatcacagcagtatagggcagatcaagtggcatttaatgcttcacagttcctggaggtgaatggatgaacaatgaatgatttgcatctttttacttttgtaaagagtcatgaagttaaacggaatta

SEQ ID NO: 121365 - DNA, 1089 bp, Homo sapiens
atatatacaaacataaaagacatggcatgtttccttaaagaacttaggatcctctagggatgttgaaatatgaaacaatctgtgtctgtgccctaagtgtgtcacgggcaaagtcaggttcagaggaaggagagaattgtttctgcttgtgatttgaggctaccagttttcctgactcctaggtcagtgttgttgttgttgtggttttgtttgtgtttttttaaaaaaatcattaccttacctctctgatgtcactttgggtgtcctagatacactctatattccacagatttattcccatgcccctaccccctcatgaacttaaacattaaacatgagtcattattggaattattgtagttttaactaataaatagtaaaattttattggactcttgaaggtcatgggtcatcatggacttaaaaattttagtgtcagtacccagttgtccagaatttagaattggtaaaatacattcagctaccaaaattgcgcagtaatatcatcctgtttaattcagctggaatttaagttaatggcagatttaatggatgggacactttgtagcttctgcagaccctgataagctttacataaataccaagttgcagctacttgagtgaactacagttccacaagagaaattcactttaggatattttgaaataccattcatctgcttcagttagatattttaggtaccatgtcattcttccctatttattaatgttatataatattataccatgtaaaaagtattaacaacgtaaccatcattgtatttgcattgtagcgtaatcagctgtgaaagatgaattttcagatgtatacttatagtactctttgctaaaaattctgtaggccaccctgactcattggttataatattgtgtagtataagtaatttcatgatgtgattatttttatatttatttatttatttttgagatggagttcactcttgtttcccaggctggagtgcaatggtgcgatctcggctcactgcaacctccgccttccgggttcaagtggttctcctgcctcagcctcccaagtagctgggattacaggcatgagccaccatgccc

SEQ ID NO: 121366 - DNA, 1055 bp, Homo sapiens
ctgatatcaaagagcattttacaaatatgatatattaaaatgattactcttaggaagtgtatccccaaacatgcttactttaccctgactcttgattttatgccttggtactttgagtagaatagggcaggtacagataatagtatgtcacagtggtctagaatctacacctttcctgcttgcagtatggtattagctagggtccattccatcacgaaagtggcagctcatcattttgggcagtcagaaaaataggcagttgttataatagctacattgttttttaaaaaacttatgcaagcaggtaagggttttttcacttttagaccagcatcttttctttaccgtagaatctaattattgtctctaatctaaaaggagatagaaaaatgtagtaacctaaaggaaacaaagaataagaaaaatatctactttttgtaagaatgggattttgcatataatttgatttactaggtgacctaagttaacagggaactgatttatatttttactggtattaatacattaaattcaggggtttctgtgttgttaaaggaattctgtgtcatttgaaacttctatgaatttagaaatgagaagacatcagtgatctaggtggctacttgtgatgattcctaattttgtaaggaaaataaaaaggagatggaaaaaggatttggaacaaccctgatgtgtttgttacaacatttcaaaatatgtctatttcattttccttccaacatcctcaataatgagttttgtctctaaatttgtgatgaattaaacatttgtgaaatgcatcctatgtaatgttggatcagaggctgaggtgaaatttccaattgacataaatgtgcttatcacagtgaagacattatacttttctattttcatttcataatcaatggtttctattgatttttgtctgttagcaacggaaattatttacttcttctgttttgttttaaatataattaggaaagttttataattaatcacaaggctctagttttaataggcaaaacatgtttatgtgtaactgaagttagtcacat

SEQ ID NO: 121367 - DNA, 1172 bp, Homo sapiens
caggcacgtgccaccacacttggctgatttttttatttttatttttagtggagatgaagtcttgctatattcccaggctggtctcaaactcctgagctgaagcagtcctcttgcctgggcctccctaagtgctgggattacagacttgagccactgcgcccagcccactctgaattgttttatagccattcccaaatgttaatgaaagtccaaattgggggaaaaagagttcctgcagaaaatgatagtgtatatttacatatacatgtcttttctgtgtctcttcactttggtaattaatataattgtggatctttgacactgattttagattacttaataaagaatgtatttaagtgtagtgcagaatagattatctttaatgtttgcaaaaagtggtacactgtttagtaatatttaggtaaaatggtaagattgccagtgtaatgggcaggttatatgtctggaaataggctcagcaggaagttaaaggaatcatggcctatactgctgacagaagataaacaacatgcactatgaaacccactaattcagtctgggccctcttttaaacatttactagaagcctgtagatacggtcggtaactccagtgtacatagtagaatttatgtgcatattcaggaatttctatgagaaacttccacataataagattttgcggaagattcatgcttacaataaacagtaaaggaacagttttggttctggaaaacctagataagcatttatttccttacattaaataagaaattgacaaatgtatgtttaggtaaatatggtatagatgtttaggagacaaaaatgatgaatgaaaatacaatcataataaggaattttagaacttcagttattgcctcacaaatttattaagtgaatgaaaaatctaggaatttaaatggtttttagagtctttgcataaaacaatttttggctaaaaaaatgtcatctctgtctctctgaacggtggtagtcacatgaaatgacacagtgaaaagatccagaattgtctcagccaactcccagcctcaattgtaccaccaaagacttacctcacatgggctgtaaggagtaaaaatgtagtaatatgttttctaaagtaataaaatggccaaatgtatggggctaactatactaaggaatagataaaacc

SEQ ID NO: 121368 - DNA, 1046 bp, Homo sapiens
taattaaacatatttatagtaaaagcaagaacatgttctagagtcaaatgtaaattttgtatacacttttaagataactatatgacattaaaggaagttgatggttagggcataaaggtcacctgttgttcaccctccttgaatgttccaggtacctttggctgaacagtttgagaggccttgaggagcctcagagataatatccaagggagaaaagtcagtgatccatgtacatttatcactgcatatctcttaataccttttttccccttgctcaagcgattgttttacatttctaagtgatgtagagcatcagtaaggtgcttaggttagcctttgaataacaagcttcttttcacaccataggtttcatgatcaaaaattagcactgggatgtctgcttgcactattcccaggtttgcttcctcggttcttcatatcatccagacccctgaactggaaatatcttgttaactctgcactgtttaatattctttggaaattaaactacttgggcatgtttagagctcaaatggaatctatgcgttttgcttgacaaggtcgttggttgctttttagagcttacatattgaaaatcatgtttgcagccagctgatagagaaatttccgtgtatcaaagcattgttgtgatgaaaccacctctgttgtgaagatcacctgaaataatgtgtgtgagagccctgtggaaaccaaaaagtgctgtgggcatttgaacactagactgttatgattagtgatgaacagcatctcagcctgccaagggagaacatgaaactggagaacaaatttggttccaggagcaaggggaaatgtaatgtggaatctcacagtttggggtttgtaattgggatccgttgctattataagaaaatgtagttcaaaagacacaggattttctgttaaaatcaatgaagttaaaagagcagctgcttgtaaaagttaattttatttgacttggtcccagtaataaaagtgatagttctgttgaacaacctgttctctctaaagctatatctttttgttgc

SEQ ID NO: 121369 - DNA, 1003 bp, Homo sapiens
tgtgcctattgtttcagtaatgccgcctaaaaggaaaattttaagaaaatgtctgatgaaagactgatgtaataactttaccctcggagccagagggaattactacatgattttaattaggggtgtggttaattttcattttgaaaatttcactctgaccttggtataaattagggaaggggcaagaatggcagcagaaacaacagtggagatgtattaatagtttagggaaaaggaaatgaagactgaaattaagatgaaggggtagatgtgaaaatctttcctatgtggacttaacagatgtctagaatattttgctgttactgaggtgtttttcgtttgcctctattagaaagcatactatatagattgacagaagtgactgaaaaagcccactctgtctgctctgttttcagagcactgacttttgaaatgtctagataaatcatttaaatcgttttagaacacagctttggttctgagacatgaaatcttttgaacaatgaaaatggcactttgtaacaggatttgacattaacagataaaggatgtattaaagtattaaagtgttttgtttatagaatttgataaccttgataacatcttatatgttacatatatgttacttagtatttttttaatacttagtacttagtattttaatacttagtatttttcagggatactgaaagtctgttgattgtgctaaaattgcagcagattaattgtctctattgtattttaaattagtaactgtcgacatgttgactcttgtacaaaattgggaaagcttctccattattattagaatatggcactttggtcaactttttttcaaaaatataaaagatatttttagatgatagttttatttgcataatataaaaattagatttgatgaattaaatgttttccatttttaggaaattgtaattaatgtatgaaaaaaattaaaaagagagcatacactatataaacccaaaagatatctttcagtttgttg

SEQ ID NO: 121370 - DNA, 1047 bp, Homo sapiens
cattcactcattaattacttagtgcccgttatgtgcttagaatttaaagaaaacacacaatctctgttttcagggagttgggtttgatttcatttgagagataggcacttgaacaagttataaaatttgtatcattttctatcagaattaaatacaatgtacataattttgttaattgaactgtctccctcgtggaattatctcctcaagtaatcgggccataacttaattgttttggtttccgtgcattctagcacagtggctcacagtgggagctcagattggactgaaatttattctttttttgttgttttattcttagtcagctttctcaggctgaatggactgaactgtaatctcacttgagggataatattgtcattaactaagaaggagaataaagaaaggaagacaaggcaattagggaatgaatatgattgcttagatggtaatttcagtagtttcagacattttaagcttgagatacccgtggggacctatgtgggggatgtttagtaagcagttcaatacagacccacagttgaagagtgaggtttacatcagggagacatttgctaatcatcactgtgcaggtcttggttaaaataaagggaatggttgagatcacccaggaagagagtatagagagacaagaaaagggtgaagggttctgaatcgaacccacagaatatcagtgtttaaatgacttgtgatgggcagtgtgggagttgggatatgagaaaccggtaaaaatatcagggaggagccttgaaccaaaaaggatagtggtatgatgggtgctaatggtatggatacaagtccaagtcttatgaggatttgaggaataaataagaaatgaggctgtggagatatagggaataggctactcttggtagagcttaattctgaggacatgtaaggaaaaaggactgcatctgtgagcttcatggttgaagaaagtgttttattttttccttaagattggtaagatgagcatatttacaggttaaggcagaaatgagtagtatgggagtaagacggactaat

SEQ ID NO: 121371 - DNA, 1079 bp, Homo sapiens
ttttattttatgctagtttaaaaaatatgataaactataacctgccagatagaaaggagtaaatggtgttaacctctttaggcttaagaatactgggaaatgcttgacaaagaatggaaatatgttttatatgttattgtcttatgaacgtcagaaactctgtctgctggtggggagggagggcagagaaataccccctgaggatgagggaggaattctttccactctggcttaggattttgctgtaagccacatttgcatcctgtctattatggcttcttacaaatgagagaagaatggacagttgcaattaggtattgaggttgaggttggccaagcagccccaaagcctcgcagataaacatgtcacagctttctttgtccccagagaaacaattcaggttaccgccaagctaatcagaattcaagattgcttccctaatagtataaatggcaaactatgacttaaatataaaaacttgattcccaagtaaaatgttgtaaaaacaagcacaagcacttcctttagttggcctaattgcagcctgtattttgtttatgactggcagagattgatcttagtgcagcaaatagaagtcagggcaagtcatctggctattctataggtatacctagtcctccagagaactatttgattgttttatgtcattgtgtcctcactatacaataatgctatccagtagaatcataatgagagcaacaaatgtaagccacatgtataattatatataatttttaattactcagtgaaattaattttgataacataccttatttaactcttattcaaaatatcttttatttatttatttttttaagagatggggtctcactcttttgcccaggctcagctacttgaactcctaggctcaagtaatctttcttccttagcttcctgagtagctgtgactacagatatgtgccaccacacccagctcaaaatattttaatatgtaatcactatgaaaaattgtgaatgaaatattttacattttatgtactaagtctttgaaatccagtgtgtactttgtacttgttgaacatctcaatttagttta

SEQ ID NO: 121372 - DNA, 1032 bp, Homo sapiens
gaatttggatatatgctatctctttgtattatttcttgtaactgtatgggagtctatagttaacttcaaagaaaaagtttaattaaattaaaaaacaggtaaaataaattttaatagtatgttatttaatccaaagtatctaaaatattatattaacttgtaaccaataaaaaatgttaataagaaacatcttatacagataagcgtcatctgtaaccacagtaataaagcagcactttcttatggtgtttgtttttttattccaattaaattgaattagcaaccataacaaatattacagggtacctgataagtcttccacttaacttaaaactctactgttttttcttgtagctttctaccaaatccttcccactttacatgcatcagttacataaagccttgcgggaaaatcaccatctttgtcatggaggccgaatgcagtatgtcctatttctgaagggcattggtttaactttggaacagacattgcagttctggaagcaagaatttatcaaaggaaagatggatccagacaaggtaattttgaaaaaaaaaatcagagtggtacctgatattttaatttggtctgaaaatgaaacggtctatttttttttaaaatatgctccctgcaatgtagttgaaaattctaaaaggataaatgtgttgacaattcagtttagataaaaagaaacttgcatattaatctaatacaaaagattgggaaaggaatgttttcctttgtaggtatactgccagtagtaattataagactgaaattgctttcagagttatatatctgtaggaatatatgtgtgtctatacatatgcacataatgttttgagcactgggagatatcatgaacaaataaaatgaaacaatttaaaatattttctattatgttatgcagaatcttttagaaacttttggttttttttttcgagacagggttgcccaggctgggctggagtgcaatggtgcaatcatggctcactgcagcctcgacctttgggctcaagtgatcctcccac

SEQ ID NO: 121373 - DNA, 1014 bp, Homo sapiens
gggtactaagcttagtacgtgggtgatgaaatatctatacaccaaactgctatgatgtgagtttacctatataacaaacctgcacatatcccccaaacttaaaagttaaaaaaaaaaaaagaaaaagatatgacttttgacctcagggaacatagtctatactagactgttataacttgtattttaatataactattgaattgccttgcaaataataataacctctttggagacagataccacattttgttaggtttaaattcaagtaagtattggatatttagaaatatttcacaaaacttaataaataaatagacattagtctcctgagagggcagttctcttgttttggaaggcactgtggtgtggcggggagaatgtagactttggaatcaaaccagagcccagacctatttgccagttatttgccatgtgactttggttaagtcagcctctctggacttagttttctcatctttcaaataaggataatgatgggattgagatgaagattacatatgataacaacccttagtattgtgcttattagcacagtgtctgatacatagcaaatgatcaataaaatgccctcccctaagttcttatttaatatgatgttgaaagtagtaagcatagtaggaggacaagctcaagagtaagatatatctacctaggagactcagagagggcttcatggacaaattgatatttgaattgaaccctgaaggatggtacgatttggacatacagaattgggatgcatgaatattttatgatccatgaagtattcatataaaggttgttggtaacataataaaggaccttttaaaccatggtttggctaaacacatagaaccattactcaagtggagagtcttacactgaacctttgtaaaagctgagagcatgttattaagtttcagttaaagtattcctgctggatgctgagaaattacaggttggttttattgctgtcttctgatctttatctttcttaatatatatatagaagtt

SEQ ID NO: 121374 - DNA, 1042 bp, Homo sapiens
tgatgtaaaaccattctgtttttcacttttactacagtgttcaatacattacatgagatatttaatgcttttataaggtaagctttgtgttggattagtttgcccaactgtaggcaaatgtaagtgttctgagcatgtttaaagtaagctgtgatttttggtaggctgggtgtattaaaattcatttttgacatgatattttcaacttatgatgggtttatcaggacataaccccaccataagttggggaaggtctccacttttctttagagtcttaaagctcttccccaagtgcagtaggaaaagcgatcataagtattgccttatattcactaggacataaaatacgttattgtgtagtatgtgagaaagcaaaatgccctttgccttttcccccccgtttttcattacctacttgctagagttatagatagtatcacttgattgaaattgtgtttataatcacatcttagtcatgttgggggagattttttatagacatgttttaaaagatccttttagcaggctatttttcatcatttaaagagcaagagaaatcatatttttccagaagtactgcagtgaaatctgcctataactataattctgcattatgttttcatagttgacatcttaaaatgtgaatgaaggtatgtatatgcatttggtttgattttagactgtttgttcataggcatttcttctctgatttgttatacaatattatgaaaagctttttgctatatatttcctgagctgtcaaaaagtatctgactttttgagtatgactgaaaaaaatacttcaaaaggacaattgtgttcaataaatatatagtccatattatttaaaaatttgcccagtatttgaaaatgctttgtatttgaccacataaatcagagtgggtatgcccagtccaattttctaggtggataggtaggaaaatatgtttttccctgaccaataatgtcatctattatgtcacccaaatgcaatgaataacttggttttgttttactgtaaagatcctaaaccttcttttat

SEQ ID NO: 121375 - DNA, 1025 bp, Homo sapiens
tctctgggcctgttttccccccaactaaaggaaagaaagagtgcctgctttttggtgacgatcaagacttaagtacattttctataagtgtaagttctttctgaacttcagattgctattccaccaaagttaggatgagctatattggttatgagggagtacagtgatgattatttgggtctgttaagatttaacttggttcatttcatcattctggtcaagatacttacttttcctaaggtctgtcttatgctctcatttttatatgggaataataatctctattttttgggttcttgtgaggagcagggataatgtctgtcaagtgcctgacacactgctgagcacatataggcactctaagttgtagctgttgttaatttactttaaaaaaattattgatagttaacaaatactattttatgcatgttaatttgaaaggaagtaaatgagcccttttgatagcaggaaaagttgcagatattaacagtaagtggcatttgtgaagagcataattttccaataattttttaagtaattggattagttaaaaattaattgttgcaaaattaagtaaacaatattgatttttcttaaaaccaaaacactgataactacaaaaagtaaggaagttctaagtctagatttgcttatggtctttcttttctccctgaatgccatcatctatgttcattactcagacttttttgaaaatagaatttgaacataaacttgtagaagtataattaaatgagaaaaatatatattgaggtttataatctgcctgtgaattctaaggtgaattcatcaaccttcagtttttatttcagttcttacccttttcttttcttttctttttgagatggagtcttgctctgttgccaggctggagtgtagtggcacgatcttggctcactacaacctctgcttcccaagttcaggctattctgccttagcctcctgagtagctgggactacaggcacgtgccaccatgcccagctaatttttgtatttttagtagaga

SEQ ID NO: 121376 - DNA, 1066 bp, Homo sapiens
ttatagcactttacttcttttatgacacattatcatgctattttctattaatcacgcattcacataggtgattagttcctccaggaccataaactccttgaggtaagatctgtctattggatctttgcacccacctcagtaccagcatgcatgaagaaaaaaatgtgaagtactccttggtctactatagcattaggaaggctatcaacccattattctgctccattaaatgttttccaatgcctgatggttagtgactttttaaatttagtttttaattttttttagagtcagaatattgctctgttgccctgactgcaatgccacgatcatagctcactgcctcaggctcctgagtagctgagacgacaggtgcatgccaccacacacagctaatatttaatttttttgtagagatgggttttggaatcagacttgtctgtacatgtctaccatttaataactgtcgtacatcacattgcttcattctttgaacttcagttttctcaagtgtagcatcatagaggagttgtgattatctaaatgattaaatgggattacacttttaaaagctgctacaaaatgcctggcacttggtcacttttcattatatgctggttccttttgttctcctgtctgacccaattcaaagtcccttctgtcccattagcttgttttatgaacatggaggcaaggattctgggtaggaggcagttgtagtacttcattcattaagcatttgctgactactttgtatagtggaaatctagaggaagggattattattattattattattattattattattattattatattttgagactgggtctcactatgttgcccaggctgaagtacagtggcacaatcatggctcacggcagcctcaaccccccagcccaagtgataattctgcctcaggctcctgagtagctgagacgacaggtgcatgccaccacacccagctaatatttaatttttttgtagagatgggtctcactgtgttgcccaggctggtcttgaactcctgggctcaagcgatcctcttgtctaagcctcctga

SEQ ID NO: 121377 - DNA, 1045 bp, Homo sapiens
gcagataaacaagtaagtgtagtgaaataaaactatggcaggataagagagaagaatgagacttgtggaggtgactctattaatttaaataaggttgtttggtgtgttttgagaaaccctagtcctgagagatctatgagaaatggattctggggacaaattagtttgagaaacgttaccctattaagttctgccataaagaaacttatgtaattgtggattaaagccagttaaacaagttattagacaagaaaacccccgatcatcactaggattttgtgagctaaagttccaaagagcacattgcaggagaagctggaccagagtatgaggatccagtggccaggtaggacagggtaggagcctttgaatcatgatgaaaagtttgtgccccagccatgccaggattagatttggcttttagaaaaggtactcttgtggcaatgtggcagctatcttgagtgaagaaagtataaatcaagaagctttccaataaaaaagagaatgatgaaggcttcaaaaatggagagaaaagggtagattttaatgacatttggaggtagaattgacttagataactttgtttatagataataaagagtcagaaaaattcttgacatataatgttttaaagaaatgaaagtacatcttcaagagagggaaacttggccctgatctgccagtcagtgtaggtcacagcaagtcagcagcaggctaagctgtgctgagtgtgtgagaaatgggagcaaagtcatatgttcaaaaatgtgcaagacttggcatctccaccacagttttctttcacctttgaaatatgggaaggttagaaatggagtggaaaaatatcagcccagtctagttttgaaagattgagtttttttaggaagaagcaagcttgttatcatttttaaataagacaaaacatgaccttgaattagattagccacatatctaattggtgagtacagcatacctagctgtacagcgctctgctcaccaaagccaaagatgggcaggtggctgaattctgctgccaggtaatcat

SEQ ID NO: 121378 - DNA, 1103 bp, Homo sapiens
taaacagtatacttgattgcttcatgcaccaaccattagattactagatttctatctacagtttttggagagatgttgcaatatgatgttctgacaataactgtcaaagtcatcataccaggatccattttcatcttgctgttgaggtaaagttacaaaaatgtacagttggtaggtcagaaagatcactatctcttgtcatctgtggtttaatgctgacctaaaccactactgtataatgtcagaattatcacagtgtccaggctgcagaagtacaacatgctacatgatttattgcatttcctgtctggaatgaagattatgaaaaggccaacagctgtgagctacagtggtttagaagaaaacttaatttctaatttttatttgtctttttcctcattcattttagattttggatttagtaaaggggacacattaccaggtagcctgtcaaaaatactttgagatgatacacaatgtaagtatttttttaactttatatcctaattatttgtcttttgttactgtgtcacattcagggtttttagttgcagcaatggaaaccactctagctattttcagcagaaaaggggattgcatggtattaagtaacttacagcatttattgaacgaccagacaactaagcttggatgctgcagaaccaggaatattttgtaactaggagaagctacctcatgagaaaatctttactacagctgtcacccaccactccatatctagggatgagcccaagggtcaataaagtttttctgtaaagagccagagtgtaaaaattgtaggcttcatggtccatatggtctgcgtcacagctactcaactctactgttgtagtgcaaaagcagctgtagaaaatatgcaaatgaacaggtatgactgttgatccaatagaactctattgataaaattaggtagtagacccagtttgacccacaggccttgatttgccaacctctagactagatctggaatctttgccacagctgcctagaagaaccaaggcttttgccatcttccatgcagaaaatctgatccttgtacttgtggctgccacctgatgttactgtaatccacttcccaagtc

SEQ ID NO: 121379 - DNA, 1063 bp, Homo sapiens
agtattattcttatttaaaagctttttttaaaacaaaactcaaggagtaaacatcaagaaaatagcaacaacaaaatctcattagttttatcacactaggaatctcgccagataagccatgtttggcaacaccaggtttatatgagtcactctctcggagactgcattctttaatttggttgctccgcttgagagttttaatttcctattgttctttaatcatttgtggatgcttttaattaagaggcctcagaattttcacaagtgaagtctattatccaacctctttttataaaaataagatatgaaaattagatttaaacattgagtttgtggcataatcaccaaaaagtaaggagtggtttttatttctcaaatctgcttttgtaatatctctcctattgattattccctcaagtattgccactattgccaatttttaaaacttgttttagattaatgaagattttggaaagacatatatctaaatcccctcacatataaaaatagtcaacttaaaccacacttaaatcaacaaaataaaaaggctgtttgtattcactagatctctcactgtggacttttagatgtgaatatcctccttcatttatattttttctaatttaatttaaaaatagaatctatttttattgtcaggtttctgccatcctacccctcccccaaataaaatcctatgtttattttcccgaggcctctgtgatcaaacttacttaaatggaagttttgaaaataaaccagttaattgataccatttgcagcagcactatgatagttccatatggcttttttggtaataccagctgcctcattataagctgtcattgcaaaacctcttgattaaaacccaaatatcccataggtaaaacaatattgctttcattccttcaaaatctacatttgcagtggcagaaatatgagacccatgtttgtgtgaaggtcattgtgtgcagaatgtgctgattccaagcaaatgtttgagagagatttatttagtagatgttaaaagctggcctgcttgaaacctgttttcctctgtattttt

SEQ ID NO: 121380 - DNA, 1033 bp, Homo sapiens
tgtgcaatttagaaaaagcagggaaaggggaatagaaaatgttcgagtcaggggggagagttgctgttttataaaaagtgctccttgaagacattattacaaaggtgtattttaaatataaataaagtcaggaagggaaccatgtgattccatgaggtaagaccttttgaagcagaggaaatagtaagtgcaaaggtcctgaagtgggggagtgcttggcacttttgaggactagcaatgaggtcaacatggctgaggcagagccagcagagagtaggcaaatatgatagcaggtgaggtcaggatagtgctgggagggaactgttgattttactctgactcaggtaggaagtcattggacagatctgagcagaggaatgccgtgatctgatttacatttttgaacaatcattctgataacaggaatagatagaagcagggaggcccattgtggaggctattacaatattcccaatgagagatgattgccccatggactaggatttttgcaatagaaattctgagaaagggtgagattctggatgtattttggaagaagagtcaataagatttggtgctgaggttgaatatgggatgtgagtgaaaaagaagactcatgggtgaccaagatttctgacatgaataataaaaaatggagatgctattacttaggtggggaagatctaagtaatggcaacctgtaggaacaggatgaggagggagtaaagagtttcttttgagatatgttaaggctgagatttctgtgagacttacaagtagaattctttagtaggcagtgagatatatggacttgaaattcatggttgagatccagaccagaggcttgaattttggagtcatcaacatgcagacacttttcaaaagtatgagactgggtgagatctcttaggaagttaatttgaatagattaaagaagaaagaggactgagggccttgtcctgaggccctccaacatttagagtgcaaagaaatgagggagaaactgcaaaggagacctaaggagtggtcttag

SEQ ID NO: 121381 - DNA, 1031 bp, Homo sapiens
gagatcagtttaggtggagagatagcaagcaagtttcataagttattattacttccaaagtctagcaggaaaaaggaacaacatcagaaataattgatagggaagggatgagagagataaaaagagatggactgggaaaaatttaatgactctttgtggctttacatctgtcacagtttttgtgctacattaaagtttcattattttcacattttgtgttttcatattttttcatctccttctttctgctaaatttaccaagtaatacaatgtagataatggagagctatttctacaaatgtcattgaatctgttactggaaatgaataaagtgtttcactgatgcatttccttcaaaatgcattttcaattagcaggagaggatttgtgtacaaaatatactctttacaaaattacataaaaataacttaatatgaaaaaaatggaaacctaaagtgatgaatatgtgtatctttgtctctgtttaatttcactggatcaaatgattgtgtcaacctgcatttacaaactttattttcttgtgatatttggaatttacctagaaatacactctacctcagctccttgacctttcacttgacatggcatgcattttaattatgatttcaattattttctccaacagattaaagatatgttttgtatgaatatttgagggcatttgttgaatgattttcataaccatgtatttgcataattatcttggagtgaatcttcattctgagttaagaaagaacagtgatcctgttctgtttccatgactgaatcatcatgtaacctcttgcaagaacttgcatttttggtgccttagttgactcaagtagaagtgaatgggttttaatagcttgcctgaggcatgtttgtctcataaatgtgtggaggcacgctgtaacttaagatgctgttacttcaaacaagcactgagcttctacataactgttgcaggaaaagcaggagggaagggatccacgtcttcattcaccatttctttctttttatgtttttatttt

SEQ ID NO: 121382 - DNA, 1039 bp, Homo sapiens
acatatgaaaaaagcctggaatcgagttaaaaaaaagtatatatatatatatatgtatatatatatacatatatatatgtatatatatacatatatatgtatatatatatacatatatacatatatatatatatatatacatatatatatatatatatataaaacctccatttctctcaatataacctttggagcatttccttctatctgcatttctagatgggggagtgttatacatcttagtgttggacatgcaacattgcgacctgcttgttcacttacataagcacttttctacaggtatttcaagctctaggattttgaatgtggaatgaaatagaggtaaggtagtcaatttcataaatggtgtttcataaaatgtgggctacaggctacctgcatcagaattaaaagacttgttgaaaagacagtttcctgaaaccacttccccaaaatactatcttgccttgacttgtaccccaagtacctgaatataacatggcaattatgatactcaagcaattatttactaaactgaactgcaggagctagtatggtcacagacgattggccagaggtagtgattattaagagtgtgctgccagtcagtaacccaagtagaagagaaatgcaaaagtatctaacaaataccaattatggaagggcagtgacttttcagtttagtaacaatagaattagctcataacattaagcagaaaaaatcattttaaagtctttattaaatatattctgacctctaaaatgtaattgattgatttacattcattgctctgaagtaacatacctatatatgttagtaacttacagattattgaagaaatatagttaaaaataaaatattctcccaatccggaaaccctctccatgaaggaagtagagaaagaaaacacttttattattgaatgatcactaaaccaaaatatgatgcagatcacaggtaatccactaggagattacaaagacagaaagaaaactccctgttttatatagctaagcagatacatcctgttacgtacat

SEQ ID NO: 121383 - DNA, 3142 bp, Homo sapiens
gccccacctcgggctcgtgataatgggaacaagtctagtcttgtcctttctctgggccagtcgtcgagaaatggcctggttcggagcgtcttggaaactgacagggctactgttagttacactgacgcgaaggacttcccgtccgggcaccagcatacatttcccctgccaattttggaagggccctggatggcgccttttaatcggggactgtttagaactatccctgagctctgtggtgtaatatgttgttgcctcctgttggtttgtggcagcagtagccaaccagagacggaattctgagggttttttatcttctgtccgcggagccccctaccagtccacgagtattaagttatttacactacgattggaactgttgacctgcccgacatctagatcctgaggcagtgcttcctgttactcagtcagttgaaaactagaaaactaaatcattcccaagagtgagcagcattttacacatgctttcttaggtgccctaagacctaaatagatgtggaacagactatacaacgaattgtttgtgacaaaggagttacacacattaattggcttgactctgcagtataataatgatttaagcttctgcacagagattactctttcctcctctcccttcttgtatatgattgtgattataatgcaactgataggtgggagggaaaaaatccccattatggatagtttttcctgtgggtaggagattgggaatggaggagtgtcttgggcggaacagaaatctatcggtggccaccactgctttaacagacgagtccccccatccactaggtggctccactcagtaaaaataaccatttcaggaagggaattcttaatatagttctttctctgcttcctgatgaaagtgcttacttacatgaagggatatggccagactaggttgtagccgacaggagttttagctattaaatatggaaatagtggtgtgaaatactgcctcaaattagcttttaattgaaaaaaaggtaatacctagaaattagaatactgtgatgagtcattataaagcttttaaagatcattgtatgtcattgggaaagtgtcagaatacactttttattctacggaggttgtatttagaatttggggtgaaagtataatgaaattattttcagattactacaatctgtattcactgtaactgtgatggctttgtaatttagacacttaattttttaacccagctgaccaactaggtgaagtaacctctgagggcttgtttgaacaaacttgtgataatgaaagttaccttttttatgggaccttttgataaatgattgttaatgctagttgtatgttttaccagaaaagtagactgggtttttgacttgatgttttctgcagtaatcatcataagaattattcttcaaaatttagcaaagttctagaaactataactagcatgggactatttaaaggtgtaaaatggaaatgggagcagatcgtttgaattttaattttaagacttcaaatgcttaaatttaagcatggaaactaatggaaccttttgttaaaacactttggtaatgagagtacacatgaagtgcttgaggcagtgactatgaattactgctcttgttaacctgttattaatactttccttagtgccctctttactcccgagtacacaagtaccttataaactatttggaagaagactgattattaacatcagtgtcttccatgtacatattttaaaaatatgctgtgactattggtttaatgtttgatattggcataaaaatggtttagttcttaagggggaacttagagaaaatataaatacattcatatttgtttatatttattggttacagtagttaccttgcttttgagacctgccacttccaccttcaacatccctttgtccgccttctctgagttggatttcagttttgagttgtatatgtgaaattttggttttaaaatacaaaagaacattattaaaattatgaatattttctttacagttataaatgagagttgtttcctttttagattcataagcatacattcttatgatatttcacataacaagttgattttcagagactcattttcctcgtcttcagtttaatgggaatgataacagattgttaaggataaagtgagattctaaatataggacttaaatcagtctaagaaaaggatataaaagcataaagttggaaaagaacttagatgtttcagtttatgagttaagtaaattatgcaagactaataacttcagagttatctggagtttgtattaatgtgtaaaaatgtttttgttagttggaaaaatcaacataaagtgtatgtaattacaatgtaaagaaaacaactatcgaaagggataattattagaatcatataattatatattatatatagatagtatatatacagagaatataactagatagaatatatatgaatatatatatgaatttcacaaaaatgtaacaatgggtttggtttttttttctgaggaatcttggtaatagatcatggatttcagtttaatctatctgactgcttgttttatgctgattgatttaatctgtactcaccccttgagttttgcaattcaagtaaaagtcgatgaagcggctcaggccctgctttagaaaaatagttgtgtacttaaatagtgtaaaaccctaatgtatttcttttgaattggaaaataacttattctctctttctgtctttttcttttaaacagcaattctgtggtgttcttggtcacacatttatggagtttctgaagggcagtggagattactgccaggcacagcacgacctctatgcagacaagtgaactgtagaaactgattactgctccaccaagaagcccccataagagtggttatcctggacacagaagtgttgaattgaaatccacagagcattttacaagagttctgacctggatggggtaaacctcagtgcacttcttttctgttggcctcagtattactggattgaagaattgctgcttcttgttaggaggttcatttcacttatcattacttacaacttcatactcaaagcactgagaatttcaagtggagtatattgaagtagacttcagtttctttgcatcatttctgtattc

SEQ ID NO: 121384 - DNA, 1856 bp, Homo sapiens
tggcgcctgtggaccatttggaccgcgggctggggagggagtcgcagcgacgcggtcgccaggcggagggtcgggaccacggcctctctcccgaccactggtacccagccgtctgctgcgagggcgccccgccgccgctgaggcgcgggcgcgcaggcccgaggcacggcgggcgctgcctggaaggcccgtctcgcaggcccccggatccggccgttggggcctcttccttctcagggagccccagcatggagctttgggccttggtttcgggaaactgggactggccctggctgctaggctgctccctgctgctgctttttggagatgagagttgctcttccatttatcctccagttaccgcgcgcttttgtgcccgggactcaaactgtggactccttttgcttagtttgaaatgagaagcctagactcttgccttccgataatacatgtaatttaatgaaccacttgtcgatacgtacgtgttaatggtgctaaataactgatcacctgacacggggggcgggggcggtgcggagagtagaaaggaagagaatgttgatatcgcgcacggagtcctgtgtccctcctttccctcaggatgtgttgccgggttaggtgacctttttccatctttgggcttttaaatgccaattcctagagactagattggggtggttattagtgctttccagtagtcacgcgtagaatatgttcatggattaatgttaagtggcaacactgctttaatattctagtcctaatctgcattacatgtagcgatatttaatttaaaaagaataatcgattattgaggcttctctaaatactaactttactatcttattttaagctaaatttaaaaaccaatgcagtaaactctgtagggagtacttaaacagtacgttgttgtatttagttactattttggggtcgaacttgtcttccctttgacaaaatgattgttaaaggcctaacaaaactacgcctccattattcatttttcgattcctgaatgaagtgtttggaactgtgaaaatatttgtagaaaaagatgtatgtttgtgttagagcgacatgttgagtcaaagcaccagaaacttttctattgtagcatacttatgtttttgaatttatagctcccttccacagcacaaaaaggtgttgtgtaaagattattgttattttaaatagtaattttaaagtttagttatcacttagaccttttccccactaatttttctcttcattcatctgtttactggctatatattaccataatgattctttccttcatcatcgtcattatcactgttattattattttacaatacatacttcattttctggtgatagtagcagagtttagtggcagacttttaggagtgatgattcctctgattgagccacacaatcagtcccgaaacgggctacttttatgtaaaaagattacaactttagattttaagctttttcagatagctgtactcggtaatttgtcaaaatgataaaaatgagccagtgatgggaccaaagtttgcctcttatttacattttttataggttcatttattgaagaatagaaaaatatagtttattttactgcttttgcatacacgtgaattatgcattctctcttgttgggatagacttcagataactttatcatgttgatcttatggtatacttatatgttgcataatcagaaaagtcacctctgagaagtggtctatgtaaatgtaggtaaaaaattggtttggtcagatgcacatttcaagatagaaaaatcgaaaggaatttgtctttaatcatttcaaactatgttattaaaatttaaattttattgagtattggaa

SEQ ID NO: 121385 - DNA, 2755 bp, Homo sapiens
aagtggctgctggatttttttcttttctggaaaagtacatcttgggctctgtttctcttatttcttcttggagcactctctcagaattctggagtatcttttcagaaggatagacactttttcaactataaaaattgcttggcaaactgttagacatttatgatactgttgcatttttgagaacacagtcaaaaaatattctttaattgttgccctttgattacacatggaaagatattgagagtattgatgtgattaaacatacatgagaccctgaggctgtttctattctcagtaaagatattatagtctgggaaacaagattcattgacatctgatgttaatcagtgtattagagttaaaggggaaaatatcaagagttttatgaggaattgctatatgtgtggacttgacaattattgtcctgcataatgtgcttaatttagaccatttttaatggtattttaaaattttatgactattatacagtgaagagtggatatagagaaatagttcagtaaaaattttaagatatttccagaagttttaacctgttggcataatctaactttattagacagtttcgaagagcgtggtagattatacagaaaggctgaactttaacattttaattcgtttgtaatttgcatgagctgggcacatgaaagcataaagttttagactgaaaataaatggaaaagtttgtagctgataaattgcttttcctccaatgatgttcatatgcattgaggcttacattttgtttttttttaaatgtgtagagggtggctaagtgcatattcctgttttattttggaagaaggatgagtcacttttgtttctagcattttttaagatttcattaatgatatattaaaagcataaaaattaatgtgtagagtgcattatagagtgtaaaagtgtaggctcaggaatcacactgaatgggttcaaatgtaggaatattgggtatgtgaccttgggcaaattatgtaattatctaggtctcagtttgctctaaagagaaaggactaataattgcacctaccttatagggtcgctgtgaggaactaatgagataatgcatacgatacacagggcctggcatatagtgtgtgccaattacacgttagcttgggttgttactccctaggccatagttttaatgatgagctaggtccactactttggtggtttattcaaattcctaatgcttataatgtcagttatgatataatgccaatatagttgtaaactttgaagttaactctttcttgttactgttggctactgtaattctgtgtttgccagtttcaacatcttcagatcctttcctagggacttaggtctgctttggtcttagttgtctttgtgcagcagacactttgatatcttctttttaccagatacatttagaaaagttatgatccttgctttctataatgatgtcttgccaatagattctaactaacgaaactgaaccagatttgaagtgggggtgtagagtagatgactaggttgaattgctttgtagaatgatactttgtagtattgtgtcataccacatggcctaaccacttattaatttttgactctgtcctcgaaggatggataacccatgattcatctttagtgttgttatatcatagtagttaagaactgaccttagtgtaatgcagagtggatctgagtcctggctctgtcacttatttattttgtaatattgggtgtaactttgctaaactttagcccctctcttgtaaattggggatgatagtacctgcctaatggtttggttgtgaggattaaatggcatgatgcatttaatttgtttagcacaatgccttgcacacagtaaatatccagtgagtttaaccttacaaacacatagggcagttgtaagcacattgactcttaaatgaaattttctgggttcagattttagctctgttcttcctgtaggagatagcttaaacaaacaaacaaacaaaaccaaacaacttttagttccatcacctactatggcaaattatttaaactctttgatcctaatttcattttatttcaatttttatataatcaggataataatataaggttgttttgaggattaaatgaattaaaaaatgtagagcagaatttcttaaacttgactgttgacatttttggctggataattttttgtgtgtgtgtggggctgtcctagtgcattatagtatgtttactagatgcaaatagtaccctttccagttgtgatggccaaaaatgtctctagacatggcaaatgttctctgcatgggcatactcacctctgattgagaattatagatacaaagcatgtagaacaatgcctgtcttgaagtttgagcacaagaagttttgttttatcattactggtggtagtttgttcttctactgctactgcctattaggaatttgtttttggtaagcatgcctgatgaaattgcttattttaaacgatggtatgggggctgaaggcatcaagtgtgctccacttttaagacctttgtacttctgggtctttgtctggattgctctttggcatttatgcattgatcactacctcacttgagattttggttcaaatgttacgctgtgaggccttcacttactatcatacatagaccaatcccccatcaccaccaccatcactattgccttgtataacttttcttgagcgatattagtctcctgataaatttttgctcccctcacaccacccccctacacacac

SEQ ID NO: 121386 - DNA, 1209 bp, Homo sapiens
cggattacaggcatgcaccaccacactcagctaatcttttttgtttttagtagagacggggtttcgtcatattggtcaggctggtctcgaactcctaacctcaggtgatctgcccgcctcgtcctcccaaagtgctgggattacaggtgtgagccatggcgcccggcctaaagtgaaatttttttttgctgttgacactttctaaatctcatctttttgcgttctattaatacttgaaacacttgaaaagcaattaggctattttgttagtataaactaaacctgacttcagtataattctctgagaattacagatgaaacatattttaaagcaggaaatatcttcggactcagattaaattttatttgacaaattagtaccaattatttttagttgtattctgagtctttataaatggtccatcaggaccaaactcagccattcataattaagacatgctgttccctttgcctagaatatcctctggaccattaggatccagcttacacatcatcacctgcctagcctttgttagcttccagagtttcaccttcctctgtgaagcccttcaatacggcatttagcattttgttgtgatgtttatatgtgttgtatttgcttatatgtttatgtcattttgaattgtgagtttttcgactttcagatgggttcatttcactagacttaaaatgctttgtagtagatgcttaacacatgtatgagtaaatgaataattttgaattatgcagattattcacttatatacttagctgcatatattctgttgtctgtaaaaatgaatttacccagaaacaatttctgactttaacatgtatattcccaaattaccaatacggatttaattggatatacacgtatcatcagccatttaaaatacaccctatataggcttattatgttttaattatttagaatgccagtagatgggcttcctatgttttattaaatttagaatgccaaatataggaaagcatttaagtaaaattttagtgtaagaaacaggaatttgtttaaattagacaatttgtttaattaacaaagatactaaattggctcctaattttcccccttaattagatctgattatctgttagccacattactaggtatcccagaatattcttagattagtttttttaagactttattttgtaataattttatatttatagaaaagttgcaaaggg

SEQ ID NO: 121387 - DNA, 1056 bp, Homo sapiens
tatatactcttatctagtttccctgattattaacatctgacataaagctagtgcctttatcagaacagagattattattattggtgtattaccaatgataatggtaaattacagactttattctgattttaccggtttttttttgctactgtcccttttctgttccatgatctaatccagggtaccacattgtgtttaatagattagtgtatccattacaagtgagtaaatatttctacatttggctaatttgtttgcctgtttagcattagagctattttatttttgagactgatcactttgtatctgaaactgatttttaaaaatgaattatacctccagtaaatgttactttcaagggagttcttttggatggctacatgctgttcatttttggcattttctctttggaattatctccagagccagttggaaccacgtaagaaaaattattctgactcatttataacaattttccttaaaacgtgtcccatgaaacactaggattgtgatttgtcctgtggaaattgtcttctttggactcacaaatgtgatacgctttattactatgttcttagaagattcccattttcattagcttactaaacatgtctcacacaatggtagctgcttagtaaacatttgatgaataaataaacggtattgttaaagaaacataacttcagtctatctccacttgtgactgtggaaacctttttccggataatgcctgtttaaatctggggaagcatacttcataagtcataatagttttgacttaaaaacagtactggaaaacttgacccattttatttacaatatgctttatttaaaaaaaatcgatcttcaagaaatatattacaggctctgaagccactttcagtaaaggagttttaggatggtttcactaatagcagtattattgaaaacaaaaaaaattgctcctttagatgactagttagaatggcctggtcttcagtatagctatgggatcttgagctttgtgaccataacttctgaatgttgtgaatgttcccatcacttgaaagctcacag

SEQ ID NO: 121388 - DNA, 4316 bp, Homo sapiens
tgctttttttttaaaaaaaattgaggtataataaatgcattcattaaaaatgaacagattcgtgaaaccattatcacaaccaagatttaggacatttccgtcatctctcaggtatgcacctgcccttttgcagttcatcctttccctattcgtggccccaggcagtcactaatttgttggattttttttttttttttgggcacaggttctggctcttttgccaggctggagtgcagtgggttgatttcgctgcaacctccacttcccgggcttaagtgatcctcccaactcagccgcccgagtgactgggtctacaggcacacgtcaccacacctggctaatttttgtatttttttttgtagagacggggtttcgccttgttgcctaggctggtctccaactcctgggctctagtgatctgcccacttcccgaagtgctaggaatacaggcatgagccactgggcctggcaggaaaattgtttttaaagagcccttaatgagtcagatcatcccagcccttagctcagtgtgaaagggtaacacttactaatgggtatgggctgtggagcttgaaacccaggctagaattttggctctgttttgtgactttggggaagacatttaaattattcaagtgcatttttttaaataatgcgaggatgttaatagaccctgtttattattggggcttaaattatataaatgttggttaaatgttttgtacagtatgacatatataactagtgaatgttagcatgtatctgaaattcttccctcatttttatagggggagagaattcaagactagtttgaggaaattttgttaaatttggagctaatctcaaaaatcttggaattaaggagcccaggatgttataggttaatcactgggactttttgttaaattaatattaacttttttcggttgactttccaccccctaaaatatgttgattcagttttctctcaaactgatttaacttaattgttttaacttttcataattgaggctcctgtagagctttgaaatgactttgctgagcaatgtaggtacaattcaaatgggagactaacttgatacttgtatagaccacacataactaaaataaatctaaatacatgatgtagattgtctttgtgtcatttatcttgtttttatcctataagggggccttgaaaaaaggtgtgtttgtgcacatctttgtgtgtgtgtgtagtcttttaagttttgatttgttgggttaatagtttctttttcattttccacctcttcccccacaataaaagccctttgtctatatatatattacctttctttaaataattttaatactttgtaaataaaacaagcctactttatggttttaataggtatgggataaaaatttaaaatatttgattttagctcttttatgtggacttattgtaaaagcagtgtctgatgcttaatttgtgaaaaggttgtggttaaaaacaatagtttttatgctttaagccatgtaattcttttgtatgtgtcaagttaatggactatatacatagtttttttttcctaaaaataatgaactgagtaaacatttagtaggatttctggtaaaatgatatactacatgcatgatgaagaaacattatttagtaaagattcgttctacatttccaaatgtatattctaaaaacaagtgaggattttttttttaaacaacaattcagaaataccttaagtgtgttcttagactcaaaactattaaaataatttggtattaggtgattttcaattgatagctttatttcttatggtattttttttgtctttctatagggctgaaagacacacagaagtcttcatggatatagttgatacatttaatcatttaattcctactgaacacttagatgatgccctatttctaggatccaacctggagaatgaagtctgtgaggattttagtgcaagtcaaaatgtcttagaggactcgctgaagaacatgctcagcgataaggatcctatgctaggatctgcaagtaaccagttctgtttgcctgttttggatagcaatgatcccaatttccagatgccttgttcaacaggtaattcttacttttttttttttttttttttttagtctgcaatttaaaataaaaaaattttcagcagctttttcttttttctttttttcttttttttttttttaatgaggagggtagtaaatttagggttatttcctttgaatttagagcttcttttccaggcatcagaattaaaatttaaactaaattttcttccaaggagtgtggagttatcctcaaggatattatggatataggtagggtgaccatataatttattatccagtatgggacacttactagaattacagagagtactttaataattacatcatgacaacaggtgtaaattgggactctttagtaaatagggattgcccggcaaattgagacatgtggtcaccttaggcctgctggagtcgggggatggctgaattgacctttctcagcatacctcccagcccctgaaatatttacattgtttgctcccatttcacctcctttggtattttgtacatgtatcttaaaaccagagaaagaactctatacctctgctgccctggacagtaaacactagccacatgtcatttgcaatgagtctggtcgcttgcaatgagtctggtcctaattgagatgtgctataaaatgcacattagattttgaagactcagtatgaaaaaaagttaaaaaatatttcttcaatttttttatgttgcttatgtgctgaggtgatattttggatatttgtggttaaaatttatgtcacttgttttgttttttttgcctttttaaaagtgactacttgaaaattcaaaattacatatgtgtcttatatttctgttggacagaaaagggtctgtagttgaagtaactgaaagactgaagatagtaattttctgtaaggctaaactatccttaataagaaattactttgtcatgttaatgtataaaaaacagtttttcttttataaagcagagaaaatattactgtaaacgttgtggcaattactaatagctattctgtgagtaaaattataggtaaaggtaaaatcagcctcccatggaacagtaaggttttccctcaccattccctagagtaaatagttctcaggtttatgtgatgttggtttgtttttcattgactagactttttctcctgtacagtttgttcagcatatttttcattttttaaaacattttctatgtatattttaaatttaatacggcaatacttaaagttgggaataggtggtctgctgttggcccttaagtttgccaggttactctgcctgaggacctcaacactggctactaggaagcttcattttaacaacttaaaactgaggtcttttgaattgcttgctaatagtgtatctctgaattatttatattatgttgtgttattacttaggtttacattgttctgttgttgtattctaaatgttttaaagcttttaaaattttgttttatgtatgcattgttcaagttttttactttggtgcttgtgtcagtatagtagctctaattatctttatttttaagcatttttgacagtgtttggttgtatgctgactgtttcctagtttagtccaaattcaggaagaacatttatttaatattaacatggttgttgctggaactccagttaccttcaagggtggttatattggatgtggaactgacacatgtgtcatcttgttagactattttacttataaaattccacccctatagtaatacctgtattcctacttcctgtccttttttaaaaattgatttctgttgataatgaaaagtttttattaatgtgaaaaatctcttcagttttgttgtacatttcttttgctaatagaagacttagagcacctttatgaagtacatagaaattttttgagatacgatttattattcgtttgtgattctgttatcttttaaatgaacttttaaatttaggaacttaaattacttcctaaattttctgatattaaaatttggttactagaattatttatctttgattctgtagcagaatgtttgtattggtatatgtatagtgtatatgtttttaagatatgtaaggaaatatgtgggggaaacttaataaggcttttctgtttaggattgtttaaatttcattgtgccatctagcaggggatttatcttgatttcttcaaagttcttttccttttgggatatttgggtcagtaaaaggcccacacattttctgaaagcaaaatggaaaacatt

SEQ ID NO: 121389 - DNA, 1051 bp, Homo sapiens
agattgattgattgattttaaggagttggcttatgtgattgtggagactggctggcaagcccaaaatctgcagggtaggctggcaggctggagacctagggaagagttgatgttgcagtttgagtccaaaggcattttggaagcagaatttctcttattcaggggacctccatttttgtctctgaagacctttacctaattgattgtggctgacccatattgtggagagtaatcttttttactcaagtcttttggtttaaatgttaattatttaaaaaatactttcacagcagcatttagacttgtgtttgaccagatattggggaatcatggcctagccaagttgacgtataaagtgaacaatctctcaccacaaaaaagttgatgtgagttaatgcatgttaattaatttgatttagccattccacaatgtatacatatatcaaaatatgttgtacaccataaacatatattattgtcaactaaataattaaaaaatcaaattaaccatcacagtaaggtcccaaaaactcagaagatgataaattattctttgaactgctattttatatatgttgtcatgaaactagtgttaatcttaggatttttgagaaagtgatttcaagatgagtattgtaggcagatgcagcttaaaaagaaagcacccagctcttttctcttaagggattttatatataaaggaagttgaaaaaatagttaaaatgtgtggatgttaatgtaccaaatactgtgcaaaactactttgctagctctatcttactaaatcttcacgaaaaccttaagagctgtagatactacaggttgagtatcccttacctgaaatgcttaggaccagaagtgtttcagattttggattttattttttggtatttgcattatacttactcgttcagcaagccagcctaatctgaaaatcccaactccaaaatgctccaatgagcatatccttttgaatgtcattttggtgttcaaaaagttttgtattttgtattttgatttttgggttagggatactcaacctgtactatta

SEQ ID NO: 121390 - DNA, 3356 bp, Homo sapiens
tcagggtcataattgcagcaagcagcattgaaggatgacattacatttgctctctcacccctacctcttaactcgacaatcagcaggcttgcttactgctcactataaaaggcaatgccttttcaacaatgttgctctcctgtatttcaacccactgtgtttgtaggcatctgtataggcatatctgtgttgtccctgtggaacttgaggagacagggttatcttgtcatcatgctgcttgctgtgccatgggtgacagagttctttgtcttttacccagtacccttgtgtcttctgtcagtaaacatgaatcagtaatgggctagttcattagtttgtgagtagggtaaaaaatcccagaccctttacagttcttgcagttctcaacattactgtgtttaatcccaggaattattcatggaggtttagccatactttaattattaaagatatttaaataatttacctccaggaaggcagggattgcagctatgtatgttattcataccggcactagaatagtaggcatttagtaaattttgactggaaaaacgcacaagaaaaaagtgggaccagataatgagactagaagttaagaaaataaaatgtttgatgcaggtggggtacaactttgcctatcagatttatagcaattactattgaagaggaaacattccaaggtgaagaatacaatgtcctgaatgtaaaaacaaatttagtatctaggaaaaggaaaataatttttgacactaaaactggaaagaaatttcaaccagtgtgatataaaaaaatctttaacataatttcaatgaacatagggctttttcttatatccctcaatatatattccagtatgagcagtattacaggggctaacatcatggtctgactgatccaatcccaggtagattttaagttatctttcaaacagcctaccttggatatcagttctcactagattttttaatatattgataagaagatgagttatatgatactatctgagaactgttgagaatgtaattagccttttgttttcttttgccctatacataagttttattgatcaccagagctgggtatgagattgcataaatttaggctctgataggagtgtttcttagaataggaggctgttctgctgtccttgttgtagagcaggggtccccagactgtgggccatggactagtaccagtttggggcctgttaggaacccagctgcacagcaacaggtgagctgcgggccagtgagcattaccgcttgagttccacctcctgtcagatcagcggtggcattagattttcataggagcgcgaaccctattgtgaactctgcatgtgagggatctaggttgtgctctgcttatgagaatctgatgtgtgatgatctgaggtggaacaattttatcacaaaaccaccccctcatccgtggaaaaattgtcttccatgaaactggtcccgggtgccaaaaaggttgggggccactgctgtagaggacagggccaaaattttcctcaaaaagttattttggggtcctctttaatgccttaaatagacaggagaagctccacagcttcagacacaaaggaagatcattttggtataatttttgttttatagcccacatttaaagtaagaactagctgagtaaaattcatcaattttattttctttagttctagtgatttttctcgctgttttcttctagtcatgacaggattgcagaatcccttgttgccatttttactatagttgctgcctggattcttttggaactctgtagacctgtgtcttctccccttgtactcttttcccttccatatttattgcttagttggaggatcttctcaaaagatttctgatctggatctactggtattggcactattttctgccatctcttcctccctaaaatactgtctttccctaattttggtctttggtcataggtttttttatcatgtctttaagtgaatcgtgaatgacaaattagttatcaaatatgtgcttacataacaagaacgataaattgtcatggaatgattacatggaagtttcctgaagtatgagaatatccaaaatggtgacattgtttaaagcataattgatgtcatttctattttcctgctaaagctaattttctataaacagagtctgagattaggatgagagcattttactggttgacaactccagttggtaccaatctcagaagatacagtgtgaatagtccccttaagttgagtggacaacagcctggatagtttaaggaagtgaataaaaaaataattttgatataaagaatatcaaggatccttgagcaaatgttttcttaaccttagttttgacctccttttcctttgtctaattagcctcataattactaatttttttctgtcaggaagcaaagtaaataataaaatctctaaggtctttgctatcttttgaggacactgatcaaaaagaaattctgatgaaagatagagagctgcatcttgattcttacgggatctcaagatgagactggctaatttatagtggcccagaagtgtgattacttgtttcaaggccctatccttggttcgccttcactatcctagaaataggatagcttctgtacccgccagctacagaagctgaatttcataattccttggcagtggcagatccttgtttttttagagaagtaggaaagctggctacctagatttctccaaatcatagacctagacctccttagcctccctggctgtccatttctcatttcctcagcctcctgtctgaccccagaaacactttctgtactccagactttatattattttcctagtctctgttgccatcatggatttgcttcccataggttgtaatttactgagtcatcatcttgactcagaatttttggccttggttttagttaggattacactcagctaacagtgatagaaaactccagataacagtggtataaagaaagaaattgcagtagctcagaaggaagtgactgagagctagtatggagtcgcacagtgccagggacccaagctccttctaccttgcgctattatgtgtgatgactaatttcacctttattgcataatttgagatggccccttcagctattagatattgattccactcaataaaaaaggggagggaaaggtaatatctccttcatttaaaattgtatcttgaaagttgtatgttcatttctactcacatcccattggccacaccttagtaacctcatctatcagtaaggtagattgaaaagtgtcattttttttatgggtaaccatgtacccagctaaaaaataggaattccagtaaatgagggagaatggctgaatggtt

SEQ ID NO: 121391 - DNA, 1067 bp, Homo sapiens
gccttggcctctcaaagtgctgggattgcagaggcggggtctccttatgttgcccaggctggtctcgaacccctgggctcaagcaatcctcctaccttggccttcgaaagtgctgggattacagatatgagtaccatactcagccttcccaaatatttttgatatgctgttggttttattcacatatgaagaacccatggatttggagggttgactgtatatccttttaaaagacactttaaatatgttttggaacaaagtagactgtaaatgagatatatgctatttagatacctggttaaggatacttgttattttaagctttaaaaaaatttttaatttaattttgtattttgaaaatttaaaacatactgaaaaacaaagtacagtatactcacatttagtcatcaccaatattcaacagctgttaatattttgctatatttgttgtattaatttatcagtttaccagttcatccatccagtctacccatttagttgaactttatcatgtatcttcccaaaaaggacttatatataacaataccataactacacctaagaaacaatttccaggtatcatctaatatcctgtccatgttcaaattagtcatttgtccccaagctattattttcacccggtttgttcaactcaggttgtaatcaaggacctagtttggcatttagttgtatttccgaagtctctgcactcctttttccattgatacattttgaacaggtaagaccaaatgtctcttagcaacatcctgagttttagattttttaaactggattttctgcaagttggaaattaggtttaaaaacttgattagagtcaaacatatttggcattcggaaaacttcataggtgaagctgtataatgtcacatcttagaatgtttatcatctgactcttgatgttaaattggattactgggttaaggtagtgagagcaaaatctcttcttcctaaatacttgagatggcaagtaatctgcacagcgatgcagccttggcaatatgaaaatatttatttcctcatcagcctttttcctaatggttttatgc

SEQ ID NO: 121392 - DNA, 1931 bp, Homo sapiens
agttggaaagttaactgaaatgaacttgatgtaagggattacccattctaaactgttcataagaggccagagaaacttatggaagataacaggaagcatttactgacttctaaacctacattatagaatggagcaagatacattttactgctgtttcaaggctgaatacatataataataatttttttctcattaagttatgacctttacctaggtatgtttatcagaattgtgttttccaagttgtagtaattctcttatgtgttccaaatttattacagagttgacatttttttttctattaaggttcatatctttaatctctttaatatacttgatgaaagttccttttatagaaccgtttttatactcttaaaaggagactgtgattcttaggcatacaccctgaaaaatgctactaattggatctttttgagtgagcagctttttttgtagttatttggttattccatgtttggatgcttccttctcatctgtgctttctaaactgtcatcctaattctgacttctgcatgggttagtcaacactatgtgatggagtagaggtgttttttgtttttttgtttttttgcttttttgagatggagtctcgctcttaacgcccaggctggactgcagtggcgctatctcggctcactgaaagctctgcctcctgggttcacgccattgtcctgcctcaacctcccaagtagctgggactacaggtgcctgccaccgtgcctggctaattttttgtatttttagtagagatggggtttcaccacgttagccaggatggtctcgttagccaggatggtctcgatctcctgaccttgtgatccgcccaactcggcctcccaaagtgctgggattacaggcatgagccaccgtgcccggcggaggtgttttattctatttcttttgattgctgaggataacttcctgatttgagtctagttgaacatggaggttctcatctgttgagatagagccatgatatttttgtatgcactcatgcatttgttcatttaagctatgttttaagactgaatattttatgttccagctgctgttctagcactagtgatacatcagaaaacaaaagaataacaaattcctgctcttgtggagttttaattctatttagtggagcatatagtagcataatagtcttttcctgggctactacaaattagggctgtaaattgtttaactcagtttcctggcctcttttactgaaaaaaatatgtgattctctaagaactcttttggtggtcctgtttgtgtctgtttttttcatatatttgagtaaatggaactgaaatgttacagaatgaagtgcctagttgggaattgacttattagaatgtgaaactcaatgaataataatgagatccatattataagatggtcgagctgcttttttttttttaaacctattcctgttttacagtaacgtgattttcattaaataacattccagggatcagcagtttacaacaatcgtatgtaaggtataatgattttctttgagataaaagtgattggtactgtactgtttgtttaacaaatatttattgcatacctatcatatgccagactgtttccagtgctggaggatagagtggtgtttgagacaaagtccttgccctcatggagccggcaagtattaggttagtgcaaaattgattgtggctttggccattactctcaatgggaagaaacacgattacttttgtgtcagcctagtaaattgtaaggtgatagaaaatgtctaattgctttttggtggcagaggtcatggtttatttgacttgggctagttagggaaggcctctctcaaacattgagagtagctgcatgctgaggtactcgtagtggccagccttttgaaaatcctaggcaagtaaagtacattccaagcagagaaa

SEQ ID NO: 121393 - DNA, 2050 bp, Homo sapiens
aaaaaggagattcagaaagtggagaggaatcagctgtgtcagatgctgctaggaaatggaataatttaaaacctgataattgacctttggatttggcttgcgaaatcctgttgattctgctttgtaatacagctctaaaattcattacatgacttcactccctgtcaacaaacactattcatcaggctttccttctggtctgtttttctattttggatggttctttttttctcctgtttacattgtagaatacatgctcattatagaaaacttggaaaagtcagagaaagtataatgaaggttaaaaaacaacagcaatggcaaaattccttacaactaaatcactgattgaacagtctgttgtgtttttcctattaatgtttcttatgcatctttgtaatgcatatactatatatatatgcttttctacagaattaatgaaaagtagtcttaaaatttatgtatttaaaggagcatagtagacctgtaatctaatgtcaaaacttttttgaggctgggtgcagtggttcacacctgtaatcccagcactttgggaggccaaggcagacggatcacctgaggtcaggagttcgagaccagcctggccaacatggctaaaccccgtctctactaaaaatacaaaaattagctgggcatgatggcacacacctgtattcccagctacttgggaggctgaggcaggagaatcacttgaacctgggaggtggaggttgcagtgagccaagatcgcaccactgcactccagcttgggcaagagtgagactccgtctcaaaaaaaaaaagaaaaaaaaacaaaaaacaacaaaaaacaacagcaacaaaaacctgaggatgtatgtgaatgtgtggcaaccaatattccatcatggtggaatagcctaactggagttcctacctgtctttacacaaattatatcttaaattaatcctgattaatttttctaaagcatattctcctccaaacttttagcgcatagcataatggttaaaagcgtgggctctatttttacttttataatacatgcttatagcaggaaatttggaaaataggaaaaaggtatattcttatctgtttatggataagaattactgtgtatgattactggtataattttcatctgttttctgccaatcttttttttttttctatctaaatgtacatatgcatgcattttatttgtgtgtttgtttctaacaaggatcacactgttttctggtcagcattttcttcataatccattctttcctctctttaaatttattttgatcaaagcatatgagcagtttcatgattctgtttgttgtcaaattgctcttcaaaaagattgtgtcatttaaaggtaaacttatgaagaattttgttctctttaaattttaggatagaccactatcttgttgagctcttttaaatgaagttctacttggacacaaagatgaggactagataactccttgaggttccttctaacccctaggatgaagataataactaacatttgtatagtgctctaaagtttacagagtgagttctcatacatcatctcacttgatcctcacaacagccctgtgaggtaggtaggacaggtattgttattctcattttagaggtaaagaaactgatagagaggttaagtgacttgataaaggtgtttttttttttttttaaacgttctagtaaggatttgaatccagacttgctggtctaaataatcacgttctttttggcaagatttcatacaactgcacatttagaattactgatacatgttggctaagtggcatttgttctacacagaaataaacctaatgacaatatgagtacggtgttactatttctttgactgttcctgagtctttttacattctttctccaccccacaaattaaatacatgagtctgtctctcttttgactaggagaaggtaatgtaattatatagctatattaaacatctactattttctccagcatttgggggaaggggaagttacattatgtttttcatttttttcctctctctgtttttttcc

SEQ ID NO: 121394 - DNA, 1108 bp, Homo sapiens
aagtacatctgcattgcttgctttcatacatgtagcataaagtctgtagtagagtattgggatcccagttagaagtagaatttttgattctagcatgaacctagaatctttcagggtatggaactcctgtactaccttaaccaaaattgtgatacttgagtactccaggtatagtcacctatgtctttcacaaggggtcagcaagtaataaatggaagtgatatttgaggctaaatcaggaaagagtataatatagctaatactctctttgactaattactttacaaggtggaagtttataaaactgacttgatttgggagtttggtagtggcaatttcacatgttagaaaatttcacattccagattttcaagagtatgtagtgttacattaagactatctcacagtattttctgtactgcctttaattgcctaacattcccaatatttttaaaagttaatttttttgtcgtttttttctagttgttggtcttgacgatattatggatgaaggagttgttaaagaaagtggcaatgataccattgatgaagaagaactgattttacctaacaggaacttaagggacaaggtagaagaaaattcagtgagatctccaagaaaatcacctcgtttaatggcacaaggtaatcctttgagagaggtctagctagaaaattagaggtatagggacagatgtgttaggttataaacctgctgagcagaaatcatattttcttgatgttttgctaatccattcgttttgatggcaatcagttttgagatcatatcaatttgttgtataagttttcagtacccaccaccccacactacccatttctccttccccaggggaaaccactagtaactctgagctggtttaatttttttttttttttttttttttggtatttacctttatagctctaggtaacatgcatatgttgctgttttttgattattctgatttattattcatccatctattgacttcccactgtggatggttttcttcctgctacttgtccccatcatataattttgttagatcaatggtaattatgttagtatgagtaatatgctattagagatgatacatttaataaacta

SEQ ID NO: 121395 - DNA, 3069 bp, Homo sapiens
taatggtaaaggaagctcattttacttacgtcactcctaggttactttttatggaaaagagatttgatgaaaacatttcttttaataaggtataatattagtctgaattttttagaggcttttccccctgctagaattcagagaactttgataaatataaaatttgacatatgttaaattatatatatgtgtatatatatcatgtcaccattatgagtactgttcaatacatttttgttgagcaaattatagctcagaataaagaagtgatatattctaaattgtattgaaataaaagcacatgacaaaatagctaagtatttttatttattttttccccctgtgatagaacaagtaagaagtttgcgacagagcactattgccaagcgttcaaatgcagcaccattaagtaacacaaaaaaagcatctgggaagactgtatctactgctaaagcaggagtgaaacaaccagaaaggagtcaggttaaagaagaagtatgtatgtcactgaaacctgagtaccataaggagaatagaaggtgcagccgaaatagcggacaaattgaagtggtacctgaagtatcagtgtcttcaagtcattcttcagtgtcatcttgtcttgaaatgaaggatgaagatggattagattctaagcataagtgtaataatccgggagaaatagatgtgccatctcatgaattaaattgttcacttctttcagagacttgtgttactattggagaaaagaaaaatgaagctttgatggaatgtaaagccaagcctgttggtagtccattgtttaagttttcagataaagaagaacatgaacaaaatgattccatttcaggtaaaacgggtgagactgttgttgaagaaatgatagcaacaagaaaagttgaacaagattcaaaggagacagtaaaattatcccatgaagatgaccatattcttgaggacgctggatcttctgatatttctagtgatgctgcttgtacaaatccaaataagacagaaaacagccttgtaggtttgcctagttgtgtagatgaagtgactgaatgtaatttggaattgaaggataccatgggtattgctgataaaactgagaacacccttgaaagaaataaaattgaaccgttgggttattgtgaagatgcggagtctaataggcagttggagagcactgagtttaataaatcaaacttagaggtggttgatactagtacttttggaccggaaagtaatatcttggaaaatgctatttgtgatgtgcctgaccaaaattcaaaacagttgaatgctatagaaagtactaaaatagagtcccatgaaacagcaaaccttcaggatgacagaaacagccagtcaagtagcgtttcttacttagagtcaaaaagtgtaaaatccaaacatacaaaacctgtaattcattctaagcaaaacatgaccacagatgctccgaagaaaattgttgcagcaaagtatgaagtaatacatagcaaaactaaagttaatgtcaaaagtgtgaaacgaaatactgatgtaccagaatctcagcaaaattttcataggccagtcaaagtcagaaaaaaacaaattgataaggagccaaagattcagagttgcaattctggggttaaatctgtgaaaaaccaagctcattctgtactgaaaaaaacattacaggatcaaactttagtacaaattttcaagcccttaactcattctttgagtgataagtcacacgctcatcctggttgcttgaaagaacctcatcatcctgcacaaactggacatgtatcacattctagccagaaacagtgtcataagcctcagcaacaggccccagcaatgaaaaccaatagtcacgtgaaggaagagcttgaacacccaggcgttgagcattttaaggaagaggataaactgaaactgaaaaaacctgagaagaacctacaaccccgccaaagaagaagcagcaaaagtttttctttagatgagccaccattgttcattccagataacatagctaccataagaagagaaggctctgatcatagctcctcatttgaaagcaaatatatgtggactcccagcaagcagtgtgggttttgcaaaaaaccacatggcaacaggtgtgtgtgtatgtgtgtatgagtgatgtgtacattgaaaataaattgcttttttgggggtgggattaatgtgagaattgttttaaagacattatttgatacacagagacctgtgcaaaaacaaaaagcttcatcagtcttggataaatgatagaaagatggatctactgaatttacaaatatatcatcctagaacatttaaaaaagcatagtctggccaacagctgacatacatggaaatattttgtcattgtcacaggttagacagtgtaatttagccactgcatctgcaaaaaagccaaacacttcctggtaattggaaaattgttatactgctttgggtctgtaagttatatattaattcatttggtgtgagaagaactagtaataaagtatgaaggtcataatggaaattctatttttcttttgaagtttttttttttcttaaaatgaaacatattaaagaacaccatttcataactatcaaactttatcttgcagtgaaatttgacagctaaacaattgttagattacccaggtcaacatgaaatagagtgaaaaacgtatttctttttttgaatgttttaaataattttttgtgaattctagtctttttaaaatttgagatgattttagcactgactttcatcattctttctagtattcagtgatttgtagttttatgacactgcacccctcaatccccaatgtgttttttgttagctttttaagaaaaggaaagcaagagatgaagtggagtttgcagctaccagattattctgttcaagtgttcatattgctgttggaacttctttcaatgctgatatgataaaagaacattataatttgtatattatattcttcttatccttattcatgaaagtgtgctagagtgatttttcccagcactatcttagtacataaaaatgaagctctt

SEQ ID NO: 121396 - DNA, 1060 bp, Homo sapiens
ttaggtttggatttggaacaatagcattatttgtactgtaggtttttaagtcatgtctcactgaaactatcccagacttgctttgaagaaatcttaatatacctttgattgtggaagtaaagggaaatcattagctttccttcagcatttcagaaacattcatgttagacagttgctttcaagaaatagcagttagcccattgttaggaaagctacaatgctcattacaaataatcatttttaatattttagctttgcaactcgaagtgggagaacttttaaacacctgcatttcaagctttattccacttttgctagaatatctgtatcattatgggcccatcaaaaatctcaaacctgtaggaattatttctgtcttctaaacgtgtgttaacattgttcgaaagttttcttgcttgtcaaccccaaatattctatattatttttttaaaccaaattaatccctagggaaatgaggacttaacctgctaaagctagcacaggtattaccagcaaggataaagaatgataagttatagatgtgatgaagtcaagtctcaaggcatagtagtggttttatacacaataggcacatgaggaagaagaaaaggaagtgctgttattgaggaatgaggtatttggcaagactttaaaaacactgtaaggattggaactcactcttgtagtttttacagttttaacattaaaacagtacctctggtatattttgaattgaccatatcacccagtgtgttaccttcaatatcctctctcttggattacagctttttgaaaggagcttggtactattggtggtgccactattatcaaaatcagtagcacggtctttagattgttaaagtacatacctaaatccttctaagtctttcagctgtatcataaattgctagcctgaagatgaaaaaaggacaaagttaaggatggttgtctgaaagcattgcagctttcctaaccatgggttaaaaagcaggtaaattaaattgctgtgtatatatctcatttgctattattttcaaaagtagttatagatactcctttt

SEQ ID NO: 121397 - DNA, 1050 bp, Homo sapiens
tggttttttcttttatttaaaacgatttgttggataaacaattcttcccaattttatatgtgatgtcacgtctgtggtgaggtaggtagctgtaactttgatggattgtccgtgatgaaattattaccaagatcttaccacccttctcagtggataaatttattgttagtctatactttgttattgtttatagtattcaagactgacaaaggccagttgtcttttcttcctgatggtttattgtcccctccctcccccagcattttctcattcataccagaggagaaatatttgaggtcttaaaggtatcattttaatagaatattattttctttgaaaacttgctgtatgttgaacttatggaacggatagagatggaaaacatgcaaagtttcagaaaatcagatattgaaaatttaatttagcctcatttttgacatagattttcttgttaaaaaaagggataaaagttttttggtgttctgttttccaggtttatggttggctgtgggagatgtgatgactggtttcatggtgattgtgttgggttaagtctttctcaagcacagcagatgggcgaggaagacaaagaatatgtctgtgtaaaatgttgtgctgaagaagacaaaaagactgaaatactagatccagatactttggaaaaccaagctacagttgaattccatagtggagataaaacaatggagtgtgaaaagcttggattatcaaaacacacaacaaatgatagaaccaaatatatagatgatacagtgaagcacaaggtcaaaattttaaaacgggtgagctcttcattaatgcattattttgtttatttaagagctttttgtatggactgactgcaataattttgaaatttctctttagaagttttaatgttcttttacattttcaaatttagttttccatgaaagtgaataggtttttatttaaaattttttgtcagtcttggtgaaatcagatggtgacttttagaatatgcaggccttatctcttacagtcttttttgccatttctagcccctagtttggt

SEQ ID NO: 121398 - DNA, 1052 bp, Homo sapiens
tgggtgaaggataaaagttggctttgagcagggttgtggttttgccaacacacatgtttaaaagagagagaataaagatattaagtatacgaggggctggtaatggtattagactgtctaatctaagtttataatgtatgaaaagtgaatacatgaagatggtaaaaatcatagatttaagaattgttggcatgaggagattctagaataaatgtgctggtataataagtcagagcagtgggatgtttgacattgagattttggagatgcttgggaattagtaatgatagaataaaaataatttgaaaagcttaacattcaaattagtaaaaccagaagagattcatcaattttgtggtattaggttatctgctcctaataagttcagatcaaaatttctgaaaactttttaaaagttaattaatatatatgtgtggaaaaataactagctctaaaagccattgtctaaattgaggaaagagtaggaccagtttttagtcactattcattttaattaggatttcagtgtcaggaatatttcaatatggattgtgggttctgatcttatttctaaatagtgacttttaatcagttttgtttgtaaacttattcattaaaaaggaaagatatttttaaaagcaatgtaatgagtttcgatatttattcaaattaggtactcatgagaagcaagagatgaaaaagaagaaagttgaaaaaggagtgcttaatgtacatcctgctgcttctgcttccaagccttctgcagatcagatcaggcaaagtgtcagacattctctcaaagacattcttatgaagaggtaacatatatttttattatagaagtatcaataattatgctttatacatttgaaaaataattgaattgttctaattttaagacttacagactcaaatttgaaggtaccagaggaaaaggcagcaaaagttgccacaaaaattgagaaagagcttttctctttttttcgggacacagatgctaaatataagaacaaatatagaagtttgatgtttaatttgaaagatcctaaaaa

SEQ ID NO: 121399 - DNA, 2915 bp, Homo sapiens
atgttcatattcacagaaatattgtatatttaattacgtgtctcagacctaactggaatgttatgtaatatagagtgtgtgcaccatatttcatgtttaaatttaaaaattctgaaactcacagatagcaagaatttttgtttggagattgtgaacttaaaggtatttaaagtacctttaaaaattaagtatgttacttagagccattgtgacagtgagatagccatgttatccaatttttgtattacaatggcatcagaatgttagccccttattctagaaaatactggttgtagttcatattaactctacatgatttatctgattcttttgttcataatatttagttacatctcaggcactaaacctccatatagacctatgccagatctagtttgaagctcatctagaggccttgatttgacatatcatacttcttcatacattcctttaccttcaccgtatgtaatttctcctcctcttatattttgaaaataatatcacctcctcttccttccctccatatctcaaatatgcacatgccactcttctgctttgaaactggctgcgagtaacatctgtatcagaaaatgccagcttgttctttcttaaggccatgtacctgatttttctttaaaggatgatttgtacttaacaaaggcagtaccatctatgccttccttacctgttctattcctggctacctttatactactacttgttatacttgcttaattttgatgttttgttgctaagcttgttcaaccgaattttcagggtcactaagcaggcttagttaggagacagctaacaaaggactaccagatcggtcatttgaataaactactattgtgggggatgttagaacattgaattaggaatttaagagcaaaatagttcctatttccctgtggcagctgctaaaaagtactaaatcagcaaacagatttcaaatacaaatagtatgtttcaccactttgcaaattactttggacttcatttgcctcctgatataaatgtacatgtgaacttctcatggttgaggtacggggtctaattcttataaccgcagtacttaaaactgtctctggcatataaaagtactcagaatatgtttgttatatgagacattaccttaagattaaaagtcatctgtggtgatttgtttatttttaggtaagctcttattatttaaggtgtacacttggaaatacatattttaaatttaatatttttaaaaaagtattttctgttagaccatagaaatgattgagaaagagcagagagaagtggaacgacggccaatcaccaaaataactcataaaggtgaaatagaaattgagagtgatgccccaatgaaagaacaggaagcagccatggagattcaggtaaggatagatatgccatgttttatagctcaaaacatgaagattcagaaaaggtttatttgcctaatgtttttaaagtagagaaaagaattttaaaatatgcatccatttaaaagtagcctattttattggtttagtggttttttgagtgttgagtaatgtctctcaaattgcattataggtacctgttgaacagttattacagtgtagattcctggagtgctctgacttagtgaatttctttttattttttggtgggatagagtcttgctttgttgcccaggctggagtgcagtggagcaatctcggctcactgcaacctccgcctcccaggttcaagcgatgctgccacctcagcctcccaagtagttgggattacaggcatgcgccaatacacccagctaatttttgtatttttagtagagacagagtttcaccatgttggccaggctggtcttaaactcctgacctcaagtgatctgcccacctcggcctcccaaagtgtggggatcacaggtgtgagccaccgtgcctggcctgacttagtgaattttttagtaggcttagaaatttgtaagtgtttcttaggcagagtgtcatttgataggtggcatagcttttcttattttcaaaagtcagtgaagaaataatttgaaatcttactagaaggcttgaagaatggggaatgttttaatttttgctcttttaagtcacagttaaaagctagcattcattttcttaagaaatagtaaaaaaaaaccaaaaaacaaaaatcaaaaacttatctatggaacaactgcattttaggaaaatataaatggaaaatataaattgattttgataattgaggccaaattttatcagctaaaactaatttttactttgacttacgttaggaaccagccgccaataagtcattggagaagccagaaggatctgaaaaacaaaaagaggaggttgactctatgtctaaagataccactagtcaacacagacagcatctttttgatctcaactgcaaaatctgcataggtaattggaagtttttcttcgtaaaattttgcattcattatgaaagaaggatacttagatactagtatatgtaatttaagtaggttttgttttcccaatattggtggtgaggcactcactcacagtctttaagctttcgtgtgactggttttctgggttgaggtatagtttgatactgtggtatagtctactgtctagacctaattatactatatatgatttgaacttaaaaactgttcttgctggagtcaaatgacaagaatttaaccattagaatgaacatcaaacattgtgggcagttgtgatgatactgtcatttactaaagtaaaggagtaaaatagcatttatattttattatatataacataagacaaatcagaaactgaaattacttttttgtaaaaaagctttttatttttaagagcacttttaggttcatagcaaaattgggaggaagttacagagatttctcacatacctgctgcctccctacg

SEQ ID NO: 121400 - DNA, 2062 bp, Homo sapiens
ctcctgtcagatgcagtggcgttaggttctcataggggtgcaaaccctattgtgaactgcacatgtgaaggatctaggttgcgtgctccttatgagaatctaactattaatgcttgatgatctgaggtgtaatggtttcatcctgaaaccatctctcccctcatcccaccgtccatgggaaaattgtcttccatgaaattggttgctggtgataaaaaggttggggactgctaatcttgtccatatttactcatgatatgttttacatgtaggaaataattataaagagattttaaggggaaattaactttattacaggtagaaccatgcatgatttgctttgaattgcatttcagataagcttaggtccctgtatatagaagagggctggcagtggggagaacactagtgaattttctgctgattcttaaatgtggttgtgatacaactaaatgatgacagttagatataaccccaggaaatgtatggttactcagcaattgaatcatagaacctgaataactttagaaagtgaaaatgggttaagttataaaagttgtagttaacagttggtttcttttgatgtattctgggcttaggtcgaatggcaccacctgtagatgatctttctccaaaaaaagtaaaagttgttgtaggagtagctcgcaaacattcagacaatgaagcagaaagtatagcagatgcattatcttcaacctcaaatattttggcttctgaattctttgaggaggagaaacaggagtctccaaagtcaacgttctctcctgctccacggtaattttctctgttgtaaattctgtaatactcattatagatctttgccagattatacttgcaagtcttcaaaaacagaaaagtgacattttgggaacctctcatttgagaaaataactgtactttcctgtactttgagataaaacaagacttcgaaaataaatatatttggagtgttttcagtgagagattggagcgtgtggggaaacagctttaaaattctctttaattatgctggtcccaaaagtcagggatagattattaaagacgaaatgtttgcacttttctcaatcttagttctcctaagccagccaagagggaagattttgtaaaacattactatgtaaatatgaatgtaattttataaaatgaaagtgtgaactctttgtcaatagcctcatattttggccttcttcacatgctaaaatacgagtaactgatgactaggtaggacattgatttattcatcagcttgtctttaggctttttaatgtcattttctagtccagagatgcctggaactgttgaagttgagtctacctttctggctcgattgaacttcatctggaaaggttttatcaacatgccttctgtggcaaaatttgttaccaaagcctatccagtatctggctccccagaatacctgacagaggtactgtgaacttttctgcttttctgtgcatgaattgataatgtgtgtttctgaaagtaattgacagggaaataagacagagttagtaatagaaatatttattaacaatgatttttaaacagtccaagtaatataattatgaattaacaaatggatctttagaattgtaaaataaactattctctgaaagttttaaactcctatgtcctgcacttttcccaagatgtactgcctcactgtgtcagataattcaaaatcaatgagagtctacatggatatccaagtttttctttgaatacacacttaaataaaagatttacatacttttggtctttaatgttaacacattaagaattttttgttaaacagatcttctgatttccccactgcttatgtttccccatcttcatgactactgttcttacctgcctatttctgtgaatgtggtttatgtagactgggagttgaagctttacagctagttgaaaaccagtgagactagtgactgtagttgctgcaagtgatacccttggttggttctacacctgagggaaatagaaagaaactattatgtggtatttatggaaaataagcagcagtaacattataatattg

SEQ ID NO: 121401 - DNA, 2784 bp, Homo sapiens
caggaagaccttccaacagcagttgaacctttaatggaagtcaccaaacaggagccaccaaaacctttaagatttcttcctggcgtgttgattggctgggagaatcaacctactactctggaattagcaaataaacctcttcctgtggatgatatacttcaaagccttttgggcaccactggtcaagtatatgaccaggcccagtcagtgatggaacaaaacactgttaaagaaattccatttttaaatgagcagaccaactcaaaaatagagaaaacagataatgtggaagtaactgatggtgaaaacaaggagataaaagttaaagtagataatatttcagaatctacagataagtcagcagaaatagaaacatcagtagtagggtcctcttccatttctgcagggtctttgacgagtcttagtctcagaggtaagccaccagatgtttctacagaagcatttttaacaaatttatcaattcagtcaaaacaagaggaaactgtggagagtaaagagaaaacattaaaaagacagcttcaggaagatcaagagaataatttgcaagataaccagacttcaaatagttctccatgcagatctaatgtaggaaaaggaaacatagatggtaatgtgagctgtagtgaaaaccttgttgctaatacagcgaggtctccacagtttatcaacctgaaaagggatcctaggcaagcagcaggacgaagtcagcctgtaactacttcagaaagcaaagatggagatagttgccggaatggagaaaaacacatgctgcctggcctgtcacacaacaaggagcacttaacagaacaaatcaatgtagaggaaaagttgtgttctgcagagaaaaactcgtgtgttcagcagagtgacaatttaaaagttgcacaaaactcaccatcagtagaaaacatacagacttctcaagcagaacaagcaaaacccttacaggaggatattttaatgcaaaatattgaaactgtgcacccatttcgaagaggatcagcagtagcgacatctcattttgaagttggaaacacatgtccatcagaatttccttctaaaagcatcacctttacttccagaagcaccagccccagaacaagtacaaacttttcacccatgaggccacagcagcccaaccttcagcatctcaagtctagcccacctggatttccatttccagggcctcctaattttcccccacaaagcatgtttggatttccaccacatttgccacctccattacttccccctccaggctttggctttgctcaaaatcccatggttccctggccacctgttgttcatctcccaggtcagccacagcgtatgatgggtcctctctcacaagcatcaaggtatataggcccgcagaatttttaccaggttaaagacattcggaggccagaaaggcgccatagtgacccttggggtaggcaagaccaacagcaactggataggccatttaataggggtaaaggggaccgccagagattttatagtgattcacaccatttgaaaagagagcgacatgaaaaggaatgggagcaagaatctgaaaggcatagacgcagagacagaagccaagacaaggacagagacagaaaaagcagggaggaagggcacaaagataaagagagggcacggttatcacatggtgatcgaggaacagatggaaaagcaagcagagatagtaggaatgtagacaagaagccagataaacctaaaagtgaagactatgagaaggacaaagaacgagagaaaagtaaacacagagaaggagaaaaggacagggataggtaccacaaagatagggaccacactgacagaactaaaagcaaaaggtaaaatttgcaggctgcttcaggattacatttaaataactgttaaaatgttgtatcttgtaaacaaaagaaagattgcctgctaggattgtgccatctttaaaatttttactattggtcatttgcagaacagtaaattctgtgtgttggtacagagtgctctgtaccagtgctcatcatcccttcttcataccaacggtccctagttataggaatttaatatttttaaaagttttacattgctgtatattcaaagatttgttttattaatatgcaataaaggcttagaaattttagttttattccttaattggtaaatatggttaactatggaatatatttacttcctctagtgaatgtcctttatataatgactaatttgggagtaatgtgtgctctgtaagtttgttttaaattgcactgtttttaaagaaactgtagaggagcaacaaaaatccaagcaacttcataatcagattatgctaatcatttagttgagcagtttttgaccaagaatcagaagcccaaggggtacatttattgctttaatctgcactcattgaagtcatttattaccatatactacagctttgtggtaggccattattttcattttcatttttggctcttcagaaacttgaatacttaagcttgtacatgatcttgtgttttgctatcctttttactgtaaaatgtaaatattttaagggatattttgattctaaatatgataaaataatttctcacctattttgtgtgtgtgacttgaaattcagtagtaaaagaatttcttctttaaagctttaattaccttcagacattgattttttgttactcagccaagaacatatagaaatagctatctatgtcaggcattagatgaggggaaaaacaatttttttaaaatcttaaattgtag

SEQ ID NO: 121402 - DNA, 1100 bp, Homo sapiens
taaatttatttaaaccctaaaacacatggttttgatggctgtaatttaaagtaagagctatcaaatgatgctgacaaaagaaaaaccttccaaaatacaaaagaaagagaactctattatttacttacctgtattaatgaagaaaaatataaataattccacaaaattgattgttttcctaaagagcttaaagattagagttaaaaattggttttgaaacagaattatccttgttatttttgctggagagaagggaggaaattcagaaccaaacattctatttaatttgcaatgacttgcagtacttttttccctatccttatcctgtgaaacttactatcataaggttctaaaacagagaacttgtgtttaaataaagcccgtttaactttggtccacttttcttttggaaattaacttgttagaaaacaaagttagttcccaaacaaaacaaaatctaagttataatttgcaccattacaaagaaattgctgtcagggttttacacattttaaaaacatttcaatttcaaatgtgtatatcgtcaataaatctacctttactgatatatctggttgagggaatatcagactccagatttcttttgcaagatgaaagtaaaaacgagtgggttaatgaatgaaaacaagcttttaggtcagtttttgatcacctcttcgctaatagttttttctacatatctaaaattctttaatcagttctgatcgaatcttgatacatgtttttaaaataggcaaggcccatatagctttctattagggatgagcatctccaggggttagaggcagatcttgtaaccgctgattgactgaaacattttatggagaatagggaaggtatggtcatattagctatttgaggttttccttttgaggaaaaaaagggaaaatgagcagatttttcaatgagtagtagatccaaagccattctcagtcccaggtacaaccagccttacacaaactagtgaattacatgaatttcatctttcagtttctcctgttttaagaaaaaacctgctctttaaaaaaagttttacacttaaaaaaacttagaatcatcttaagacagtgaatgcatac

SEQ ID NO: 121403 - DNA, 1068 bp, Homo sapiens
cctgagtttgaaatggatgaagacagctgctaccattaaggaccaaattttatgctaccactaaacaaaaatacccactcagtctgtgttagattgtatgtctttttaaaggtatttagagattcaactaagctttaaagagggctgagcagctcaggaagcctgtaatgtgggcataactctttggacctgatcttgatgcttctgctgctctgttggcctctgaagagcaatatctaatttattattactgtaattttttaaaaggctttaaagtgcctcaggggtcccctgaaactaattttctatttctgggattccctggattcattatatgagatggtgacatgattagaggaattcttttttagtatgaaaattgtcccttttcttcttcagtacttgcctccttgctggcattgaattaacacagggacaaaatatggttaattttttatttctaattctcccaacaaacccctgttgcccagtatttatgtggtggcctttaaccacctgagggaaaaaatgagcttattcaagctgccaatatttatctatgggctgtagcagtacactgaattgtactgtgccagggatattgagatgctctgggggtatattgtatacctgccagttttcttcatttctgaattgagttttcttttcttgatgttggtttccttcatatcacctcaaggtttagatttgtgaaggaataagcatgatggaaataatagtcttgaaaggagatatgttgtatataatcaggaggaagaggaaggaaggacttacccattttgatattttgctgtaggtggccagttttgtttctcatagggaaatctgacccccacctgtcatgttggctcctaaggaactgctgttgtaagcggctcatcaagagttgaacttcacgtagccttgttgggaatatggaaaaggaagaaagccacaggactgcccattcagtcttgttaagattgggatgattctgcacaagcaaaaatgacttgaaatttatgtatcgacacacctctaccaatccatcttcagctgactgaatgt

SEQ ID NO: 121404 - DNA, 1797 bp, Homo sapiens
ttactgatgacacatttgtaggtgatgtatttgttaagtaattcttacaaaatacatgtaccactctttaccccagttaaataatctctttttggctaggctacattgtaggaaaggaatgtgaaaatctattgacctttgatttaatcaaatttaagcaaagtatattctatcttcaatatttgatattatgatatataaaatactaataaataattatttaataccattttaaataaactaccatataatgacatagagcttgaggttaatcattacatatagctgtactaatcatatctcattttattccagagtgttattttatatgataacatgaaattccagcttttaaaattgggttttaaaaattccacttatattttatattacttggtgttttccatttcctattaaaaaaggttgtctcttaagtcagcagaggaataaatacaagattactctcctttgactcccattttattcactaataaatactgactcagaaggcctgccttgagtagaaatatcttcaacatgtattgtaccatagaagtggcacaaatttgaagagtcttcacacttagtagatgtgattccagattgttttgtgtaatactgatggtgatggcaaagatatatcaaatgttgaatattgtgagtgtgtccactggtattatgacataatatttggtatttagtattgaaaaacaatagactctcaggagtgggatgcctactttgagataggatttatgctagaaccttctttaataatatattcatgtactgaaaaatttcatagccagaaaagaacggcaagaaaactattgctgtttttagtgacaccaacaattacagatgttatcttgaatatatcatacaaagtaaattatttgactaatgcttcattaaagtattacatttgagtacatttttaaaatttcttgtttaagatcatatttgacatatttgggggtatcatgtgattatagaaactcagttatttccctaatttttatatgaaattgtgaaagccaactaagttaacaaaatgaagccttttttttttttccaaataaaaatgtcttatttcaggcagctttttaaaaacctcttaacatataatggctataacttaaaaaaaaaaactcaaataacattatggtttaccagtttttaggtacaagtcaggagaaagactggtatttattaacaaagtcatctttaattgtcctgaggtctttactatagtttataggactcttttgctgaagataattctggactatatagctgagatataaaatgtggaataaaaatatcttatttcttaccacttcatttataataaatgattaaaacagttttggcagaaaaattctacaccaggatatctaaatcacataataagccttaatggaatctttgtttcttactgacatcaatggtgctacttatgtgaaaggaaattgggatctctgtatagattccaggaaatctgaacacacacactcatttgtctttctactctgcctttgctaatccttgatattctactccccaaaggaagtctcaccataggcctgtgtagactttagttcatgcctgcgtgtgtatgtgttgtcatttttagggacatatttgcaatctaatgtgatttgagtctatgtcagtttaattgtccccatttctttttacctttgttctgtttgccctcagataactttaggagtcatcattcacctttctctttacactcttcatcttccttttttttttttttttttttttcgt

SEQ ID NO: 121405 - DNA, 1036 bp, Homo sapiens
actaaaatgagaagagcctctgctctaagcctttgcctgtctatgatgactgtgaggcatgagcaaggaataaaacttccttttttgagacgctgagaagttaggggttggtggtgtcactacagcctaatctatcctattctgacatatctataatgtccagttgaggtggattggggaacagttgtggtgtgctaaaacgtgattagttacattggtgatgtgttctgtaatccagatgtaataaggtgatgggcatgtcagtaaatgatattttgggggaagaatgtatgcacatattccacattgtactctgaggtagctgcatatattactagcaaagcactctagaacccattttaggtatgatttatcaaaaatgatcttgttttagcctacttaaaattaataaatactaaaataagtacagtaattgtatatttttataggagactattctttcaacatttaaagatactcgagtttttctttattttaaaactacattagagagaaggttctgtggtcctttgttgaaccatgattgttacagaactaagagaaaaacatttattctagcatggtggttttgctgaaaggtaagaacttgtcctgttctctttttgtccttcctttccttcctgcctatcttccttccttttcttctcttgtattctttcgtcttttctctcttctatttctctcacagcccctccctccctctctccctctcttcctcctttgttattttactccttttttttgatacataggctataatttataaatgttggtctataggttggacattgaaataatttgcacggaatctgttattaatatacatgtaagtgtttggtaaacaaatatttctacaataggtcatgaggaacttgtaatcacttagtaagcactgcttcattaatcttaacaattttcttgtgaggttaattgtgtaacaataattaacatcccctttgagtaggtgggcttttgtcacactgagaagtattcttatctcccctcagaggcggga

SEQ ID NO: 121406 - DNA, 1032 bp, Homo sapiens
aagttaagacatgtctattctcctttagtcctcatttcaaatatcaaccactgtttacagtatcaccactttttccttttaaaatggactaatcagttttatttagagattgtttgacaaagggtgattgccccaaatgatggtttcctgaagaccaggatataccaaccaagaaaaggcaagtatattttgtccacctaagtaacttcttcttctgtgtatttttctgcaaatatggatgttcctttggactagtcctttctcaatcatattgaagtttaaatatatttactttaattggtaaaatcaacttaaaaatctctattctgattttttcctaaggattggtatgcatgttaaaagtaaccaaagtataatttatgtcttggcctgtattgaatgcctttttcctcctgagcagagtcaattgaaaaatatcttgcttgctgcctccatttttaacatttattcttaggcttaatgtaggaaactagcaataaaatataaatccatattctattttttaaaagatcatactgttttattttcaattttatgaaacttttacttttagatattacaaacaagagaattagaaatgtgacgttagacttttaactctctgtagtcctttgtatttaggagagaatttggattagaaaaccaccttctggaggagattttgacattactgtgtgagcaaattcaggcaagtcacataatctcttagagagaacttcagtttgctcagttataaagatcaaaataatcatctgtaacacactggattatatggaaagtgtaatatacacgaaatctatttagaaaagtgaaaaccagcatgcaaaaatgttgttgtaattattattattgccaacataaacttgtaaatttgttcacatttattagtttagttcattggcctgtatgtatgtgaaataatggtccagtcctttgatgataaatatcacaaattgttggatagatttgctgggtttgacattttaaattaagactctgatattctgttag

SEQ ID NO: 121407 - DNA, 1044 bp, Homo sapiens
acagttgtttcaagaaatttttactgagaaaatatttaataaaatttaacttaatgaatggataaggcccttttatattccaagaaatatcttcatatttacctttggtagcaaagatcacagggctgcctggtatacaggagtgcgcaatatctgggttgagcttaccttgaaatgagattactgtctactgcagagtttgatagttaagattatgtgtcaagttggctagtacatggtacccaggttttggtcaaacactagtctagatgttgctgggaaggtatttttttaaatgtaattaatatttaagttagtagactttcattaaagcagattactctccataatatgggtaggcatcatccagtcagttgaagccttctgagaaaagactaaggtctcctcgcaaaaaagtacttctgcttccagattgtctttgaactggagctgcaatatcaactcttccctgcatcttcagaccacaggaatgccctgcagattttacacttgctagcctccacaattatgtgagccaaaattccttaaactgaatctctctctctctctctctcagtaggtgtgtgtgtatacgtatgtgtttgtttgcatctgtctgtgtgtatgtttgtgtatgttaggtgcaataataattaaatgacaagaacgattaaagtcaccttcaagggttcgaatgggtataaaaataactgaaaataagtagagattcttatccttggtagataagttccctcatttccctttctgactaatagacagcatagaaggaagagagggaagtaacctaccaagttcaagaatctttatttactactagttatttacttctcatacaaaccctgggaagtaagtttaattactattgccatttaacaggagaaaaactcactcccagaaaagataatatgtacagcagtgtgtggtatgaagcaatgctgaaaactcagtgttatcagtctccataacctctgttattctcagattatcttgctacctgctgtttgtgagaggaattgtttgact

SEQ ID NO: 121408 - DNA, 1074 bp, Homo sapiens
gagatgataaaacaatttccctggcttttttttcagggcttttttccagacccttattttttgttacccattagtgaacttgggaaggtttttatttctaaatttagtgcctaattctcctgaagcaggtttcacatttggatatttcattaagattgtcctgggacaaatctttgtccttcaaatgcagagggaatagggactatttacttcctattctgctatctctatgtgcctttgagtgagaacaattactggaagagttgccaaaattatagtaaatttaaggaaatttaaaataattagatttcttatactataaaataagggacagccttcaaagtccaaagccaaagtcatttctaaagatctctattatttagaagttccctggaaagcatctcacacctatttttagaatcataggatatgatgaccttaagacactatactagaggcaatttatctgaggctgtctgagtggttggcatcttatacagttagagagagaaaggattttctgatgttaatagtgtgctttctttgattgatttttgtttggaatgctgtcaaaatattttaggtaataacatgaattagttgcaacgtaacatgattttaaaagctaaaaaaattttagacggcatgaaacattgtaagacaatagaagggaatttttttgccacaaatagtgataaaaatattatacattaaaaatgcaaccacttttacacaaacatgcataaataaatgtactagatgtcacaggggaaattcaaatgaaaatcttatttttctatttttgagatgtttaccacttattaggcgtgacaaagcaaatacaaaggaaatgttagaagaactagaatttaatcacagcttgaaagagctataaatacggtactactcttggtttatcatgcaaagggaaaatcgatttcaagtccaggtgacctatgagctataccttgaaggacattttgtatttcaacatgtttagatgtgctgaaactcttccagaaagaggtgcagtctatagagatgcaaagaacaaaaggaagaagagaacggcat

SEQ ID NO: 121409 - DNA, 1041 bp, Homo sapiens
attattattctgacatggaggaaaatgttccttatgagctccttctaggacatttacatttataatataataagaataatttttttcacattatatgacaaatttatataattttttctaatgattaccagtaattaaatgtcagtttctaacttggctccaaatagttaaattttaaactattttaacaatcataaagtgttcaggtcctttagtcaaggacaattaaccatttatttttatattacaggaggtcaacatgaagcaaatttagacaaattgtagttaactttgcataagcattttctttaaagaaaatctgtaaactccagactactttgattaatttaaaaacctttcgtcctcctgtaaattgattccattgtgcaaatgtcttgtactgtggtacttcttactcttagagaattgtcacctgtgctattcagtcagctcagtcagtgagaataaaaagacctcagagaaccacaaagaattctaagaagatgctctctctctctcaggaactgtgtgttggatggatcaaaccttgaaatcaaaatgttcaactttgagtttatgttaaaaagaaagcttcccatattaatgtctagaaataagttttacactgttctctcttggaagggcattatttttgcattttgttgacaaaagcaaatttcataaataactgtttcatttcaattaaccagtttctttgggatttattttaagatggacttcttaaagtaaggcttttgatatttttaaacttagaaatttgtatatatggcctgctttgatcatcattgttgatcaatgcttataatactagtctaagtggcaaatgaatttttctcttcgagcatgtaaactcatttatatacttgttcttttaaaaaaaatacatggaatgcctttttgtgctggatttctttgttctctcttctattgcaggaggttaagcttttcatagtaacatttttagtgttgactcatactacttatcttaataatttcaatcagtctaatggagtgacctag

SEQ ID NO: 121410 - DNA, 1084 bp, Homo sapiens
tgaaataggagctaggtttgctttctagtatgcctttggaaattgtccctaccttgactttctgcataaatggtcctctgccaacatccgtgttttgttttgtttttctttgttggtttttggctgaagaatcagctagcccaacaaagctaattacattttaacttcagcaaaactgaggttgacttgactgctgggtctgctgttagcccatcccttcaaaagcatgcttgatggtccatttctctttcattctgtatagataagattgattcattcatactcatggcttcaatcatcactcagtttatatctgcacagtcatcacattactcaaataaacatgtttcttactccttagcaagataatcataattagcatgaaaatttatcaacatacctaagctctatgtcagtgacaatatcttacctaatgaggtaagactgggaggtgttacttttagcagaatgtacttcattatgaaggcataggtttaatgggaatgtatcttaaggattctgtctgttcttgccttgaaatattaggctatggaaacaaaagataactccagggtaaatatttttaaaaagtaagaattaaatctccaaaaataatgactgagggcaaaatattattaataaatttattgaatttcaaagtgcactaaaatttttatgaaacaggagttggacagaggcttaatttatgcgtataacatcattttgcaacttatctgagttcagcagagataaaattcctttcataaataaagaggcggcaatttttggtgactgaaaaaaaggcaaagggcacagctatattagcaattttggtcttgatcgacaccacaggcattcagtagctactatttcaaattcattttaaactcttttttgcattttaatagttttgcttctaacactagaatgcaaatgtgaatttttgcctctagcgtgttttattgctaccttgtcaaaatcactagaaatctatattattctaacactacattacatttttcagaaatcagaaggagaaataatgtatgagtaaagtcagagggtatgaaaagatgttttgtga

SEQ ID NO: 121411 - DNA, 1028 bp, Homo sapiens
ccatcaatgatagactggataaataaaatatggcacatatacaccatagaatactatgcagccataaaaaagatgagttcatgtcctttgtggggacatggatgaagctggaaaccatcattctcagtagactaacacaggaacagaaaaccaaacaccgcttgttctcactcataagtcggagttgaacaatgagaacacatggacacagggaggggaacattacacactggagcctgttggaggttggggggttaggggagggataacattaggagaaatacctaatgtaggtgatgggttgatgggtgcagcaaagcaccatgccacgtgtatacctatgtaagaagtctgcaccttctgcacacatatcccaaaacttaaagtacacacacacaaaataaataagtctttattctgattaaaaatttgagattctttaagttaaaagttttaatcttttttatttcttcctaaacgaagttctgagagaaaaattgaaattatttttattaacttttttcaaaaaataatagatatcaatcaggtaagaactcatatctaaactctgtctcctcttagtcaaaatgggataagttgaggatttaacactgatgaattttccaaattgttcatgacttcctgttgaaattaactgaagctcaattatttaaaacatggcatggcatattgttatgcttccaatattttgaattactctggctatcttcattttcaactgacaaccactgtcttttattatcttaatagaaagagaaaaagaaatctgtgtactttgttttctggtgttttatacacaaacctcagtaattggattctgatactccattctcagttttatcccagggctcttattgattatttggccagtgagataggcactctggaaggaatacattaagggaacaacaacacagtctgataagtggttgccaaaatcactggtgttgcaattttggtaatgtacatctctgtcttgagatataaggttgggaatatgcagaccc

SEQ ID NO: 121412 - DNA, 1067 bp, Homo sapiens
tcgcttgaggccgggagtttgagaccatcctgggcagcacagtgagaccacatctcttaaaaaaaaaaaaaaaaagtcttgtatctttaagtgacaaattacatacttaagtgacaagtatccttaaaacaacttatgtctttaccttctgagtttccttagcaatatctttctctaacttatcagtagggttttattcagaaaaaaatgttaaaattatcagtataatcattctaaaggtaatattcatttatgtcctctcacacctgtgcccatatgcacgtaattacagagtgattcatgaccatgcaagtgaatattagaaaatgttgcttttaaaacaagtataaaagtgtgtgttcatacaatataggtatatgctacataagtataataactatatgcattatagaagtgtgaagaaaattagtggaacgtttcttttattgctttttatttttgctctttttcttgttgtttctgtggaacttgactgtttaggaaaattcaatttcctcctgggaaaaaaaaattcggtgctggttattgcagagacactgcagattgtcttaatcggcaaactagaacttcacttctaactgtgtaattttaactttcaatggtttgctgactttgaaggaggaaactatgcctcatttgccatatatgtaaaagtgtgaccacatcttcaccctctaaaaagatcttcttgaagataaattaaaatataatccacaagagatgttgatgagcaaggtaaaggtattattcaaattatgtatttgaaattatattatgtttaaataaagtaaattaaaaatcagttcaatgtgacaatatagaacattttggccaagccaaaaatataataatggttgtaggcaaatctaagttgtggcttggcaagcatgaaaagacaagttctagggatgaaatcagagtccaaaatctatgaaggttaatgcaggattgaacaagtggtcagccagggcagtgtcagtataacctgtagtttatccagagaaaaaatctttgttaagaaaaaaattggtaaaaagatggagatt

SEQ ID NO: 121413 - DNA, 1049 bp, Homo sapiens
catgttggccaggctggtctcaaactcctggtctcaaatgatccacccgctttgggctctcagagtgctgggattacaggcatcagccaccgtgaccagccgaggtggatgattcttaaagcaaatacagaacatctgaatggacatgtactttctagatgtcgtgggagaagtgtcatatgatagagagatatagatagatacatatacacttatatacacacaattaatacatttttaaatatatgaaaatgtgatcaaaccagaaaataccctaaagatttagtgaggtagagaacacagagtttttagttgtagtagatgaagacaagactataatgccacattagaattatttaaccagaacttttatgattctcagaatttgaacagggtcacagaggtgcaaagagaaaggcatgagtaaaagcctaagtttgtggtatgtaatgtgttcttaggagacactgagtcgatgagtagattaacctgattactgcagaggcctaatataagaagtgtatatgtgggtgtgacccatttataaagagcttgaaatgccaggctaagatagtttgaaatttatcctgtaggtggtagagaggtgatggataatagaaatatttacattattcattgtgattaaggatagtttaatatatctttttttttatttctgagttaacatttttaaaggaaacccacttttgaatatgtgtatttcagggagcttaagtacttttttacattagataattatatgacttgccaattgtaacagaagaatttaagtgttttaataatactttatagataatagtaacactctcttagttatgtatccattgtgccttgctaatgttaccatttcctgtggggatgactgtactagacagtgatatatataaaatgtgaggacttattctcacaacagtttgatttattaggtgattaactgtgaatgttgcttctactaatgtacaaagattgctactgtaagttcttttttttttctttttcttatactttaaattctggggtacatgtgc

SEQ ID NO: 121414 - DNA, 1023 bp, Homo sapiens
gaaagacattcagaaagtattattaaataatattaagatgtttaaatctaacacaattcttaaaaataaatgtgcttctataaacctgagaaaggtataatgttgatttgtctctgtttatttaaaaagtatgtcatagtcttagtaaagacacttatcatttttttctttgcttcataattatttgactactcatttcacctcctcgactagactcttaatttccatagtaagagggttcatgctcatttctgagtttcccacattaatttgcctctagacccaaagtctaaaattaaagatatagtgaaatattttcccagtaaatcatatcaacaaagatgatacgttactgccttaattataacagcatgcattttcatttttcaatgtatcttttttatctaattttttcattgcatcattgttattagattggttggagtatgatactagaaagatcaattaagggttcaaattctatgtgggacttttacttgtctttctcatggccacaaattcactctccactttggccatatttgcagctgtgcaatattggttaaaaataaaagagagtgggtggacagaagtagaaatattatatgaattcatttatatctctggaaaataagtttggagaacactatctgttctgtctgaatcagaagcatgcttgttctaaaggaacagcacaacatttacttctgcctgcctggaaatctgaaatttctgttgatgatcctcccattttgacatgttagcatctgcccactgtgtacttttctgtgtgctattaccagcagtgtgctcagaaatatgatcagcccatttaagacaaggttgttgcaggaagactttttaaaagacctgttcctttcaaaggttcatgattttaaaccaaaataaccacatccattctttataggaaagatcatatgtatacaattgacaatgtcaagataccttaatgtttcttgatttcatttcatacatgtaactgttcatggtgaattattttaa

SEQ ID NO: 121415 - DNA, 1126 bp, Homo sapiens
ttcattttttttttaatatgtcatattaattggcagtttttaacactacattaaggtgattgaaagagtgggctttggagagagacctaagtttcagtaccatctctgacacttactagccatatgatcttagtcattagctttggttaataatcttttagagaaagtattaatcatcaattttatgaaagaacctatctcaccatagtcttttatttgctttcacagatcagtgtactgttacccggacatacctattccttcacaagttctggttcttcagtgctgcttactattttggtaactgggcctttcttggggtaagtgcagatatcccacgcgtgatttgaccttcctttataaattatagttaaatgtgtaaactctttttatcttactaggccatttgtatcatagtactgtcattgaattttaaagcattactttccagatgattttaaatttgaaaaataacacatggcttatttaaatttacaggtatttttgattggattaattgtatcctgttgtaaagggaagaaatcggttattgaaggagtagatgaagattcagacataagtgatgatgagccctctgtctattctgcttgacagccttctgtcttaaaggttttataatgctgactgaatatctgttatgcatttttaaagtattaaactaacattaggatttgctaactagctttcatcaaaaatgggagcatggctataagacaactatattttattatatgttttctgaagtaacattgtatcatagattaacattttaaattaccataatcatgctatgtaaatataagactactggctttgtgagggaatgtttgtgcaaaattttttcctctaatgtataatagtgttaaattgattaaaaatcttccagaattaatattcccttttgtcactttttgaaaacataataaatcatctgtatctgtgccttaggttctccagagtgatgtggaattttaaagtgtctctctctgattgcctccaaataatatttacaatatagctgatgaatgttactcccatatgcaaattgttttcagttttctgcataaaatctttagcaccactcaagtagatttcatgaaaagat

SEQ ID NO: 121416 - DNA, 1051 bp, Homo sapiens
atcaagtcttttatctcatagataaatgcaattttagtttaatttgctttagtatttttcttaagataatggtattaaaaattttggtaatagtttggtacttgttagttttttgaggatttttttttaagcacagtagcctaatctaaatcaaggttgatactgtaaacatttgccggatgagaataatgaagtttttagcttattttatatgactgttagagtgcttatagtttatatgttaaatttaatttcatctttttttttcaggttttccctcttgattatattcttataacaattattattatgtactttatttttacttcaatggcaggaattcgaaatattggcatatggttcttttggattagagtaagtatatattacagtattatttttttctcatcattttgtgtgtgatctccataattacaaattatcttagatttagaatatagtagctgtatctttataccacaagtgagagaaatactagccttttcacttcatgttgacataaaagtactttttatctagagcagtggttcttaaatgggggtgattttgccccccggaaacatttggcaatatctagagatatttttagttgttataattggggaatgctagtggcatgtagtgggtaggggccagagattctattaaaaatcctgtagtgcatagggcagacttacctagcctaaaatgtcaatagttccatggttgagaaaccctggtccaaaagttatattatttcttagtagaaacacattcgaatataatagatacactgaagctcaaaagatagccctccctattagtaaagattaccatatcattggttattttcttcaaatgcttattttgagataaattaacaattttaaaatgaagctgtatcaggtagacactacttccagctgtgggtaaaagagaactcagttaaatagtggcttgaactaataaaagatttcttgctatggaaaaaaagaatctagtattgcttcagtagctcaaaaagtcagatccaatatctctgtaattcttt

SEQ ID NO: 121417 - DNA, 1591 bp, Homo sapiens
cctaccattcatgatttcataacattcattgatctatttatatcaattccagttaaaggaggagcccaacacacttaactgtgcttactgggactcttctttttggatctggtcttgacaactctttagcccagttgtccccgcaacttggggaagatttcggggaaaaagagcttaggtttttgctaacatagatttcaactcttttatattctgaaacttttcattagagactcagttataatatttttcttcctctttttctaccatctttaatataaagttcatacaattgggagaaatatgttccactacttacagtgcttaggacattttttccacagaaacattgttttacctgacaattttttcagtgttgttagtactctgtttcaggaatagtatcacttgtataggcttttatggattgtaatataatttaaccactatatatatcatttatatatattattacttctatgggaaaatgttctaaattttctattttaactaacagggtaatataacctgcatttcatggttttggggtgtgtgtgtgtgtgtgtgtctgtgtgttagtcataatgtacttttcagtctcatttcagtgtaatagaataaagactttgtatttggtctaacaaagagtttcatttgtttacttattagtgaagacttttcaaatgctttgtctcttttatgtacatgttctcaatcaaatagtctcataatgaaaattcaggtataaatgcctggaattgtatactaagttaaaatgtatcttagattgtttttgttagatcattgtcatattctagcaactcatattgaatataatgattttgtgcttttaatatcaacttttagaactatattttaatgaatatatttttgcttttagatcgtctggggaatatttttcatcttagttgcattgctgtttgtaatttctctcttcttgtcaaagtaagtacagtagacacattttctaaagcacttatacaaattctatgataatatacattttgttgctgaatgccattagtgtaggctgttcatcttaagtagcttttttacttgaagtgttctatagcattaactcaaagaatggctaaaacgtccaataatagagtgtttctttattctccatcaattgaacaatagctgtgagatatttaagtgaggtttaatttgttatccattgttttctttgactcaggtgtatttgcatgcttaaattatattttttctaaatttgctgaaaatttgatagtataacataaatttcattctttgtaattttttttagtttagataaagctcttcattcagctggaatagattctggtttcataatttttggagctaacctgagtaatccactgaatatgcttttgcctttactacaaacagtaagtaaaatatcaatcattttatactgtagctgctagagtataaaatgctagagtctagcaaacattctgacatcctgttgcacataaaattattatgctaaaaacctatgaatagtttgacatatgcttatattattttctagttttactttttatttgcctgtaatttacacact

SEQ ID NO: 121418 - DNA, 1019 bp, Homo sapiens
ggtggtgtgtcattggcagcagtagaaaatttacacacttttaaatatgaaaagccacaatttagaatgaagatataataactgtggttatctatgtaccagttagcacagcagccacctttatgaaagcaaaaactatgggagattccagaaggtagagattgaaatataatagtaataggagaataacagcattctcagggtaaaacatttcaagtggatgaaatagagtaagaatatagaagacctaataatcagtaaggtataacttacaacttttaaactttacatctagataatagaaaataaccttttctccaaatgtacagggaacacaaaagttgatcgtattattaattgtatcctgaagaaagtatcaggaagtttcaaacagtagatatattacaaacaatttttctctgattgcagtgcgttaaaactagaaattgtaacaaaatcaatagattaacatacttttcacttgaaaattaaccttatattcagcaacttttgagtgaaaagaaaggggaaataaattacagaatttctaaaagttaatgataattgaaacatattagagtctgtgggatacctttaaaatagagatcagtccctgatgtgattctgtcctgtgcggctgttctcttgagctgtggttgtttatctccatctgccttctctcccacctaagtgtgtgctgccacctgatggaagatttgatggacatggacataaacccccggaggccctggaactatctatttggttgtgaactacaggctgacaaagattatcactttaaggtggataatgatgaaaatgagcactagttatctttaagaacggtcagtttaggggctgatggaaaagatgaattacacatcgttgaagcagaggcagtgtattacaaaggcagtccaattaaagtaacactggcaactttgaaaatgtctgtacagccaacaattttccttaggggctttgaaataacaccaccagtggtcttacggttgaagtgt

SEQ ID NO: 121419 - DNA, 1038 bp, Homo sapiens
gttttctttatgtttttggtttcttaactgtaattcagatgtttcttaaattttgatgaatattaatttatatgtctatttttggttcatatttttgtgtcctcagaaatgtttgtctatcctaaggtaagaaacattttcttctagaaattttgtagatttacatcttatgcttgggatcatgaccccatttaagttacttttgtgctatggtatgacttaagggttaaggttcattttattttctatgtggatatccaattgttccagcataatttttttttcaagactatcctttgctcattggctttccttggaagttttgtcaaataaattgattgtagtgtaagtgtgggtctatttctggaatctccattctactcattgatctatatatgtctttatgctaatacttggttaatagagctttataatctgccatgaagttaggtagtataaattattcagttttattttcctttttcaaaatcattttggctttgccaaatcctttgcattttcatataaatttaagaatcaatttataattccacaaaacatccactaggatatctattgggattactttcactcttatagataaatttgggggagaattgatatattctatccatgaacatgatatctatttatttacatcttaaatttctctcaggaatgttttgtagtgttcaaagtagaggtcttaaaaatatcttgataaatttacctctaagtattttttatagtcttgcaaattatgttgtttaatttcagtttttaatatttgttgttagtatgtagaaatttgtctttgtatcttactcttatatcctgcaacctggttaaattattagttctagtaccttcattgtagcttccttaggaggttttcttttatacatgatcatatcagctgctaaaagacagttttacttcttccttataagatttgtaattgcttttattttttacttttctaatttcactggctgaaacctccagtacagttattctttttgttagtaaatgtgtcat

SEQ ID NO: 121420 - DNA, 1889 bp, Homo sapiens
atattctgataattttactaaagatgcctactggagaattaactatgctttaggtggattggtttttacaagggcctaactattgaaaagatttaaaaaatctcatgttttgcaaagatacttaagatgtagtatacctgttttctttaaattttaaggttgtttttcaaccttagtttcaatattgagtgtaagcatgtatctgatgtgaaggtactgttaaagtgttgcaagaatattttatattttaaagggcttgctaaatgttatacttttttctccttggcatctagcaaattaaaacggcactcaagtatactttgggatttgttgtgatttgtgcactgcttcttttagttgggtaagtcttgattttttttttttaaaccatgaaatggaaatagaattatttgaaaaaaaaaataaaaggatcattcagaaaaatctaggaaagaaaaaaatgtaagaaaaaagaacaatccactctctaaatctccaaggaacaatagccacaatttaacagttttgtctatgttgtttcatctagacatttttatgtgcttgaatgcaagcagagttcacctcccttcttgcatgcattctacatgctttttacacaaatgtgattatgttttatataattcttggtaatctgcctgttaacatattgtgggcatctctgcaggatagtaagtgtagctccatcaattttgactatattgcgtttccttctaaggatacaaaaatatatttaactgatcttctagtgatgactgcttagacatttataatgtttccccattataaataacactttgatgaaaattcttgtctgtgcatcttttcagatttgaccctatcagtcttttaaatctttgtcaatgaattccctttcttaattcttcttgtttttatactaatatcagtaagattttgcttatttgtttgtacttctaaaatttatccttgttaatggaagacatttatctttgttaaaaataggtcattagtctcattttttatgttaggaaatatattaggagttaataaattttttaaagtttctgtttataatttagtctcacaattttcaataaataactttccataaataaaaaaattacttattacatgtaacttgtaatgggaataaaattgttgagtaatgggaataaaattcttgaactttttgtagttccaggagttcttaggatgcatgtgttttatagtcaagtcatattttcagttctttttacctgccttgatgtgtcatgaaaaagagtacttttgtaagcactttttttagtggtttttctatgtattttagctctggagtatatttctaaagtatttttttggctttttaaagaaagccaaatctacttatgttaatttcccttgttaacatcgaggtcccttgtatgcaaacctgaattatctggagcgggaatcagcaaacttttcttaaagcatagatagtaagtattttagatttattgtctgtatggtctttgtgtctctcttgtagctcagaagtaatcatagacaatacataaacaaagaacatgactgtgttctaggaaaactttatttataaacacaggcagccaatagtttgccaactcctattttagaacatgagtgagaatcatcaataaaactacaaatctttgcaacagtgagaataagaaaatagtgaattaaagactattagcatttcagccatctaggacagtgttcttctcattatcatacgtaaatatttgaatgaggcgtgcatttaggttaactgattgacaaaaggtcttgaaatatttttgaaggtggcatattcagagtttcttttaagtgatatgcttttgctaataaaactagataattttatggca

SEQ ID NO: 121421 - DNA, 1226 bp, Homo sapiens
gatcttctacacaggtggggatatgtggggacggccatgtcgccaggaacatgtggggcaagggcaagaagaagagtgctggtattgccaggtttgggtggacccagtttctaatggcttgcatttgcatatcaaaggttgcctaaacttttctggagatgctttaaaagatgaaaacttcctaaggaccgttttcctctctatctgcctacaataatttcttaataactcctacaatataaagctacatataaacttttaattttgaaaccacatatgagatttctgttttctacaacaggaataaataatatgtattcattttcaaaatcctgaaacttcttgaacctactttgcttcatttagattcactttgtaacacttctttgtagcagttcagtcaagttactttaaatctcacctctccttttatcattaccaatttcccactcctgtttttttgattttaaatttcaattttctaaaaattttttctaagtattgccattagtagactgcagtctctggggaatttgtactatcaactttactctccacagagtcattttaatcccagacttatggttgcttggctcctcctccttccctccctcaaacatcattctcagtattagattataaaagctttataataatacaaaagctaaatgtttccagaattttctctttgaataaacatgaaacttgtgttttataaaaaaaagtgtaattgttgagttaggagaaggatgtcatttttttcagcaataaagattctgagtaagatttcagtaggacattaaatgggaaactgaaaaaaatctacaaaagtttctatggatgggatatgttttcgagttccattgaattgttttttttttttttttgagactgagtctcgccctgttgcccaggctggagtgcagtggcacagtctcggctcactgcagcctccgcctcatgggttcaagcgattctcctgcctcagcctcccgagtagctgggattacaggcacacaccatcacgcccagctaatttttgtatttttagcagagacagggtttcaccatgttggccaggctggtctttaactcctgacctagtgatccgcccatcctggccttccgaagtgctgggattacaggcgtgaggcaccgtgccctgccccattgaattttaattcagctgctttgctcctttgcctttatcctaatctaaaatctgt

SEQ ID NO: 121422 - DNA, 1104 bp, Homo sapiens
ggtgaaggagcctgggtgagaaacaccatccaaagctggggcaaagatgattaccttcagcatgattacaatgtattaccttcagtatgattacagaagtcctacttgacaatcacatatagaagaacggtgctattcagtaagttctctttcctttcccttggagggaagacagcagagtcatcagttaaaaaaaaaaaaagaaaaccaaacacctcccttgaataaatttatactcctgttcccaggatcttgagctttagtgtgctatacctatgtgtcttatcgtgggccactgtgccaataaacaaaaacaactgtttggtttacctcagttgcagtagttattttcatttagaagttgttctcagattattgtttcagttatatagaggattactagactagttatgaagaaaccccactacattcaatggaattggtgcttaaaatctcatcgatgtgctgtctctggagtgataagaaagggctacatctcccgaaatgatttctttacgtcatgtattggtttccttcttcaccttgaacttttgttgaactgtatgtactttaccccaaacctgttaatattttgagcgcttctatgtgaaagcaaagaaataattttaatactctggcattcataaattttattgatgagattatttattttaaaggtttgaggtaacatctctggttgtaccaaagaagaaataaatatggtttcttaatctcttgcatgttttcttataaataatcatgttcaatgaaaagaagttactgagcttatttagatacattaaacattacttaactactggttctataggtgtatgtttataatattagtgttttttctacataaagtaatttaaaaagctgttccacagagggtgttaccctgtgacagatgcgtatgtgtgtgtgtgtgtgtgtgtgtgtgttttagtgtgtatggagagagcttcatggaccttttcgaaatgttaattccctagaaagatgtgcagctgcatgcgcatctatatttttgtatagtatttcagagatttcgtggacttttttaagtctagccttgctttatttctaggttaagaaccactg

SEQ ID NO: 121423 - DNA, 1052 bp, Homo sapiens
aaagcagtccacaaacaaattcttccttatgttgtctgtgtcaggtaggaattaagttttctgtttctgttttaagaagggaaataccaaggcaaaaaaaaaagtgtagttccttattcaaagtgatttaaagtaaaactaggaggctctggtgtcatcaaaccacacttctttgagaagaactagcaattgtgtatggtaagaggtgatgcactcatcagcttttaagattttttaaaaatgatttttcaaatgcaaataaagaaactgctgcttctcaaggaagcttgcacttccttcaaataaaaagccaggtctttttatttttaggtaaacattcattttaaaaaagtaaatgcctacaaattcttgctggtatttttagtgagttggttcctgtgctcttataaattaaatagggatttgtggtggacagcaggcagaagactagaatttctagtcagaatatatgaactcttatgatgactcatgacattagtttgtagaacccacttaacctgtgtatctcagtatctccagctgtaaagtaattaatagcaaagcaagccctaatcatttaaacatgcttagggccaccgcagacaaaaattgctatataaatacttagtttttatctctttaattttagactgtgtagtaagagtataattgactgcttaaatcccaaatcaaacatttcttttttaaatttcagacttctgtgaaaagtctagtagaatgctggtgaactgtggactagcactctattagacttttctaatgtactagatagatgtaccaaataaaatgacctggctttgaaagaagtgcaagcttccttgagaagcagcagttctaatgtactagagttttctaattagtacattaactaatgttcacacattagttaatgttcatacacagtgaaacagacactgcagcattcagtttgtaaaacagatattccttttgtttgccacgagttgacactgaaaggaaatgtaagagttacacctatatctttagttaatccttaattttctgttttatat

SEQ ID NO: 121424 - DNA, 1117 bp, Homo sapiens
ttctgttaggcagaggggaggtagtggaaaacagatttgtcagcatcattatgtatatatatgtacatgtatgtttctatttaggggataatcaatacaaaagaggtagattaaaggaaattaggcagcaacaatagaacaaaaagcacaacaggatacaagagtaagagtggaagaaactgcaaacaggccttgaacttatactgataaaggaattttatcaccaaaatttgttcatgcatatttctgctttcagtatatcagtgtaataattcctttctccaagttggttgagtttcaattgaagacaagtaataatagttactatttatggaatctttaatgctaatttatttttccttaaatattaagttgagtactatgtgccagacaataggaatatagcagtgaacaaagtagtcagaatgtcctgccttcgtggaactttcattttagtggaggagaaacattaaagactaataagtaaaatatttagtatgttaggtggggataggtgctgaggaaaaaataaaggactaaagagatatggtatgccaggaataaagaattaatatttttgatagtgcagccagaaaaggcctaattgagaagctggtatttgagtcaaggccagagggaactgaaggagtgagtcctgtggatatctggagagaagaatgttccagggaacaacgagtgcagaggccctgagacaggaatatatttcatgcgttcaaagagtagaaaggaaataagtatgatgggagtgaggagaatcgtaggagatgaagtcagagaagattcagattacatcatataattttataagccattttaaggcagtaagattggaagccacagagggtttggaacagaggagagagacaaaagctggttttttgaaaatagcctgaagagggggaatatattagttagggtatagagtaggtatagctgctgtaacaaagagttacgagacatgaaagtctgagcagtctaggtagggaagacattcggtaatccagaatttgtccatttttttgctttaccgttcttgaggacttggtcctaatctatgtgatcaaaactagggacactgtcaagttggtattccagc

SEQ ID NO: 121425 - DNA, 1066 bp, Homo sapiens
cctcatttacctttcagattaagatgtcatgcagtaattttacaatgctcataatgtacttatttattttctaatcatagaaataagtaaactttcagaaatgttccaatactgcagtataaattgataatgacactatagtaatataatcaaacatacagtattttaaagtacaagtgttaatttgcttgtgttatattttacttttatctgtcaattacatatcttatctgttttaggtatgactttagcctttccagcctcagttcatgattctctaatttgcagtaaaacatttcaaattttgtacaaaaatgaagaggttgttttaaatgatgttatgatcttcaaagtaaaaatgctattggatgaaagaaaggtaaacatctcttcatatttatttatgtaaatattttttgtaatgcctcaagatgttatttctaactttctataaaatttcaaaaagtatctcatagtgtaatttcttttcagattgaagaaacccttgaggaaatgaattttctattatccttggatctacacttcacagatggagattattcgtaagtagctaatcaattaaaaaacctttaggcacttatgactgttatttgttattattagattgcccattttcctcttaaaattcatcctatccctatcttgtcttgaactacttgtgttttctggggaaacttcatgagaatgattaggccagctctattgtgcccatgccgaatccatgagctccagataacaaaaccagacaagttaaagaaatatggaacaatttttcctagctcctagaaattgcactgttaatgtaataccactaccgtgaggcatttaaatgtaaatgagctcttttccactgtatcactggctaatctttcttgatggcatcagttatgctttctttaggtaggactttgttgatattctgagagttatcaagactgacgatgtgcacttgacagttgttctagttcattaatttccagagcccttgaggaagttttaggattggctacctccaacttacccacatacctggacatgcagtcat

SEQ ID NO: 121426 - DNA, 1023 bp, Homo sapiens
aaatctaatgatatactaaatatctacaataagatatgttttactttttaaaataagcaatggcctgcttatttttgagtagcacttaataaaattttgtagagtaaaagtaatttgaaatatcctttgggatttattataatagtatttgacctatgttgtactgcagccttgtaataaacagtattctctatggggtaaaattttaagatgagattaattcctgaagtatcaaaaaggattcattttatagggatattagtgaaaaaatagttcatatcatggactgatagaaaacaataataggtgggatctgattattttctcaattggtatgtttcatattgcttctaatgcaactttgatgctttaaaaattactcttattcgaaatttttaaaaagtaattaagtaaatagtttttatagtttcaactactttataatatattggcgtttactaaatgtttcatacttacatgctaagtgttcctttttacagggcagatgatctgaatgccttgcaactaataagtagccgaacattgaagctgcactttagcccccatagaggccttcatcatcatgttaatgttatgtttgattacttccacctttctgttgtgtctgttacagttcatgcatcattggttgcactacaccagccactaataaggtaaatttgactaatatttttgtattaagccattcttacactgcaataaagaaatacctgagactggtcaatttataaataaaagaggtttaattgggtcatggttcttcaggctgtacaggaagcatgatgctggcatctgcttaacttctggggaggcctcaggaaacttataatcatggcagaaatcaaagggggagcaggcatctcacatggccagagcaggagcaaaagagtcaggaggagttgctacacacttttaaataactagatctcatgagaactcactcactatcatgaggacagtatcaagaggaatggtactaaaccattcgtgagaaatctgtcc

SEQ ID NO: 121427 - DNA, 1091 bp, Homo sapiens
tagaaggccactacctcaaatgtaaatttttaaaaatcttcttttgaaaatgaatcatttacagaatagagctaatttaggctatcacttatcctcaattaatggaaagttatgtttcaaatatctttattggtggtttggaaatcaaaaacaaattttagttagttttaatgaccagaccacaaaactattatactaacatattaatgaaggacagtatcatgtgcctgaaaaacagtgtgatgaaaagtagtgatgtaaagcttaaaatccatgtgtaatgtcatttctacaaaaaaacccaaaaacatgtgttaatagctttgatgtggaatactacagtagtttcaaggaggcattatcttatgttcaagagtgcacatttggaaccatttctgtcacttacttactttgagcctacaaacacaaagtggtttccattcacatggtaagaagattgaagggaatcagatgtggtacatgtgtcaggaagcaaaggtgagattatccaaaagaaaaagggtgtaaaggatctctaggaacaatacttcttaacagtgtacttcccttgggcttttaatgagcacctcctgtgtcagttactgtgctaggtgctgaggaaagaataggtccctgcctttaaagaactttgacttctcctgttccctctcctctcacagcaacagtattaagaaatcagctcagcattgggatgggaaggagaaattcacccagcaaaatggggcttcaatatatgagatgggcttataaattacctgtataaggaagatatccatctgcatgtaatattaaagtagatttaacatgtaatatttacaaagaaaaacatatgaaccacattttaacttagaaaaaaatcctctctaaaaggtagtatgtttattggtaaaatttataattagtaattaaataaaaacatttctccttttaaaggcaaatatttatttcaaatagcttagaccagcagtccccaacttttttggcaccagggaccagtttcttggaagacaatttttccacggattgggggaagtgattgttttgggatgaaactattccacctcagatca

SEQ ID NO: 121428 - DNA, 2189 bp, Homo sapiens
agtaccagtccacagtctgggtgttggggttagacagtgttagcaattattattaattagtctagcttcagcatgatcatgtattcataagattttcaactttttctctggtgaggatggcttttatgtcatgtatattactttgggcttatagatgtaatatagaaagtatcgtaataaaagtgcccttatatttaatttcagaagttaattacagaatgaatgtcaactttattccaaattatttgcttaaaatattttatcagaaaataaaattctaaagcaaacccagacttcagttttaaataagtatatgatagaaataaaattactagtaccttacacatagacttacttaaaatatatttctcgaatgaatgaatgaaatagcacaatacagttttcattgttacttgaaaaagtataggcatcaacataaagcttaacagtttcctagggatttttaaaatcaagattcatcttcagtaaatattggtaatatattgtggtgttcttaaactttacggtttttattttcctttctctttattgtgaattttagtttattcttgaatgcatcctgtaagaaaacatctaaaaatactattaacttaaaaataaaagtatttgttacatattctaaactatcaatgtcttttatttttattctagcaaaataaaattgtgaacactaatatatttctataatgtactattgaccaaacaccactatattcaccagttttaataagtggatacagagtagttcttgattaaagaatatttccttctattacttaccactttcattgagttttcaaataagcatatatttaaacttcttaaacttgactatgctttgaaaacttttctaaaatatgttccctcttttaaaataacgccttgagttcctttcggcttttttgcctttctcttttctcccagatgaatgatgtacattttctgatgacatataattaaatattggtttggtgcagggagctcttactgaacatgagagtcaggagttctggaattaggtttgggcaagtcacatagcctatatgaaccccaatatctacacttgtaacagcagggagttaactctgagatccctgccaacctaaaattctgagtctaattaattaagacatattggattatgaaatgttgagtggcacatacatttaaattaaaaaaccaaagaaatatatacttgaatgtacatcatttgtaattttgataagctaattaactaactgcactatcagatcaacactaagtctattattaacaagttggaaaattctagtaagttttgttgtgaaaggagtatagtaactagtgctgtgtgcaatccttatgactagccaaggccaacatgcagctcctatatgagcgtcttctcagaagaaaacagctacgaacacagaaagacaaccatctaggtacgtttacaaatagcttaagtaaatgatcccttttaattaaaaagtatgaaattttgctttaaattagcatcagatttcataaatgtatatttaataatgtggtatgtttccaccattctgaagaacttacctttaaaatcaatttggtttgtagataaattttggttaatttcctaattaatttgtaatattgaagtttttacttaaatctggaaatggtaaatgcaaaactcactggcttttttcatatgttttttaaagtttctatgaagagcactttttcaaaaccatgattattactacaatttgttggtttaatgacatcgccttaaatttgctcagttattttatctttggctaggcctagtgataatgaaatgtgattttaaaactaaaccaggccgggtgcggtgactcacgcctgtaatcccagcactttgggaggccaaggtgggcagatcacctgaggtcagaagttggagactagcctgaccaacataatgaaaccacgtctctactaaaaatacaaaattagccggatgtggtggcgcatgtctgtaatcccagctactcggaggctgaggcaggggaattgcttaaacctgggcagtggagattgcagtgagccgagatcgtgccattgcactccagcctaggcaacaaaagtgaaactctgcctcaaaaaaaactaaacctagttttctgcactgcagaaatagagaagagatgggaggctga

SEQ ID NO: 121429 - DNA, 1913 bp, Homo sapiens
taatgaagttagttaacacttttgttgagatatcttttatccttaaacctaacattgtattgccgttgtctgagctgtgttataaatatttgttgaatgaatggatagatttagaaaataaatgttagatacatgtaccctttgacctagcatccccacttctgttcacctgtatcatagaaatagcatactaggtagtatgtaaagatacaggtacaagcatgtttattgcagtattgttcttagtggcaaaacagtataaacaaagatcaatgcccattatttgggcaaagagtggaatacagaatatatcatgatgcacccacatcaaggaatactgtgtagtcatcttaaaaaatgctttagtgctaggtaccagaatactgtggggtaatgctgagagaaaaaaagcaagatgcaaaaaattgtgcaaaatacaatcctatttttataaaacagtgactccaaaactcatatgtgtatatgtatatttgaaaaatatggaaggatatgctctagactgtaaccttggattagtaataagagccaagcccccccccccagaaatatatgataatcatcacatttatacatttctataaaactgtataaatggatatacagtatacccttgaataacaccagaactggggcactgacccctgtacagttaaaaatatacctgtaacttttgactcctctagtacttaccaactaatggcctactattcactgaaagccttacagataacataaacagttgattaatacataaaaagactagtatctacatgtttttatgcaatcatgacatattcatctttcttaattttttcaatatttctaggctacatagtttgcaagtttcatattctttccaaaatatttattgaaaaatacttgtgtataagtgcacctgcgtagatcaaacctatgttgctcaagggtctgttatatatgtcactttaaaaagaaaaaataattaaaataggattttaaactcccttaaaaatctaagtgatttcaaaattattttcagttctaagattttagagttaaattatgcttttaaacattctttaagatactgtttgcattgaagtagctctcagtagctataatgcaaacatacccatttatgcagttaggttcttctatgtaaacattagaaaaatgtgtcacaactctcaaaaccttattttctaatttttaaaaatcagaggtagaatatgtaatttctaagactaactttactgattttttttctgtcacaggaaaagatcatgagtaatgtgaaaacagatggtggttttaatgcagagtctgttgctggttttttagttttggaaagcccaatattagaagccactggtttatctaacagtgaaatgatttgtgaaatcattgcaaatttctttagttaccaacaagttggccaaattagtgatctattttttggtatatatcaatatctaaatacaatttacttgtatattttgtgagttatgaaatacatgtgttccattgatttttagttaacaacagagtatttgttgtttatgttaccgggtggggtacagcgtccttgattcttgttgaaggaagaattcagccaagagacacgcagcaagggttaagcagcagaatttatttaaagagacagtagtatactctgaaagataaagcagagcaagcttctggagagagtgagctagcagcagccagtgctggggaactctatgaagaatacatgattattcatgaaagggcatgaggaggtgtcacttgcaatcatgttttagatgatccccttgggcatacatgctctgtagttgtacatgctagtacacacgttgcttgtctcgttagcatttaaaatctccacctagggatgtgttttttactattataat

SEQ ID NO: 121430 - DNA, 1050 bp, Homo sapiens
aaagtatcacaattttttctaaggagtcatagatattttaagtattttttcttagctaattggggaaaaaatctgaagaatttattatctttcaaaacaattataactctcattatttgagcactgtgtttaaaattcccagtattttggtgttagaagctgatcattctctatagcatcctaatttgtaattttagtttgcaattgacattatttcagttaacaagacatcttagatattgaaatattggttaagttgttgaaaattctttcagtaactatcaggtaagtaaaaaaccattgttaattggtctttgtctctacacatgtgcatgcacatacaaatgcacatctctttttttaaaccacaaatttgcctttgtattaatattctcaataacattatatttaagtatgttacattaaatcttgggaaatagtgaaattttttttcttttcatttcagaaaatagagaatcctgatgaactggcagaacttataaatatgaatcttgcgcaactttgctcacttttgatggctttatggggacagtttctggaagttataacgctacacgaagaactaagaatattattagcacaagagcaccatactttgagggtaagttaaagagaagtgattttagagcattttaatgagtattatttacctttagaaaatttttatgaaaacaaacctgatttttacctatatattgataaatcagaaaagagacatttgtcatattgttattgtttgacttccaaaattaataatagaatagaacaatacagttaagcatatgacctatttcaatcacaatccctgctgctaagaaaaaccacctaaaagtaagtaaaataggaaaatatatgatacagaatagaataggaacctaagaataggaattaatagccaagcctcattagggacaggaatcaggaactagagagctgtctcaaacttatatctccctcttctccttttccttcccttcttctaccactgacctaatataggaatgtgtattattaacttagcaggatgga

SEQ ID NO: 121431 - DNA, 1037 bp, Homo sapiens
tatttccaaggcatgcctatactaaacatactttagtataggtatgatatgatatatatgataataatttagttgtgaattttatttaatgtgctcagcttttaatgcactagtattccatattattaaaaatgccaggatattggaatatccattaaaagacctcaagtattaattttttatttattttgtgtgatcttttataggggaattctaggctttttttttaaggacggatatttcttcatcacgttctcatcatttcttgtaactgcctgtgtacttacctctgtaattcatttttctttgtctaatttgctcttttaatgtggtgtggattgggaaagcaaataactgaaaccaagtgcaattgtatcaactagtaagtataaatcagctttgtaatgaaacaattttatgataattttgctatgagttagtgcaaggacgtaaaaaacatttgttcagtaaacatttgcaaggtgcttatttttttcaaggtagcatagatattagataatctatcagatatagaccctgcactcaagattagaatctaatctgaatgcacatgtatagaattgtaatataaatactgtgttagcaatttgaacagcattattagaatgaacacagatacaggagtatttaactctgtgaagcattaacaaatacttattttgaatgcttggctgtcttcctcctagcttttgaataagtgatgttgccaaataagtttttttttaattgggcacacaaaattcattttttataaatatcaaaaatgcatgccaaaatacatacatatacaaagcagtaatatatatattccccatatttgaaatttaaatttgtaaattaaaaatttttttctgtcaaacttttgcctgaaaattagctgtattgccatcaggtggcagtcataccttagttatggccacacactacagttaatacccttagttgtaatagctacagcatgataattatgctgagagtgaatttagaaagaacttcatttgggtgcatacaagaaa

SEQ ID NO: 121432 - DNA, 6172 bp, Homo sapiens
ttttgagacaggagtttcactcttgtcgcccaggctggagtgcaagggcgccatcttggctcactgcaacccctgcctcctgggttcaggcgattctcctgcctcagcctcctgagtagctgggattacaagcacctgccaccatgccccactaatttttgtgtttttagtagagacagggtttcaccatgttggccaggctggtctcgaactcttgacctcaggtaatccacccacctcagcctcccagagttctgggattacaggtgtgaggcaccacgcctggcccatagcttctcttctaaagaacattacactttaggaggggagatgatttattttaagacaaaaggtggtaaaggctatggtggtaatcataatagtttatatttatatatgctttccagatttatttcatgcagtacaaaaatacattggcaacactgaagagggagaagggaagtttaattctgacgggtgattgtggaaggcgtaatggaggcagtttctctccttaccataagatgccggattgactttttaaatacgtcatgttattaatactctcctttggaattttttaggtacgcagattttctgaggcattcttttgttttgagcatccaagagaagctgccattgcataccaggaacttcagtgagtagtataaattcaaaattaaaatgatattacttccttttacataagatacctgtctcagaatttatcagtgacagaatatacagtattaacaatataagaaattaggagaatttgaatttcagaaatcccatctataatcaaattgtttcatcttattagttacttcattaaagttccatactttacatataaagaagcataatgcactgtattcctccctccttttttatcagatctaccataatcttggtagtctcatacagctttggctgtagccttccatttagccatattctgtctttattttcacaggccagaatttcttatgttcatccttttttattacagattttcatatatactgtcttctgtaattgtaaatgatttacaattaaaatatccagaacaaatgccttctatctttcctactgagtagatttagtcctggttttctttggcattaaggaatattttgaggacattatgctgagcaaaaaaagctagacattaaaaattgaatactgtatgattctacttatatgaagttataaacaagcaaaagcaagatggaaaaaagacaggacatggttttcttggcattgacttgtgctggattgggaagacatgagggaaccatctgagtagatggaaatgttctgtatcatatatccatttgtcaaaagcatacagctaagatttatattttaatgcatataaattataccacaaaaaaaatcctgtaaataataatagagtatcagggtaggtagtgagtgctgatagaaagggtatatgttaactgttgaagttcggaggtatgtatatggggtattttatactattctttgatttgtttgaaattttccataagacagggttttctgttttaactgttttgtattagaaaattatacatcttgttttaaaatagctgttaattttatttgtcaatatatgttaagtagaaacagtagaaatgaaacacgtctttttcccagcactagcatcaaataattattaagcagttaagcttttggtatttctcttatatgtgatttgcagcagatttagaagttgagacattaagcatagaaattcactttaaaataacataagaaagtatggaagaatataatgggaattacataaataattagcagtctgtaatttaataagtcaataatttattgccaacaaactatcattttcattttaccagtttttatcgctgaccaagcagctctctcataagaaggttatgtcttgcagatgagggataggaattgaggagggaaggggaaagggtagattctacaaaggggagttgggtataatttttctaaattacaatctgactgaagaaatatttttcagtgctcagagtcatctacagatgtgcaccgctatcaaaaatacttccttctgcagttctcttccacccttacctattgaatgtagtgaattagatggagatctcaattcattacctataatctttgaagataggtatttagattcagttactgaaggtaagtgtaatctaactaaaatatacaagctatgtgtatagttttcagtatattcttcctaatatacataaaaccattccctaatgtggaatagtttttttccctctctagttttatttatgtttgaggatattagaagttatagttagaaaaagaagtcttaatcatatgagttctcacaccttgttttaaacctgaatctttttttctttggataaaagacttagatgcaccctggatgggaattcagaatcttcagagatcagagtccagtaaaatggataaatatgagactgaagaaagctctgtagcaggactttctagcccagagttgaaagtcagacctgctggtgcctccagtatttggtatacagaaggtgaaaagcagctaacaaaatctctaaaaggaaagaatgaagaatcaaataaatccaaagttaaggttactaagcttatgaaaacaatgaaatctgaaaacacaaaaaaattaataaaacagaactctaaggattctgtggttttggtaggctacaaatgtttgaaaagtacagcatcaaatgatctcattaaatgctttgaaggcaatccttcacatagtcagaaggaaggtctggatcccacaatatgtggatataattttgacccaaagacctacatgagacagacaagtcaaaaggaagctagctgtttgccaactaatacagagagaactgaacaaaagtctccagatattgaaaatgttcaaccagaccagtttgatcctttgaactctggcaacctaaatctttgtgcaaatttgtccatttcaggtaaacttgatatctcccaggacgatagtgaaattacacaaatggaacacaatctggcatccagaaggtcatcagacgattgccatgatcatcaaacaaccccatctttgggagttagaacaattgaaataaagcccagtaataaagatcctttcagtggagagaatataactgtcaaactaggaccttggacagagcttcgacaagaggaaatacttgtggataatttactacccaactttgagtccttagaatctaatggtaaatctaaatctatagaaataacatttgaaaaggaagctttgcaagaagcaaagtgtctttctattggagaatcattaactaaattacgaagtaatctacctgccccttctacaaaagaatatcatgttgtagtaagtggagatacaattaagttaccagatattagtgccacatatgcctcatctagattttcagattcaggtgttgaaagtgaaccgagttcttttgcgacacatccaaacactgatttagtctttgaaactgtgcaagggcaaggtccttgcaatagtgaaagattatttcctcagcttttgatgaaacctgattataatgtaaaattttcattaggaaatcattgtactgagagtacaagtgctataagtgaaatacagtcatctttgacatccataaactctctaccctccgatgatgaactgtcacctgatgaaaattctaagaaatctgttgtacctgaatgccatctaaatgatagcaaaactgtattaaatctaggaacgactgatttgccaaaatgtgatgatactaaaaagtcaagtatcactttgcaacagcagagtgttgtattttcagggaacttggacaatgaaactgtagcaatacattccttaaattcaagcattaaagaccctttacaatttgttttttcagatgaagagacttccagtgatgtgaaaagtagttgcagctccaaacctaacttggatactatgtgtaaaggcttccagagtcctgataaatctaataactctacagggacagcaattacattaaattcaaaactgatttgtttaggcactccttgtgtcatttcaggttccatttctagtaatacagatgttagtgaagatagaactatgaaaaaaaatagtgatgtattaaatctcacacagatgtattcagaaatccctacagttgaaagtgaaactcatctgggtacaagtgatcctttttcagccagtactgatatagtaaagcaagggcttgtggaaaattattttggttctcaaagcagtacggatatttctgacacatgtgctgttagctacagcaatgcacttagccctcagaaggaaacttctgaaaaagaaattagtaatcttcagcaggaacaggataaagaggatgaggaggaagagcaggatcaacaaatggttcaaaatgggtactatgaagaaacagattattcagctttggatggaacaataaatgctcactatacaagcagagatgaactaatggaagaaagacttacaaaatctgaaaaaataaacagtgactatctgagagatggtataaacatgcctactgtctgtacttctggttgtttgtccttcccgtctgcaccacgagagtctccttgtaatgttaaatattcttccaaaagtaaatttgatgccattacaaagcagccaagcagtacttcttacaacttcacttcttcgatttcctggtatgaaagttcaccaaaacctcaaatacaagcgtaagtaatggaacgtaatagtacctgctgctaaatatatacatatatatatacacacacacacacatacacacacacacacacacacacacacacacacacacatatatatataaaatcatagatagtgctaaaggattgagtgtctattttgttgtctggtttctgtaatacaaaagtgcttctttgatgactatccgaaatggagaaatgaacataatatacccttggccagacagacctatagttgctgaatgatcgtgctgttctgctgttctataggatagacattcctgatacagattttccaatggtagttttgtgttagaagtatggaataactgagcttaaaacccttttttcatcagtccctcatttctcctccattaacttccagacaaaagccaagttttatgagtttatctaggaaataaggataatattagttaaatgagtaacagggtagtggaaacttcttgaacttaccagatgctgattgccttcagctaagtcattggtttccagaattgagatttcatgtaccagtaaaatatccagaaaaatctggcgatgatacaggtttaccagcgtgcactggttcttaaaatattctattgcctcagccagactgagtcataatatttggggtaagaggtcttggcatgtatatatatagagagagatttttaaagttcccagattattctgatttatacacagaaattaagatacatagtgtctaaagctagtgaaaccactgaggtaacaatagccaattaaaaaattgtgatatgcagggaaaataaagtttatatcaccgtctggttacttcagattgtctgagtcatcagaaagcaatgatctctaatatagactttatatatttttggccagcttatcctactcagtttagtgttcatcaggttcctcttccagcttcactttatcagtccaaatgatgtatgttaaatagttaataatttttgatgtttgcaatccccaaattggttagattgtccgtcattgcaaacgagtatataccactaattgtatgcagtcacattcccctcttcgttctgctccttcttattggtatttttagagaaaaatacaaataacctaatctgctaaatactgtaactccattctcactgttacattttgtaaatcactccttcccttccatttatgcaagattaaaaaggagcaaaggggataagatttcattacaggataaacatcagattatcacctctccagtccctctcccagcttttctgtgcatacagtgttaaattttgcagaaagtataacttcactcagaatgttttcttagagttgatttcaagtttaaaagaatattttcaagtgatttcaggtttaaagtgttcattgtatttga

SEQ ID NO: 121433 - DNA, 1039 bp, Homo sapiens
ttgcttaaattaattgaatcttaaatgcattctgaaacagaaatatgcttaattttaattatcctaagtgtaatattagattccttcgtaagtaaattttccatggaactgacactcatgtgccaacattttgtttaatttgggattttttttttcattatactttaagttctgggatacatacgcagaacatgtaggtttgttacataggtatacacgtgccatggtggtttgctgtcatctacattaggtatttctcctaatgctatccctcccctagtcccccaccccctgacagtccccattgtgtgattgtccccctccctgtgtctatttgttctcattgttcacctcctacttagaagtgagaacatgtagtgtttggttttctgttcctgtgttagtttgctgagaatgatgatttccagcttcatccatgtccctgcaaaggacctgagctcagtggatttttttttttatcttctctcttattgttggttttgccagctgtcacctcctggcagttattttgtctccctttgatagtctttctggttcccttttacctggctgctttaaactttgtgtgctagaaaaatcggtatttctagaagttaaaatttcattaattaagttataaaaattaaattataaatacaggtacctggctttagtgctggggttttatgacagctgttttggttactcaacagtttttttttagatgtaggaactgttagaagatgccaaatatctctagaacaatgcaatattactgtattatgagattctatagcagcaaactagatttttgtggattatgaaaatattaaacaaatgtccctggtactaaattgtcataaaattggagatttttctttaaaaaaaaaaaaaaaaccagactctcaagaaataaaatattctcaatgctaacttttcttccctccctccaaacaataaagtcttcaaagaattatcccccaagaaagacttctggacccagaatctgccagaatctctggcaaattcttttttaaaa

SEQ ID NO: 121434 - DNA, 2247 bp, Homo sapiens
aattttttgtatttttagtagggtttcactgtgttagccaggctggtcttgatctcctgacctcgtgatccacccgccacagcctcctaaagtgctgggattacaggcgtgagccaccgtgcccggcctcaaactgatttcttatccttcttagtgcctcaaactagattctgttcaaacatgttataacaaattagtatgtgtttattttggtgtaaaaaatttttgaaacccatacgtagttttttttatgatgcattttctatgaactttttgaagaacacttgtgtcttatatctgtattgtaagtatatgtgtagatgccttttgagttaattattattaaaataaactttcttagatatttaaatggatttttatttttctcagtctgtgccagtatcaccaaaggaaggtcaacagattaaatctaaaatgcattcacagtttgctgtatgattacctagaatggtgatggtaagacaccatttatagctactgtagccgggagtcaccaaagtgatgtgctaacagtttgataaataaatacactgttaggtagaaaagtgaaagccaccaaaaccacctaagaaacaaactgttggccaggcacggtggctcacgcctataatcccagcactttgggaggccaaggccagcggatcacaaggtcaggagatcaagaccatcctagctaacacggtgaaaccccatctctactaaaaatacaaaatattagctgggcatggtgggatgcacctgtagtcccagctacttgggagcttgaggcaggagaatcgctcgaacccaggaggcggaggttgcagtgagtcgagatcatgccactgcactccagcttgggcgacagagcaagactccatctcaaaaaaaaaaagaaagaaaaaagaaaacaaaaactgttgaattgacattgcctggctaatagaaatcagctttgacataaaaattgagaactctatttcattgtatattgtctgttcacaaatggcataggccataagcttgtctctaaaaactgtaaaaatatgtgatggtgtactttctaccttttactttatctcatcctttaaacatcatttttcattttttaggaaacagtgcagatctccgattagtaaaaacttacattgaacttggattgcctgggggaagaattgattttcttatgtctgagagaaatcaggtacaatatgacagtgttttcagtgaaaacaaacatttttgtaccagtttctacctaaattttgccttactacaaaatgcctgtaatagtagaaataatttttctgatttctatgaaatttaatataaatgtatatccaaaggaaatatatatgatttacattttgacttatgatctcttcacatatgaaatatttctagaatttcacatttctatagaaatatttcattaattaaaccattgtaaacatcttatgtttcatactggtagtgagctaaacaaacaaataatgcaagtattttaagaacactgaacctttttttcccctagaaatttactctctttgctcgttttaagataaaaaaattacactcactaacttctctataaaacattgaacttaaccatactttcagtacctaaattaaaaatgtttatattgttagtttttcatgtgattatacatattcccaaatataatgtatgtgctttgctttctttttagaatgatacttttgctgattttgatagcatgactgatcgtcttttggatgagataatacagtatattcagatatatagtctaacagtctcaaaaataaggtatcttctttaatattatgcaatttatttttatatttctatgaattgtataaaagttaaacagaatttgtgatagggttgtcctattctgaaatataggagactacaactcaaattaatttatagtgaaaaaaagtaaagattttagggaaagatttatatgaaatgtccaaaaaagtgtatctgtagagaagaaaataggttagtgtttgcttagagctggggaagatgggggatggtggggataactacaggatataggatttctttttgaggtggaaaaaaggtcctaaaattgattatagtgagagttaaaactctgtgaatatattttaaaacattgaattgtacactttaagtggaagaagtataggctctgtgagttacatatatgtatatgatatatgtatatgatatatgtatatgaagcaacaaaaata

SEQ ID NO: 121435 - DNA, 1040 bp, Homo sapiens
attaactgggtgtggtggtgcatgcctgtaatcccagctactcaggaggcggagacaggagaatggcttgaacccgggaggcagaggttgcagtgagccaagaccacaccattgcactccagcctgggcaacaagagtgaaactccatctcaaaaataaaaaaaaaaaaaaatcaaatttcaagaataatgtataataaatttgttatttccacttgactagataatgtgattacttacattttctataaacagaaccaaaaatgatagttgaaggaaaattaaacctttttaaaaagagccatttttctgctttatatggaaataatgtaactaaattttataacttatctaaaaattggcatagtttttttattttcagttactattgtgaactaattttccttttttctgttggttccataggacagatctattcagaaatgatccacaacttgcttcgacccgttctgcaaagcaaggactgtaatttggttcgctataatgtcatcaatgcattgcccaatacagctgattcactcattgggagagctgcacatatagctgttcttgattcggaaatatttttagagaaattctttctggttgctgccctcaaatatttccaatagtataaaagcattgttagcgactggacaattacctcattcaacaatgtttcaaataatgtattatattaaaatgtagatgctgataagttctaagaaatatttatacctttttatatggaagataatttatatcatccatgtttagtgctttttaaacatcaactttactttctaggtaatgtggctgtgcaatatttttttaattttatctttttacttttctattactttttcatatattttgctacctaagtatttcagtgaaactttaagcccatacctgtgtctgattgtttattattggctttccacaattcttacatcagactacattatattagagaccattattgctagaatagcatgggatttaaaattttctaatactgggggtattatttagttaatt

SEQ ID NO: 121436 - DNA, 1102 bp, Homo sapiens
tgggagacatgactttttaaaaaataaatatttgccaggcatggtggctcacatctgtaatcccagcactttgggaagctgaggcgggtggatcacctgaggtcaggagttcgagaccaacctggccgacatagtgaaaccccatctctactaaaaatacaaaaaattagctgggtatggaggcaggtgcctgtaatcccagctactagggaggctgaagcaggagaatcgctcgaacctgggaggcagaggttgcagtaaaccaagattgtgccgttgcactccagcctgggcaacaagagtgaaactccatctcaaaaaaataaaaactaaaataaataaatacaaaataaataaataaatatttaaacacaacttgggttctacaagtgcctggactacaggtctgtttgaaggagctgccttgtttgttgacccatggtgatgtcataattatcgccagtaatcaatgcgtggattcagggtgccaatggttgaatatgatcatggtgaaccccttttctaaagccttctctagtcctctacagaggtactatggccaggaccaagaaaatgaaatttctcaaaggtcagtggtccataacagttaagtatgctacatgattctcttggttttcatttctagtgaggaaacacacttactcttcttcaattccacatacaggacaggcctaaaagctcctcccatatctctgagaacattagaccatgcactcttgaagaaggctttcccttttcctccttaaaaatcttcctccagcaattgagggttcccatgtgcagtatgttggctcctttgggtctgcacagggcccaatgggtagaaggtcatgttggccgcaccaccacagtctgggcaatcatctggctcaccatgatgtggtggtcttggagtcagggagcatgccttaggccttcaggctgcccagaaaaggatgatgccctgcacagagatgctgaagccctggtacaggccccagatcccatcagacttacttatcttcaccagacagtctcctaggtctttgaacctgaatcccagctctgtgtacgatttcccaacattgaccaccagatgggt

SEQ ID NO: 121437 - DNA, 1061 bp, Homo sapiens
aaaaaacctaattttagttttttcggttggagggcttctgcctcagcctttgaaacagatatactatttttagctgctatgttttgtgtttggagatctgatttatgtttaatgtcttgtaagtaatctcaagggaaatatttcttttttttttaaagaaatgtcttgtgtagttaagaaaagatcgtgtatatttttaattggtttatttcgttattgggtgagaaatagggtagttctctaaagcaggagacagtctctttggggaatgtcctttaagatttctgtgttatttgacttagacttttcctgaagctttactgttctatctcaatactatataaatgagtcacatttcagtaggctgataatatttgactagactgagccacacagcatcagcaggttacttcactgtcgtaacaggtactgaattactagaagaatcatgcgggaatactgtaactagattatttttatgaagcacttttcaatatagtaacttgattgagtcaagattatatttatcctatgtaaccttttcaggtgatgagtttttacaaagtccgtgcctggttcttgtaatacttgttttcctagtaacttgattgtgtgtggttatttgggagttctgcactgtgtttaggctcagttgcttgctcattgactgcactagcaaaacactgaaaaatggtcctttaaaaggccaagaagaagaaagaagctgaagctaaatagtacacattttgtcattttgagtaataacatggttaagtagagatgctggtaaatattaaatctgttcattaaaagtcgaatagtaacagtttcagaattaaccttccttcatctacagactttattaaaaataatttaatttttgttcaaatttctgtctccaaaaaagtactttataaaatcagattttcactaatgctttctaaaataatacagatttttaaaagccattattaaccatgttaactttttttttttttatttactcttttgaggtggggagaagagaatcatgtacttcttaaattaggatcaaaagtttt

SEQ ID NO: 121438 - DNA, 1055 bp, Homo sapiens
caaataaatgattctaaaacgatgtgctaagtgcttgtaataatggttttaagaaataactacctctatacttattttgggctgttgttccccttgcaccttgacttttgcccattggtggtctttacagttcctagaatgctgtttcaagacctttgcacgtgctgttcttctgcctgggaagctttctaacaagtttttgcctgctcagcttttgctcatctttcaattcctgcttaaatgtcttttcaagggaaataattctccttgatcctctgagattaggttaggcttccgtttatacataaaagacaacaccctgaatcttttattgcacttatcacaattgtaattaaacattatttaggtaattatggggtacactgtatccctgctggattatagctgtaagagaggagaccttgtttatcttggttagggtagtatccccagttttcaggacatgtggtaggcaaatgtaacttagcaaatattttttgaatgaatgaatgtgtgaatgaatgagcacagagcccctggcaggcagcagggtgtgtgaaagggagtgcacctgtgaaagggagtggcatgtggagtgaccctgttgggaccagtcacagaaggagtcttcatttgagctaggttctgaaggtggagtgggatttcatcagatagagaaggaattaaaggacacagctgcacacacacatgtaccagtatgaaagaacagaagaagtttccatacggcccttactagataagctttctttaagcatgatcagttttggtagtctcaggtcagaggaagaactgggatagtgaggattgcaggcaaatcctgagttaggagatgttgaacagtggtccaagaagagggcaagaggacctaaattcacacaatgtcaatatataagtcagggtatagagcaggaaagagatccactgtagctattttcaggaatcaggtacttaccaagtcattggaagggctggaggagggaaagtcagggagccactgctgaactgctttcaaggccacacataccaccactgct

SEQ ID NO: 121439 - DNA, 1121 bp, Homo sapiens
tgtctcagcctctggagtagcttacaggtgtgtgccaccacacccgcctaatttttgtatttttggtagagacggagttttgctatgttggccaggctggtctcaaacccctgacctcgagtgattcgcctgccttggcctcccaaagtgctgggattacaggcttgagccaccgcgcctggccagaatctagatttttataagtggtacagagttgggtgtatttaagatggtatgggatgatgaagtactacttaaattagcctttctcacaggacctatttaaaaatacatgcatgcaagagtcatttaacaatctctttgcaatgggatcatttatgtaggaaatcccaagaaatttatagaaaagctattagaatgaataattgagtttattaagtttacagaaataaagtgactatagaaaaagtaactctatatactagcaacaaataattggaagttgaaataaaaattatgatttataatagcataacaatatgaaaactgtgggataaatttaacaaaatacgtgcaagacctgtataccaaaaactacagaagatagctgagagaaattaatgaatactgtacctaaagaagtggagagaggtatcagagatatcatgctcatggattagaagactcaatatttttaagatgtcagttctctccaaattagtctctaaattcaacattattccagtcagaatcccagaaggctttttttgttgcaactgacaagctgattctaaaatttttaatgaaatgcaagggaccttccaaaatcaaaacattgaaaaacaaaaagaatgtttgaggtcttacacaacctgcctttaacagttattaaaaagctatagttatctgtggaacataatacgtagtccagaaatagactcacatattatggtcagtttttaacagaagtgccaaggtaactcaatggagagaaaggatagtcttttcaacaacaacaacaacaacaacaacaacaacaacagaatgtataataccttgaaccttacctcagaccattcacaaaaactaatttgagatggatcataaaactaaatttaagagctaaaactataaaactgctagaagaaaacatgggggaa

SEQ ID NO: 121440 - DNA, 1094 bp, Homo sapiens
tatttttaaaaggcttccttaatacagttggtgaaaatgttatactattttgcattttcttgatactcttaagatttaacttttttttttttttttttttcttgaggcggcgtctcactctgtcgcccaggctggagtgcagtggcacagtctcagctcattgcaacctccgcctcccgtgttcaagcagttttctgcctcagcctttggagtagctgggattacaggtgcccgccaccacgcctggctaatttttttttgtatttttagtagacggggtttcatcatcttgaccaggctggtcttgaactcctgaccttgtgatccacccgccttggcctctcaaagtgttgggattacaggcatgagccactgagaatattgaacattttttaatgtgctcattggtcatttctattctgttaggatttgctcctacattttgggagggtgggattggcaacccttttcacatttctctcttgaccagtcattgggccaagagaacacaaaattccagacagcattcattcttctgggtatcctggtgggccacaccattcatctccatattccacccataagaccgtgaataagtgggttgagcattttggaaaaatattttcagtttcagatctatatctatatatttttcagtaattatggaattgttgaaagtttagagatacaagagacctgtatggtatctgttcgagtctgctatactagagagataaaagaggttaaatgacttgttaaaagcaatggaacagtgagagaacatgggagtgaacccaggtcttctggaaatctgtctgttactttgtcaggtcacgtattaatgtgttacccttgaccttcacaaaagatagcacccaactttttaatcttttcattctctttaaattcagtccttgtgcacagtgagaagggaggtaaattgtgggtttttatgcttaaccaaaccgttatctatgtaatggcagcatattaacaagataattggttatcagagtgagcaaggattatctattatttagccaatttattcaaacataaatttggcagtaatgtaaacatgttttcaaaatttg

SEQ ID NO: 121441 - DNA, 1294 bp, Homo sapiens
gtgcgtgccaccatgtgttgctaatttttgtatttttattagaggtggggttttgccatgttggccaggctggtctcgaactcctgacctcaagtgatctgcccaccttggccccccaaagtgctgggactacaggcatgagccactggacccggtctcctgtgtttctttttaaaaaattgaggtaggaaatcctggtcggggtagccatggcagcttgtgtctgccacctgcccttggccatcacactgatgcaccgggtcccgtgctggccacagcctgctgctcagcatcgcctgtgctctgtggggactctgatgaggctggggctttgcagctggctccacagcgggctttggtgcttgcgcacgtgctgggtagaagttacacagtcgtgctgtcagtatagtgacttgccccctttgatgttagagggaatcgaagactgtcttctttatatcttgaaaccctgtgacaggattgacccagagaagctctcagtgaattcttactttatgaaagacctgtgcttggacagtttggaccaagtagagagtaagcatggtcatggaagataaatttgggtttgaaattcctggtatagatatggaaaagttaatatgtccacaagaaattgtagattatattgcagataagagagatgtatatgaataaaatatcagacccttttgcttcactgggagaagactcagatgatactggtgagtgtctggaagtgagaatgcattttggcattattgctgactttggcagagtaattctgttagacctgggtttaaattgtgtaattgttttactctgaaaataaacgtataaaaccaaaaaaagaaaaaacttgacttataattacagagagaacagttcacagatctcatttagttttatgagtcttggcaaatgtctgtatgatgtcaccaataccccagtgaagatagagcatttctgtcacactagaaagttccttcatgccaatttccagtcaagtcccccaggggcatacactacactgatttctatcccattgggttagttttgctatacattaaaatgtctgtctttttggaggctgttcctattaactttgacgtttaattcagatgggcaaaagtgatgatcacaatgtgatataatgttccatattcatatgatattttataataatttctttgatataaaaagtgcttgaggccaggagcggtggctcactcctgtaatcccagaactttgggtggccaaagtgggcagatccgagagtttgagaccagcctggcca

SEQ ID NO: 121442 - DNA, 1060 bp, Homo sapiens
ataaaatatcatatgaatatggaacattatatcacattgtgatcatcacttttgcccatctgaattaaacgtcaaagttaataggaacagcctccaaaaagacagacattttaatgtatagcaaaactaacccaatgggatagaaatcagtgtagtgtatgcccctgggggacttgactggaaattggcatgaaggaactttctagtgtgacagaaatgctctatcttcactggggtattggtgacatcatacagacatttgccaagactcataaaactaaatgagatctgtgaactgttctctctgtaattataagtcaagttttttctttttttggttttatacgtttattttcagagtaaaacaattacacaatttaaacccaggtctaacagaattactctgccaaagtcagcaataatgccaaaatgcattctcacttccagacactcaccagtatcatctgagtcttctcccagtgaagcaaaagggtctgatattttattcatatacatctctcttatctgcaatataatctacaatttcttgtggacatattaacttttccatatctataccaggaatttcaaacccaaatttatcttccatgaccatgcttactctctacttggtccaaactgtccaagcacaggtctttcataaagtaagaattcactgagagcttctctgggtcaatcctgtcacagggtttcaagatataaagaagacagtcttcgattccctctaacatcaaagggggcaagtcactatactgacagcacgactgtgtaacttctacccagcacgtgcgcaagcaccaaagcccgctgtggagccagctgcaaagccccagcctcatcagagtccccacagagcacaggcgatgctgagcagcaggctgtggccagcacgggacccggtgcatcagtgtgatggccaagggcaggtggcagacacaagctgccatggctaccccgaccaggatttcctacctcaattttttaaaaagaaacacaggagaccgggtccagtggctcatgcctgtagtcccagcacttt

SEQ ID NO: 121443 - DNA, 1011 bp, Homo sapiens
ctaaaactaagagcctgctgttagtaagccctgcaggacatagtcccagttccactggatgaagcctgaaatatcaaaatcattgatgggtgatgttggttctattgcaagttgaattatggagactgatagaatcttaggcctgttacttaacatctttacagattctgtttcttttcctgtaaaattaggataataatgcctgtctcatggttgttttgaaatttaaaattgcaaatataggtaaagtgttgaggctaatgcttgtgtcactgtagctattatgctatttttattatttttttcctgctacttactgggcagagtttactcttcagggccttgagtccttgaggacagctagtttgccccatattctttatcgcctccccaaaacatcagctcctgttgtttttttcccctgccctctcatttccaaattgcccaatctttcattttcactggttctttcactgctcccctacctcccacccttttctagtctactttttagaaacctagaaactaagcttaccaatatattttttatagtcacaaaatgatctctctacatctgtgatgtcattgaattcttatttccccaaatcccaactaacaaacacatccatgcacttttacgcagtcactttttggcagtggtctcctatagaaatgactcattattccacatcacctctacctttcagattttaatgttactatttgtgataacatcactagaacagtgtttaatagtttggtataatgtacatatctgccttgttcctaattattttttatttcccccccgagatattaatgagctacattaaatagatatgtacagtcatagtcattgaatataagatactgctgattttaagaagcacatccactttacggaccaataagaaaaaaaataccaattattagacaccatcaattgtgagatgtattcctatttcaaagacgttaaaatatgaaaaaatgtaaacgaggattgatgagata

SEQ ID NO: 121444 - DNA, 1051 bp, Homo sapiens
tgtgatcttgattgtaaatcagtagaatcccagggtatttcaaagctcaaaagaaagaaaacttgtcagccctggaaacgggagcattgttcaagtggtgcactagaaaaaatggcagtactgcctacaaactatgagggaattcactgttaggaagtagtaagtgtaaaggtggtactgttttcacaaaaaaagacatttagattatggactatggatcaacatacgttgataaatgtgaaggattaaaaatatgcttctgttttaacttgagtgattaatttcgtagttgtgatttaaattatatttctaaggagaatatatattggaaataataaattatttggtatttgtgtatatgtatgtatgtgtatgtatgtgcaggaatcactttttaatgtttatgtgagtaattaaaaaattttttttattatagtgcatgcaagatatgggaaatactaaagcaagactactctatgaagccaatcttccagagaactttcgaagaccacagacagatcagtatcctttaaaacttatttgttttgagtttaaaaaacattaactcatttttacagttcatattttatctgttagtatttaggaagatgtgaactttatcacgctactgttcattaaagatagaaattgacttgctgtgagctgtgctttgtatatggtaggtttttagtaggaatttggcacacagattacataattacataaaaatacacgatacatatggtatttagatgtgattacagacccctgattcacaatgattatttgacttacgatttttccacttcatgatggtgagaaagcagtatgcgtttggtagaaactgtactttgagtactagtgtaaccattctgttttcacattcagtacagtattcagtaaattacatgagatattcaatactttattaaaaatatgctttgtgttagaagattttgctcaaccgtaggctaatgttagtgttctgagcacatttaatgtaggctaggctaggctatgtttggtagattaggtgtattaaatgcatttt

SEQ ID NO: 121445 - DNA, 1038 bp, Homo sapiens
agaagactaacgttggctttatcatcttgacttttccatttctcaactttgcaaggataaaattggccactgttcttctaatacatgtggaatcctatatgatgtgcccagggacagcatatatagtggaaaagaacatagatgttggaatcacaagtgcttaatctttccaagttgctgtttcttcatctatgatatggaactaataatatgcacattcgtggggtgtgggaggaattaaaggacccaaagtatgtacagcatatatagtataggatgtctggctcagtgtgggtacttgcatagatgttaatttcttataccaaaaaccccaaatgaacctgaattgaatttaaagtgtggtgatgcattgatagtggtggtggtgatgtaggaattaagaattgtcatttacttttctttctagaattagtttggatgagttttgttcagtgagaaaatttcctgaaagaggtagacttctttaagagaaagaaaagtagtttacagaatgtagttgcagaaataatgtgaaagagagcacagattgaggagtaggaaaattaaatttagagtcccagctttgtggagtggcgtgaataaagggaagtgtacatatcactgaattcatgcttttccttaagttatctgttttcagagcagtggaatttttcatcagagataaatatgaaaagaagaaatactacgataaaaatgccatagctattacaaatgtaagtaaaaccttcatctctcatcaattgtttgttgactagatttcaaacttttaacatgcaatacagcttaatttatttattgtgaaaacatactagttgtatatatttacatttgaatattggaacttttttggttatataatgttgagctcttgcagagcagaagtcttgatttagaaaggagcatattctaaatctaataaccacttacatggcatttaattaagttaatttttgaaatttgcaaaaaagctagaaccactaattgaaaatggtgggagagaaattttttcccctagat

SEQ ID NO: 121446 - DNA, 1047 bp, Homo sapiens
acttttcacctgtactccacagatttcctcctctgatgctcctcttcagcctttggtatcctctccttctctgcaagctgctgttgacaaaaataaattggaggtatggtcatgttttaaccagctacattatgtagtgttaaatggtaaattaacttccttttgcagtgtgtcattcgggaacactataatagttgttgatattttgaatgatccctagaattaaaacagcaatttctagaatttttttataccacaggtatgattaaagaactttgaatctatatttaatttcagaatgactgatttattggtgccatggctgtatctcaacagttaagaagcagttagttttttgttgttgcgcccattactatcttatacttacaggaacgtttttttaaaaaaaattttctttctatgattctgttgttaaaagcacttaaagaaagttaatgtcaagtttcttttttttaagcaatagtaaacatcatacagataaaacgtgtattatgggataatgagttcagaatcatcaatgacaactgttagaatgcattttgggtggaagtggttagggtgcagatactaccactatgtatttttaaagtcatctgtacaaatatttgagagttttcatttcttttgactctttacctattttttttttttttttgttacattggccttaataaattagtttcaggcatcctttcaactatcattttttcccgtagacatgggataaatgataaatggttggctagatgtgtggtatacaaaggcaagatatagcccctgccctccaggagcttacagtctaaggcaagaaaacagataactatatagcagtttataatacaatatattatgggctgtgattgaggtacgctcactgtactgcaggaggcatcattttgatgcatcttatgctctgaataagcattagatataaggggaaggattaggaagaattccatacatggaaactagcctgtgaaaaaacatatgggcaaagtgcagtgtttggggagttgcaagtagaat

SEQ ID NO: 121447 - DNA, 1825 bp, Homo sapiens
atatcactctaggtagcacttgaagttcctgttaggatttccccccctccctgccccattttctcaagatgtcctgtttttaaagagaaaaattaagaggattattaaaaactttgaatcactatttagatttatatcaacaagattaagttttgtctgtttttgagtttcatgtaaatgtaatcataccatgcaactcttcctctgtatggattcttttgctgatcattgcgtctgtgagattcatttatgtcattgcattctcatttcttattgctgaacattcttctattgtctgtctacatatgccatacttttttttttattctgctgttagtggacatttgagtcgtttctggcttaggacttcaatgagtaaagctgctatgaacattcttataaatatatggcattgtcatgaagaaaaatatcctagtgagtatagaaactaatctttttcttattctgtgctaatcaagagtacagaatttcctggcagttgagaggttatctttaaatgagtaaatttaattagcctgaaaaaatattgactactacgtgaagaaagctctttcagccaagatggtttgctctgttcttactgttttgttttacctagttttaaaaagagcgaattgaatacctaaaataagaattattacttaacagaaagcaatagcaagatgatagtaactttattttgttagttaaataaccatttactacaatgcccgcaagcctagaagaagaaacccgccagagatgtaatagctttttaacacttgcttattatcaaagtaactgtgatgataaagaatgtgtaggttgtagcagaaaaccatattttaggttctattacaggcttgtagtaaattgaaaacatttttttcttcatggaatttctaaaatgtttttgcaatcatttgaagctttattgcaagtgaggcaataaaaagggaagaaatccaattactttatgtgcagagctttcatttcctagttaatgaaagaaaggcttttgttcactaagcatgcatgctttacagttcttcttagtaaattagaaatttcctgaaatagaaaattaggaaaatacttcctgaatatatacactttgatagagggtagttttactaagttaaagcttatacttaagaatgttgcagcccaggtgaaagggtcaacaattagattagatgggtcattgaaggtaataaaaatagcaagcacatactttgtgcttaatgtttgtgaggcattgttctaagctctttaaatatattatttcgtagtcctcacaatagttatatcaggttgataccattattattctcctttatgatgagaacctgagagacagaagtttggcaatttattcatggtcacacagctattgagtagtggctgtgctgagaattgaatatgatcagtctgccttcagaatatgtatccttaaccaatatgctatatggcttttcagtctatttctataacatccaaaaataggaatgggaaggaaagaagcaagaaaaggtaagggcaaaggacctcaactctgtatctttgattttctgcagtttgaacatgatgtacttgggtataattttttggccttttatcttagttggtgttctctgagcttcctggatgtgtggttttgtatccaacattaattttggggaaattctgtcatactgtttcagatatttcttacgttcagttccttcttctccatctggtatttccattacatgtatgttacacttttttagttgtcccacagttcttggatattcttttccatttcttcagtgttttttttttc

SEQ ID NO: 121448 - DNA, 1092 bp, Homo sapiens
aaaaatcctatgatacaggttttgaaaagataaaaccttttaagtagccattgcaaatcctcttacagtctgttgtagttgtagaaatgttctttattccaaaggataccagtttcttgaagcagtagttgctatggagtggtggtcctctcatctctaactattgttgagccccaggatttgatgagcaaaaacttggtgtcaccttaggtagtaaatgcaacttactgtgaaaatgcttcagtctacctacattaacagattcaaattaagaagtactgtcttgattgtagatgtttttatatgggcttgggcttgtaagtgatcctcttgaatggcaccattttaccttctacaattgtttgattcctatctaattttataactttatttggattttaagtaatggataagctgcgctttactatgcagaatttgatagcttattttggtgtttgtctcaggggacaccctctgcaccagcagctgcaaccctgtctacagtaacatctggggatctagatttattcactgagcaaactacaaaatcagaagaagtggcaaagaaacaactttccaaagactccatcttatctctgtatggcacaggaaccattcaacagcaaagtactcctggtaatgaattttgatatctgctttcagtgacattactagaagtacatcctttgtaattatataataagatcaattatatatcttttattgttccatgtagtgagtgcttttgttgttgcagtttatacaactatgaagccgaaatgaatgagcattagaattaaaaaattaagaggcatgtacaggattcacagaactttatttggaattaacaagctgttcatagatcactaaatgttgtttcacaagcttatagaacatggattatctttgatgaattattgaaacgatttgcatgaagtttatgactgcgtacagtgtattttctctgcaggtaaacagtcttgagttaccacatggattaaaaaaaatctatgaatttttttgtaatcataacaaaatattagcataagccttattgtttacagagttttaatctttcacaccatttccttt

SEQ ID NO: 121449 - DNA, 1105 bp, Homo sapiens
agcggactcattaaaatcccaagattgctttggtatttttttttaagtaagttgtggttaatctttggggaaactgtatctagaaagtagataaagaagggaacaaagtagctatttgctttaagaaatatttgtatggtactctgtttttattccagtgcttggactagttgtcacattaatgaaaaaatgaccaactgtgtggctaaagaaacaagaattaaaagtgaagtaagcctcttgaactaagccttttatatgtttcacagatgaatcagcagatggctggcatgagtatcagtagtgcaacccctactgcaggttttggccagccctccagcacaacagcaggatggtctggaagctcatcaggtcagactctcagcacacaactgtggaaatgaaaactgcaatacaagtttcatccagaactaccacctgacattccttgctgaaacgcatctagttcccctgtttattcatatgcatattttttttctttttacccatttgttcatattaagaatgatctgattgaccgtgttggtctgtactgattcaatttgatgtggtgaaaagcaggttgataaatcattttatgtcaagggcagctttgctcatatttcccatgatttcatgtactgcattatttgagaagctgctcaacttgcaaaatcagttttcctctcaataaaattatagctctaatgtttgcatataagggaagtagttatcatgttagtaatacctctaatagtataaaccccaccccaaaattagccagtaatcctgtaggaaggtactgtatgatcaaatgtttaatcatataaatagaatgtaaatgtctcactgagcactgttttctagtgtatcaaaatgctcttatttcatcattcacttcactgtgctgttgttatgatgtgcttaacagggaacgtgattagtgaaaggaagataaacgtggatgttactccaaaacttcgtttaatgaatgcttaaagaattcaaattttatctgcctctcttgtaatttggatctcttcttaatgtacatagtgctaacatgaagacctttttctgcactatatgcaaacagggtaactaa

SEQ ID NO: 121450 - DNA, 1173 bp, Homo sapiens
aagtaataattgttttgaaggtctgaagccctggatctctttttccttagtgactaaggtgatactgtcaagtcaggcaccctcccagagttgaagctccgggcaccaacccacaaaacatttctcagcaacttttgcccttctctacattaaatgagttgatttatgattcagtttgcaaagtaatactaaatgataccaggtggtaatggaggagctgtgaaaacaccacaaccaccatcctctccagatgccagactgggccagtctcctgttccagaccctgctgccttttggagaaaagttaacactaagccacttacaaacataacgtggtacagcaggtgctgagtgaagcagaacaaagaatcataaagcattagctgtaggactagccccagtatcgatacctccaccaaccctaaagggagggaggtggcacattttagcagagaatactggatttggaattagaagccttttgtttttgcctaggtccctgcccctgggacactggccaactcatttaacctttcttgattttctaacttccccatttctttatttgcgagagaagtgtaacacttcaactcaatgtttgatgaaaaattgaggtatggaaagactccactgactgcaaagcactgttcaaaagatactacaatatataaataaaaatactattgtcagtgtgatcatgaggggcaggtgatgccagccaccatttatggctgaaagaatactggttgacagatgtaaaaggtttgggaaagttccaggtagcaaagccaggacacctacatgtgatagcaactctggtaacaagtccacagccttccttagacacaactaggacaaccaccagacacctcaacaaaagccagaggttcaaattgataacgtagtgtcctttccaacaggtcagatcagattttagtgttaaaagatttcttgctttttcccacatgcttataaataagctttatccttttttttttttttttttttttaaattcagatgagagcctacccttctcagtcatactgaaactcctgatacattcttcacatggcttcaggatactggttgtatttccccattctctcaaaaacatgggatccaaattgtgcagaggtgatttctggaaatgatatggagccacctggatctga

SEQ ID NO: 121451 - DNA, 1050 bp, Homo sapiens
ttgtaagactttaaaagtccaacaagctatttacatttctggacaaaattgcaatagggactggtttttcctcacttgttttaaataacaaaaaggcagacaaaatgattgaaaaaagtttccagacattggaaaagaggcacatgagacagagatctctgagaaaagagaaatgtgacccctacaactgccccagcttcctgcctgaagtatgttttcaggctacaccacagggaggggaacccggaaagctctgcagtccccttgaattgaggaaacaactgagaatttgaggaggccaagacaactaggatatgcagggtggagtactagagaaggaagaactctgctgatctgtagacagctctcctcaactcttcaactgagtatgaagagcaaatgctcacacaactacctcaggccaggtacagaaccactggcaaggagcaggtgaatcaattactggaggggactagttcccattctcagtagccagagtggagctacctagtaacagctggagcacctggaggagaacttggaaggttatcgtgcctgttgtaaggtcaaattgattagccctaaactagaggctgagatggttttgcctaacaaacttcaaaagcaagcctggaaaggatcaaaatgtttccaagttaactcagttgtgtcccagtacaaagctcaagaatacatatgtatttataatatagtataacattacatatatatgtgtttttatgtatggttgtgtgtatacatatatgtctctctcatccagtatctagcaacataaaattcaaaatgcctgatgcccaagacacctcagtgatgaaaaatacaatgtctgagatgaaaaatacattggatgggattagcagcagaggagacactgcagaataaaagttgagtaaactcgaacacataatgatagaaactaccaaaatgaaacagaaaaggcaagaccaacacacacacaccgtacagagtcacaggaacagagtcaaaggtgaatgaatgagggagacagggaaaaaaatttgaagaaat

SEQ ID NO: 121452 - DNA, 1099 bp, Homo sapiens
ctggaaaactctgttcttacagcttagctcttttcattgaaattcccagataattatcttgtaatttccctgtgcctaaaaaagtcttatagtagtcaaactagaatagaggtacaatttgtaattcttaattaatatcagaataaatgtgagttagaaagagatcttctcgccggtggggccggctgggactcgccgctcgcacgcccttgggcagcggcggggcgcctgctcttccttccgcttgcgctgtgagctgaggcggtgtatgtgcggcaataacatgtcaaccccgctgcccaccatcgtgcccgccccccggaaggccaccactgaggtgattttcctgcatggattgggagatactgggcacggatgggcagaagcctttgccggtatcataagttcacatatcaaatatatctgcccgcatgcgcctgttaggcctgttaacattaaatatgaacatagctatgccttcatggtttgatattattgggctttcaccagattcacaggaggatgaatctgggattaaacaggcagcacaaaatataaaagctttgattgatcaagaagtgaagaatggcattccttctaacagaattattttgggagggttttctcagggaggagctttatctttatatactgcccttaccacgcaccagaaactggcaggtgtcactgcactcaattgctggcttccactttgggcttcctttccacagggtcctatcggtggtgctaatagagatatttctattctccagtgccacggggattgtgaccctttggttcccctgatgtttggttctcttacggttgaaaaactaaaaaacattggtgaatccagccaatgtgacctttaaaacctatgaaggtatgatgcacagttcgtgtcaacaggaaatgatgaatgtcaagcaattcattgataaactcctacctccaattgattgacgtcactaagaggccttgtgtagaagtacaccagcatcattgtagtagagtataaaccttttcccatgcccagtcttcaaatttctaatgttttgcagtgttaaaatgttttgcaaatacatgccaataacacaga

SEQ ID NO: 121453 - DNA, 1098 bp, Homo sapiens
actcaagatttacttttttactagtgtgtaactttgaacaaatctcccagtttcttcattgttaaaatgaggatcataacactggcagcattctgtgaagactaagctggaaaatgtgcgctctgtgtaatatgggcacagcatgtagtaagcacttacaactttttcctacatttttcttttctcgttttccttctcctttgttttctccttctcatttcttttcttctatttctactcccctttctttctttttccctaggatgcaattcattttgatccaatttagcatttaaagaactatataactcctaggactgggattggcaaactttctatacaggggcaaatagtaaatattttgggctttgggggacagtgggtctgtattgcaactacacagctctgctactgtagtacaaaaactgccatagacagtacataaatgaatgtgcatagctatattccaataaaactttatttaaaaaacagctggcaggccacagtttgccaagctctgctttagagtacattgtccaacaaagccttgtgcaatttgaggtgctattaattttttttaattagatttatcacataaccgaatatatgggcatagggtattcatctttttaaaagcactattcttgtgtgctattattaaatttaaacaagttttcatataaaactcaagtgattcgaatcttaaaatgccttcacaatgtttgaaatgtctggttcatttttaaatatttactatttaggtgtttacattgaagaagttctaagtaaatggaaaggagattatgaaaaactggagcacaaccacacttacattcaatggtcagttacatattatctatcttgaaccatgtcctatttaatcatgtatgttttccagacaacgttaatagaaaaattttatttttttaaaataaataggcttttccccctgagagaacaaggcttgaacttctatgccaaagaactaactacatatgaaattgaggtaatgcaagctcatttcattttatacagggtggccaaataatattgctatttcactgtccttgtagctactgaatcatttcaggtgacttt

SEQ ID NO: 121454 - DNA, 1025 bp, Homo sapiens
ttcttaaaggcctcagcatacattacctttgtctttctttctctattggatgactgttctttctggtacactttaagctacactatcttcttcactgcccaccccttccaaattcccattagcaccatcttcacctagctaattttattcaggcttcaagactcagcctggctattagccaactcagaagtgtcttttgacccatcataacacttatagtaatggtgtatgtgtctgtcttgcaaattaagctgtgtccttctcgaaggtagggatgatacccttcatttctcatcacctagaatttaaaacattgctgatatatggcaggcagtcacaattgtttgttgaatgaatgaatgaatgaatgaaatgagtaagatcctgtaacagtttggaattatatgccacctgggtttacagtgtagtctcttatcaggtaggtttgttctgagatgtatagtaatgatgactttcttcttcgcccaagtattttgtgtaccttagaccagtttagcaaatgaagtccaagaactatttgaataagtcattcttagaaaataactttaggaagcaactgactccattcatgtgtatgcctctaattgtaggttcacttctgtccgaatatgaatttttaaaataattttagcattatattagcaatttgcaatataccatttttatgcatgtaaagttgtattctaacatatttactttttgctcatttgattaaatttattactgtgtatcccatcattaaggtaactaattttcagtaattaaactgttggtcttctgtttagccattattctcagttctgtgcaggagtgagctgaaacaaagttgtatagcccagagagtgagaagctgcatttcatgtctcccaacagtcagaaagggattatgtactgtttaaggaaggagtttggcgaatattttgaaacccttttgggaaagcatagaatattgaaaatccaaaattaaccaaatccgtgagtgtgcaagctcaaagctagagacc

SEQ ID NO: 121455 - DNA, 1079 bp, Homo sapiens
tacattttaattagtacattttctttttctaactatttggagaatttataatattcagttttaacagtaactgatggaattacagctgtaaacatgttgtaccagctgtgttttctgaagcaaatctaagtgataaaagcatgttatcatcaccaagtacatataatccttacccacatggaggagtgtgcagttggtagtataatgtggtaaacatgatttttgcccattatgaccttgtaaacctataaggcaacacaatgaccaagatagagacagttgctgtttcacaagtcgacaatggataattgtaggagactccacttttaatgagaagcaaactatcataatggaaaatagccagatagattaaagcttaagccattgaggttgaatggtgtacctcttatggatagcatatagttgtgtctagcttttatatacagcttggccccaacaggacttttcattagagtgtttagtccacttacatttactgtaattagtgatctagctgaatttagttctgccactttactgtttgttttctatttttctcatatattgcttgttcctcagtccttcttttcctgatttcttttacgttaaatgtttattttaccattttaattctgttgtctttttaaagctacatttctttgcattcttcttataatgattactatagggactataatatgtgtatttaatttatcacaatgaaaactatttgcgaattaaccttggttttacatatataaatcttgcaacactaaagttctgcttacctcccgtctatcctttggtgctatagttgccatatacattacatctatattttttaaaacacaaaatgcagtgctacaagtttgtctttaagaaactaagaacagtatgaaaaggatgttaaaatatctgggtagttattaaaataaattatctctaaaatgaattttgtaatctattattataattttactagttagaattttcaattgttattttttatatctttaagaggtgaaccgagtatagagtatagaacaagaaaaatgtcaggcagtcagctggactcactt

SEQ ID NO: 121456 - DNA, 1388 bp, Homo sapiens
taggtactcagcttcccttccactctctagggatcctgtagaccacagtgtttgtgctcaactgcagaagcttcatgtgagaaaaaagtttccttttctccactgacatattcttccactttttctttatataatttcctgctggtctctttaatccccaggcttctttcaaactcctgtttctctatatagtagcttcctgtacaaatgtatgtcacatttatatgtggaaacttgcctaaataaaattaggcagatgtgtgatgccagatatacacatatgactcaccccgcccctccccttgcttcatttagtttctggtcaaataccactttactaagaaaggccttacctgaccaccacctccacctaaaatagctctccttcaaatggatcatttggcttactgcacttccccttgcagcagttgtcaccacctgtgaaattatataatatcttaattaattgtatttgactccatgaatgccaggatatcagggactcactgctgagtctctatagcctagaacagtgctggtacatagcccttaaattcttttacacaaagaagaacctattaaattttgtcaaataagaaacttgaggtttatcttaatgacagagttgctattatcaccaccatctgttttaaagttgagtatactaaaattcatagcctactcaaggtcacacaagtagtaagtggagccaagcttcaaacatagatctcctgactccattcatatgaccctataaactgtctcaaaacaaaaagataaattaatataaatatttattgaatatgtctttgtagagaaagcataataagcataaagggcaatgcgttaacctttatcacaagcaaccctattggaatgtgtcaacttatcagaatgaatcaggccagaatatcaagtataaatgaagcctgtagttaactgaaagttgcatatcaatcaggcactccagtttctctcctcaaactctgaatattcaatgaataagataaagaaatggctaatttgattttacctttcatttttttgacctaattctaaggtgactactcactcctcaagatttaactaatgttgctttatttttatccctctggggagacagaagagatgattgggaaacacatgtttgaagtttgtaagttctgctgctttcaaccccacagatgtctcttactgcccacttgggccctggtgattaagcaactagatttggagccagtcaggcttttgtttagacattttaactttttcttgctttccttgcaaactcctcagccttcagactggttggaaagtaaatgtacaatcttacataaattttcaggtaatagcatttcagctttttccccaagattttttgcttggga

SEQ ID NO: 121457 - DNA, 2202 bp, Homo sapiens
ccaaacataactactaaaaggcaaatcctggtgaagtgttaatttaaccaattaaattatatttaagagtctaaacataagggaaccagagaataagcacaggaaacatatttgtatgagtagatatgtacagatataaattcagttttatatattttctatttctttacatccctgatttctatatggaccttctgtagatggctagtttgttatttataaatttgagctgtttgcacagtagatgttactttaattgtgttattctaattatctatttatctatatatctaattatacatctatctgcttttaaaactatagcaatatatgcatgcttttataatctcttcacttttatatctgacttttgaagaggaagttaattttgatgaacagtgatgaggaaaatatccttgaagactaaaacactgcaataaaaagagaaaaccatgagaggtttccatgtcttggtctctgtttatattactaaagagatgttaaaaatatcatttggggactatcttatattctgtaactagagcataactatctgctgacacataggccacttccgaaatattgcttaataacacattttcaaataccctggtgccatctcaggcaaattaatctctgaactaacaagagtctttactgtgctgcacagatcttctcagagatatgtaataaatggtatgtattcaaggactgctgcagtaatagtatttatgtagcttggctagaaacatttgctctcttaacagtgggcatttaagatgaagactgtccctggcattgtgcagcacagtaggaacattggcctgctgactaaacaaatatgattgccaaagtgaattattaaattccaactggcctcacttgctagagaatttcactcctttttctcccacacagcttcctactttttattaaaggaacagttttcagctcttgcaaataattgcagtattttgctagtcattactacagcagtttcccactgtttatattttaaaactagcacttggatgagtcctgttgaagcagaacaaataactgtgtgtgcatctgtgtaaatatttatcgaaatttgctttattaaaagtcccagtgaacttttgttctaactgctataccttgtgtcacttctgacacagtcacatcatcaagctactgttactttacaaaacatgggtgacttcatttcagtatttccttcagaggacttatttgggagactcccttccaatagaggaagtgggttgatgagtgctggtgttctcattccagatccttcacatctctggaaagctgcatcctttgtagaaaatagatctgtatgtgtgccaaagtataaccctgatgttcatcagggcagtgggaggaggtcatatattccttgtctgtttgaacagtgatcctcccatttggcaggactttgagaggaagtatttaacaatgggattttataaaatttaatgtagtaaagactgtttttatatttgaatggatctaaggaagttttctttttctccctccgataagtggggggtgtttaagggtaatggtgtctacgaatttattgggaggatttggctgttttattggaccttgtggaataatttgctttcattttatcatttccatgaaaggtagtcctcagaagaaaaaaatgtggtctcttaacttcataccaatcttaaatgttttgcttaaggggaattagtgaggaaataacagtctcaggaaggttgaaaactgtgattttactcaacaaatattgctcttttaatctctccagccatgccagaaactatgaagttattttctttcacacatgcactgtaagacctggtattttaaaaagctttaaatataagtagctttatcttgaaaataaaaattgtacatagtaggggaaaagatgttcttatcatcatcccttgcttccagccacatgatgtctccagtggagctgctgacgacacaaatttccctaagtctagcacacccagatagtgtcaaatggtttgttagcagttactgcagaaagttagaggacatctgaggaacaaaggtaaatcccttttctccaagaactactaggtttataggtctagaatgaaagaaaggtttaggtcttcattagccagtgacccaggccatcataacacagagcaaaagttacctctctgtgtt

SEQ ID NO: 121458 - DNA, 1844 bp, Homo sapiens
taaaaatacaaaaattagctgggtgtggtggcacgtgcctgtaatcccagctactgaggtggctgagaattgcttgaacctgagagggagaggttgtggtgagccaaaatggtgccactgaactccagcctgggcgacagagcgagcctaccatctcaaaaaaaatatatctatatatatatatagatatacatataaataaataaaataacatcaacagtgtgttattcataattgaaataagatctggatgcaattttttattttacaaaaaaaataacttctaaagtttacagtattatgtttctaccactacgtggacagagttaccatgcatgtgcttaggtaagataaactaatatttaacataaattagaaacccttactaattgctttcatgtgttttttttcttactataatttttaaaatttcacatatcagcataataaaatatctataaactaaaacataaaattcttaaaatggactgtagtaagtcagttactgaaaataaaacactgtcaaaatgtgttagttaaatgtaatgtgagtgttgctataaagttagtaatgtttaaaaaatagcaccacactgagtaatcatcaaaagtattatacatttagtttttattcatgatttgccaaaataaaaattggcacatgcttgaaagggagatttctaaaggaagttaagagcttctgaaagtgtcagtggtgaatgatttaagtgatacttatttttcctgaccttaaaactctgatttgaacttgcactccattttacaatgatgttgtctataaatattacacatgtatgaagcctttcctctactacagaataactaaaaccagaccagaggactgtggaggcaagggaaatgcatttgaaggccgtctgcatgggaattagttacctagacctgagaaacccctttctatttagattcctctcagaattgctctgttttcttttactagaattttagctaaacattaccattcaaggggaaaacaatctttcctgagtggtatcaatttttggtagcttaataacactaattcaaaattgcccgttatttttctgtatcagaagagtaacaggaagttaattgtttatcttaattttggaagcaccttactgaaattttaaaggtggtgcttagtgaactgtcttaacaatctcactaaaataatacagaagactttcttcatgtggttctatatcataagaagtattctgtatagatatggaagataaatttcctagtgcgtactgtagttgtttttgtgcactgccaaacaaatacataatgaagctgttaaatcatttgagattgagggtttttatgattattatttttcctcctcatttttacacctcctaatggccagtaagtaaaatgcaaaaaagtatcctctgattatgtttattattagaaataatagtcagtgaattaaatattctttaatagacttctgttgtaatgtgcggagaagtgtctcgctaatgtacacttctaaaatctcaatatgaatgtgatgggcaagttaatgttgccaagcaagtgatgctaaatctgcctttcctaatttgtatacctcattattatataaccttaataatgcagtactttcagggtagaggctttttgatgcaaattaaaacaaagtaggttggggattcatttagcacaaacactaaatgtgaacttactgtccccacagacttcagtgccctgaatggttagagaaattaatgaaggagctccatcgggtgcctttacaactcttagtaatatgagaatctttccacagctctcatttcaaaaatgataacatgaga

SEQ ID NO: 121459 - DNA, 1595 bp, Homo sapiens
tttttaaccttaatgggatagagttaccctttgctttgagaaagtaatttatggagttcttcatatttgttagtttcagtaaacatgatgctttttgtgtggattttatttttgtttcgggtttgagatcacaaactactaagacttacacaatttaagaaccttacggtaacttcatctaaaaacaaatctcagggaaaggcacacccacttttctgtatcaacttaatctttcactagattcagaatggttttgaattacttcaggaaagtagtgactgatagagcttaaccttcagttttcctcatttattttcataagagaatgggagtggaattcaaaacattcaaatttggagttaatgtgcgtcactgttgtgagtgataggttctgtgtttttccagtgggaaactttgatccacatactgatatatgcctgtgttatacctcgttattcttttctgtttttctcctgattgttgcttactctttcaaaaatcagctgactgtacaagtcctctctgggagcagactttagagcaaaagtgatctataaaagcagcatgtaagtcttttttttttttgtcagagtttataactttccaagtagaccttttatattttcacggtagtctaagttcactcaactgcagtatttgatgttaaatgtacgctttacgctgttaagataatttagtttctgtgtttggtcacttttgcttaaaggattgtaattacataatgcatgttgaaatcatattaagtaacctggccacttgcctatttacttcttgtggctaacaataatgaatgaaaccatttatatatgttgttttagtatatcacaaaattttatagaaactagaagctcggtgatgaataatagacatccatgagccttcttatttgttttgaatttgagacattttctagaatattgctgtttgaatgaggcttcagtactttacagaatcgttgcctgcacatcttggaaacacttgctgggattacttcttcaggttaacccaacagaaggctaaagaaggtatattgctgttgacagtgagcgactgtaaacatcctcgactggaagctgtgaagccacagatgggctttcagtcggatgtttgcagctgcctactgcctcggacttcaaggggctactttaggagcaattatcttgtttactaaaactgaataccttgctatctctttgatacatttttacaaagctgaattaaaatggtataaattaaatcactttaaaaccatgtctgtacatttttagagggcttcagcagggcattgaggaggtgctctgtgtatgcatagaatttgcaatatcaaaaagaaagtattcgtaagagaaatgaggaaatgtgttacagtatttttattttttttaaaagcgtagtagggcaatatttcccagaaaaatctatgaagtgatttgttttgtcctgccctttctgcagtttcaaaataggtgttttttagacccattcacaaaaaaaaaatccattaatgaaaccacaattatttgggggaaaaaagtaagatgaagggttagttattttcacattacttggattaa

SEQ ID NO: 121460 - DNA, 2007 bp, Homo sapiens
cccctctttgccctttgtatattcttttgaaaatatgatccagtagtgtttatgaatgtgtgttgtgtaaaatttagagattgatgttaaacaacagaattaaaggacaaagctgtcttttttgttggaattggggatgggagagcagctcaaagtgggaaatatggagaaaggagagacattgtggaaaagaagagataaattgaggggaaaaaaagaggatgaaaaaatgaagagagagaattactgatgtgcttcacacccacacctcctctccaacttcacagtaacagaggcaatgtcactatcttttacctgacaagtgctttaccagggagttgtgcctggcatcgtgggagtggaaaatttttcccttttgcattttgagacttgggtgtgctgctttaagatgccactggtatctaagtaatgtttgtttatactggatatttttctctgtagcctttgtggattggacttataatataaacaatattgttagcagaactgcaggtactctattgctatgtttattttattagttaaaaaactaccagagccctaggacttctgagcacatttagaaaataccagaggcaattttaagactagcattagaaagaaagaaaagaataagaataaaactaagacttgcataccttagaatcctaaccaatgtggtgatttttaaaaattaatgtttcagagactctaaattagggtagttggtttcatcaattacattttttaagttaatataaagtgcttttgtatgtaaattctcttaatagataatttaggtaaaatgaaagtgtggcattttttgttccatagaatgtaaaactaacgtcagaataagaattcttttgggaatttaggatttttttgatgcttctcaaatcatctgtaatgacttttatttatagaaaaggtagattattcattagtttttatgaaaaacactcagtttaaatagccgggtatggtggcgcatggctgtagtcccagctactcaggaggctgggcacgagaattgcttgaacctgtgaggcagaggttgcagtgagccaagatcgcaccactgcactccagcctggtccagagtgagattccgtctcgaacaaaacaaaacaaaaatattgagctaatctaaatggtaaaaatctagatttgaagaaatttattttaaaatagttgttcatttgtcaaatagaaaagtatgatcttagcaggtttggttagatccctatctgaaacaaagtaaactaaagatgtttttcttgatcaatgcatagcaataactgctgttcaaacatgtgaggaatcaccagtaaattgggggatagaaagcaggaaaaggagcttttttctcttattttttttcatttatcagtttttcccatttgtccatcctttcctataatcatggaaatttttattttttacactcctctccccatttttttatcctagattgccaccacaccaaggttttctagagttaggcagaaagagaacctgggcctagatgctaatggaaactatcccatgctttctcagactctctttcctccccagagacaagaggagcaaaacaggagttgatggctcattgctgttgcttctgtggctgccctgtttggttgacctgagctttttttaaaaacctccactcttgacgcttaactctatgaataaaattagggccagtcacactgtattttcatcatcagttatccctagtgattcaaatttagcacaaacctgctgtgagtacatattaattaggtgaatacagtagaatgcaatcataacatgagtcttttaataactattctttgtttgatttttattttagaagtttgaagttattttgttgaaaatctagaaaatctttatgtgagcaactgaggttcgggtagcccacaacagtttaaatcaaacattaacttgcagtaaaacactactgaaagtgtctttgattttgaggtgcagagagctgtttca

SEQ ID NO: 121461 - DNA, 1032 bp, Homo sapiens
gggccatgtggccagggaacccttcatgaaaccacctctgcaggtaaatcaacatagaatataccacctacaagcagagttaaggctgctttgggacacaaggctcaagagaccacagttcacagacccctcctactagtgggatactcccaccatcctccttaacctgttggtgatttgtgggagtggcagtcccagcgttctgttcaactagggatataccgtttcaagcaaatgattggaaatggaccctaagggacggatgacctgagagagaacagacaagaatggtggatggagggctgtcccttcaacatccttcaagcctcagatttcaaaaactttagtcctaaagcagataatttggcaagcaagtgtggctaagcccaggcacctctgttcttggttgtcaaaactttaatctacaaactcatataatggctcctataatctctatctataaatgcccaacatgtgagaattttcaagcttatcagttaaaaaaaggtcggggggcagtgattgtttagaagagaggttcaaagcataggttgaggagtcaaccagtcctgattgcaatcctagttttgccatttactgcttgggtggcttcaacctacatccttgactctaagtttgtttccttacttgaaaaatgaggataatagtactgcctcataggagttgttttgtaaattatgtaagattataaattaaaacatcagctaataaatcacacggtatatatttaatatatgtagcttttaatttattataataactttttcaaatttcctttttagtcctggagagttgctgtagaagaaggaaaagagaggaagacaacacaacacaggaggggataagtacctctggacacaatggaagtagtagttgttgagcagagggaaagggataggagaaggatgtggactgcagtgctgcagtgccaggtaataactttgatcatgtacctccttggctcaggtgctgtctcttctactctcctccttacttgtactaccttattta

SEQ ID NO: 121462 - DNA, 1045 bp, Homo sapiens
cggtgccaccgccggccgtgcttgttccgaggccgcgcagacaatgcggccgggctcgtccccgcgtgccccagagtgcggagcgcccgcgctcccccgaccccaacttgaccgtctcccggctcgcccagccccctcccggggtaggggcgccccctccctccggtggccggcgaaggaagtcggtccgcggccgcagatcccggcaacttgcgaaccgggaaaagtttgcggcgcctccgcggggcggcgcgacgcggcccgcccctcgcgtccgcggtcatcgcgggtgactttctcgactcgtcgtcagccggggccgcagcgcggccggtggggactgcggggcgggccggagtccgtccgagggctcccgcacctcgggctgcgggtgagtcggctttaggcgccgtgggctcaagtggtttagggcacctgggcttgggaagaagtcgtggagagagcctttaatactttatggagctggcggggagaacaaataaaattgcggtagcttgaagggcactgacatgccactgacttgggaaccgtatccgtgggaactcttcgggtgccggcgcgaccaagggcctgtgcgcggctgggtgggagatggaaaggttagaaggtcgcggactagccctgcctgcgactggctcagcttgaccttggaccagtgactttaccacttagatttttctcgtgggtaatatgtggggccacagcaacgtggtctatgctgtcgtccagtttttagactacatctccgtttttgagattttcctagggcctcaacacggtgcgcgagttatcaagcgataggccaggatatgtttacatgcgcctggattcacctttcagcctactcagaagtaacttttaagtctgatgttttaaaacactaacatttaaaggctttccttcactatccattgcttattttacgaaccttaggattgtcgtattttgctgcaccatttggaatcctaggggccagggtggggacagagagccaagtctgagggtgaagtggcaggtgcccccg

SEQ ID NO: 121463 - DNA, 1034 bp, Homo sapiens
tttcccttttatctacatctgccctgggccctttcccacacaaggtgaggaacacactttcagagacctctacctccacttcttaaccttcaatgaaaggctttctgtagtttcttctttaattactccaaaagaggaaagaaattgccatagggaaacatttggacaattggacaggttgacatttagcactaatgctcaacagttttacctggcctgactttttctggtcttatgaaggatagagatgagaataggcataaaacagaagagagactactgtctgccattgatgagggaaggataaacaattctccctcttaactaccgaaaaggagacatatgacttggggcattagatgcttcagtttaatgccttagagaaagtctgagaactaatttcttcttactgtggatatggagtggacattagccgttttaatcatctgtgcaatttaaatcttgagaagagattgaaaggacacaattgtgtgtgtgtgtgtgtgtgtgtgtgtgtgtgtgtgtgtgtggtctgagctaacatgccaatttcttatttctaagaatatgcattaagaaaaatttggaaatcatggtgagaggctggattttcagtttcaatttctgcctaatatataaacgaccaaaaaaagtctccttgattctaaaacaggagttatgacgaaacataagttctataaaaaggaaagaaattaagttggtaaatctaacatgattatacccaataatatttcttccaaattagtccatggctagaaatattagtcatttagttgcatttgaaagaaatttctattcttgaatcaggagaaactaaattaacatcagggctacattttcaaaaataatcatacaaattttatgtgtaatatatgcttacaactttaatatagaacttttaaaaagatgtgtaactaaaggtcattttaaggggaaacatttacgcttcaaagttcatttagaaaaagatttgatattgaagatttcagtatcacctgttttatctcagtaag

SEQ ID NO: 121464 - DNA, 1075 bp, Homo sapiens
ttccaataaaaagttgaatattaatttgaagacacatttgactgggaaagtatccaaaatgatttaacttatgtttggggaataaaatacagagttatatgaatccaggtatgttttggaacttcttaaccttcactttctgactgactagcaggtgtgaattctgcctgggatagctctgtagtgcttgggagcacataaatgagggagggattaaggaacagaagagtgactttgcatatatttggaacagaaactgaaagtcctgtctactttgagataataaatgggaaagtattgctcagagtcttgaggatcatacaaaggtagtaattgtaactgtcctaacactttgtcattccagtcggtgcggtggtgaaactcctgtagattaggttatcattatatacagaatgaaatccaaaaaacttcagccatgcccttcaatcttcacagtgtcttgtgtcttgacacaatcacctctagaactctgttcttcctgactgattagcatttatttcctgtatttcacacttaccatacacttttccatctccattatttggcagtgttctgcctttttaaaatgtcctctatctctagctgtgatttaaaactaaaatcaaatttcgccttctcctcaatcgttctctttgaatacccaattttattcttaatgtttgcatgtgctttcctaagggaaattaattataagcataaacggagaaatcatctttctacatttatatattgttttatggttactaaagtgatagtttatagttacatacatggaattatagttgttggattaagttgtacattgttgaatgtttcttttttaatttatagaagtaattagaaagtaagaaactaataaattttataatttcatagggagaaaagatgtatataaaagtactgctgaggatgattgggtttgaaaaagggtaacttttcttgtcttctaattcttggcatatctgttaagtttattgatttaatggccatgcatttgggaaaaattacttaggtcaataagtaccttttcattggatgacaagacattatttac

SEQ ID NO: 121465 - DNA, 1094 bp, Homo sapiens
aaggaatgaaacagttttctaacttgtgtttactgttaatcgcaagaaaagtattgtaaatgctgagctaaaaagcatccatttaattgacatacttttgcaaataaaaaccagtgaaactaaaaaaaattaatgctaatttatcatttcatgtatctatgttctttgcttttatttatcagtatcgtttacttacagcttttaaagttcagtaattagccctgtggtttttgacaagaaaacttaagaattcacttgtagttttcccatgaattatttcttcatgtcacggtttcaacactgaagaacacttttatttcttctacttaactgtgctccttactttgtattaaattcacacatccccacctttgcaactctacccagtaatttcaaggcctggtatcacaaaatcattggtagcttattaaacctatttattcaaacataagccatattcctaaagatgcatctttaagaacttaaagttacattaatatttgtatatttatagattaaatatgcacatagaagcacattttggaagaaaaaaactacacttaataggcggattccaaacatcttcccgaataaattgtttctttattcacttataagattataggttttatgttcttaaagtattgtaacttatctttccaaggcttataacagtgaagattttaaattatggagcaaagaatctacactttgcctttatggggtgcttttccagtcctcttgttccatgtattcttttattttaggagttactaaatgtcctgttttttcctgtcttgttcactgggcaaacaggggtagatggtccccctccctagataggagacgacctcctagtcccaggattcaaatccagcatgcgtctccggagaatgacaggtactagtcaactcctcctcacagacaagtggcttctagaagcttataggccaccaactgaaggataaccaagagaaaagttgaatatgatgtactttattccaggagccagagccagatatgttagatgtagccaactctggtaaagcacctcagaatatttactgaaatgaggatagcatacaaatggcaga

SEQ ID NO: 121466 - DNA, 1065 bp, Homo sapiens
atagattttaacaattacctctgtttttcatcagttcattttataaatcttcacactaaattaatagaaaggaaataatcacagaaaatggaacttcaaaagaattggggtttaagtagaaacatcccattttctgatttttactctagctttgatttaataataaaataattgcttttataccttacagttgaatgtacttttatagctttaaaagaatttctttagtacattgtgaactagaaagcataaggccaaaaatcacacaactattaagttgtgaataaagggagaaaaactcaagatttctgattcttgcatgtttaaaaccaagtaaatattctttatgaataatattgtaaagataaaaaatttatgccagaacaaaaaagcatgtttaaactaaaaataagacataatgaaaacactgaaacagtgttgtcttgttcactcgtgcccagggatctctcaaataaacatctaatcattcaaaatgaacatgtggcagagtcagcagagaacttaagcacataggggtgtgatggtgttatcctcatcaacttattaaggtctatcatagcttggatgagacacttaaacttttgtggactaagtttcctcatctctaaacttaactggttatacatgggatagctgaattttaatgtcctatagactctaaaattgagtctatactgccttgttgcatcatgttaaaacatccattaggccctggataatgactgacagttcattatgtattattcagtaaaccaaaggtcatgttgtatttaagtattttatattttgctgaaggccagaaaattatgcagttttatttttaaatttatttcatttgaggcaaactagattttatagccctagttagttcttttttattgtaatttttgggctttcaaatttaatgataatactcaaaatattaccttttaaactatccattcaacaaataattattgagcaactaccatatgctaggtgttgatattacactgataatccaaacagacacaattcctgaccacagggaacttaaagtggtat

SEQ ID NO: 121467 - DNA, 1127 bp, Homo sapiens
ttaaagcttttcattgatttttattagagtgtaaactacatgcctagtttctttgtgaattgttgaatagcaggttacaaaagaagaactggcctgggttttctaatttatgttagctctgaataagagctgttaagaagataccttgaatttacatctagctacacgtgaaccgaagacacagtataaatgctttggacactgactcctggcctttgagagttgataacttcccaaaaggagtcatactacacagttttgcactggtttctggcgaaatttgctgtttaatgatcataattttaaaggccttttattgccctcaacaaatgtaacctcatgacagatagccttttaagaatatattttgaaagagatgatgaccagttgtcattaggagacaagtagaactgatttatattttttgtgtcaagccacttaaagaaatgtatcatattttctttggaagcttcttgataagataaaagtctagcttttcatcttcatgtgaattcacccttgagaactgctgcccatcatttctgcattccattctagtgacttttcttcctgtagaaactacactctacattctaacttggggatgctttatttctttatttggactactatttagaattgcttacatatgcattttatggtgtgttattgcaaaagagcctgtgcaggcctgtaacggaccagcacagtaggaaccactttgaaaatttgaccttaaataccacatacatgtccattctttaacaagttgtttaaaaacaaaaacaacagaactacattgtttttaggctttggtagaagcaatttactgcaagtccatttgcagcaacaaaaatgtctgactaaagacgcaaatttttattgagaagtatgttttacttaagtgtaaatcaaaactctagtcttagatgaaggagagtaggcatggattgaacttagtggtaaatgtttagatacatacttgaagatggtaaacttagggtcaggcatacataagtttgaattaaacttttgctctgcaaacttttttttttttttttggagatggagtcttgctctgtcacccaggctggagtgtggtcacacgatgttggctcactgcagcc

SEQ ID NO: 121468 - DNA, 1029 bp, Homo sapiens
ttcaaagactgatgtggcatagattgccatgcagaatacttgattatggaaaacttagtgtagatttttaaaggtatcaacttattaatagagtaacactggtgtgataaactctgagtttatattttttaaaatacattctattgatactccatgctttagttttcagggttgctaaaatggtattcatttagtgaatcatgaaaatatgatgcattgtgaaactctgactttcttttttaaaatcgcagttaattcattggaattattcattgacatgtttaacatttttcctctcctctctgggaacattttaaaattattcataattaatctggcaataacccagatgaaattgttttaaaatttattttttaaagcaaaagttggtgtttatttaaattatctattcatgagctcctgttgcacaactgaaagaactacaaatgtgggtgtttagttacaaactcggtcttaccgatcatattttgctaaagattgatattctaaaagtcatgtgctcctaaaattctttgcatttccttcagttgcaaataaaacattttatgggttcaaaagcatataagggtactgcatataactctcctatagtgagattctgattacattatttctgtagaaataagaattccttccacaaaataagttgtattgtatgttggattttggttttttaaaaaagctcatgttctattgttaatataaatgttactgtttatgatattcatattcacagttgtctttcagagaaatcatcaatttgtaaggattgaattgaggtgggaagaagggaatgactacattggtggagttactttgatatttaatatgacaaatacactaataaacattttggttatttgagtttcctgaaatatatgatctttagagttatatacatacagcttttaagaaatgtgacaacaagcatgtattttatatatctatatatataaatgttctataaataaaagagacctggttggtgttttttatgatataaatatg

SEQ ID NO: 121469 - DNA, 1064 bp, Homo sapiens
aatgtaagtaaaaacccagcagtgatttttactttagaaaaatgggtcagtggttttatgcaaggagtaatgttttaatacaaatatgtgtttcagatattttctgctgcttataaatttaaaagcttaatgtcctaaaggtatatatttaaaaagcaaatacaaaagggagagtggctatttttgtattgtaaaatataacaaaacactgcttaaaattatataaaattggccagacagattagattattcattactatgctcaatactatgtaaaatcaaaggtaagtgaaatattgaagcaatttaaatagccagcaactgttttttctcttaaaaccaacattggttccattttctgttccttaatagcaagagccttatcacaaaatttacttataccaaaaagctttcacaaaatcctttttatatctcactcagcattctggaaagtacctattttaaattattcattctactggatatattggcaaataaattagaagtaggaaatttgagtcatgtcttaaaattacaggattagaatgaacttagaatagctagcatccctgtgatagatctgcatctttgcccttccaatcagatgagctgttctatttgttatgaaggagaattatttgtcttctttagagtcaagttcctttacagtaagtataagaggcatttttcatttgtgttgtttcttttgtttaaattttttatggtggtgcttcctggtttttggtgttttgtttgtttgttttttaaattacactttaagctctgggatacatgcgcagaaagtgcaggtttgttacataggtatacacgtgccgtgatggtttgctgcacccatcaacccacacctacattagatatttctcctaggcctcctaggagatatttctgctatccctcccctaggcccccacctgctgacaggccccggtgtgtgatgttcccttccctgtgtccatgtgttctcattgtttaactcccacctataagtgagaacatttagtgtttggttttctgttcttgtgttagtttgctgagaatggtgg

SEQ ID NO: 121470 - DNA, 1024 bp, Homo sapiens
cctgttgtcaagagttgttaataaatgatttcagtatactcgtgtaatacttcagattacttttttttaaaattgagatagggtctctctgtgttgcccagactggtcttgaactcccagactcaagcaatcctcccacgtcggccttccaaagtgctgggattacaggcataagccaccatgcctggccttcggaccacttcttatttaaggcaacctgaaaaacaagtccattccagtatttggggcttaatctcatcctcagacaatttaggtgattatttatccccacatgcttaaagtatctcaatcatcacaattattaaataacatgataaaataataaaatccactccctaaatgtgtttatttactagggctgctgtaacaaaatgccatagactggatggcttaaagagcagatatttattttcttaacattcgagaggtcaaaagctcatgatcgatgtgtcagcaggtttggtttcttctgaggctctctccttggcttgctgttggccaccattttgttgcgtcttcctagggtggtccctcttgtgccggtggcccctggtgtctctgtgaggcctgatctccagctcttataagaacaccagtcaaattggattagggtcaactttaatgatctcgttctaacttaatcactgctttaaaaggccttttctacaactacagtcacattctgaggtacagtggttagggcttcaacatgtgttttagagggacataatttagctcctaacactagaaatactttggaaacattgaagctgtgaaatcaaacaatttacacgagtgagaagttcagcatttggatgtttcccgctctcttatctggctttagccaaaataagaggtagtacagatggtatgtttcagtgtatacaaatctctttacttaaatatttttgggcagccttattaagtttaatatgaagattatttaaaacatacgaaaagccatgttgaacttgctattgtttatactttcaatagctcagcg

SEQ ID NO: 121471 - DNA, 1028 bp, Homo sapiens
gtggctcagatcttgttggaagaactcgacctgtccagcatggtgatcggatggtacaaattgttcccaccgtcctcactggtggatcccacactcactcccctcacccggcgggcttcccagtcatctctggaaagttcaactgggcctccctgtattcgatcatagtgaactcataccagagtcattccaataaaactctacttttcaggataataatctgaaccagatatttcatgatcgaaagcattgttggagacagacaatcaacttgtgttttgcctgtagtagtttttcaataatatgtcccaattgttatttaaaacatggcttcatatgacagaacaaggcaatctatcaaatttacaggaagaatcaacatgctggtgagagtcactgatgcttctaacaaatagaaaaagaggaaactttaaatccacgcatacacgtacacacacacatgcacacacacacacaccaaattgaacaaactggaaactctcactctgtgaaaagttgtattctacacatttctgcacagaccacaagcagtgttatttccctgatgtttgagttgttttgttcttttgtgtgttttgtttatttgtgtgttgtttgttggttttcgtttcttgagtttttgttttgttttcaccacatctgttatttccactagtttttttttggctgtgtcatgacaggcctcatgatgctaacagagattcttcccttcttttttccaaaagcaccaaaaaaaagggctgaagtagtctctgtagcatctccccaaagtgttaaacagctacataaggtgaagccaaggaagggtttcactagctttcattttataattatttaaagtcttatgtgtggatacccaagagacaaaaagttatcttccaaaataaataatcacagaagtacttttttaatgaagagcctatctgtttgcattctagaaaattaatttatggtttccattgttttgcatggaagacttttaaagaagtcaatctgcaactaatgct

SEQ ID NO: 121472 - DNA, 1035 bp, Homo sapiens
aatacaccaataatggaccacttatggacttcataagtgaaagccaaagcaatgagtctagcatgttatgtactgacaccgagaaagcaagcactctcctaattcgcaagatttataccctaatgcaaaatctggggcctttacctaatgtttgtttgagcatgaaacgtttttactatgatgaagttacacccccagattaccagcctcctggttttaaggatggtgattgtgaaggagttatatttgaaggggaacttatgtatttaaatgtgggcgaagtctcaacaccttttcccaccttcaaagtaaaagtgaccactgagagagaacgaatggaaaatatttattcaactatactatcactaaaacaaataaaaacaaaacttcacaaaatcctgagggacaaagatgcagaagatgaccaggcgcattatacaagtgatgatttggacattgaaactaaaatggaagagcaggaaaaaaaaaaaccctcgattttctgaacttggagaaccaagtttagtttgtgaggatgatgaaattgtgaggtataaaaaaagttcagatctttccatttctcattctcaggttgagcagttagtcaataaaacatcggaacttgatatgtctgaaagcaaaacaagaagtggaaagtctttcagaataatggcaaatggaaatcaaccagtaacatcttccaaagaaattcggaagagaagtcaacatgaatctgggagaatagtgctccatcactcgcattcttctagtcaagagtcagtaccaaaaaggagaaagtttagtgaaccaaaggaacatatataaaaattatttttcttctgtatgtttgcaaagtttttctcaacatttaaactgaaggacactatattatatttccctaactctgaaaacgtatatgtagtttaaagcagtttgtacactaaaattaagttcttggctgactgtcatactgtgttccttaatcttgaaatgaatccagcagaacttttgaataaaagcaaaagtacacatgtt

SEQ ID NO: 121473 - DNA, 1612 bp, Homo sapiens
ctaatgtatctttgcctgacttaatgctatggatgtgaattatagatattaaacaaggagacaagaagaagtcacccaagctaggagctctgaagtcatcctttttctcatacttactccttctggtcaggcaaaaggtcattaactattgtttgtttactttataggtatttttcaaatacattcccttttcttctttaccacttctattccattctgtttcttacctctccattagatgatttgtaatattctcctgcctgatcatctggtttctgttctcagccttctctctgctctaacatcatagtattgttcgtaaaatgcaaatcttatcatatcatccccttgcctaaaatatttccatgactcttatcatctactccttcatctatgtatccatctacaattattagagtgtgtaatatgtgctaattcccaaattaacaaggcaaaggcctccactctggaggaaggaaaagacgccagcaagggactactacaagcctgtgaacaagtgtgaaacaatgttattggtgtgcttagagagagaggttacaaagtgacatgagaaaagaaaaagaagtgaagcccgggcagaaaagtcagcacaggcttcaaaggggaagtgaggtgtaagctgagtttccacaaatgagtagttaattttcaggtgggcatagcaggagggaatgaacaatcttgacagagaaaacagcttgagtaaagatatggagttgtgaatcagcacagtaattctaggtactgttaagtattttcagggtgaggaaagccacaagaaagggtggtagagcaaaaggcaaatcaccaatctgttggatagattctgatgctgaccatagaatcttgtatttatcctgtaggcagtagtggtcattgaatggtgataatcaggggaatgatataatcagatataaattttggaaagatctgcctttcattagttcagcaaataaattggagtgcaaaatggagtcaatatggcctataaggagatgataccaattgtgagaattttccattcattgttgcattcatttattcataaacttattctgtgaaatgtctgttgactatcgactatatgctgtggatcatactagaaaggtgagagatgattgcctaaggaactaaggcagtaactgtggagatgagaaggaggagtttaaccaaagaaatgttaaggagataaaatttgcagattgttttcaccagtctgacatgtggtatgaggaagatgattctgacttggttgatttgaggaatggaagtgccattcactaatatatgggacaaagagtgaagggcacatattctggtgaatataatgggttcggatttgaacatgttgggctttttgagtcattcaggtggagattttaagtggtgggaacatagcagtgaacaaggcacagtctatttccaaccacgttagatcagcaaccagaactgtttctggcacatagataacactcaataaaatatttttgaatgaatggaatcatttacaaatctggagtttaatctaaatatgtaaccagatatttagctttgaaagcctctgtcagttttgtggtaattaaagcaataa

SEQ ID NO: 121474 - DNA, 1074 bp, Homo sapiens
gaagataatggttgatacccaaaagaggaagctaaaaatgccttttaaaattcttactatattttggtgatttttaccaatgacattattgtatagttgtggtcattataccgttcattaaaaatatttatttgaaattactgcatgaatgccaatctctgaataacatctttgcaaatatagcatgttattttgtcagtccaaatgtgtgctaaatactaattcatgttgttaaatgtggatataaaaatagttaattctcttgctaaggatactcatttatcaaagtaaagtaacattttaatatttttcaagacaactatttttaaatatttattagagaaactgttctaggagaaaaattaagataaggtattatgtattttactctgttatggacacatacatatttggatatcagatagtttcatatcaaattacatatctttgtactcaataaatattagaaaaactgtttactcatctgtaaaatataaataatagcatcttctcattgagttactttgaaaataaataaaaataatacctatgtacaggacttaacctagtgtctaccataatgtaagcacataatgaatacttgatactgtgattgagtacatgctatgactataacccagaataagacaataggaacataaaaatagaaatgatcatcattttagataggggaaaacagaagggaaatacagagaaatgacatcattgtgtttgagaccatatggtatcagaattggaatagaaggaaactggagttgggggagggaactggaagagtgttgggggtttgggaatgaagaggtgatactaagttgtgtttgggaatatattggatttaaagtgatagaaagtaattgtagtgaagatggactgtagtcatctcatgaattggaccagaactttaacattgttcatttagttttccaagagatatttactgtgggccgatactatgtgctagatactgtgcattggtacagtaaccaaggtacagtaaaccaaggatggaaatacataaatttgtgagtcggttttctgagtgaaagttagaaa

SEQ ID NO: 121475 - DNA, 1085 bp, Homo sapiens
tatgcttgttcttcatgggttcatatatgtaaagcatttagcatacaatggtgcataatggaccatttttctgcatttacagcatctcatcaatgggctagaataagcttctttaaatgaaaaactggactgtttccaaattatttatttatgtttagccatcacagcacccaatagagtgtcacattcaaaatgaacttatgtgatagaggtggcgcagtgctcatgctttcccatacaacccatcttttttcatgcagtgcttggttcatattttcttccttctcctaaacctctttttggcataatctttcttcttatttctttcctcatctgatgcataactgtttccctatttagaaagcaatctttattattacttcttttcctctcagcacatttatatcttaaaccttattttttggtgcagctgaggagaataaattctattgccatgtaagcacatttacttcagtcacaatttatccttaatatttttaatgatcaaaagtactagccatgaaaaataggtattttatgtcctaggaataagaggaaaaataaataaaattttgtactttccttgtatagtaaaatatctgtggcttgtttctttttaattctctctagccaatcagaaatgtggtgatgatatgataacataaataacttttgtctggaatgtttttattgaaaagcagatgtgaatcagctactagacagatatcattacaccatgcccatgagagacaaaaaagaaattaaaaattaaataatattcacaaatagctaaactaaagcaagtaaaacatcaaaaactcaggttaacttggaaataacttttttttttttacaatacctaagtaatatttttcttttccctttagaaaggctcctgacattgtttagcaaatacaatattgtggccaacttaagaactaaatcactgttcatctttttaggagattgctttgttgtgttactgttttgttttgtttaagctgccctaattattagtaagagaaaaacaaggctattttgagagctacaaatatgcatcatacaaatataatgatctagaataa

SEQ ID NO: 121476 - DNA, 1055 bp, Homo sapiens
acacacattctcacttactcttggattctggtctttggtgggagcttgaagcaagtgcttgttagccacatatacttttttttttttttttttttttgagacagagtctcgctctgtcgcccaggctggagtgcagtggcgcaatctcggctcactgtaagctctgcctcccgggttcacgccattctcctgcctcagccttccgagtagctgggactacaggtatgtgccaccacacccggctaattttttgtatttttagaagagacggggtttcaccatgttagccaggatggtcttgatttcctgaactcatgatccacctgcctcggcctcccaaagggctgggattacaggcgtgagctactgcgcctggcccacatatactttttctcttgcccagctggtcttaattgtatatggtttagatgtctcttaggaatgcctgggtttgtatgtttggtgtggtaaaaaaaaaaaaatgccatttgtgtaactgcttaccaacttaccaagttatgatgaataaagtaattatgtcaaaatgtttaggtttacattgtctggagcttataattttataattgctgctaacagctagtttttcttttatgttttcacatcattttctgtcctcatggaaagtcttaacctgtgagaaagccatcggtatcttcattttagtaataatgaaactgagacttagcttaccaacccacatggtcaatatcaacacacaggtcttttgatttcaaaacctacaagaaaactctgttcatgtatgtataatcattacctattatgcacatggcatgatcacctggtctctataaagcaaaaacaaaaagcccgacatgattctcttagccttccaattccgaatgagtatgggttccaccatccatagtcaccaaggtccttattcattcaagatccttccttagtcagatcctgaggcttttgtgtgcactggcagcaatggcatcccacgcttccctgacactggaggatacctacagaaaagatcctagctgcttgccaattttaaggcacat

SEQ ID NO: 121477 - DNA, 1033 bp, Homo sapiens
aaagtatcatctttactattccctcttgtcaaaagaacaatacttagaaccacatgtaataattttccatgctcattcatatatataaacatgaagacacatatagcaacataatcattctaccagtattatacttttaaggaaaattcattatcttaactgtttcttggtttttatatcagggacaaagatgtttagctaacatgatcatacaaactatgagtgtgtgtatatgtgtatacccatttaggcatgtgcaccagccaaggttttcaactggaaatgacaattagctacttcataaatgcttttggctatgcgtgcatattcacaaagccacctgctttttaaaagtattgaaaatttttattactaaatttcaaatctggattttacgaatgttgcctatcctactagagaccagtgttgattaatactcttttaaatatcaaggcagaaagcccaaattaatattagcataattaatataaatcagtactaatttgtattgataatagggatgttctgtatgtgatcattgtgtcctgtgtcctcacctgcaggcattatccttatatgtgtgtacatatatgtttatttcagaattttaaaaatgacgttgttatactttatatctggattcagtagggaatgaaacaaagtttatatttgttaattgaaatgcataatattgaaaactatccaaaaattgccttgagaaaaattatagccaagataaaatgcttaaatattcaatttatttcatgatccttgaatctcctggaacttaaattatatattaacctgataatagttaacttaggacagaatgtaaactagatcccacttataaattttatgtgcacatgtttaaccattcatcagacacagaacttcttttattttgagacagtcttactctgccacccaggctggagtgcagtggtgcaatcatagctccctgcaacctctaaatcttgggtttaagagaccctcctacatcagccttctgagtagctgggaccacatatgg

SEQ ID NO: 121478 - DNA, 1041 bp, Homo sapiens
taatatgcaatctagtgtggaaggcaaatagatacagagatacttctagtgtggagtgaggagtgatctgacagaggtgagctcagggtaagagggactacatattacaggaacctgaggaagcctgagtaggggagtagcattaggaaggggaggggaggtggaaattgcactgagtcccaaaggatcagttgcaggggagggtgtggatgtatatgagggaaggggaggaggtggtgggaggatagaattagttagctaaagagaagagccaacgggcagagaacttgcccagcaagaacagagtgtgtgaagtctagcaagtgaaagagagtgcggtttattcaagggctttgcccactcttatgtctatcttcagttgggaatgactgaagagatgaaagtggagaggaagccactgggactagatcataaagggtctttgggacaaactacttgatttttccattatgcttgagtgcaggaatcactggaggacttgaagcagggatgtggtgtgctcagacttgcatttcagaaaaatgaatatagaggtacagtgagaatgggttggaggtcagcaagattcaaagaaaagagtactaaagaggcacattagacaagaaatgatgagagcttaaacaaagtaaagagtggcaagtgacttgcaagtccttaaggcgggagaaggggaaagaaactacagtatttggcatggactgaatcaggaagtggggaaaatgggggaaagaaaggaggaggatgctccagtgtctgtcctggacaactatgtgaaaagtattactcttcataaagaagtgaaaacaggaaggaaagtagattttgtagcaaaaataaggtgtgttcagttttctgtgaaatggggttaagatgctagttggacattcacatgggactagagaaggtttgaacttaggaaaagaactgggctgaagaaataagtttaagggtagccttaagccatgctgtgactaagccacggtgagtagggtagggtgaaaggaggacagaactatgaat

SEQ ID NO: 121479 - DNA, 1008 bp, Homo sapiens
catttcatatggtgaagtctagccaacctcaaatctattagtctgatctacttcatccactacatttgtgtaagattacccttctttcatagtaaacacatatgtaaaatattttaatgtgtttttgttagattcattttaatgtttccaaactgtttctattaatattaataagtaccattttatatgttttctcctatatttcttgttttcatccaggactactagattccagtaagaataaaattaaacattagaggtttgtcttccatattgtttaagaaaattagtttccctttttaaataattactaatatttgaagattatgaatcataaattaatcacaagtgccatacctattattttagaagcaattgagcaatataaatggtcttcagttttaccagttcttgatctgtagtaaattccagcggtggtggggtctgtgaaataatgaagaaaaaaattattttaaaaaaagagaggaaaaatgatacctaaattagaaaatcgttggttttatttcttgtatcaaaatatctgataattttaacattcattatgtgttcttttaagaactgatgctcatcagttttctcatcagtttttctgtttttcacttggcatttattgatattttctattgcctgagtaatttaagagcctgcaaaattaacctgcctttcaatttgcacatgtacttattatggtaaaatcaatattttcatcctaggattggtcatgtactttgcagcctaatgataaggagaaaaataacctcagaagagtgaagctgtgctggccagcaatggagatttgatagggaagaaaggtgtcatatcacctggatatagccaactaacagcttgatatatatgattccaagccaaaacctacatttagtctctctctctttctttctctgtctctgtgtgtgtgtgtgtgtgtgtctctctctctcatctttatactatagattataaaatttggatacgtaaatagtcatc

SEQ ID NO: 121480 - DNA, 1053 bp, Homo sapiens
ggacattaaacccagagaaccctacttgatcttccggccgttcaaggggtatgaagagtccctactcaagctcaccgcgagacagcctgttttgtgatctttgacagcggggcaggagcagaagcggccaaaaatgcgctgaacgatattcgcttagatcccgaaaacccacagatcatgaggctagagtttgccaaagccaacaccaagatggccaagagcaagctaatggcaactccaaatcccaccaacatgcaccccacctaggagcacacttacttcatcgctcgggacccctatgacctgatgggggctgctctgatgcctgcatgcccagaggcctgggcccttatcctttgtacaccacagagctgaccccagccatcacccatgctgcgttcacctacccagctgccactaccgttgccgccgccctccatgccaggtgcgctggttcccttcctctgacaccacccagcaaggatggaagtatcgtcagttctgttagttcttcagtctggtcaccggggagttggttctgggaatctgtggtggtgccgggacaggcgccctgagctcccaccgcccccgcccccgggcggcctgtgcagagctgccgctgccccccagaaattgtgaatcctaagcctgacacagtggactccttcctgtttccccttcctcctcttcctcagcccttttctgcacactcaagcctttctccaacgcctcccaggaggatttggggaccttctcgctgaggcgctcagatccagctcggaggatcacttggaccctgcaaggcctgacctcccacccaactttgcttcggtagctcccgctcgaggaaacgaggcgtttaattttgcatgtttcctggcacgaatgaagacgcttacgcttgtgtatatgtgagtgtacagtttgttttcacgctgtcaccatagcaacaggtcctggcccccggtggttcatcctgcctggcctctctctgctcgcctcgcccctgcacccaccacgcttcagggaggcccgagcccccagccccgtggc

SEQ ID NO: 121481 - DNA, 1925 bp, Homo sapiens
gattataggcatttgccaccgtgcctggtgtacccagtttctgttatcaacagaatgcagtggtgtatggttgctaaagggtcccaagatcaggacctacgttaaggtggattttgaattatttaaaattctgattttgttttatttttaattaatctttgggggaaggatgggaggggggtgagggttgaagaagtaaacattgtacctattggatacaatgtttaatatttgtgtgatgggcacactggaagcccaaacctcactattacacaatacattcatgtaacaagcctgcacatgcacctcctgaatctatttttaaaaatttaattctctagcacagactccctttttttggtaagatggcggggtacgacttaactactcgcatcacgcaccttttggatcggcatctagtctttccgctccttgagtttctctctgtaaaggagatatataaagaaaaggaattattacaaggtaaattggaccttcttagtgatgccaacatggtagactttgctatggatgcatacaaaaacctttattctgatgatattcctcatgctttgaaagagaatagaaccacagttgttgcacaactgaaacagcttcaggcagaaacagaactaattgtgaaaatgtttgaagatccagaaacgacaaggcaaatgcggtcaaccagggatggtaggatgctctttgactacctggcggacaagcatggttttaggcaggagtatttagatacattctacacatatgcaaaattccagtatgaatgtgggaattactcaggagcagcagaatatctttattttttcagagtgttggttccagcaacagacagaaatgctgtaagttcactctggggaaagctggcctctgaaatcttaaagcagaattgggatgcagacatggaagaccttacatggttaaaagagaccatagataataattctgtgagttctccactccagtctcttcagcagagagcatggctcgttcactggtctctgttttcttcaatcaccccaaaggttgtgataatattgttgatctcttcctttaccagccacagcatcttaatgtgtccacacattcttcactatttgactacagcagtcatagcaaacaaggatgttcgaaaacgttggcaggtgctaaaagatctaggtaaagttactcaacaggagtcttacacatataaagacccaattacagaatttgttgaatgcttatagattaactttgacttagatggggctaagaaaaagctgagagaatgtgaatcagtgcttgtgaacgacttcttggtggcttgtcttaaggatttcattgacaatgcccatctcttcatatttgagactttctgtcacatccaccagtgtatcagcattaacatgttggcagacaaattgaacatgactccagatgaaactgaaaggtggattgtaaatgtgattagaaatgcaagactggatgccaagattgattctaaattaggtcatgtggttatggtaacaatgtactctcaccctatcagcaagtgattgaaaagaccaaaagcctttcttttagaagctagattttggccatgaatattgagaagaaacttaatgacaatagcaggtcagaggctcctaactgggcaactcaagattctggcttctactgaagaaacataaggaaaagattttaaaaaaactctaaaagaaagatgaaataataaaactattatataaagggtgacttacattttggaaacaacatattgagtgtaaattgtgaagaattggaataaaattgactgattcaaaaaaatttaattcacaaaaaaattttaatccttttaagctaattatagattcacatgtagttgtaagaagttacaaagaggctaggtgcagtagctgacgccc

SEQ ID NO: 121482 - DNA, 1886 bp, Homo sapiens
aaagtggagccgcgggtcctgctccttaaggccgaggggatacggacccttctttggaacgtgtgaggcaggaactcgattcggcagctactgggtggtcctcgcaccctcaagcctggacgcccgctttccgaggttcaggtcccaccggttgttccctagaggaagaggcaagagcaccttgcccccagccattcccaagcccatgggattctggtgcgaaagacacaggtcaatgcaggtggaaaccctagttaacttggagacagctgggcccgggtgaggctctcccgaagtcgcgggaagcggaagagttggcaacctgctggaccgcagccagggcggcggggcatggactcagggtcctggcccgggccgggggcggggcctggccgggggcggggccaccaggtgcgaggctttatcgcccctgagcctcggccggcgtgattaggcctggtttgcgctggagagtggtcttggttgtgagggtcataagatgggaactctcccggcacgtagacatatcccgccgtgggtgaaagttcccgaagacctgaaagatccagaggtgttccaggtccagacgcggctgctgaaagccattttcggtgagtgtgcccagtactggcgggctgccccggctcgggagtctcagccggcccggggatctcatctcttttccccaacaggcccggacggatctcgaatcccttacatcgagcaggtgagcaaggccatgctcgagctgaaggctctggagtcttcagacctcaccgaggtcgtggtttacggctcctatttgtacaagctccggaccaagtggatgctccagtccatggctgagtggcaccgccagcgccaggagcgaggtgagaggcccagagactgggtacgcggaacacaggctcgcgggggccgcttcgcgcctctcctccagccctctcctctttctcctctcttgctcgctgccagcaccttgggcgtcaccaggggtgcccttggcatctgggccttcccaagacccctttgggaatgggggccccagaatgccggccgtcggtcttggagacccaggggtgagactatggtgaaaggcggctggtgctggacccactgggcagggttatctgagctatctcaaccgtctccccgcccccttcagtttcttggagaatgttcgaatgggccgagtagtctcgggttccaaggttctgggcctgactctcaggcccagaacgcctggatcagaagtcccagaaacgaaccctgaaagaggcggagaacagtccgggcgcttactattttcccccagactcacgccgctgttgctatttctggtgcagggatgctcaaacttgccgaagccatgaatgccctcgaactaggcccttggatgaagtgaaccagtttccagccaatgcaatgaagccgggttgcagagattaggttgtggccagagctagagtgattccttaagcttgttttaaaatctgctccagcctaaagagttaagggaaaaccatttgttcccttaaagagttaagggaaaacccttggctctgagtcttgttgtgaatatttctttgatgattgttaataaaaagtgttttttcttttttcccatttttaaaaataacaataaagttttaaataagttgatagttcagtgtggttgatggattgtaggtactaccttaaatatctctgaagcacagctgaagtgtggccctgagcttaacccttaattgaaatcctccaaagacaaaatgagggtccaaaggcacacttggctagtgtcaaaaagggtggaggagccagggtcctgagatgcagcactgaactaaaaacctatgggagatgtgatgattgtctcaagtgacctg

SEQ ID NO: 121483 - DNA, 1926 bp, Homo sapiens
aactgacacattgaacaagcctgccctgggtccgatatacctatctttgggaggcaacgatgaaaccttaacctagccagcaaaggtgattcccagtctattaatagagtcgtcaattcaaactcacactgttaatcagctataaggtgggcagaggactttcaggctaagcataccttacgagcagagatgacgaaggagagcattggagacccaacaggaggccaaatgaatactagttcaaggtcaaagaggcaatcccggcgattgaagcagcgcaggaagtgtccaatggtgccgctatgccggggcgtcgcttgcacccgctcaccccgacgcggtgcgaggcgccgccggaaggggcggagcgggtcgaatatggtaaaagagagcccgagcttcgcgcctgggtctggaagaggtcttgcgaaagccgcctcgagcgcgctccgcggctgctggtcccagtatggtcgatgatgctggtgccgctgagtcccagcggggcaaacagactccggcccactccctggagcagctgcgtaggttaccacttccgccgccacagattcgcatccggccctggtggtttccggtgcaggaactgagagaccctttggtgttctacctagaggcatggctggcagacgagctctttggtgagcgaccccaggtgtgctagtgggctgtccacctccagtctgagagaggcttggcagagcagctctctacagtctctttcccagattcgcaagccaggagtgttgcagtgatgcccaccttccagttcttcccttccctggccaacattcccttcaaatccagcttctaacctgccaccgtgcagcccctcagagtttttccttacttgtttaggcccagaccgagccataattccagaaatggagtggacgagccaggccctgctgacagtggacatagttgactcagggaacctagtcgaaatcaccgttttcgggcggccccgtgtacagaatcgggtgaagagcatgctcctgtgcctggcatggtttcaccgagaacatcgtgcccgaggtgagggtctttgagaacctgcatgtggaggaagccacgagtgaccatactggccttgctcggtttccttccatcctcccttaaccttctcaaaatttcttggtttccagaccccagggagctagctgtacgaagtttgttgggaggggatcctggggtaggaccttgggaaagtcagcagagatctgatagattcagacccatcactgcccaagtcagcctcacctgggttacagcactatcgcagatctttctctcctccccaactcccagtcacggagtagttcgaaacagcaaacacttgtccctgtccatggttagtatcaactgcttctcttccagctgagaagatgaaacaccttgagaagaacttgaaggcccatgcatcagacccccactctccccaggatcctgttgcttaagacaacatagttactgttgggaacatcttaactttctaacttttgctgctaaagttgaagaaaagcaagtatagcattcttaaatccccgtattcctttttcctgtgtcttgatggattgtggtttattttgttgcaagagtgagtttgaactattctaataaagaaatggctattttgccaaaagcattaagatcttcacacacttataataaagcaaatttataaaagattgactcccactcatgttttgatatgaagggtgggcaggtgatagttttgtaggtttttgtttttgtttttttttcctgaattcccatcattttgaaactcctaatccttttatgattttctggtcagagagaggccctcacccacagggagcggatatgcaggggcagataacctcacaaatggtgatctgttttgtttttacataattggtcctc

SEQ ID NO: 121484 - DNA, 1175 bp, Homo sapiens
agctgggtgtggtggtgcatgcctgtaatcccagctacttgggaggcctaggcaggagaatcacttgaacccaggaggcggaggttgcagtgagccaagattcgccattgcactccagcctgagcaaaagagcaaaactccgtctctaaataaataaataaataaaaaataattgcatacttaaaatcttctggccctggccagttgcagtggctcatgcctgtagtccaacattttgggaggccaaggcaggaggactgcttgagcccaggagttcgagaccagcctgggcaacatagggagacctctgtctctacagtgggtgtgatggcatgcacctgcctcagctacccagtgagctgagatcgtgccactgcactctagcctgggtgacagagtgagaccctgtctcaaaaaagaaaacaaaagaagagaaggagccctcttcctttctccgccatcgtggtgtgttcttgactccgctgctcgccatgtcttctcacaagactttcaggattaagcgattcctggccaagaaacaaaagcaaaatcgtcccattccccagtggattcggatgaaaactggaaataaaatcaggtacaactccaaaaggagacattggagaagaaccaagctgggtctataaggaattgcacatgagatggcacacatatttatgctgtctgaaggtcacgatcatgttaccatatcaagctgaaaatgtcaccactatctggagatttcgacgtgttttcctctctgaatctgttatgaacacgttggttggctggattcagtaataaatatgtgaggcctttcgtttttaaaaaaaaaaaaaaaaaaaaggaaagaaaaagagaaggtgagaaagaatcttccggcccttaagagctctgtgaaacgtcagtttgctctggccgctttcccattttgatctcgggctggcgtcaggcccactgcaggatccctggcaccccaagaagctaacccagatggcgggaaaagtgttctattaacccagccaagttggctcagtgcatctctccacctcagtctctggtgttggcttccatgcactcgggaaaactgcccacttgtccccaggcttccaaggaggcccacgtgactgactgagctcccaaaaggttttcttgcacaatagccctcctgtttt

SEQ ID NO: 121485 - DNA, 1320 bp, Homo sapiens
tttgtatttttagtagagacggtttctctatgttggtcaggctagtctcgaactcccgacctcaggagatctgcccgcctcggcctcccaaagtgctgggattacaggcgtgagccactgcgcccagcaaaagatgtactttttgtgttaatgtttatcattccgtttcagtcacaggcatggcccattgtgttgcaaggaatagatcttataggagtagcccagactggaacaggaaagacattgtgttatttaatgcctggatttattcatctggtccttcaacccaggtaagaattcctatggctggtttcttcttatagaggtttaatagatttagatatcaaaaatgtaattaaagtttctttacctattgcttgatccaaaggtaatgcctagcttcagagaagatgcaaggaattaaacacttagattgtgctggtgaaagtataaactggcaaaacatttttaggaggcaataggtaatatctaccaaaagccttagtagtgaaacagtggaaactgtttaaactatgtccaatacacttatctattccatgataaaatatttgacattttagatgttaatgaaaagaccatcttaaacaaaaggctggtattgggaagttgggttttagggtgtgtggctttttaaaatttccctactttatggtaaatatatattggttttgtaataagaaaaagtacatagaaactaacactaatctctcagtaaagcaatcttaaatctgagaaaataatacattttcttatggggaatttggcatattctgtgtaatatcagccattttttaggtacgtagatcataattagcaaagtctgtaatatatagagagactacttttaatcatataccttctcacaaaaaggcatagtctgactatgtctaactgatactcattgctacaaattttttttttgagacaaagttttgctcttattgcccaggctggagtgcagtggcgtgatcctggcttactgcaacctccgcctcctgggttcaagtgattctcctgcctcagcctcccaagtagctgggattacaggcgcctgctgccatgtctggctaattttttgtatatttagttgagatggggtttcaccatgttggctaggctggtctcaaactcctgacctcaggtaatccgactgccttggcctcccaaagtgctgagattacaggcgtgagccaccacgtctggcttgttgctacaaatcttgatggtactgaataaatgtaccgtgcatctgagacaagtaatttaatattaatctgttttctctccaaagccttaaag

SEQ ID NO: 121486 - DNA, 1062 bp, Homo sapiens
aaatgtatctttctgtcatggttcgaagggtttaggacccatttgctgaaccatggtatcttgtaacttgccggcagttacttttccattttcacaaagtaagcattttaatgtaaacagtaagaaataaaattgattaaattagttagggcaaatattatttttagatcttgggttggtttataccagaatggttcagtgttcatttggctttactttttaggcaaagtgagaatactaattgcaactgatctagcctctagaggacttgatgtccatgacgttacacatgtctataattttgactttccacggaatattgaagaatacgtacaccgaatagggcgcacgggaagagcagggtaagtaagcttagtccacccatgaaaggccaattctagattctccttattcctctcacaaacttcttgcccagaaaaccattttattctattacctataatttttcagctacttcccagattatacttgctactttatttatccctgttcatttggcttgttccagactcaaccagattccatccatgattagcttcttatatctggttctatgtgttttatatctagtgtcaccgctgagctctgtacccagtggttactctgaaggttattgacaaattggtatggatatgagacgacctttttcctcttaagagagctaccactgggccgggcacggtggcttacgtctgtaatcctagcactttgggaggccgaggcaggtggatcatgaggtcaggagattgagaccatcgtggctaacacggtgaaaccccgtctctactaaaaatacaaaaaattgacctgggcgtggtggcgggcgcctgtagtcccagctactcgggaggctgaggcaggagaatcacttgaacccatgaggcagaggttgcagtaagccgagattgcgccattgcactccagcctgggcaacagtgcaagactccatctcaaaaaataaataaataaataaataaataagaggtactatcatataccccctttgctgtttaaaccacagcagatttagattccaaatct

SEQ ID NO: 121487 - DNA, 1162 bp, Homo sapiens
ttctgtagttgtaatgtaaaatagtcacattccattttgatccatggtaacaatttaaaaaatgactttaggccgggcgcggtggctcacgcctgtaagtaatcccagcgctttgggaggcagaggtgggtggatcacctgaggtcgggaattcgagaccagcctgaccaacatggagaaaccccatctctactaaaaatataaaactagctgagcgtggtggcgcatgcctgtaatctcagctactcgggaggctgaggcaggagaattgcttgaacccgggaggcggaggttgcagtgagcggacattgcaccactgccctccagcctggcgatagagtgagacttcatctcagatagatagatagatagatagatacatagatacataaatacatagatacatagataatgactttattcttttttcttgttatttagtggatggaagcacagtatatgcagagagtgtgattctgactactgggacatttctgagaggcatgattgtaattggattggagacgcatccagcaggacgtttaggggatcagccttctataggattggctcagacactggagaagttagggtttgtggtgggaaggttgaagactgggactccaccccgaattgccaaagagtccattaatttcagtattctaaacaagcatataccggacaatccatccataccattcagctttaccaatgagacagtatggattaaggtaagatactttacgaaaacctggcttacagctggtattggctattcacagcaggaagtactgtaactttttttttttttttttggcagcagttcactttatagcactattgcttatagtgcaaagaaatgattttttttttttttttttgagataaggtctcaccttgtcacccaggctggagtgcagtggtacaattatgggtcactacagccttgacctcctgggctcaagtgatcctcccacctcaacccccttgagtagctgagaccataggcatgagccattgtgcctggctttttaaaatttttttgagaaatggggtttcactatgttgcccaggctggtctcgaactcctgggctcaaaggatccaccccccttggcctcccaaagtgctgggattgcaggtgtaaaccaccgaacccagcc

SEQ ID NO: 121488 - DNA, 1123 bp, Homo sapiens
aacttaattctccagataaggagttggggaaaatcaaataatacatcttattgaggtgctactgtttagcagatgctgctgcatttgctcactatacttagaaataatcttttggggccgggcgcagtggcttatgcctgtaatcccagcagtttagcagatcacgaggtcaggagttcgagaccagcctggccagcatggtgaaaccccgtctctactaaaaatacaaaaaaatagccgggcatggtggcgcatgcctgtagtcccagctactagggagtctgaggcaggagaattgcttgaacccagcaggtggggattgcagtgagccaagattgtaccactgcactacagttgatgggcgacagagcgagactccatctcaaaaaaaaaaaaaaagaaataatcttttggtatttattctgagatctgatattatttcaaagaatcttgttcttgatctgccttatatgacatggatccttatgttaatgaaactttcatatatttgcagagctctcgatgttctgaagtatgaggaagttgacatggattcattagccaaggctgttccagagcccttgaagaagtatactaaatgtagagagctggctgaaagactgaaaatagaaggtagaaaataatttttgacttaacatacctttatcatatgtgcaaattatgaatagacaacagatccattattactgttggaccagcacagtgttagcttctgtgcttttcaaaagtgtggtcctcagctaagagcattgcaacacctacaagcttgttagaaatacagaatcttggctgggcacagtggctcatgcttataatcccagcactttgggaggctgaggtgggctgatttcttgagcctgggcattccggaccagcctggccaatatggcaaaaccctgtctctacaaaaaaaatacaaaaaattagctggatgtgaagatacatgcctgtagtgccaactactatggagacagaggtgggaggattgcttgaggctgggaggtggaggttgcagtgagccaagatcgctgtactccagcctgggtgacagagcaagatgacatctaaaaaaaaaaaaaaaattaaaaaaaggaaatacaga

SEQ ID NO: 121489 - DNA, 1050 bp, Homo sapiens
tctcaaaacacgctgaatgataagacttttaatttggtagacttaataggcaaagtccctatgagtaggcaaatctgcatgttgagttttattccaggttcagttttaggttcactgtctctctctttgatgaacactgcacaaagttatttgtattacagctccttaaagaaagagtacaaattgtttacgactagttttttcatatacacgaaaaagcacaattataatttctgtcccactcagaaattaatggcaaacccatagtaacctaataaagctattttaacatgtgctaaataattcttttatctatactgttgtattgatcaaattatttatatgctctttaaaaatcttttatgaattgaaagctataactctctctcttgaagtctgtctgcatcacataagtattgatcagtcttggatgattcattcatagccgactgtcttcgttgagtggtcttcacaaatctcagcagattgatgatggcggcaggtgttactccgggtatgcgactagcagccccgatctaaaaatcaataccacaagagaaactaagtgagctatgctatgtcaaatcaaatctattttcctccaaataacaatctgtatagtatagtttatacaatattttcttaattattattttgatgtattatcttaacatatttccttgtaaagtagataaaggaaatattattatttatgtcttcattttacaaatgggaaactgaggcacagaaatgttaaaatagcttgtgcaagattacataactaatagatgttagagtatctacttttttgtcccattaaactaagaaaaactgtaatcaagttcctttcttcaaatacaggtccacagtcccttatttgaaattcttgaggccagcctgggaaaaatagtgggactctgtctctacagaaaataaacaaaaattagcttaggatggtggtgcacacttgtagtactagcctctcagaaaacaaaggtgggaggatcacttgagcctgggaggtcgagaatgcagtgagctgtgattatg

SEQ ID NO: 121490 - DNA, 4496 bp, Homo sapiens
ttgagaggcgaaggtacaccctaatctcaatacaacctttggagctaagccagcaatggtagagggaagattctgcacgtcccttccaggcggcctccccgtcaccaccccccccaacccgccccgaccggagctgagagtaattcatacaaaaggactcgcccctgccttggggaatcccagggaccgtcgttaaactcccactaacgtagaacccagagatcgctgcgttcccgccccctcacccgcccgctctcgtcatcactgaggtggagaagagcatgcgtgaggctccggtgcccgtcagtgggcagagcgcacatcgcccacagtccccgagaagttggggggaggggtcggcaattgaaccggtgcctagagaaggtggcgcggggtaaactgggaaagtgatgtcgtgtactggctccgcctttttcccgagggtgggggagaaccgtatataagtgcagtagtcgccgtgaacgttctttttcgcaacgggtttgccgccagaacacaggtaagtgccgtgtgtggttcccgcgggcctggcctctttacgggttatggcccttgcgtgccttgaattacttccacgcccctggctgcagtacgtgattcttgatcccgagcttcgggttggaagtgggtgggagagttcgaggccttgcgcttaaggagccccttcgcctcgtgcttgagttgaggcctggcttgggcgctggggccgccgcgtgcgaatctggtggcaccttcgcgcctgtctcgctgctttcgataagtctctagccatttaaaatttttgatgacctgctgcgacgctttttttctggcaagatagtcttgtaaatgcgggccaagatctgcacactggtatttcggtttttggggccgcgggcggcgacggggcccgtgcgtcccagcgcacatgttcggcgaggcggggcctgcgagcgcggccaccgagaatcggacgggggtagtctcaagctggccggcctgctctggtgcctggcctcgcgccgccgtgtatcgccccgccctgggcggcaaggctggcccggtcggcaccagttgcgtgagcggaaagatggccgcttcccggccctgctgcagggagctcaaaatggaggacgcggcgctcgggagagcgggcgggtgagtcacccacacaaaggaaaagggcctttccgtcctcagccgtcgcttcatgtgactccacggagtaccgggcgccgtccaggcacctcgattagttctcgagcttttggagtacgtcgtctttaggttggggggaggggttttatgcgatggagtttccccacactgagtgggtggagactgaagttaggccagcttggcacttgatgtaattctccttggaatttgccctttttgagtttggatcttggttcattctcaagcctcagacagtggttcaaagtttttttcttccatttcaggtgtcgtgaaaactacccctaaaagccaaaatgggaaaggaaaagactcatatcaacattgtcgtcattggacacgtagattcgggcaagtccaccactactggccatctgatctataaatgcggtggcatcgacaaaagaaccattgaaaaatttgagaaggaggctgctgaggtatgtttaataccagaaagggaaagatcaactaaaatgagttttaccagcagaatcattaggtgatttccccagaactagtgagtggtttagatctgaatgctaatagttaagaccttacttatgaaataattttgcttttggtgacttctgtaatcgtattgctagtgagtagatttggatgttaatagttaagatccgacttataaaagtttgatttttggttgcttctgtaacccaaagtgactaaaatcactttggacttggagttgtaaagtggaaactgccaattaagggctggggacaaggaaattgaagctggagtttgtgttttagtaaccaagtaacgactcttaatccttacagatgggaaagggctccttcaagtatgcctgggtcttggataaactgaaagctgagcgtgaacgtggtatcaccattgatatctccttgtggaaatttgagaccagcaagtactatgtgactatcattgatgccccaggacacagagactttatcaaaaacatgattacagggacatctcaggttggtgggattaataattctaggtttctttatcccaaaaggcttgctttgtacactggttttgtcatttggagagttgacagggatatgtctttgctttctttaaaggctgactgtgctgtcctgattgttgctgctggtgttggtgaatttgaagctggtatctccaagaatgggcagacccgagagcatgcccttctggcttacacactgggtgtgaaacaactaattgtcggtgttaacaaaatggattccactgagccaccctacagccagaagagatatgaggaaattgttaaggaagtcagcacttacattaagaaaattggctacaaccccgacacagtagcatttgtgccaatttctggttggaatggtgacaacatgctggagccaagtgctaacgtaagtggctttcaagaccattgttaaaaagctctgggaatggcgatttcatgcttacacaaattggcatgcttgtgtttcagatgccttggttcaagggatggaaagtcacccgtaaggatggcaatgccagtggaaccacgctgcttgaggctctggactgcatcctaccaccaactcgtccaactgacaagcccttgcgcctgcctctccaggatgtctacaaaattggtggtaagttggctgtaaacaaagttgaatttgagttgatagagtactgtctgccttcataggtatttagtatgctgtaaatatttttaggtattggtactgttcctgttggccgagtggagactggtgttctcaaacccggtatggtggtcacctttgctccagtcaacgttacaacggaagtaaaatctgtcgaaatgcaccatgaagctttgagtgaagctcttcctggggacaatgtgggcttcaatgtcaagaatgtgtctgtcaaggatgttcgtcgtggcaacgttgctggtgacagcaaaaatgacccaccaatggaagcagctggcttcactgctcaggtaacaatttaaagtaacattaacttattgcagaggctaaagtcatttgagactttggatttgcactgaatgcaaatcttttttccaaggtgattatcctgaaccatccaggccaaataagcgccggctatgcccctgtattggattgccacacggctcacattgcatgcaagtttgctgagctgaaggaaaagattgatcgccgttctggtaaaaagctggaagatggccctaaattcttgaagtctggtgatgctgccattgttgatatggttcctggcaagcccatgtgtgttgagagcttctcagactatccacctttgggtaaggatgactacttaaatgtaaaaaagttgtgttaaagatgaaaaatacaactgaacagtactttgggtaataattaactttttttttaataggtcgctttgctgttcgtgatatgagacagacagttgcggtgggtgtcatcaaagcagtggacaagaaggctgctggagctggcaaggtcaccaagtctgcccagaaagctcagaaggctaaatgaatattatccctaatacctgccaccccactcttaatcagtggtggaagaacggtctcagaactgtttgtttcaattggccatttaagtttagtagtaaaagactggttaatgataacaatgcatcgtaaaaccttcagaaggaaaggagaatgttttgtggaccactttggttttcttttttgcgtgtggcagttttaagttattagtttttaaaatcagtactttttaatggaaacaacttgaccaaaaatttgtcacagaattttgagacccattaaaaaagttaaatgagaaacctgtgtgttcctttggtcaacaccgagacatttaggtgaaagacatctaattctggttttacgaatctggaaacttcttgaaaatgtaattcttgagttaacacttctgggtggagaatagggttgttttccccccacataattggaaggggaaggaatatcatttaaagctatgggagggttgctttgattacaacactggagagaaatgcagcatgttgctgattgcctgtcactaaaacaggccaaaaactgagtccttgtgttgcatagaaagcttcatgttgctaaaccaatgttaagtgaatctttggaaacaaaatgtttccaaattactgggatgtgcatgttgaaacgtgggttaaaatgactgggcagtgaaagttgactatttgccatgacataagaaataagtgtagtggctagtgtacaccctatgagtggaagggtccattttgaagtcagtggagtaagctttatgccagtttga

SEQ ID NO: 121491 - DNA, 1344 bp, Homo sapiens
taatttctgggtattaaaaaaccatcagagacatttctttttccttataaaagaagtcataacagtgaacatttatagcacttagcttactaagggtttcacgtcctataatccccagcactttagcaggctgagaggggaggactgcttgaggccaggagttcaagaccagcctgggtaacatagcaagaccctgtctctatttagaaaaataataaaaacaaagggtttcacatgtattttagaaattagaccttccgaagttgtgagatttgtaataatgttcattttagagactagaaaactaagcctcatgaaggccatgtgacttgtccaccattgcaccagtgctgagtggcagatctctggtctggaagccacgttcttctcactataccatgttgccatttttcagcaactggtgcacgatgcatattctccaagacagaagggaaggaggcttgattaattgtggctcagcctttcctcatagttttggggctgtaagacctgtgcattgtaagtgaaccataaggtctgtttgcctcagagcaggttagttcacaccgtgctgctgctgcttttaagcaatgcaggatgaacggagcttgggagcaattttctctcactcccatggtggcatctcttcagttcactttctttgtactgctcctcttaggtttatggccgtgcagttgtcagtgctcctgtcagtctttccaaccttccctctaaattcctggcaccagcagttggcctagaacatgctgatcttcagcaccctgacagaaaaggctgctatcacagtggaaagtgtggcttcctgggctgcctcttggcaaagggctctagcttgtccagatttgggtcagccccagggtctatcagttccaggagaggtgttgaagggctgtgacaaatgcctgccctggcagatggaggaagctctggctagcttgagagcgcagtgtaataacagctgccctgagaagggacttccagccattcttgtgctctgagattgtgtccggaattggtgggttcttggtctcactgacttcaagaatgaagccgcagacacttgcggtgagtattacagttcttaaaggcagcgtgtccggagtttgctccttctgatgttcagatgtgttcgaagtctcttccttctggtaggttcgtggtctcactggctcagaagtgaagctgcagaccttcacggtgagtgttacagctcttaaggtggcgcatctggagttgttcgttcctcctggtgggctcgtgatcttgctggcttcaggagtgaagctgcagaccttcgcggtgagtgttacaggtcaaaaaaag

SEQ ID NO: 121492 - DNA, 1184 bp, Homo sapiens
gcgcccttgggctttttttttttttttctagaaagttttctggtgagttaaaaaaacgtgctcagagtcctacccacccccacccccatccccagcccaggcgagttgatgtgtggattcctggcatttgttatttgctgcccaaatgaccctggcctctgggaatgaggccccggacctttgcttttatgtcccagagctcctgtgagttttacaaaattatcataattatatttcaatcttaagagctagttctgcattttaggctaaaaagcaagaaatgagggacaagaaagtcactttttgcctagtgtccctgctgcccccagcggtcagcagcctctgacgctgagggtgtagacccgggttctgaggccccagtgtgactttccattgttcgcgaggccctcacccgctgcgccgcccgggctgagtcattctaaattcctttctttgtgttttctctctgcagtcacgcagaaatagttgctccactagtcatcttctttccttaaaccaaaaagaaagaaaaaaaaatctagcctttgatagttcttattcacgaatcagctaaaatatgagtcaaacacaagtttcctgagagctataaatatttgctgcaccccaccctactgggaaatacccacagtccgtgtttcgccaccgagtggctcaaatctggaggatttctttggtgtccggggtaaaacgatccctgctgtgagtggtttttagggcagtgaatctgtaatgtattccaagcttctgaagacagggtgtgtgtgtgtgtgtgtgtgtgtgcgtgtgcgtgtgtgtttatgctgtaacaatcggttctttaaaacgtattttttaaaatacaaagtccttatggtgaaagttatggacattgacactgggataagagagtggagaaagtagtgagctgaatggcatccttcaggagtgtcagtgttttgttttttggtgtttttattggcaagtaaatatgggtcatttggcatggccagtgggctgacatgaatatcaacaagggccactttgtaggccacagaagccaccttatcatccagtctgaggtgtaaagtttgagggtggattggggagggtcactccagcctgaagcccaagagccagaaaccctagatttggggttctaaagtcaggcggaagttttggggctg

SEQ ID NO: 121493 - DNA, 1024 bp, Homo sapiens
aaatacaaaaaattagctgggcgtggtgacgggcgcctgtaatcccagatactcaggaggctgaggtaggagaatcacttgaacctgggaggtggaagttgcagtgaaccaagatcacgccactgcactccagcctgggcgatggagcgagactccaactcaaaaaaaaaaaaagaataaagaaagaaaagtgcgatgcccagtcaatcacaaataagatcatcctggtttaaatctactctcacatggatcacagtataaatttctatgtgctgtgttttgttcgtttgtattttgtagagatggggtctcgttttgtcgcccaggctggttttgaactcctggcttcaagcgatcctcctgtctcggcctcacaaagtgttgagactacaggcatgagccactgtgcccagcctgttctatgtttttaagctacacgagaattttttttttaattaattctcactgtttgttcagtctgtcttcatctaagtttgtgttgcagtttaaagttaaagtgacttttaaaggccacatcacctgagactagggtaatcatctttacttctggttcctgaaatcatatttttccagtggaccatcctccagtggctgtggttgttgagcatgctttcagaacacctatgtggcttaaaacttagtttatgttttgtgttcaacactacgtgtaatattttaaaactgtttaatgtgatgtgaatacatttatgtacatttatttttaaatttgtaaatagctttaaattgctatggcaatgtttcttttataaatcatcaaaataaacctttgtgaattgatttttggatctgacagttctgtgatgtttcctagtgtccacagtgactctttgacatcttttctgcatcctgctcgagccatcgtcttctctacacacatttctgctaccacaaagccgaggaacttgggcctcctaagggatacagcatcagaaatctctgttgccatcaacctgcccttcctagctctgaatagagtcagtcc

SEQ ID NO: 121494 - DNA, 1047 bp, Homo sapiens
acagaatattacctccctcagtaagaccccaggtaccatttcctcctatttttccttcaccctcaccaagtggaaccactctcccaacttttaaccccatagattagtatggtctgactttgggctttatataaatggaataatttagtatgtaccttttttgtctggcttcttttgcttcatattttgtttgtgagctgtatttatgatgttgtagcccattctcattgctgtattgtattacgttgaacaaatataccactatcctactgctggtggacatttgggttgtttcaaggatgaggcttttatgaataatgtggctgttttaacactcttgtgacactatctttttaatgaagtgaactacacacaaaattttatttcacttgcattttttgtcttcctttatagaacactgttggagaatggcaaaccgtgttctatattgctgctgctattaatgtttttggtgccattttctttacactattcgccaaaggtgaagtacaaaactgggctctcaatgatcaccatggacacagacactgaaggaaccaataaataatcctgcctctattaatgtatttttatttatcatgtaacctcaaagtgccttctgtattgtgtaagcattctatgtctttttttaattgtacttgtattagatttttaaggcctataatcatgaaatatcactagttgccagaataataaaatgaactgtgtttaattatgaataatatgtaagctaggacttctactttaggttcacatacctgcctgctagtcgggcaacatgaagtaggacagttctgttgattttttagggccatactaaagggaatgagctgaaacagacctcctgatacctttgcttaattaaactagatgataattctcaggtactgataaacacctgttgttgttcactttcctcataaaaattgtcagctctctctgacacttagacctcaaactttagcatctctgtggagctgccatccactgtataatttcgcctggcaactggactgaggggagtgt

SEQ ID NO: 121495 - DNA, 1092 bp, Homo sapiens
cagagtaagactccatctcaaaaaaaaaaaaaaaaaaaaaaagaatgattcattaagctatgtttatgtggttttctgcatctgcattttattttatagtaaaaaaaattttttttaaataaatgagtgagaatggaagatgaaaatgttcagtagggagaatccataggctaacaggaaggtttgtcttctctcacaacccagatcccagagaaacagtcaagattacccgaagcagacaggactagggcaaggcttatttccctctgagacagactcttagggactgccttggactgaaccctataatccttctgacagccagacttatttactgtaattatattaaaaaattaacaacatattgctatgcatttcctttgctttcaagtggtggtcattggctgtgatgaatgtgtatgttttgtttttttctctcaccgtaattaatcctgtatcttcttattccttccagaatgggtttttatcttcattgccttatttaggctcttggttatgtatgatcctgtctggtcaagctgctgacaatttaagggcaaaatggaatttttcaactttatgtgttcgcagaatttttagccttataggtaagtgaagcaatcaggttttgttttggtttacagttatttaccatgtttacagttataggagataggaaaacaaagtgtgtttcccacttttacacacagttaacacaatactcaacacagaacacctcgctctaatcaccaaaatgtttgtggggatttctgcctacacataaccagttctgcagcggacaccagctaggtatcctgtaattcagttctgacactgtccagctggcggtagcatcagatcctataggttgagggctcagttccacaagatcgcccccctacttcggataccaatcacaagtcccagcttgtgacctctgcttctgactgaccggctataaatcagggttcccatgactgtcttgtcaggttcagttaatctgctagagcatctcagagaactcagagaaacactttattttatgtttacccacttattataaagggtattgcaaaggatatagatgaacag

SEQ ID NO: 121496 - DNA, 1032 bp, Homo sapiens
ccagctgacaaggagtaggggttcagtttgaatctggaatagatctttttctcagcaaaggtgataaaactactacctccatgttttaatgaacttttttatagttcaggctctcatgtgtgaaatttttaccaaaactacagatatgagaaacagctaatctttgacaaatgtttcttagatttgcttaatctaagaatattctttaacattttttcataattatttttgtacttttaaaaagcaacctttttcattatttagacaatatcatgtaattaacttttttaattaaagcagccgggtatggtggccaatgcctataatcacagcactttgggaggctgaggtgggtggatggcttgagcccaggagttcaagaccagcctaagcaacatggcaaaaccctgtctctaaaaataaaaatttaaaaataaataaaaattttccccaatctttatttcagctccagtgtgctgctctgctcgttacaacttagcaattttggccttttttggtttcttcattgtgtatgcattacgtgtgaatctgagtgttgcgttagtggatatggtagattcaaatacaactttagaagataatagaacttccaaggcgtgtccagagcattctgctcccataaaagttcatcataatcaaacggtaggtgctattttttaaggaaacaattttaattatcctaaaatacttgcaagtaaaaatattaaaaggtcttttttcatcctacagaaactatactttgtttgtgtatactctgaatcactttctttttgtgttttcccaggaactgattgggcaataacttgtaactatagctactactgctatgccgtaatacaccttcatctgtttgaaaagtagttcttccattccctctataaacataccatgcttaaagaaaatttggaaaaacctgttttatataacagaaaattaaactgttttaaattttctaaatagcttttataggagtattatttataaccctatatcacttatagagttacagct

SEQ ID NO: 121497 - DNA, 1050 bp, Homo sapiens
acttccctagttcggtcgaagccctccccttaattatgtgcaattcaagtccccactgcccgcccgcaagcccccactcatcctcgctgcgggcagggtggcccctgcactttacaagggggtgcaggagcgggagacggtcgtccgaacaccggctccccggcatgcgtagaccggcgggcggagcgggctcactttgcgccaatcctacgagaactcccagaactccgcttccctagtccaacccaagccagagttgcccacacctaagatggcggcgggggcggagtcggcgcggccgcctctgggcgggaccgcggggactagacgtggccgcggggcggtgtcatcgcccccgccccgcccggtccagccagctcggcccgggggcttcgggctgtcgggccggcgctcccttctctgccaggtggcgagtacacctgctcacgtaggcgtcatgaggtctccggttcgagacctggcccggaacgatggcgaggagagcacggaccgcacgcctcttctaccgggcgccccacgggccgaagccggtaagcggcggggtcgtccaggggcttcgagtgggcagcggtaccgggggcggcggtctctgggccggcatggcccgggtacccgcaccctgcgccggcgggaccggagctgctcaggcgcgaggggacattaagaggggagcccgttcagagtgccgctcagtcccgcctgcctcggtgcgcagaagcccctcgggaaccccgggggccgcgaccgtgatcgcggagccgagccggggcctcggcaggtgcagccccaccgggcgggggcgggggcgggggcgggggcgggggagcggcggtgcagccggcgctgagctggtggttattttgggtagtgctgagcaagggacccagtggaagaacgaactgggagagaatcatcaaatgaatgggctaaggtccgagcggaggaccccggtgtaagagcaaactggaggagaaacctgcagatcagtaggcagagggctgtccttccctgtcaccgctaggtttccgc

SEQ ID NO: 121498 - DNA, 1053 bp, Homo sapiens
catcgtgccggtggagcccgagcggacagcggaatacgaggactacggcgcagacgagcctgcagaggagcctcctgagccccaccggcgctggcggcgcgccctgccccacggacccgggcagtgaaccagagatcacgcgccgcgccgcgaggcttgggggaggtgttgaaattctcatttacaggtcagatagagcagtgtacgtcttttctgaggtgtttcttccagcgttgctcatccaggagtaccctttctgattgtagagaaccttgtttctgcaggaagcctagctccaagcacgcagtctgtagacatttttgcctttgcccttgaaatgcttgcaaaatactttgttaacaaaagctgcaaagagagaacatgccgtgtgcctttagttagcacagcgggcagcctcagtgaaactcttaggttaagcagttaagtcctggaacccagagctgctgtgtatttcgagcgggcagtttatcttttgctatacttattttcaattcaattacaccacgattcaaataattcccctcctaaaaccaaaaaggagggaaacgtcaactccattgcaattacttatcttcctcttctatctctgttatacgccggggcatagaatgctcgtatacatctctttaacaaccacaaaccttaagccatgtagatgaagttagtgcatcaacgggatacagttccatattgccttaaacctccttgttttagacacactaacatttataccaaattgcagattattctgcagagagggaattgcatgtttgtgttgtatatttagtatgaacttttttcagaatataatatttcttagttatcaaaagtagttggaaaacatttgcaagactatgaacatagaattgctgcttttatattttaactgcagattgtgaatttcactgccttatattatttatttctgaaacaaaagaggcatttttcaataaaactactgaaaatttgacatggcatgtttctttctttgaagggccttttggactgcctcaagtggttgttacaacaaac

SEQ ID NO: 121499 - DNA, 1016 bp, Homo sapiens
tatggatatatatatatatatatatatatactttaaccattacatacgtagatggatgtgtatttatattttttacttagtcattcaacttttaaaaactatcatctttgacctgtttcaggttccggctaacacattttctaagtcgccagtgctgcttacagtttgaatacatgaaaatcctgtttctgagatgtttgcgcacgtgcttattaggaaatgagtctgtatggaaatctcaccacagataatggttaacgaaccgggtcgacatcacaaaggagggtggagactctttttactaacttgaatgagacaaaagcagtggtgtcagtttataatcctgatgcatttcagtaataatgtagaaaaacattattttaaaaaagttccaacacacagccatgaggagcctcagttttgaaagaggtgcataataaaactactaaccagaggagtctatgccattttaagaaaaacaattaacctggttaaagagaaatgtcttatgtaaataataaactaattgtggcttgtaaatgatttgtatgtgatcctgtcgactaaaatcacttaacaattctacaataagcttctgcatcaaagcctgccgcttgctctatgccggaataacaccaaatggaatctcctcatctcttgcttgttagcgatgtgtctgattcagggcatctgtctttttgttacttttttgtccgtgtcctctcatttgggttttgtaactgcaattttcaaaccaaagtttaaaatcaccttttcttcctgttttgctgtagtcactggtgttcctcacccaccagctgtaactcagtttgtgtgaggtacagccacagaagatgtcatgtactgtatattacctggtgatagttgcttttcaccccccgagttcagtttctaggagccaatgaaacttcccctcacctcctcatctttccaagttgttctttgaattgaggagtttgaaggcataaacagttacttggggatttgcgaaaatc

SEQ ID NO: 121500 - DNA, 1066 bp, Homo sapiens
tttgattccagatatttcaggattctgggtatccacttttgtcaaaggagtacttaatactctagagaaaacctacatatttctataattctactggtttggctgctgtactaatagggctactaaagataaaatacctttaatatgtttttcaatgagatattataacaatttcttcaggattactgttcctaattactatttaaaaatatattagacatgtttgtttgcttcaaataatttttcccctgccttgtagccaaattttttcttggccataaatctagaattacacaaatgtctagaaagaacttggcttaaagagtgaacttctgtgaaaaattaggttctgctttcactaaggaaatgaattacttgaatcaaatattatcagttaagatgaaaattacatgcttccagataatttttcccctgtgctttctctttttctccctccttaggtttgccaggagagaaaggtgaaaggggtactggatcttcaggacctcgggggctgcctggccccccaggtaggtttgctagtattttaaacaggcaaagactataaataccgagagggcacaccatcccgaagagattcacaacttcatcctgttattcttttttttgtttttgagacggagtcttgctctgtcacccaggctggagtgcagtggcgcgatcttggctcactgcaagctccacctcctgggttcacgccattcttctgcctcagcctcccgagtagctgggactacaggcgcccgccaccacgcctggctaattttttttaatttttagtagagacggggttttgccgtgttagccaggatggtctcgatctcctgacctcatgatcttcccactttggccccaaagtgctgggattacagaagtgagccaccgctcccagccaacttcatcctgttattatagcataaagcattcttattaccatggcatatgttttagcaagaagttcaacctccataacttcattttcatgttccctttgttaaaaaaatgaaaagtttctattaggcattaactataacattaatatatg

SEQ ID NO: 121501 - DNA, 1070 bp, Homo sapiens
tgaggcacgaaaagcatttgaacctgggaggcagatgttgcagtgagccaagatcccaccactgtactcctacctgggcaacagagtgggactctgtctcaaaaaaaaaaaaaaaaaaaagaaaaagaaaaaagaaaaaaaaaaagaaaatacctaacaaacaagtggaacaaaactcactcaaacattgcatttcagccaaagaggtgaatcaagagtgggaatctcacatacacctttcacttttctatctctttctcgtagacatatgttcaaacatgcattttggccaaagaagtgaatcaggagtgggaatctcacatacatgtttcacttttctatctctttctcgtaggcatatgttttcatggtctttcctcatgaagtaaggatcacattgctctcaatggctcacacccttgagagagtatgtgtgagaagttggcaatgttaaaatgtggaagtgccaatataaaatgtttttcatgcatctttagctgatgttgctgttggttgtttgcagttccaaatccagagttttgacattgtctgcagtccagtgtggaccagtagagacagatgctgtgatattccctctagggtaagtaaaacagaattgaattctgccatggctttaacagtcccccagtaataaacccttgtgcctgggagaggaagtagcactgcacagttgtatattcaggatggagctaaaagacacgcaatgtgtgggtgctcaccagctactacagaaaagccagtgcctgtgtgatccctccctcacaagctggtaatacacagactgtttctgggacttctccctaagagaaaagtcctgctgagttaatgtgtttgataagaccacttactgtaaagccctcttattgcttgtaaagtatcagcattttacaaaacaagccagcacctttctggatgactaaggttttttagatggtagaaataaccatattatttctttttgagatgatgacttttctttaatagtatctatgtaggtggtaatagttacaaagttgaacgttggtgatggatttgaagcttttggccag

SEQ ID NO: 121502 - DNA, 1050 bp, Homo sapiens
catttttttcagttattttgccaaacacctttaaattttctccaaacaacttcttgaaagcttgcatggatgctttggagctttgtggttgagaagcacatctggatttaatatctcgtgcttctctagtgcctttacccagacctcaggatctgaaactcagagatgtgactcacagcactatgaatgtcttttgggaacctgtgcctggaaaagtgcgtaaatatattgttcgatacaaaacaccagaagaggatgtcaaagaggtaggttgaagatgatagtagatatgaaaatatttgttttcctagtaggtttaaaaaaagaactttatcaagtatggatgatagcatgttttgaatacttgtcactttgttaacacagtgttgaaaacttgtgatattaataaagcagtttttgaaaatcaatgatatattggactgtcttgtcaaaacagaaatgttttgctgtgtgatattaatctcaaaaagatcatcccttggtagataaaaagttatcaaatctaaatggtatttccttcccatccagattccttatatggctttctattctaagaattactagaaaatgtcatgtttctaaaaataaaaggtagcaagaggttgcagcaatgaagaggagcagtttgtcagataacaggaagataggacactagagaaggacacagagaaaggagaagtatgttgttagaggggtgtccttttgggagtgttcttttgggagttccgtgatgaccggattcaaagttagagcaaattagaagggcttcatgaaccagcaaaacttgtgtgtgcttgagggagtattaatgtcagaatctcagaggcatttttggaacataggagtcatttctctaagcactcagtgactggttctgctggtcatttgtggattatacaaaagctactttatacatgtgcacacatttatttcattctgcatttccatttaaaaggggtacaatggccagtggatctcacaagattcttgtgcatagcaaatgaagtaatgctgtgcgtaagagaccat

SEQ ID NO: 121503 - DNA, 1094 bp, Homo sapiens
attattacataaatctatttttaagagtaatatataattattaatgtattaataattattagtgatgtaattaatgtagtaattttaaattatgtaataacgcataatttaaaattgtgcattaaatttattaatgcatttaaatattaaatttaaaattatgcattattgcataattaagctctattatttaaagagtttttactaaatgtagatattgtaccgttttctatttttaatgactaagatgcagttttcttttgttaaagtaattgcagaaatgttttatttgggctgggtaagcagtgttaggttacataaatgggtgggcaactatgacttgggaaggaaaatggtaacataagccccttagattttctgtccctgccacaattacagcctttatgaacataaagctagtttttaacattcttagagacggaggtggtggacagagtttacttctgatagttttcattattgctaaaaaagagtagatctgggcagagcaggagcaggcttgtaagggcttatttccttgggatagtatttgggaatccttaatcctgatatagtatataatatatgagtgacacatttgtattctgtagtgtgatgagcattatttaattttttccaatgatttcttttgtaatataaagaccaaatgctaaccttgtaataaactggaaaatttatagctggtaatataagcttttggaaaggagaacattaaaaaaatggatgtggacaaaatcaagtgtcaaatcttgctgttttgcattaatgttctattgtttctcttatgatgatattaactgacttatatttttattttgtagcttgtacactgaggatgttgggattattttctctttccaaagcttttcctatgtatcaatgtttgtgcttatctttacagctctcaatttgtatatttgtttgcatacttttctaaattgtcttccttctttcttgattctttaaatgtgcaaacttcaccatctatatttacatgatttttattcacagtagatcataaatttaaatgattaatagctagataataatatatcagggtttaaaaaatatat

SEQ ID NO: 121504 - DNA, 1055 bp, Homo sapiens
ctggtgtaaacaggcagaatattagtttaataaacttttgaatatcgctatttatatatttataaattaacatcacttatttttgaatacttgcctatgaatatgaatatacatttaaatgtatatttccttgtcagatataactttcccatgattccttattttcattaaaatatatttttcatctctgctacatattgagatttatcaaataacaatgaataattacaaggcaaataatgcagagaatgaaccaaaaccatcattgtttcttgtccatattgtgggaaaaaacatattatgtcaatgttttgaattaacttctctggttgtaagcaggttgtgatttggcatgcttgttcaaaatgcactcagcatgtatcgaaattcctttaattgttatgtgaattgtttgcatatgtggttattatatgtgatttcattgtacttgtatgtacttgtatccaaatatgtttctattatgcttgattttgctggccattcttgaatgacctagcaactcaagaatcaaaagtgttttgtgctgtcttctgtaatatgtacactctctgatgttttgtcagcttttagttttattcttatccaacaacatatcttttatatttgttggaaacaaatttatgcaaagacaattttagaaagctttgctcaacacaattctttattaattaaattgaccattttgtgacattgaaaagtttaataatataaactctctcttttgcagttgacccaccttcagacttgaattttaaaattatagatgaaaatactgttcatatgtcatgggcaaaaccagttgatccaattgtgggttacagaataacggtggaccctacaacgggtaagttttgagactggggttttaggacagaagcatcatgatgatataactcaatctccacctcttctcccctttcatcatgaagaagctgtgctttaggaagcctgagggatttgatccatgtcaccagacatttgctgaactcaggtttcagatttccagtctagtgtccactattatattttaatgt

SEQ ID NO: 121505 - DNA, 1037 bp, Homo sapiens
ggtacataacacataaacaaagggcttcagaataagacatatctaggtttgagttctagttcaaatgtaattattgtgtatttgatctctgtatgttctcagcttccagttcttactaatgatagtaacaataactgcctgagatagattgtctacattaatttatatttgggattcttgctaaatcaatattatagttatcagatcgtgttgcagattatgaaaccagaaaacaaatctatctagaccctgtgtgtagtggtataaccatttgttgtgctagtcactgtggaagagagaacaacagctgctttctcctactccctatactctacaacacttgtcctctttctgcaattcatccctgcaaagcaatttccttttcccattccttggaatgcttttcttctcactgttagctggctcctttttttctggtctcagttcaaatgtaactttactcagcccttttctagcttccactgcgctattcctcctaatagatcaccctgttgatctgcagttcccactataggacagtatcaggcttatgaattatttgttgtctatctccaccaactggaatgtaagacccatgaaagggcttgctcatctatttcacagctgtattctctgagcctacaacagtgctttatacaaagtagactcatactcagtaagaaattgtgggatgggtggatgaggaagggtaaggtttaagtgaatgataaagatcctcctctgctcataatctgaacactttccatcgttttcatggctaacagctgctcttagtcttcatcacctctcatctaggttgctgcagtaagcatcttaaaggatctgcctgtttctaccgctgcccctctatggtctattttatcacaacaatcaggctagtcctctaaaacatgtaagtcattcttcattgagaaatcctatgatggctctccatgtcactcaaaagccagtccttaaaataacctacaaggccctaattgatgtggcccaccccctactaacttcctctccatcac

SEQ ID NO: 121506 - DNA, 1113 bp, Homo sapiens
attacatttgattactttaaaattatatcactctttttttttacattcactttagggaaggcttgcatattttgaactctttttttctttggcatttaatcatccttagcatttctcaggcagtcttgggttaatatggaaataacctttgtatacgttcttaatcttatttttaaaaatttttgcattttatgttgacaaatatattattgtgccacactttctatattaaaactagattaaatatattttacatatatttatttaaaatttttccagcacctatcaaaatacttttttgtgttccaattaaggtagtcttaatgcaaacttacaacttttgaactggaatattaaatttatacacttagatcttagaatttatggttaagttcttttttgttttttatttttaggaacagcatatgccatatatgagctggctgtggcttcatttcccaagaagcaggagtgacttcagtcatcccagcaatcgcttggttcagtttcattcagctctctatggaccagtaatctgataaataaccgagctcttctttggggatcaatatttattgacttgtagtaactgccaccaataaagcagtctttaccatgctttgtctgattttatcactttatgccaataatttcaacttttggtcagccttgtaaatcttaggtaaggatcaaagaaatgattcttttgccactaaacttgtgaaagcaacattattgtgatgttattttagtgaaattttacttctaacagctcaaaattagtctcaacttctgtctcaacttgccgtttgaatgcatattgctttttccccctacccactccagtatatcttggaatatgctagaacccgggggtagtggaagcagattatctttggctcctggggtctatatttctttttttttttttttttctcagctatgtgagagtatgcttaaatattggatatatcccacagcttagaattaggctttagtagaatggctttgtaagatatttcagtatttgtttttttctacactccgagtgggttcaggtaggtttctctcatcaggaaccaaccaaagcaggacagttcctgggctccccag

SEQ ID NO: 121507 - DNA, 1941 bp, Homo sapiens
ttggtcagagtggtctcgaactcctgacttcaggtgatccgcccccctccccggcctcccaaagtgctgggattacaggtgtgagccaccgcgcctggcaggtttttgatgatatggcagtatattatgaaaatatttgggtttggtgtattttggttaagcactatttttgtaatatgtgtatgtcaatatgtttgcatcaaggattataaaatgctactggttctgttcaggtagagatcatgattttattttttggttagaatctatatgaattgcttcttgaatatgttatttggagactgcagaatgtaattcgaagagcagaggatggataacaaattgaaaaacctggatgctcttgcatgactttgctgctgacaaatcagatatgcttcaagtctcaatttaccttttctataatatgaacgactgaaaatagttggttttgaaggtttctttaggctctaagtctatttaataatattttcattttaggctcttcgtcagattgggcagaggacgataagcactgcttcccgcaggcattttaaaaataaagttccggagaagcaaaaactgttccaggtactgaagtattttataggagatgttacttgtaattattagattaccaaaaggtaagagttgggataaacaagtatgtgtataaattagatcatatgacaatataaacattacaaaaaaagtcaaggacatgtaccatagtgctaatagtggttgtctcttggggaaagacctggtggagcagagcaatttacctttataagtagtttgattatgagtgatttttgttttattatggtttctagcttttcctaaataaagcttaaagtgattaaaaatagttgtatcatatatacctaaaaatacaatactttattgaacagatgtactaaatagctactgtatgctggattagatgctagggatataatttagggttataaaccaaaatcccttccccacttttttaagggaaaaaaagtttcctatgactaaatctaatgtgtggcaattattggttcttttatatttaagttatattaaagttgttgagatcagtgtgtatgttttatagctttaatgtttatatattctttggaaagaccgtcattaatggatctcaaattaacggtgaaagaagaatgctgacttttaggaattcttattttaaaagtagtagtagtagagacggaataaagaaaattgtaggtcttttaaattttaatacttaaaatactttaattctagggatttaaggagctatatcattttatatgcctgttcttttgaaacttagttggaaatgagtgagacatttattattgtcttttttttttttttttaaatctaggaggatgatgaaattccactgtatctaaagggtggggtagctgatgccctcctgtatagagccaccatgattcttacagttggtggtaaggcctttggaatgtttgaaggtttatagaaaagtaatagtaatgataactgataactttattgcttttgctatgccagtattttaatgcaggcagtttgtctccagaatttgatatcttactatatctcataatgattcaagagggtgactgatacatactgtataagagcattgtgatgtcttcttttttttttgaaatggagttttgctcctgttgcccaggctggattgcaatggcgcgatctcggctcactgcaacctctgcctcccgggttcaagcgattctcctgcctcagcctcccgagtagctgggattacaggcgtgcaccaccatgcctggctaattttgtagttttagtagagacggagtttctccgtgttggtcaggctggtcttgaactcctgacctcaggtgatctgcccgccacagcctcccaaagtattgggattacaggcatgagccactgcgcctg

SEQ ID NO: 121508 - DNA, 1198 bp, Homo sapiens
aactgactgtatccgcgtaagaggagtaattcttttttgaattttatgaggcttcagagctgtatttcggccaacccagtctttgttcagtttctagcggcttcaaggttgcccagttttacgccttctcgctcaaaacagacactagttttctttgatagcctggtctcacattgacttcatctaagcttattacattcgtctcataaatcgtttgctttttccccagccttagctccagggaccagcctactgaacatcgaaaaggtcaggaacgagatcacgggactgagacggcgagccggctagagcggatagagccgtactgccgctctagtttttcttttgctctctatggttaggagcgcaagcctctcttcggcccggaaagatttaagttcgtgaatgcatacgcaagactcggaggtagttccggttccggcgtggccattttcgttggtggtgttcagttgtggcggttgctggtcagtaacagccaagatgctgcggaatctgctggtgaggagcttctcatcttgcattcatgatgggggcgagggagtggagaggaggctgaggcaccacgacagaaaaccctcacctgggaggggtgccgaaggcggctaatgaagtcaccttgattcgtgtcctttttccctgaccttactttcccttccgtctattcctctcgccccaggccgttactgggtagatgtaaggagtggagaggctggggaagtgaccagagactcgtgggttagacccgtcttgggttcttagtcaccacctctaaccctgtcggtcattgatgaggttagtagctccgatctgagtaaaaccaagacccaggtggggagtgtctgacacccggaagcatcaagcagaaaggtgtttttctggtactgaaaggttttaagtttcaatggttttgagctttgcgagcttgagaaggcagtttaaaaaccaagccattcaattttgggtggaactttaggaatagtcatggctgaagtgcagtgttatttccgtcaggcgattgtgcattgtccttcacccctccatcgactttgagcatgtgaaatatttccccaaattttgataaagaaaaatgcgacaatgattattttattttttaaattatttaatgaagttttgcttcattaaaatcctcaatgtaattttagaaaatcgagagcat

SEQ ID NO: 121509 - DNA, 3212 bp, Homo sapiens
gagatggaaaaatcttcctataccctcttcagattaccctgtacattattttgatggacgaaaacggatgatcttgagcactatttcatggatgggaggaaaaaatccatttttggggattgcttacatcgctgttggatccatctccttccttctgggagttgtactgctagtaattaatcataaatatagaaacagtagtaatacagctgacattaccatttaattttatattatgaaagcaaatcatctgcatgtgcatcaaggccagtcctattcaacctagctttcgaatgctgatatctggttagtatgtcattttgaagttggcacataacttttctaaaaaaaagcagtctttgttgtttgcttcttccctacggatgacttctaaaaatatatgacgggtataaaaaaattagctatattgatcatatcaacactgtaactgctgaaatggcattctaatgtttgctttttattcggacaggccacatgatgcatagagcctctttcatgtgacttgtgtctactgcttaaatctttatgctgtgttgatgatattatattgacatatgaagctgtatatgtgtatgtattttgtggagaaagggattacaagatgtatgagtataatgacttgctaacctttcaggattcagagaaagatgaagaaagaccatatctaaataatacacttcatcattttcatgtgtataaatgcttaaagtaccatctttgttgaggtggttcatgtatccagtttatccagtacagttatttgtcaagcttagctttgatttcaaaggacacgcttaccttgtctggcataagaattaatgctcatgtctgcagtggttgggtaggtcctgcttaggagaattaaaaaattcctctttccgtttggttgaatgttgcagtcaggaaccccaactcacttggaatgtttttatatgtaatcatttcccttgaagcttatactttataagggaagaaagaattcaggtgatatgggaaaactgcttggcagaccttcatcttctgcctcaactgtaaaccacatgtaagtgcttaatggagactgttttcattcttgtgatatttaacattcagaaaattacttcagctttggaaatactcaggctgtttttattctgcaggtaagtgttttgacttaagtactaatattccagaaatttttgaaagcagtaaccttaatttcctatgtatttcattccacttttgcatataggtcaaatagcaatgtgtatgcacattctctttagttaaggcaccaattgttttggttggttttcctaagacatactttaaaaagatgttctataaatttcctaattaaattatggggattttggagtatgtacatgataaattataatatgtatatggttgaagttattttattttttactaatgaattattttaatattccttattgaataaatgctgtaacttgtttgctatggaacttattcttaaagttctagttaaaaataatttttccacatgcatgaaaatatgtattaatcagaggtggcttaattacattgaaattgcttttttgttgttgtttttttactgaaataactcatgtttgtgtagaagaatgcctgtttactcagagtttatattttccttcagttatattttaaatcaaaaggtctgggtaatgtatacttttgattaatatatactttttttaaaaaacaaaaaacaatgtaatggttaatagtagaaatgtgccacacttttcaagttttatataacatatgaaattcagttaaaagaatgtgtgtttcataatgacttttaactggtaaaaatattacttgcacgaagtacttgatgtatggttatcctgaaatttcggagtatttggtgtgttctttgtctaaaaatagtctgttttgtcagtccttcagaatattatttattctgaagattgtccctcttgcacttggcagtttattttcggggatacattgttgggggagaggggtttctgccactctttccagattgagtctgtgctgtttaaggaggactaccatcctgcaactctttttctaactggggcacagaggatgtcgctaaagaaaagttgaagagccctttcagcactttctcatctgtggagaagatggaatcttaaaatacatttggagttttatctgttttacaagtccattgatggcctaagttcctcctgttttctgctgtttgatctctaaggaactcctgttgctaaatatgaagagtatggaacattcgtatagtctctgtgaagcatggggggagggaagacatttctttttcttataggctttatgctcaaatgtcatagtctcctttcaaagaattgtgttgcattttaaatgcacccagcttaagtagaagacattgaaggatgcattaattttcaggaactattttgaattatgaaaagattcccaattgaaaaaattattcaacaagtaaaagctaagaaatttcattgaaatcataaggcagtttaagcataaattgataaaaatagctgtgtactactaattaatagaaaatcattcaaccaagagaagagtcaagtgaatatcgtttgtttatttgctagtgagtttctttgtaacgttgattttattaaatgataatatttggttagtatgtcctatgttaataaaaatgaacaaaattaattttgctatgttcaggtgtcttgataaaataacaatgctccagtgttgttgcttacatttagcactaaattttaacacagcgtcagtgagtccaggttttaacttcttcatgcctggatgggataaaatgtaattcattgttaaattaattcatatttgtatttattaatcactgtgacaacattaaccatttgttcttaccaggaagtggtcagattatcatctgagttacagttagactggctaagtttggtattagatcaaggggaatgtccagtaaacagagaggtaagcatgatggaaataatgaagtggggtacacaggaaaaacctgactagtgaggaggagcagctgagagatagggtcagtgaatgcggttcagcctgctacctctcctgtcttcatagaaccattgccttagaattattgtatgacacattttttgttggttaagctgtaaggttttgttctttgtgaacatgggtattttgagggg

SEQ ID NO: 121510 - DNA, 1166 bp, Homo sapiens
tctgctccctgggttcaagcatttctcttgcctcagcttcccctgtaactgggattacaggcgcccgcaaccacgcctggctattttttttgtatttttagtagagacggggtttcaccatattggtcaggctggtcttgtattcctgacctcgtgatccgcccacttcggcctcccaagttgctgggattacaggcgtgagccactgcgcctggcctggtaattttaaattttctaatagtcatatttaaaactatgaaaagaaacaagtgaaattaattttagcaatatgttttatgtaacagtatatccaagatactgttatttcggcatataatactatataaaagttgagatacttcatattctaattttttatactaagtctttgatatctgatgtgtattgtacacttatagaacatactcatttggaccaaccacatatgaaagactcagtagccctgtgtgcctagtggctgttgtatgagacaatgcaaacagaaatggataagcaagaagctattggggatgcattattggaaggaaggaaatgcagatttaccttgcaattatagttgggttaatattaaaacatttgatcttactgcatgtcagctagcctatgggtaactgaattagaactctgttaaaggaagagaagtccatctagaattataaagttaccatagttaatccacataggaataaagaacaaatgtgaatcatatgcctactctgtcacaaccacttttggaaacaaatatcaggtccttatttctcatagagttaagcagatgctatgagttttcaagagatagttagtaatgtctttctttgcttgtgtttagatacattagaattgtttctcattggcaatgattcttatcctatacctatcgctttgaaaaagaaaggtattgcttggtggacagataaaaatgtgaaattcagaaatccccctggaggagacaacctggaagaacgatttaaaggtaaaacattactaatatcccttaaaaaattaaactaggagttttaatgaagtattttaaattttctatcttcagaatcttaaagttatgctttgaaaaacacaatttttctttcctcagcttcataccaagttaggtaaatgttctaatgtactaaaattctaaaggaaat

SEQ ID NO: 121511 - DNA, 1090 bp, Homo sapiens
tgtagtgcacacctcccagtgtctagggatagaggcggtagaacggctcaagcccaggaattaagggccagcctgggcaacatagcaagactctagtctctgggagaaaaaaaaaagaaacaagtttgaccattatccctgtgaaaagtcgatgctaactgggtgaagaccagtttgaattagagaaaattttaaattgaaggtagctcagagtaggctaatagattccttgaatattctcttttaatgtaaatagtacttttttgacgtctttaaggatagttttaaagtttacttgtggctttttgtaacataccttctctagccttatttacagttgtgccattttagattgctaagtactggtggaatttaccccactacctatcacaaattgtaaactaataaaagtccaaattacgtagcttttatgtacacatgaaataagtttatacagaatagtttttatatgaaaattttttccctctctgtttctctagggcaacgtgtttatgtattatggactgtctaatttctatcaaaaccatcgtcgttacgtgaaatctcgagatgatagtcaactaaatggagattctagtgctttgcttgtaagtaaaatgataaatatgaaaatatgatatctgtaaaataagaatatgtagtaactgttcagttagaattgttaggatgaaattaaagtgttgtcatttatagtttgtatagtgaggatttttttccccccgagatggagtctcactttgtcgcccaggctggagtgcagtggcacagtctcagctcactgcaacctccaccccccaggttcaagcaattttgcctcagtctcccgagtagctgggattacaggtgtataccaccacacccagctaatttttgtatttttagtagagatggggtttcaacatgttggccagtctgctttcaaactcctgacctcatgatctgcccacctcggcctcccacagtgctgggattacaggcatgagccaccatgcctggcctgtatcatgaggatttttagttaaaatattttttcctggaattcacacagatgcattgatgcccagactgg

SEQ ID NO: 121512 - DNA, 1941 bp, Homo sapiens
aggtgttgaaaaaacagtagctcttggtaacctaatttttttcaaaagtatataatggaaagctgaggtgactgaaaagtatttaagattgaaagatttaagaggaaaaactgatttattgatctctgttaatctagtattttaatagtttagatgttttagctatgtaaatatgcagttttgaattttgtatgtatgattttatgcataaatatatttctttgataaaaagaagagaggactttacttggaaagatcagccagtagaacaacagaggaccctttccagtttttactacctcacactgtcaaacagatgaccttaaaaacagtttttgtctgagctctaggtcatttcattggacttaattttccttttaatagcaagtcgtttcagagtgttttaggtatccactttctctaaggaagtgcttagttatatttttctcttgcagattgattataccggaacagagccttccagtccctgtaataaatgtttatctccggatgtgacaccttgcttttgtaccattaacttcacactggaaaagtcatttgaggtctgtgtttccaagtaatgtgctagaaaagccatgctttaaaaaatactgatactgtactaaatgtcttttacaaggtattttccttttatagagaagtctgtataatttactggagtttataggcttttgaggaagatcgttttgtgtgtttggctgttggattttgctgtctggtaattaaatacatttatttgaatggtttagttagtactttgtagacaaaatttaagatattgtattttatcctttcaacagataatgttatgactgtacgaatcaattttttatcaagttttatatacttgtatttttaaaattattgctcaaattgttgtgcatacttacgatactaaagcaagctttactttagaaaataaataattctcccattacttaattgaattatttttatgacatatgaagcattataaaaaatgcaaacacttattaaaaccttactgatcatttatgtttttataagtagttagaaatccatctgtttgcatttacactgccattctgaatacatgctaacggacataaagattcagaataggcatgtaaagaccactctgtattctcctgtgcctgaaaattgagcttaaaataattattcttaagggagcaaaactgcgttaatacatgccaactttttagattttctgaacttaagattttctaaaggtagtgatgactttaatagtccctaatagttggttgccatctagtggttatagatgctcttgcactgacataaaggacaggatcatgctgcttttgaataatacatgaaaacaaattttgtagaagacaaatgtaattatttaactttgtttcagcagaaacagaatatacatttaaagtatctttacaagtccatgatttttcagtgtgatgggcagacaataaagatacaataaattctgcttttgtcagaacaggcagaattgaagaaacgagagactagtagtgatatagaagctctattaattttctctcccattcaaaaaacacttcagaacttgttttttgcaaaggcagtcaacctcaaattcattctcttgtggactctgtgtttcttcacaagctcaaactttgaattggactaaactcttcagggaacttcaagtaggttattttatctcagtgttcattcaaataatctctttttcagtttacaaattgaatttactgtactgaatctcgaggtaatatttccttttaaaaaagaatattcattttctcaatttctgtgatgtaattttgatattccctctcttccacaagaaggtttccatgtaaacattttctttatatagaatgggaaaatttgcatggtttgacatttgaaagtcaagcattaaataaatgatag

SEQ ID NO: 121513 - DNA, 1932 bp, Homo sapiens
agggggcgcgggtggattgagctacgagccagagttggtgggcgtcctttgagagtgcgcgctgaagtctttgacatttaaaaaattttggggtggtggcctaaggatgagagcagccagcattcacatcttgtctggtgttcatgaaaagtttcaaattgctaaggttgggtgcaactggggaccaatctaagtagggaggggacagacagtttcattgaggtgtgttttataccctctggtctgtttctcagagtttcaggcttgcttttgcagccagccttcagattaggcctggccttgtctgatattctttcggaatgtgtttttataaaaatattctgtaaaataatttatctggaaaaagagtaaggtttacagtgtcaattttggggccgtaactaaagcttattgacacaatttgagttttactcactcgtgagggaaagttaaacatttgctgtaagtagactaagccagcctcaagaaaagctgtatgtttttgttggggaaggtggtaatggggaacaatattgatttttttggcctatgaatatataaggacccccaaaatagagctaaatgttattgtaattgtagcccaagaagtgtttatattacttaatttgactatgggttcagtgtttacactttgtttagcaaaatgagtctctgctgctcagagactcattcttcttgttaaaaagaattaactactctttggataattttgcaaagatgattttcattgcaatatgtcataagctttacttcaaaaaataacttcttttagtatgtttcggaaagattactgaatcaagaaagtacaatttaacttaaaattaagaaaatccctaaacaggttctataggagggtgttgaggaatgggaatgctttggtactgctttgttaacagcacctcgaacagtgcctggaacacagtaggtactcagtgttagtctagtgaaagaatagtgaataatagaggtaatttttcttaattcttcttacttgagtatagtaaagtgaaaaaaaagtcttaccgtacaagccagcctttatctaaaagtgatgagaactttacaggagatttcctagtaagagtaagaaaagcttctgagtttttctgggttcgtttcgtattacctccattccagtttgcggaatgggtacctgtcgaggctgagagggtgcagcttgtgttacaggtagtgctatgtgtgttgtttttgttttgaaattggaaacaaaagatggcttactcgtgcttattatcttcagtatgcagatgattatacttttgtgctatcctagatttccagcttctataggcccgattgagttaaaattctaattggatgaacatagggaggattaaaacaagcacaaataaagccacagatgtagagttaatgtgagtttcaaactactacttttactttattctaatctaagggtctttgaatgtataggtatgataaattcgagtttcaccatgtcttaagcatttttataaagcaagcaaacggtaacttctttagagcataagcataagggttctgggcacggtggcggcacgcccttaatcacacacagcattttggagggccgaggcaggcggatcacttgaggccaggaattggtgaccagcctggccaacatggcgaaaccccactctactaaaaatacaaaaattagccgtgtgtggttggcgcgcgcctgtagtcccagctactgcggaggctgaggcaggagaatcgcttggaaacgggaggcagaggttgcagtgatagcgccactgcactccagccagggcaactgagcgagattctgtctccaaaaaaaaaaagcataaggaaaaggaacaattttagttcctcataaccaattttcatatgctatattgaatctttccaaataaatgatattta

SEQ ID NO: 121514 - DNA, 1163 bp, Homo sapiens
gagaggcagtgctttctaggtagagagagtaaaataggggagcatggcatgtttggggaacttaagggaggacaataatggtgtcagataggagagcggtgcaagatgatactggaggtgacatcacatttatttcaaacaaggtcaatagccgggcatggtggctcacgcctgtaatcccagcattttgggaggccaagttgagaggattgcttgagcccaggagttggagaccagcctgagcaacatagtgagcccgtgtctgtacaaaaacataaaaaaatgatatgggaggattcttgagcccaggagggcgaggctgcagtgagccatgatcgtaccactgcattcccacctgggagtacagagcgagaccctgccacccaaaaaaaaaaaggtcatcagctgctacatggagagagcttcagagaggggcagcagattatccagttaggagatgattggaatagaggacaaaggtgattgatggtggctagcttgttcctataaactttcttttgatattctaccttttctttttttcactctgggggctctaacaagcctacctactctcttatacatttcttcatttttgtactgcacttgttcatatctagttttcttttccttttttttttaaccaagtgaattccttctcctatattttctcccgtttttcctgaagtaacttttttctgccttcctttctaatatacatatactactactttagtttgttttccttttcatttcagcctgtcttcctttatggaccttgtctactaggttgaaaagagtgatgctaaactgttgcatgcaatgttgttctctacagataccagcaaaaatgcttctgtctccaaatgaaaagtgttttccatttcgccttagccagtcttttatgttatatataaactcattgcagaacccaatcagtttgccagttttactggagaccgtaaatacctaacactgtctgttgaactagagcacagcttctcccaaacgattggcattccatggaatatgaacagggtttctagtttctgcctacttaggggaatacacctctttttcttttgattgcattacttttggaaactacatcatggtgtcattccttatttactccttacttaagtatgtttatttcctgattt

SEQ ID NO: 121515 - DNA, 1188 bp, Homo sapiens
ttttcatgggaggatattttaattatgggtttttcatggccttgtaagttgtgaaaattctggctacaaaccctagttaattgtcatctcttatgattagggatttcctgtcttagttcattcgggctgctgtattgaagtccatagactgagtggcctttaaacctcacatttctcagaattctggaagctgggaagttagatcaagaggtccagattcagtatctggtaaggtcccactttttcacaaatggtgccttctggctgtctcctcacagaatggaaggggcaaacaggctccattgggcctctttgataagggcaccaatcccattcgtgagagctgtgccctcgtgatctaatcagctcacacaggccccacctcttaataccatctgtatcttggggttaggatttcatcatataaatttgagaacattcagaccatagcactgaccatggggtggatgtactttatttgtctttagttcaactcagaaagccagagccaagcttaagacatcagaattatccccactgcctcttcagtgagttttttgttctgttttgtttttccctagttcaccaagtcagagcgttgcccttcagcttgtctggttttcagtctgacatctcattttgctggggccttgaggttaacctaataaagcctgggttctaggacatcaggtttttggtcatagggtaccaagagagaaatgccatctttggaatttcatttagctctctgggttcccactttctaattgttaatggcttcaaggggtttcagccatgcacttataaaattttttaaaattcataatgagcacatttagtgttctgatctagagtttttcaggttgtcaagttttaaccacattgccaaaaccgaaaacgttgtttgtttttcttctgttaaaaggcaggtatcgttgagtttaagggagagtctagcagtctggatatagttctcatgaagaaggcaagcaaactatttataggtacttatttctagaatcagtgatcaaagatgagatttagggctgattttatatatattcatacatattcatgtgccctccgtttttattatagctttctaatctgagcttctttgtgtagcaagcacatgtatggatgattatgaattagtaaaaacagattttaatgtcttctttttctctt

SEQ ID NO: 121516 - DNA, 1057 bp, Homo sapiens
ggagatacagataaagagtaaggatttttttttccctcagatgttttataagaataaaacttctcattagaaaaacaatttctattgtatggaaatatttttaggagtatggtattcttaagaaaacatataactctttcacagtcgctttaaggaaagaaaaagcaattccttattgataaataattttactgttattttctccatcttttgaaatgtataaatatatgcttgtagtacatgtaaccttacaattaaaaattgactgtacaatggaaggcttcaaaataaggaaattgttttttgttttttaaaaaggcattctgttcaggcagcaatttggaaatccaccatttatcatgagtaagtgaacccagataagacccttgcattttgtatgaaagtttaaatactacagtatctttcttccccagttgtgaccaccacccctaccacatccatcttaggtcagattctcaccagagaaagcagaaccattataaatgataaacacaggtgtttacccagacagaagttaagcaaagtgttcattacactttgttaatctacttggaatgactgttgtgtaaaaattttaaatgatagttttaatagaactttttgtttgtcatgagatttgtttttaaagttcaacatctagttttttggccgggcacagtggctcatgcctgtaatcccaacactttggaaggccgaggcaggtggttcatttgaggtcaggagttcaagatcagcttggccaacatggtgagacctcatctctactaaaaatacaaaagattagctggatgtggtggcatacacctgtaatcccagctactcaggaggctgaggcaggagaatcacttgaacccgggaggtagaggttgcagtgaacccagatcatgccattgcactccagcctgggcgacagagtaagactccgtctcaacaaaacaaaaacaaacaaaaaaacattgtttttagttttttgatttattgatctggttttctgctggccaaaataaacaacaaattcagagatccacaaatatac

SEQ ID NO: 121517 - DNA, 1072 bp, Homo sapiens
gttgatattttcaagagtggtagaagtataactattttaccatggtaataccactggaattactttcttttcattagctaaggctttctttcctttcagttcatttctttgtttctctatctttctacccttaattttcaatctaagacaaaaaggaaaaatgaatgagaatatataaaatccataactaaataaacagaattatgtgttcatttattgtagggttcaacaaactatgatccatgggctaatcttgcgtgccacctaattcagttaataatttttattggaacatagccacatgtattgtttatggctgttttcatacaacatatgagtagctgctacagagaccatatggcctgcaaagactgtggtttggccctttacagaaaaagtttgctgattccctgaattaggtgaacatagaggataaaacctcagaatttaatataaggattgtgattgctacttatgtttttttccccttattttctgtgtagtgggacaaatctgctcagtgtggatgaagatgaggattctgaaacctcaaaaggaaaaaaggcaagtgttgcttaaaatattttcttcttttacattatatacaaaaaaattgttacctcaaaagatttaatatttttaaattataaaccccagttacccactttctccactccagaggcaaatggtgttcccagtttgttatttatcactttgggaatgtttcatgcattataaagaagagaaatatttccacctcccatgttacacaattggtaatatactgtgcatggtttttctgatcttcctttaacttaatatattatcttggagaccatctgtaagagttcataaaaagcacctcattgttttcagtgagtgcatagtattccattgtattatataccattaaccaattccacctattgatggatatttacagagttgtcaactttttaatttttttctaaaataatctgtaaattagccttctatatgggttattttgcacacatacaagcgtatctgtagaatgaattcctagaggttgcactgctttatcaggacaggt

SEQ ID NO: 121518 - DNA, 1095 bp, Homo sapiens
ttgcatctattgaagtataaagtatcaatttctgcctgtacagaaactttgatactaaggcaaaagttcttatacataagcacaagttgaaatgacagccgattgccatatttggctgtagtgttctccagatagcagcaaggcctgataagcaggggaaatgcttactttttactctctggagaaagctatcctaagatcctctaccctaattgtctcaaatatctttggaaagattcacatgaaaagaaagtaatacaataaacctccatgttcctacaaatttgcattgtctttaggaaaaaaaaagtaggcagttgaattattcttaaatccatgccaatgctatccaccatcattcccaatagctgtatgtttttactacttttaaatggttttcaaatagttgttgatagattgtcacattatagcatttttgactcatatttctggatctttttttacagttaaatcgtcgatctgaaattgttgctaatagctctggtgaattcatcttgaagacatatgtaagacgaaacaagtctgaaagttttaaaactttgaaaggcaacccaattggacttaacatgttgagcaacaataagaaattgaggtataggcacttcaccacacattcctacagaaaagataaaggaagagtttgacaccaaaaacttagaagctaataggcccaacctgtaccttttcttctgaatttgtctatagggccaagaggtagcatggtcccagtatgtggattctttgctttgaatcttaggagtaggattgattgcagtgtctcttgtttctgaataaaacattgcaagaaatactttgttagggtgggatatcatgattttgctttcatacatttagtagaatctcagtcataatatttgaagaagcacaatagagtggtgtggtcatgtctcctttaggaaatactaatcaggattgtctcaataggggacttaaaaatttcttattcctcctttttacaatagtgaaccaccattattggtaggattgggtatcagtagcaactcagaaatagggttgaaagtcacttttatttctgctgtctcaatttataca

SEQ ID NO: 121519 - DNA, 1673 bp, Homo sapiens
gtggcaaaatcagaaatagtatttaggactcctgatttttattttagtattctgctttattttttaaattttctcaacctccgcctcccgggttcaagtgattctcctgcttcatcctcccgagtagctgggattacaggtgcccaccaccatgcccagctaatttttatatttgttattagagacggggttacagcatgttggctgggctggtctcgatctcctgacctcaggtgatctgctatttttaaatttttctttaattggattggaaacatttgaaagacaaattcaggaaatggaaaactcccaaaagacaattgggtttatccataaattttttgttgttgttggtaaaggtttttgtgtgtttgttcagattttaaaagattttttttataaatgtgtatataatttttccgtgttcaagttattttttgtttcttgaatctgcagtgaaaatacgcaaaatacgtcattatgttctggaactgtagttcatggtagacgttttcatcatgctcatgcacagataccagtagtaaaaacagcagcccaaaggtaagaattctaattgtctttggttagtatatacatggcatcttcttcaataggttttcactttttttaaccatttttttcctttgtgaaaccttactgttttcactgtctgtagagagatatatctctgaaataattcatgacatgaaattatactattttatatctgcttttgagtaatcagattctgtaaatagagaatttttcactaagacctgttgtattgcattataatccagagaatctaagatgatactgaaactgatttacaatattgacctgaaagtgtttgactgagatatcttcagttggtagtttagctctgaagagtaaaattacagttaataccgtactttctttataaggcttataagagttcatagcatcaaaacaagtcacattagttttaaatgttggagaaaatgttattttgtagttgtagttagatttaggagttctcattgatcttgaaagtactgcttgagtcaaaataatgaaagtaacatttagggaaccatttttggaatgttacatgacctttcagttgactgaaattcttaggctacaagagttaaataaataatttgtttattgcattataaacagttccttataactagtaacattttaagatttggcatatattttagatactgttcttcattttttaaaaatgtaatatctagactgctcgtcatttagaagacacgtcctgaaccttgctatatttttctgtttacatagatgggctatcagatcttttacttaaaaatgttaagtaacctcatactttatgataaaccaaccttttgtttttgccttaaatgtattattgtatcaaatagtgttcacctgagatgcttgagaaacttaaaaggacaaattactgtgcagaccaaaaattggcttactctactgcaaagtatacaagctctctggcctacatatggcaaaaacatgagaataaacaataaaaggagagtaattaggggagagaaaaagagtagacacattcttatgccctgatcatactaatagaaaccattgctgataaagctgacttaatattctgataatgtagtctaagtttgaaatactaacttaaaccttat

SEQ ID NO: 121520 - DNA, 1031 bp, Homo sapiens
cgttaatagtctggaaattgggttgcgatttgttttactctaggtctcaacacctataacattttgcatgtgtattattgctcatttacataaaagattagattcagttcatatgaactagtttatactggtaaaatgtttctttaaaaacaacaacctgagttaatttgtatttaagaaataatcctaattgaaaaattcttaatgattaggggcagcaaagaaaactgtataatcaagtcagcaggacagattctacttacatttgtcttttatttattctgtataagaataagcatttcttattccaactgcagcatgactgtcactaaaaagattttgatgttcaaagacaagtcattgagagttcttcggttttcttccttcaaaaacattgaatgattttatgctacataccaggcatagatgaggtgcataaagatgaatatgataaaatctctaccagtaaagctcaagtttgattgcagtagagattgattagggtacagaaagacaagtaaacaaatgattacatgcatggttagggcagcagtagagctatacaaaatacgtgtagtaaaaactacagagaagggaacaagaatttataaaggaaacattaaaggagtttttgagtttaccaggtagaagaagaaactgcatgcagtaggaatcacgtcttcaaaggcacaaagaaaggctttaactaagattgttgcttccagggatttagcacaattgttagacttcaggtgagggtaaacacattggcttttacagcttctcctaaattttcttattttctgaagtcttaattttttttttttttttaattatagagatagggttttgctctgttgcccaggctgtagtgtagtgtctcagtcatagctcactgcagcctcaaacttctggtctcaagcaatccttccacttcagcctcctgagtaactaggactgcaggcatgcaccaccgcaccaggctaactttaaaaaaattttttttgtagagacgtggtctcactttgtta

SEQ ID NO: 121521 - DNA, 2170 bp, Homo sapiens
ggctgaaattacaggcgtgtgccaccatgcccagctaatatttgtgtgtgtgtgtttttagtagagatgcggtgtcactatgttggtcaggctggtctcgaactctttacctcaaatagtccacccaccttggcctcccaaagtgctgggattacaggcttgtgccaccacacctgtcccattttgagagaatttttgaagttgtaaatgaggtcattgataccagaatttatctattagtctttttcccttttcttttgttttttttttttttaattttaaggccacagttatagtactaattgaaggtaatttttcttttctatattgtatgaaatagtccaacaagaatgtaagttgacatttttacaaagtcctacattactaataatgacttttccccggttttatgttttattttaacatgaaagcaactctagggcaggacttgataaaaacacatattgaaggtacctgtaagaataccatgacttgttaatcagatacattataatgaatgcattttttctcaaggataagaaaaatgagcattgatgtgtctttgtgtgtgtagtgtgtgtgtgtgtgtgtgtgtgtgtgtgtgtgtgtatatatatatatatatatatatatatatatattttttttttttttttttttttttttttaactgttttccttttcctaactcccttggcttattgggaagtattatacctaacccgtttcttctacctctgtttttctacctatttcctttcctctgtacaggtgagtataaaaaacaacagaggccggacatggttgacttagacctgtaatcccagcactttgggagggcaaaataggaggatagcctgagcccaggagttcgagaccagccttaccaacatggcgaaatcttgtctccataaaaaatacaaacattagccaggcatagtggtgcacacttgtagtcccagctgctcaaggtgggagaatcacctgagcctagggagatcaaggctacagtgagctgtggttgtgccactgcactccagcctgggtgacagagccagaccctgtcatctcaaaaacaaaaacaagagagtactaaactgttcttattttttgggcacagcagtatagaattggaagtggctacattaggtattaatgcctaactgttggttttcattttgctttttctggaaatgcagctatataagaaataaatacataggataggacagactagatttaaacttttatgtttatattttgcttcgcttctttaatagggatgtgattatattcccttgtttttctgtcatttatctaacctatgtgttttttagtagcaaagataaaatttcagatatattaatgtacatttataatattcttttccttttgaaaattttttttaaatttgtatatttttaatgtgttcatgtaaaaacaagttactatattttttttcttcatttgctaggattaaattggtattttagttgcatactccacatgataggagtataagaattgatataggaatttggggattttgtaaattatgctttgcttacagttagttccaaatatttcattccttttataataaggataaataatattagacatgaatctcattttattctaaattgagggcttatataatttcattctcgagtaattgatgttaatagctttttggagttttcatgaactatggagaagggtggaacttttatacattggacttgtgataagaagccaagattttaaattataggcttttccttgtgtcccaaatcatataccatatttaatctaagacttttgtgcaaaaatttcagccttaaaaaattttttttcttactccaaaggaaataatcatacctgatattaggatcagtctggaaccagtaaaaattttataacttctaggaaatgctattgtttcttgaagactatttctgtaacaacagtagtctcctccttatttgtggtttgatttaaccattcccttattagtagatactgaagttgtttctgaatttgctatgataacattattgaatttttcagatattgagaattatgtccaggtgagggaagtacatactatttataaaagtacaaaggaggtaccatggcattaaacatgaaaggacaagctaactcttct

SEQ ID NO: 121522 - DNA, 1397 bp, Homo sapiens
tggtatattggattcggtactatcatcagtttcaggcacccattgggggtcttggaaaggatcgttagagaatagcagggaatattgtattctaacatatcttcaagtatttgatagttaaagcccttttaagatttttttatatttttgtgtattcatcttcctgtttgtttattttgtatattgacagaaatcgaaaaacaatttagacatgactcaaaacatagtatattatatatatataatgtatttaaaacaagttgatcacagtataattttgccttaatgactatagttactgcaactacagtgatatatcaacaatgaggtcttgcctcttatattttttttctttttcatgttttaagcagtctggaccgaaaagaaaggtaagcttaatattgaagaaattagagcatggatatagtggtaaaatataaaattatttatatgttttgaaaaatattggttgaattagagtttataattaaagctttttttaattttaaagttttagttgacatgtaataattgtacatatttataggatacagagtaatatatcaatacaggtatacaatgtgtatgatcagatcagggtaattagtatatccatcacctcaaacattttttgttcctttgtgttgtcagcattcaaagtccctttttctggctttttgaaaacataaaataaattatagttaaccatattcaccctatagtgccacagaaagtgagaactcattcttcctgtctagctgtaattttgtatttgtgaacccacctccctccatcctctcctcccctacccttcccagcctacagtatccacagttctactctctataataaaaggaaacttgttgacagtacaacatggtatttggcttatataggtggtatttgaggctcattctgaatgtacatttttctataatggttatatatatttatgctaataagtgactcctttcttttaaaatagaatatttcagtgctttagtagtaaaattgctttcagttacatcatcaaaatctttatcattatattttagtgataatacccttgtttttatgctttaatagactgggggagggagagggaaatgtattaaacaccttaagcttagagttaaaactttaaacatcaagtgtattctcttctgactgaaaggtttgtaagagaattttgtgatcagtcttctatcattatttgttctctttgtaagaacactggcagacacatgttgttcttttagaggatatttgaatggtataaatggcatggaaaagtgtttaagaaaacacacacatttctttgaacatttcaaagtaaaatgatcataattgttctaaagtgggtatccataagagtagctggactgggcaaggtggct

SEQ ID NO: 121523 - DNA, 1002 bp, Homo sapiens
agatcaccagtgtgaatagaattacaaataaatagcctcttttatttttatgtggtttatttagagtaggaaagtagctattgtagctccctggtctgttgcactttttgtagttccccttctgtgatgcgcttttatacaattagctataaggtttttgctttttttccccccaaattttgcttttttcccccaaaattagtgttgtgtttaaatagatacagtatttggatgtagtatttagatatagtacttagttactaaggattatgtttaaaatccttgatattgtgtgtatttgaagtttaagagaggaatttaatactttacaacaaacatactttatagcccctgacataatgtaatcatactacaagactaaatacttgttccacgattgctgatcttgtacgtaacgttttttgttctgattttggaattgtcctcaagacaatctcattcaacatttattcctttatttattaatttgtttttaaacaactaaaaaatacagtaaaattttacaaattgagtttcatttattggtatagttttgttattttatagtatcactttttatatggcaaagaagctatgatttgcttttaataggcttattgtaagtatgccattaactttttcattttgaaaactgtatttcctgttagaataaaactacataaatttcttttttaggaaagaatacccacctcatgtccaaaaagttgaaattaatcctgtaaggttaagtcggctccaaggtgttggtaagtgtgcagttttgttacacctgtgaaggatttcaaattgctgtatgaaaagtacaatggagatacgatgctggctttagaatattcccaggtataatagatatatatgtagaaaaccatttttttgtaactgatttgagaatttcttcaatggtaacctgatacctggaacagttgcacagttaggtgattacagtttgaaatcttttgattattttagcatttttgctat

SEQ ID NO: 121524 - DNA, 1679 bp, Homo sapiens
aatcatggtgagtaagtatttatattcatattgaaatatttttcaatatactggttattaatccaaaaaataaaataagggcaaataacatttataaaaaatatatcatcataaaatcagttttcattatctggaataatgattcttaatgtgtgtccatcttgtttttctgaggcctttgtttgtttaaatagctctgatggctcttacttccaaaatagaataatttttaaaagctaggtttttctgatagcttagaatgtgcttttaaaaaacacccacatttttttttctactttgggtgaaaatcttttgtgcatgtattgaacatttctctatttcataaagagaatattccaaacatttcatcctttcttaataatgaacagtctttatagatgtgaattattatactttacatactaagcatagttaagcttactaagtttattaagtttagtaatagtgactactctcttcagcatttattctgttataccttaaatgtttattgagctcttactctgctatatgcttagtccagtgctttgcattcattatttacttttatcctagctttctgttgaagatccctataagctaaaaaacttcctcaaggacatagggctagtaaatgacagagctggtattggaacccatgtctgtttgatgccaaatcccactcttaaacactgtacattactatattcttgctctgtcacaaagaaggttactactaatcctcagaactgtacaaaaggtattatttttattttaacaaatgcatttctggcctggtatggtggctcacacctataatcccagcactttacgatgtcgatgcaggcaatcacctgaggtcaggaattcgagaccagcctggccaacatggcaaaaccccatcgctactggaaaaaaaaaaaatacaaaaattagctgggcatgatggcacatacctataatcccagctactcggaaggctgagacacaagaatcgcttgaacccaggaggcagaggttgcagtgagccgagatcgcatcactacgctccagcctgggtgacagagtgagacttggtctcaaaagtgaaaaaaaaagcatttcaaagatgttaagtgatttggcccactaataatggttttagatgcctatcagccaggcttgttaccaataatttttaaagtttattcaacagcattcattaagtaaataagcatattcaagttaagagaaaaaagagcatgcttatttactgttcttttaacttgggttttgtttgtttgtttgttgttgttgttttttgagatggggtctcactctgtagcccaggctggaaggcagtggtgtgatctcagctcattgcaacctccgcctcccgggttcaaataattctctgcctcagcctcccgagtagctgggattacaggcgcctgccaccaagcccagctaatttttgtattgttaatagagacgaagtttcaccatgttggccagactggtctcaaactcctgacctcgtgatccacccacctcggcctcccaaagtgctgggattacacgcgtcagccaccgcgcctggcccttaacctattattttgaaataattttagacttagagaaaatttgcaaatttaatacagagacatacgtttattttttcacacagcttcccttaatgt

SEQ ID NO: 121525 - DNA, 1002 bp, Homo sapiens
acatgtatgcttgggtgtaggataaatagcaatgctataataatactgtatatattgttatatgaagattgcattttatttcaagatttcctttggagataacttttaaaacattgagatttcaaaccacaagatcactaattacttgcataacacttagcataattttctcctaaacgatatcatggtctttctatagttaacactcaaggtgattttctttattgttctctttgccttctttattttgaatttgaggcacttagtatatttttttataagttatagccacatatcagtacttaccagcatgataagcagttctttactataaaattaaagtttgtaaaccattaagtgtaatttttggtcagaccacaagtcctgttgcttttttatttagttgctttaaaaattttttctaaacatacagaataacaaccgttaagatctcatttttctctccacctactctctcatttgtttcttaaactcccttttttttcagcctgttttttgtatccttgttagagagaacagacatatattgtccctgaatgtacatttaattatattcttcatgtaattacattatgtaattacaactcaatcacctaatttagcactgcttaacacatgttaacttttgctttttgttcgtttttgagacagggtcttgctctattacccaggcttggagtacagtgacatgattatggctcactgcagcctcgacctcctagtcttacatcattctcccacctccaccaagtagctgggactgcaggcgcatgctgccacatccagctaattttttgtattttttatagagataaggtttcaccgtgttgcccagtttgctgtcaggcttctgggctccagcgatctgctcgcctcagcctcccaaagtgctgggattacaggtttgggccactgctctggccacatattaactttcaaccagtcatggtagctgttgttaatattttaatatataactct

SEQ ID NO: 121526 - DNA, 1067 bp, Homo sapiens
taggtagggatcagaattttaatgtcatttttctctacctattatcaattaaaattttgaattatatcaaagctttggacatttgtttccctctttgttatgatggtagagaaaatgtgacatagacatgatgttataggtatggtgaagagaagagtgtgattacataatcaggatgaaatgatattgtttttttaaatgtcagtctccaggatgcagcagaaaactaattagatacatgtttgagcaaaataatgtgcaaagatactgtgtggcttaaaaagattaatgaagtatgtttataaggaaaaagctttcctttgggtacattatcaaatttagtaaggccaaaaaagcttgtaggggcttatgttttaagactgctttactgtaaattaagtttttcaaataattggttgtgtgtttcagacaactgtgtttattttccgaattccaaaatgtctgccttctttttatagtgtcacatcatagctcttcaacaaagtaacttagccttcataaaaataatacctggatgctctggactggagcagctgctctgtaacctcagattttagatctcgggagaaaaaaagcactttttagttactctctggccagaggctaagtccttaattgttctatatctgtgtatgaatcattatctctgtgtcacaaaggtaatgccattttcagagatgacatagtgacaatgtctcttcctccgacccctgtaatttcatttttttatgtgtcatatagttttatgtttctcatgtaattcattaatccaggaaacatttattaagcccttgtgtagtttctagatgctgggaaaacacatgactaaaacgtaatttctgctcttcccagagctggcaatacaatgggggaacagaagtacaaataacaataaaatgagagctgtgaaaactctagggattaattgtgcctagagtggggcagaggcagcttcttaacaaagaagagtttgaattcaccacataggcagagcttcacttgtgaaaagaacagcatatgtgagggtaaaagagagaacacatgaa

SEQ ID NO: 121527 - DNA, 1146 bp, Homo sapiens
ccagcctgggcaacatagggagaccctgtctctacaaataataaaaaaattagctgagtgtggtggcacgtacctgtagtcacagctagtttggaggctgaggtgagaagatcacttgagctaaggtgtttgagattagagtgagctatgagcatgccactgaactccggcctaggtgacagaatgagaccttgtctccccaaaaaaaaaaaaaaaaaaaaaaaaaaggggaattgtgagtatgtgagtggttaggcacaggaagggcttctgttaccttagtagaacaaaataaagtgaagaggatattgatacacttgatgaagtggtccatatgtggagatcctgctgaggagtgaaaaataaataagagaagagtaatccaggatataattattggtttagtcttatgttctgattatttttttgctgaaacactagcttattttaactaaaacttaaagtttatttttttctccttcctttagaacgtataatgaagaaaacagaagagtccgaatcacaagtggagcctgaaattaagaggaaagtacaacagaaacgacactgtagtacctatcagcctactcctcctctatctcctgcttcaaaaaaatgtttaacccatttagaggtaagtagagaaattattctttgttgctaatcagattgtgttttgattaatattagtttcagtacttattaaattctaggtgatcttttatcataggaccagaagagacttggaaaacttatttaggcagctttttctgccttcagtagaccatttttatgcttgttcaaaatatagaatttatttttctgtaaagaatttatcagtgcttccctgcaacatacttcaaatgattgctctctgccagaatttttttcaaataattttaagaagccaaaaagttacaaaaaatagtagaagaaaatctatatatttatctcccagattccttgttgttcacatttgctttattgtcctcactctctatgcctttttccctccttcctcctgcctacccataaacgtgtgtatatgtatttttttgtactatttgagttgaagttgcaagcatgatgcccatttaccatttaatatttaagtatgtgtgtttttggttttttataatcagaata

SEQ ID NO: 121528 - DNA, 1170 bp, Homo sapiens
gctgatggaaggcatatggtaatagctcagaacatacttctgttcatattttaatattggggattttaatagtaggaatgtgttttttctgttttagtatcaattttatgagaggaaacagcacttttccatggaattcttttcatttagatttgccctctttacctttattatagatactaaagtaatggagccagtcagtactcagcttgatcatatcctcagattcttggagacagaattattttatatatagctgactgctagactagatagtcttgaaaatttcttccagcattttgatattaaatcccgactaacattacttatttaggctctcatggtagccatgatggtaatgatggggaagagagggacttaattttgagactttgaggggattccttaatgatgcagtaaaatgccaaaatcttttatttcttttgttcttttggaacttaaagtttatgaacaccgtgaatgttcaaaatgtggaaaggaaaaagaaaatcagaccaaatgccaaagttgtggtgttcttttttctaaggatttgcaaagaaattgcagacaagctattactttgaatgagtctactggaccattattaagaacgtcaattcatcagaattctggaggacagaagtcacaaaacacaggattaacaaccaagaagttttatggcaacaatgtggaaaaggttccaattgatattattgtgaattgtgatgacagtaaacacacttatttacagactaatggaaaagtcattttacctggggcaaaaatacccaaaatcacaaacttgaaagaaaggaaaacaagtttgtcagacctaaatgatccaagtaagtattttactccctttaatattgcttatatcaatccagtatttttcagatatatttttacaaccactctccccaaccccatatatatttttaatataaatgtgagcttaaaactaatcttgttctcatcctgtccatcttaaatagttaaaaaaaacaaaaaaaagaaccacagaacttgaccctagtcttagatgaagtgctagttataaccagcattctgacttcggccaggttaatttaatctttctgatctgtaaatgggtagatttcctgctgatagtgggtttttttttttgtgggggggggggtgcctaaa

SEQ ID NO: 121529 - DNA, 1553 bp, Homo sapiens
ctcttatgtgtatgtgtatggcatgcagtccttgtttataataaatagcaaaagattagaaattattggggactggttgactagagtatacagcgtgtatactctaaaggagtgaaagatctgataaactgtgtaatttccaagatccttaattaagtgaataatgcaagctacagataagagtgtatactgtggagaatgaacataatttcttctaaaaaatagaaattgggcacagtggtgtcccaactactcaggagactgagatgagagaattgcttgagtccaggagttgaagtgtagccagggcaatatagtaggaccctgttgctaaaaaaaaaaaacaataataataattataaacagaacactaggctttccttttaatatatacttgtgtagtttttcattaaaaatatagttcatgggcctttttaaaaaatctatatacatgtacacacatacgtctgtatgtatatatatatacatctatatatgtcaggtactgtgctaagcattttacataccatttgttcttgcaacgattctgtgaaatagatacccttattgtccctaattctacagagaagagaaattgagccaaataaccagtaagtggcaaaaccccacctctcaaatgctatatatgtaaatctgtttagatcgtctaatctggcctgttaggttttctgctaataaaagaccagtgttgaaagagaaaccatgctcaatatttgttcctgagactggacagtaaaattaaaaagacaggtagagaaatactgagatgatacttctctgggacatgtacattactcagtaaaaattaagcatttatgtttgaaatactaataaagtcaacgcatgacttttgaatgctttttctgtgtcaggctgtttcaggcctggggatatagcagtgaataagacactgtccctgttctcttatagtttatgtgtagcagggagaaacagataaacaagtgaacatccgcaacaaggaacaacagaaaatttaaatcagttaatttgactgtgtgtgtgcttactttattgggttatcaaagtgatatttaggctgggcgcattgggtcatgcctgtaatcccagcactttgggaggctgaggcgggcggatcacgaggtcaggagatcaagaccatcctggttaacacggtgaaaccccgtctctactaaaaatataaaaaattagccgggcatggtggtgggtgcctgtagtcccagctactcgggaggctgaggcaggagaatggcatcaacccaggaggtggagcttgcagtgagccaagatcgcgccactgcgctccagcctgggtgacagagtgagactccgtctcaaaaaaaaaaaaaaaagtgatatttaaactaatacttggtggccaaaatgcataatattgagggaagtagaattcaggcaggagcaagcttgtggtgtttcagggacagaaatactggctagtgtgcctggaggataaagagacaaaaacagaatattatgagaaaattggataaataggcaggggccagattatg

SEQ ID NO: 121530 - DNA, 1187 bp, Homo sapiens
tataagtatgatatatataaaatatgatatataaaatatatatacgatatatataaaatatatattatatatatatacttgactacatggagtttcacacatatttacaatgcattctattttgtgaacaagttgtatgcaaattattttttacaccttaaattttttgggactctgaaatagacctactgttcttcttgtaacttgctgatattgctgtttgggtgagtggtgatggactgtaaaatcaaattttatatttgtatcatattttttaaaagataccaagtcttaatgctttcttcagatttaactttttatcagatagagtggattgtatcttcattcatttttattaattttagatctggaggaggtccaaagcaaatttaggatattttccactttggtaatttatttgcatttttaatggacagaaatgaaatataaaattataactatagttttaatataaattataaattattaaaatacttttagtcattttgtccagtgatgatgatgatgacaacgacagaactaacagaagagaaagcatatctcctcagcctgctgattcagcatgttcttcccctgcaccatccactggaaaagtagaagcagcgctaaatgaaaatacttgcagagcagagcgtgaactacgaagcattccagaagactcagagttaaatacagttacattgccaagaaaagcaagaatgaaagaccaggtacttttcacttttgttgacatttgttcagattaatgcctccattttggggtgtaaattttttttagaaggcagtttggtagtgccaagaaaaaatgatggattattaagtggggcttaaataccacatgggagattatttggaagaacattaagccatatacaaaaataagtttcaattaaacttaaggcttgaagtataaaaaattcaacaagaaaacacagtatcaaccttaaaataaaatgtcagtatgtacaaaaatttcttataaaatctagcagaggagagaagtcattttgacagagatatattttactgtaatactatgtttcattatgttttatattttactataaaaatttcaaaaagttcacatggaaaaaggtaatatgaacgatgtcaatagacagtgtatctaggacaactatttgtaatgcagatgacatagtatttta

SEQ ID NO: 121531 - DNA, 1355 bp, Homo sapiens
tttacaagatcagattttttttttttaagaaggaatttcgatcttgttgcccaggctggagtgcggtggtgcgttctcagctcactgcaacgtccacctcccaggtttaagcagttctcctgcctcagcctcctgagtagcctcctgagtagccgggattacaggcacctgccaccacacccagctaattttttgtacttttagtagagacgaggtttcactgtgttgggcaggctagtctcgaactcctgacctcagatgatccgcccatctcggcctcccaaagtgctgggagtacaggtgtgagccactgctcccggccaagatcacatctttaaaaggtggtgtggctgtttgaatccaggcagtctgattcccagagtactattcctgaatgccatactattactcaaatttaaataacaaccaaagtatagctaaataagatacaaggatttactgttatataaaaaccatgaattttaattttatctaacactgttgaagggaaatccattttatgttgtgatatttacatttcttatattgggtctttgcatatgtttatacttagcttgcagccttattttagtaaattattaagtgaacattttcttttcctttttagtttggcaattctattatcaacacacctctgaaacgtcgtaaagtgttttctcaagaacctccagatgctttagctttaagctgccaaagttcctttgacagtgtcattttaaactgtcgaagtatacgagtaggaacactcttccggctgttaatagagcctgtaattgtaagtacatcttaagctctttactataccaattataacattaaaaattccgttgctaaagctaatatataatatttaaaatttataagttaaaatatttaatagaatatcagttagttcaagatttcacattgctttaagagtatataaatagtagctccttgccattaaaatgagttagaaaaccttccaatatgttattgtttattatcatgccagcttcgtgcatgaaactttcaatgagttagaaaaccttccaatatgttagttttagtatcatcccagctaagtgcatgaaaagaatatattaaagaactgtagtgagtgaatgaagattccagaagttttggggtttgctggaaaatgtattatagcatcaagactcctagaaatagattattgtactataatggctgcccaaaggactttgtgtactttatcttacccatcatacctgtgtacttactattctgccaccaatccaagtttttattttctatttgaaattttaatataatctccttaactagccttcttagtcattatttttttctctaat

SEQ ID NO: 121532 - DNA, 1099 bp, Homo sapiens
aaagtgaagcctgcctttctttgtaagtctagagcaatactaattcatctttttttttagttttgtttagattttatcaagatacagctagacggtaagctattttatgtctttttacttaccaaagctttctttacaccaaagcactttacaggaataaaagattaaataatattcatagaatttattaagatggttagttgttacatatatcttcttatcaaagggcatatatcttggtgtaatttcattcagaaatatcacagaacctaactttttagaaaccccttttcatttggaaaaaataaaaaagtttctttaaggcagttataaagattttttttattacccacaagagtaatgatttatagagcataataaatatgtgcttacatttacttaaacttgtatttcctcacaatttcccccattcatgatattaccctcttaagaattatttttccatttcatttgttttcctccagaaccagaccatgatcctgtagagattatattaaatacctctgatctaactaaatgtgaatggtgtaatgtccgaaaattacctgtagtgtttcttcaagcaattccagcagtttatcaaaagctgagcatccaactgcaaatgaataaggaggataaagtttggaatgattgtaaaggagtaaataaattaacaagtaagttgtgtaaaacagattataatagataataatagatactgtatttacaatatctgttaaatagcaaaatgtgagtgcactttgacagatgccttaggtgtatattatctacaattgtcacagccaccttgtgaaatagatattactttctccattttacagatgaggaaaaactcacagaaagtggaagggctgaagataaaacccagacttactcatttacaaagtttctaagtggattaaaacccaaaagatctgcactcttaactaacactgtaatctgagtaaaataaaattttttaactgataggaatattaaatgtaaatcagccatataaatctggaaatcttgaaacttggcctgaataggaagttgttaagttcctaaaatgggccttaagtctttataatacata

SEQ ID NO: 121533 - DNA, 1365 bp, Homo sapiens
ttggtctgtcatgcccaggctggagtgtagtggtgtgattttggctcactgcaacctctgcctcataggttcaagtgattctcccacctcagcctcccaagtagctgggattacaggcactcgccaccacacccggctaaatttttgtatttttagtagagacagggtttcatcatattggccaggctggtcttgagctcccaacctcaggtgatctgcccacctcagcctcccaaagtgctgacattacaggcatgagccaccgtgtgcagcctaacaaggtttttggttttttgtgtgtgtgacagagtctcactctgtttctcaggctggagtgcagtggctcaatttcagctaactgcatagaatgtgtccttgttttaaaacattagatctttatgttataattttattttcaaatagcaattttcattgcctgaagataatcggatagttatcaaactttgctaataacttccttggttctaaagaagagagattgatggttctaaagaaaaaagatttactgagtttttaatacaaagcgaactgtggccgggcgccatggctcacgcctgtaatcccagcactttgggaggctgaggcgggcggattacttgaggtcaggagttcgagaccagcctgaccaacatgggggaaaccctatctctactaaaatagaaaaattagctgggcgtggtggtgtgtgcctgtaatcccagctacttgggaggctgaagcaggagaatcacttgaacccaggaggtggaggttgcagtgagttgagatcgctccactgcactccagcctgggcaacagagtgagactctgtctcaaaaaaatagaaataaataaagtgaactgttacattaattatatttgaattattttctatcaaatagatacttggtgcttgaaaaactgaagaaggaagacgctgaccgaattcatatattcagttcttttttctataaacgccttaatcagagagagaggagaaatcatgaaacaactaatctgtcgtaagtcaaactctgaaaatatttaacagatgtaagtcactcacatttaactaagtgaaaaatcacgtacttgaaagaaaacacaaatctctgcagttctcttgcttactttttaaattctccagccaggaagagaacacactaaataaatcagttccattttcattcttcatgggttcatattcaccttccttaaactaactttgtgctagttttggaattttttttaacaacttatttatattgaggcaatatcatttagttctcttatcagtttacaaaattaatataattcataatattctaatactttcagaatacctggaatttataaatgttctgg

SEQ ID NO: 121534 - DNA, 2011 bp, Homo sapiens
cttatttcagcaattcctaatgttgcatcttagaggtgataacagtcattggttttgaccagtgctcatggctatattgcttcatctaccatcagataatgctcacttttcctactgtcttctccccagttaccctaagtcgtgcttggctacacctctcaatatagttgccaggaccaattctgcagtaataaaaatagtaaagagaagtctaggcaagataagcactagaacttccacccctcagatggagtaacaggagtaaaatatctttctccaaattcaacaatgggtagtcccatgccttcctagtttccatccaacaagttctattttctttccccagtttgtcaaaccattttatgcaactgtttgagctattacatctgaatcttcttaatttataaatcactacatataagctggagcactagaaatatttcagaagcttataatttatctctttcttacagaatacagcaaaaacggcatgggagagtaaaaacatggacccggcacgtagatatttttgagaaggattttatttttgtaccccttaatgaagcgtgagtaagaatttcctttaaaggaaaatctttaaatcatgtaaatgatggcaatttttaaataatgagtatgaggtgaagaattcattttaaaacatctttctgaaatctcttgtgtatattcatatttgtactgcctgttttacaagaattaatgcagtttcacagtgaagcatgtaagatattgaattttagagacaatagaccagatacctttctaatctcattttattcattaatgtcaaataataccatttttaaaaatatggtgcttattgtctagcaagtaacctatagaaaagtattattttatacaaaaagatgattaggtcacataaaggaattggaatcttaagtttaaaatacacttctgtttttagccagaaaggagaaacgatggttggatttatgccatttttcaattaaaaaccatgtggactacttgaagcagtttctgagtaaatggaggtgtttaaagatttgtattattctctcccaatgactagatagtagtattttacaatggagacttaaaagttttttgtgttttattctttcgcttttctatgccctcaatccaaagaacaccagaaatacacttgtagtcggaaaacttgggtttatcacttgcatcaaggaatgacacacaccatgggccactctggagcctctcaataaaaggatgtttcaaagaacctgtgacagaatctgggctttccttgagtgatatgggggagggtctaaagtagtggtttgcctaggtaaagaagtagcattcactcattaataaagaagaagaatgttggctattttgtggtttccaactgtgaccttatgtttttctctgcttagacaaattatgatatggccctactttgtctcattctatcatggttgcagaatatgctttcctggagttggtattctatgagattgtttatgtctaataagcctagctgtgccaagctagcttctgaattttttttttttaacttttgtagaggtgagggtctcactgtgttgctcaggctggtcttgaactcttggcctcaagccatcccccaacctcagcctcccaagtagctgggattatagacatgagccactgctcctagcaaagctatatatttttaaattcatattatcatagtaaaatttaaaataacatttaaaactagttaatttcttcattctcttcaaaataaggttttggctgggcgtggtggctcacgcctgtaatcccaacactttgagaggctgaggtgggcggattacttgaggtcaggggttcaagaccaacctggcgaacatggcgaaacctcgtctctactgaaaatacaaaaattagctgggcgtggtggtgcgtgcctgtaatcccagctactcaggaggctgaggcaggaggatcgcctgaacccgggaggcagaggttgcagtgagccaag

SEQ ID NO: 121535 - DNA, 1174 bp, Homo sapiens
aaaaaaaataggctttttttttttttttgagatggagtcttgctttgtcacccccaagctggaatgctgtggcacaatctcggctcactgcaacctctgcctcttgggttcaagtgattctcctgcctcagcctactgagtagctgggattacgggtgcacaccactgcgcctggctaatttttgtatttttagtagagacagggttttgccatgttggctaggctggtctcgaactgctgacctcaggtgatccacccacctcagcctcccaaagtgctgggattactggcgtgagctactgcgcccggccagaattaggcatttttaataaattaattggcaagaactttagaaaaaaacattttaattgatatgtattgccaaatataataaacttttctaataacatatttagtcatttcatttgttttttacagtgcacactggtttttggctgttgtttgtttccccggtttggaaaaaccaaagtatgaacctaatcctcattaccatgaaaatgctgtcatacagaaatgttcaactgtagaggacagttgtatttcttcttcagccagtgaaatggagagttgttcacaaaactcttctgccaagcctgtaattaagaagatgctaaacaaaaaacattgcatagctgtaattgattccaatcctgggcaggaagaaagtgaccctcgttataagagaaacatatgcagtgtaaaatacagtgtgaaaaaaataaatcatactgcgagtgaaaatgaagaattcaataaaggagaatctacatcccagaaagttgctgataggactaaaagtgagaatggcctacagaatgaaagtttaagttccacacatcatacaggtatgtatctaaatgttttgaaagaatgaaaaaattcagaataatctggattttttaataaacaggattaagatcctgttttaaaaaaaaatcaggttaatgactgggtgtggtggctcacgcttataatcccagcactttgggaggccaaggcaggaggatcacttgaggccaggagtttgagaccagcgtgggcaacatagcgagacccaatctccaacaaaaaaaaataaatagaaaatttttaaagaatttacttataacaatatagtaacacaacttacttttaatttatactgaggtataa

SEQ ID NO: 121536 - DNA, 1147 bp, Homo sapiens
tcttaatcacccaggctggagtgcagtggcgtaatcttgtctcactgcaacctccccctcctgggttcaagagattgtcttctcttgcctcagcctccctagtagctgggattacgggtgcgcaccacctcacccgacctgttgagctcttgtaagaaatctcctgagcaggaaaatctggagtagattagtggctgctcggggcttttgggggtgggcaggtgaggtgggtgggaatgtaggaagagagtgatagctaagtggtatggggtttctttttgagatgatgaaaaggtttaaaaattggttgtgatgatggctgtgcatatactaaaaaacattagactgtatgctttaaatggctgtatatggtatgtgaattacatttcagtgtggctttttaaagtctccttttgaccaataatgttacatactttaatgtgaattcaaatgaattaaggtacttgacttaaagcaatgggacaaaagcctagggtttcatatacacaaactccagagatttctagtgccctcacctacaaattaattttctggtcaagtaaaagccagttaaatttgagtaaatagcctcaaaaatcctaatggagaccaaagccaaaaataacttgttttatgtagtttgccttcttaatacttgtatatcccatttactcatttttgaattatagtttgtacatttttgttttgtttttagtatgtgtataccatatcaactatctcttcctctgaaacaaatgtttcacaaaaaatcacatacagtgatttcacatagagtcaacaagtgttgactacttatgtcagataacaggctgtagtaaataagtggaaattaggtttttacagaaaactagggaaataacaatgtgtggaatcactactttcacttgctgttttttcacttgacaccttatgaaatagttgacttgccatggtgcatgaaaaatgtgtacgcttaaactctagaatcacactcaacatcttcacatggtctccttatatgagaagttctcaggaactgacactgattgagagaaccactgatcaagtcatcacctctcaatttactccagatcacttgtttatgggggaattgactgcatcatttaggttatttttctcctgtttt

SEQ ID NO: 121537 - DNA, 1047 bp, Homo sapiens
aatgttcatttttgccctgaattatataattttccacgttttcgaaattttaattataaaattatgcagttgcattttcttttatgttctatgacatgctgtttctgttattggacataggttattttcagactgtcatagctttcattactaaagatacctgacttgcctaacacaaaagtacttatttgtttacacatatacatatgtatatgtatttaagtatatgtatacttaatcatatagctgataactagtttttaaattttaatgaattttagcatctgggtagtggaaacaactgtaattgacatgtcaatccaggtttttaaaataacttactttatgtttgtgatattacacactaaggcagattttgtgttcttgactactgtatcattaattaactactagcattaatttcagcctcatatactatgagtgatagacatggccttttttattatgtaatgtttcttattgatacagatggcttaagcaaaatcagactaaactatagcgatgaatcacctgaagctggtaaaatgcttgaagatgaactcgtcgacttctcagaagatcaggataaccaggtaaaacttaatgcttggcaaaaagttctaatgttttatctaattaaaagtttttcttgctgaacatggtggtgcacacctgtagtcccagtgacttgggaggctaaggcagaaagatctcttgagcctaggagtttgagttcagcctgggcaacataaggaaactccatctcttaaaaaaaaatgaaaaaaggaaaaagaaaaagactttataaagtcttgtaaagcaatttcttcaactagtaatttatcatggcttctgaatttggatcatatcttaaaaaacaaattcagctttcaagtcagaagttgccaggataaatgtatacatgctgttgttgctgctactgtggtgtggactgaactttaatgtaatactgattaactcaccctaactcagctaccaccaccaatacccaccttcctctttcaaagcatttatgggtcatactta

SEQ ID NO: 121538 - DNA, 1057 bp, Homo sapiens
ctacagaattttagtataaaatatagctaagatatggttaagttaatattctataattcaatatttaatatatccatagatatttaagtattattagattataaggttcgtatgtgtctataaggttcattttttttccctcagtagtactgagtcatacaaaggggattttgaaggttttaaatttgattgtttataatatgccacttttaatccttttatgcatttgtaatattatgaagtattcgacttttggtcatttttaccctgcagaccttgtatcctacttatggactcactccgaggcccttctcggtcaaatgttgtcaaaattttaagagagtaagttcacactttatttcgtattctgatggggatgaagaactatgtatatttatatatgtgtgtattcttaatatatatgaattattgcaggtatttagaagtggaatgggaagttaaaaaaggaagcaaaagaagtttttccaaagatgttatgaagggctctaatccaaaagtaccacagcaaaacaacttcagtgactgtggtgtatatgtattgcagtatgtagagagcttttttgaggtgggtttcaatttgttggatctgctataataaataataaaatagtgcatttgactttaccttagtaaaaaacacaataagcaaatattttaaagagtttcaaaattattgtttcaaaaattattccatggagcaaaaacttctaaatggaagaaccttcaaggcataaaaatagtatatttacagttcatcaaatccaaggcttgttgagctcattctatcactgaacaatcaacctgccctctctactagctcttgccaccttaagaaatctctcccatgattcacactgcctcttttagcctcttttctcctcttcatagatacatttcttaagaagtgtttatattcactctctaattctacagattctacttctcaaatctctaaaatctggctttatccttaaccttatgttaaaattgctcttgactttccagcaccctttgacagtgtcaaccatttcttcct

SEQ ID NO: 121539 - DNA, 1663 bp, Homo sapiens
atttggtccactggcaaaccctgatctagactataagatctatgatagaaactgtgtcttgtatctccaatacctaacacagtacttggcatgtgatagataatacagaaatacatattgaatgcgttgttgggttttcttatttttaacttcggaatgtttctgtgattgaaatgaaaggttatttattacagttttctaatacgcatttaattgtattttcagaatccaattctcagttttgaactacctatgaatttggcaaactggtttcctccaccaagaatgagaacaaaaagagaagaaatccgaaacataattctgaagctacaggaagatcagagcaaagagaaaagaaagcataaggacacttactcaacagaagcacctttaggcgaaggaacagaacaatatgtcaatagtatctcagattgaccatttctgttacttgtcatttctactttcagaaactaaatgactttcaaatttgggtatagacaataaagaactgaagtgctcactactcagtgatttggaaattttgatgcttgtataaatgtcagataattaatttccaaaggcgtatgtattaagtaaaagtctgtaaatatgttaatgaggccaatttttccagcatttataattatttttttcacttgttaggaagcttttgttatgtattttctgttaatagtacctaaaattgcaacttctaaacacaaataaaaagaaaatatttataggaggaaatgattaatttgatattctttagtgaacttgtttaattcctcagtgggtgtgacatatttcatgggaatattcaaatatctatggtaatattttgaccctttatatttgttctaaaataagtcaaaatgtgaaaataatattaaatctaagatattttgaactaagcatctttatatgcttgtgtaacaggaacaaagtaacagcctttcaattcatatactgccttgtgttcagtgaacccaagaaatgtaataaatatttgtaattttacacaaatatttaagaggaaagagtattaagagcaattcaaaaaaagtaaccttatactactaaaaaaaaaattcttgcatatattatcatcaaatgcatttttgaagacatcaaagactcaggttaaaactattttggtaagtgcagcttgaatttcaaatatcccgtgttacctttctctattacagcttaaagtatgctacaatctgtgtcatatagttaattgataagcatttttaatctgtgtaaacacaggaatttaaataggaatttactatttttttataaagcttttgctattttttcattgctcattttgttcttattattttgataaagtatcagactttttgcttgagttcttcagtgtaaattattttttacatgtaaaagtactgtattcaaccagttgcataatacagcaaaaatctttgaattcccctttaaaataactaaaatttgatggtttccatgacagatttatagcacatatagggatcttgcatgtatctgcagaaacttcattatttttcaaatgaaatggtgtatacttctttcaaatgaactttgagacttgaaacatattttagtcattttttgttaaatattgaatttttaaatacacatatatcaaaaatagttg

SEQ ID NO: 121540 - DNA, 1070 bp, Homo sapiens
cagggttgagcagatgaataaacatctggctgagagaatttagcatacaaataaagtatacctctggatataaatgttataactgagttaaaaaaaaaacaaatatgtttcccagcttgtcttttttagagagtatggtgaaaatgagaaacaggtttggaatcaactgaataacacctgtggttggaaaccaaccatttagacattttctctgtaagtaggcttttttttttttaaaggagtgattttcaaacttttgtgggatcttctaaaaacatattgtttatttggatttgacactgatggaatcagtatcccgcaggagatatttgaggctcttagtttttccatgttgtattctttgaatttccttgatttgaggattgagttattccagagagaacttttctcttcttccttgttattttttttctaaaattagatgaaccagctgtgttttggtttgtgggcatgatttgctgtctgttatccttttggtcttagtatctgggggaagaacaaagaacctgtgtgtgttttgaagaagaatgtattagtttctctgctcttcttgttcatcttggttgatctttaagatgagaagaacgaagaaaatactttatgtacttattattcttgtgtttgatatttcaaacaaaactgtggcttgtattggccactgagatgatggagaaaacaggtgaatgtaaagtgaaaaactagtcatcatgtattcaaatggctaattgaagaggtttatgttaaaggttttctttcaggtatgggaggagggaaaagaaggatggaaattgaatgagtttgaccatatgaccagctgtcacgacagatgttttagcaaccaggaaatatttatttcaatcagaatttaattttatattttatagggatgcattctactaataagccttttttttggaaggaaagtgaggataagttaggaatttataaaccaatttggtgattttagtaagtcattagtaaaaatggagatagcctggtggctgcatatactgatgctagtatgttagaaaatgggctgttagaacaca

SEQ ID NO: 121541 - DNA, 1014 bp, Homo sapiens
acaggagctggatcagtttgtagcatcctcacagacatttgtgctggctgcagtatttttatttttttgtgtcatcttcctcaattcattctttttttttttttgagatggagtcttgctctgtcgcccaggctggagtgcagtggcacaatcttggctcactgccacctctgcctcccaggttcaagtgattctcatgcctcagccacctgagtagatgagattacaggcgtgcaccaccacgcccagctaatattttgtatttttagtagagacgagttttaccatgttgactaggctggtctcgaactcctggcctcaagtgatctgcccatcttggcctcccagagtgttgggattacagccgtgagccactatgcctggccctcaatttattcttgagtgttgcattcctgtctttaagtgagacactgaagcttttacattctgaataataatacatataaataaataataagaatgaatataaaattaatgtttcatttaaagtgatgtaaatgagaaactataatagttataaatagtatatggttcataaatacacatgatttacaaattcctttttttttttttttttttgaggcagagtctcactgttgctcaggctggagtgtggtggcatgatctcagctcattgcagtctctgtcttccgggcttaagcgatcctcccaccccagcctctgagtaactgagactacaggtgcgcaccaccacacccggctaatttttgtatttttgtagtcaggcttttgccatgttgctcaggctggtctcttaacttctgagctcaagccatctgcttgccttggcctcccaaagtgctgggacttcaggtgtgagccattgcccctggccacaaattctattcttaagcaattaaattggtggaaatttcttgcatttaaaaaaaatgaatttactacagaaattatattttgcctcccaaaacactttcaccatttttaaaaataatgaaataaggtttgttgccc

SEQ ID NO: 121542 - DNA, 1067 bp, Homo sapiens
aaaatcagagctatctattgtagtacttttttccctcttgaattgtgctttttaatcaaccttcattaatgagtactcactaggtttactcttttagttgaaaattcattacttaaaaatatcactgtaacacacatgtaaactgaatcgcttttaaatcagcttctagggtttacatcagccagggttttaaaaaagatggagttaaatgtaacctaacaattgatttttaggatgagtcaaagtgattcagattaagatagtattgctttattttatttgttttcttcaattctctaatgacatataaattttatgtcttaggttcactaatgtatttaaatgaagccacactgctccataatatcaaagttcgatatagtaaagacagaatttatgtaagtattttacctgtagtgtaagtttttgtggagataattatttcatgtggtactctttgattttgtcacgcttgaaattgtctaacagaaaatcatgcttgatctgagcctcttgaatagagtgtgaggttagtgaggacaaagatttttttctaatttacaactcgaactctaggagttaaagcatgcctggtacacagaaagcacttaatcagtatttgtgggatgaaataatgaattcagagtgtcgtttaatatcttttggacttaaaaatgtccagtttgagtatttttaaaagcactgtaatggtttttggttttgatttttgacttctggtatgtctgtagatatgtttgattcactttccacattgtttggaagacaatgtaaggcagcctataaggaatgtatattgaaattaaaaatttgaatgaggaaaaaaatgtaaatcagaataggaggtagtatctgaggaaatactaagaacacaggaatgctgaccatagagcctaaatagttgctgaatttcattagaccgtaggtactctaccttgaaagtccagaatattcaaaaatgaaagaaaatgctttcagtgtaaatagtcaaggtttacaccaaatcattcagatggatacttaacctagtatgttttaattataattat

SEQ ID NO: 121543 - DNA, 1814 bp, Homo sapiens
ggtcagttggtgctgtatttgcacttaatggtaaatacctttaagtttcattgttactttagatggttgcaggaatatatgtgtccactatgaccatctaaaagctcctttcacaatctaaaacccagatgctgaatttgacttcagcattgagtattactgtatagctagtcatgtaagatattctagcacctgtgttgaggtacggtgcaaggtcaattgtgattcttaggaggctcaaaacttaacaggatttgggtagagacttaaatggggatgtttaaaatgaaggatgaccattataaatactctgtgcttacgtttagttatttgttttttcccctttatttggtgaatattataacctctttgatagacaaatggtattagaaaaggtaaataatttaacattggttaattatattttaagactttaaatgcaaaaatatattttctctgtgttttgttttttagagctcagttgttggaggatttgtttcacattatctcctagagaaatctaggatctgtgttcaaggcaaagaggaaagaaattatcatatcttttataggttgtgtgctggtgcttctgaagatattagagaaaaacttcatttgagttcaccagataattttcgggtaggtcagaagaaaagaaatttcatatagccaggtgcagtggctcatgcctgtaatcccaacactttgggaggctgaggcggatggattgcttgagcctgggagttcgagagcagcctgggcaatgtagcgagaccctgtctctaaaaaaaaaaaatacaaaaaattagctgagcatggtggcactcacctgtagttccagctactcgggaggctgaggtgggaggatcacctgagcccaggaggttgaggctgcagtgagccatgattgtgccactgcactccagcctgggtaacagagcgagaccctatctcaaagaaaaaaaaattttgtataatttttgaaaatataattgccatcaagcctaatacttattttagtgaattttgaaatctacttgttgtgtgtatgtaacttacattggatcaagtataacatgttagaatgaccactgtactgagaagatctctattaaggtgtactgctgagtttatagtataacactgtatgaggaggcacataatggaatagataaaaggatagatgttaaaccctacgtcaatttaaactcaattagaaattgataatagctctgtaatactagctttaaagttacctttgacttatctgtaaaaatgtttgaacactaaattaatattaataaaggacacatgattgaatttcttaatttacttcaacaacaaatatttattgcttgcccattgggtgccaggcattgggccaggattaaaaagataaataatacacagtccctgctcttgatcaacttagatgtggtgggaaacgcacacacacacacatgcacacacacacacacacacacctgagcattacaagcgagtagagtttctaggagcggtgactggggatggtttggttaacacaattttcagattctcaggttagaaaacagtgtacttgtatggagtatgggaatgtagtttatacaaaggaatgcaatgtgagtaaggaatgtcgtctgtatagagttccccagctgattctgatagtcttttttggtcagaaagcctccatttgagaatcataacacacataattactgctctgtggttgtgtgtgtgcgtgtgtgtttgcagacagcttttcttttacttcaatttcttttaatgtgtgtttgcaaattttaaaagtc

SEQ ID NO: 121544 - DNA, 1050 bp, Homo sapiens
aaactgactctaaaaatcaaaaattaagaaaatcaaggatagaatttcttaacttctcagaatttaaaatattacttgaaaaattaaaccatactatcggttcttacttgagattctacatatttagtaggaaggtgattttcatgattttatacactatgtttagatttttgatactgaaaagatataaaattgttgccctttaaaagtagaaaacttttatgtcattgatttttaatcattttatttaatctatgctcagagattaggatttttaatattcctggttttattagtaggaagaaaatgcttataaaatatagaagtattgatttgaatggtgagattatacagtactcaagttgtgtttagaaattcttcatggttggcactatttggtaagttgtgttttctcctgtattatttccctgtggatcatatatgttaattatgtttaatttgttttgtcatagtatttaaaccgaggctgcactagatactttgctaacaaagaaactgacaaacagattttacagaaccgcaaaagtcctgaggtatagtagaccattgttcataaaatctttaacttaaaaaaaaactcatgctgaaagatgtgttataatttttattttagagcccaagtaagagttctaacttttaggcttatactttaaaaaattaaatattcatctaagtctctgtcacagtgtaatactttatacctcttgttgttatctagtgaagtgacaggttctggttcttctggttgggcatcactgcattgctctcctctcattctgttttcaagcatgaaggtattaaattgcctaagaatcattctcttctagcatttttgaaacttgctcttatattacccacttgagcttaagtatatgtcttttacaatttattgtctatttcaaggctgacgtgaggtttgatgtagacagtaaatagattaagcgttcttgggaagaaatgcttataggctaggcgtggtggctcacacctgtaatcccagcactttgggaggccaaggcgggaggatcg

SEQ ID NO: 121545 - DNA, 1028 bp, Homo sapiens
atcattttgactaattaaaccctttgcccaattccatctgaatgtctttaggttgtgtgtaatttttagaaaaatgcagtatttttagtctgccatacagcaaatatgttcattaacttttgattagaaacagtttttaaatgaagcaattctttgactgcaagactaaaaattctgcatgatgtgtgttttctgctgaacagttttggctgcatgtgattgtttcctttgcttcttttaagaataaaattgaattttattgtcttagatattttccagaaatgttacacattcataattgaacattttaaataattttgtggaaagacaattatagcttgagctgggaatcatttgtttactgggaggaaaaaatatccatctccaggaggcatctttaatgatcagttaatcatgatcctgttatttaatgtttaacttgtatattctcaagttctggaaaatttctagtacaatcttttcgtgtccagtaacttttatgtttctccttctagtttctgcagtcctgactttcttctttttttcttctgagttggtatagagtctaacaaatgagcacattagatgcaagttcttttaggagagaaaacaaattttcttctcattttttctgaaatgttttaagtcattgtgtaaattattagagtaagtataatgcttactaatatactttaccatatatatatatgcatataaaaaggtttaaaaaagaattctaaggcatgaaaattgtatcagcctgacccctatttactacaacttaatattggtgcagttggtggcagttaacctaaaggagtcatactgattgtcacatttaaattttttattgcaccttttaacttactttttctttttttaattaacaagaataatgtatatttatacagtacattggaatacaatgtaatgtttgatacatgtatacattgtggaataattaaatgaatatatttatcattacctcatttaaaaaaactgtaatgttgattcaagtattgatattc

SEQ ID NO: 121546 - DNA, 1049 bp, Homo sapiens
tgtgtctggcacatagtaatcattataagtgctttaaatgagtaagtacaattaaaatacagattgctcccaatttaaaatgaaaaaaaaaaattcaagcaaaattagatatgttcttaatgtgcattaaaattttttgtttttttttgaaggattggaaaatttgttttgaaaatgtaatgaatgttagcatacatttcatttgctctctagcattgttataccaaaggagcatatgtgggagattctaacacaaaaaaaagtctttacaataattaatacacactttagaaatgttgttagaagtgataaatggcatcttcacacctcttattattaccctgtggtagaagatgcagttgtatagagtattataagtgttgcatgatcaagttatttgaagagtatgaaatgcccaaaaggtaatgctatttgcgttatctcttatttttcttctctaacttccttctattgagggtaaagtgaacagaaatcagggaagattggaaagagacagggaatcaataagattaatatgtgattcaattaattattttaaaagctaagattttattatatttgtcttcatccttcctatgactcttcctatagatccaaatggtttctttctaattagaagtgatttcttttttccctagggagcttaatttggcatgtcttagcaatttgaaaaaatgttggttttggcaggatatggtggttcttgcgtgttatcccagcattttgggaggctgaggcgggagggttacttgagctcaggaattcaagaccagcctgggcgacatagtgagaccccataaaaaaaaaacaaaaaaacccccaaaacacacacacaaacgcacacacacacacaaaataaattagctgggcatggtggtgcatgcctgtagtcccagctacttggaaggctgaggtggaatgattgagccctggcggtcgaggctgcagtgagccatgatcgcaccactgcactccagcttgggagagtgagaccctgtctccaaaaaaatttggtatttttataatta

SEQ ID NO: 121547 - DNA, 1013 bp, Homo sapiens
cagttagacttgatctgtctagagaccaataatttgcctctagaaaagagtcttattgggtttacaggaaatttgactatagtagttttaggtggtggataagttgggacataatgagcataaatattttcctatataatatttagttgctgataattctcataaattgcccgtttctaaacagtatcttacaaaaatgatcattcacaaattattttggacttccgaacagtgattgacagtgctttgtgcttgttcgtgaatctagggatggtgtctgttttggacttgatgcagggtggttacccatcacgagcttcatttcatgaactctacaacatgtacaaaaagtatatgccagataaacttgcaagattggatccaagactattttgtaaggtataaatgccacccaaattgaaatttcttagctatgaacttgtcttttctattaataattgacatttaactttttaacttttatttttcaggctttgtttaaagctttgggcttaaatgaaaatgactacaagtttgggttaaccaaagtattttttagacctggcaaggtaaatatacattttttactttaaactgtaacatcatgaaaacaaatagttggggttagtgaatatcttaaagtatttaataatttgtattattcttgaattatatggtcactaacaacatgaattgctattttccataccatttctcagaaaagaaaaaaaagttgagaggaagataattatatataatgttcataatttgtttagctttactcatacatatttattctaaactccccatttattttagagcacaggtgtccagtcttttggcttccctgagccacattggaagaagaacagttgtcctgggccacacataaaatacaccaacactaatgatagctgatgagctaaataaacaaaacaattgcaataaaaatctcataatgttttaagaaagtttatgagtttgtgttgggcctcattcaaagctgtcctggg

SEQ ID NO: 121548 - DNA, 1070 bp, Homo sapiens
acaaagaaaaaaaaaacacccaaaactaaaaaggaagtttgacataaaaaaaagtgtatcacagggacagattataggcagttgcatggagatagtccatagagctggctgtctttctcagtcattaactatattttgaagtcttgtaccacgaataataggtgctttttttcttttaggacatggttcttggagaatatgttcatattcattttcttcatgagattgctctttttggaattcttctgtgattcctctgattgggatttttaggatttttgatgttagggattttaatctaggaattttgatcttttgggatttcaacatttgggattatggcttttgggattaggaattcaaacccctttgacatactgggctaagctgcttttatgtgtggtttggccaggtcatagcagctacatagctggcccaagacaaaagtgagggacagaacattttggggttacctaaggatctgtggcaaacctttaattgttgggagctgtgtaggaatcagtaacttgattacatttacagttgccccttatactcatcagagtacctgaaatagtgctaggtacatgaaaaggatccagcgaatttttccttatcagtagaaaaggaaaattcttttggcctaatgaaaaagaatcatgctaacaaagattatttttgaggtattttgttagacaattgtgaatatagataaaaagagaactattaatataaaaagaaaaaagatagcagaatcttttccccatcattttccaaataaaatacagaaacatctttattactgtagtttaatacgttcagctttacacattgcattatgataggaaacacattatagtaaactcatctgttacaccattcatttgtggactgtgttctacagtggtaccgaagtcagtaaccgggcagggatctttgcagaatgttaataggaaactctgaaaaaaaagttcaaggtcagatcatcctaggaaattgtgagtaactgaagttaagtagatttctttgctgtaggattctcagaggcttcactcagtatgttcattgtg

SEQ ID NO: 121549 - DNA, 1082 bp, Homo sapiens
ttattttctgttaaatttttgaagagttttctattttttattaggaaacttgagatggaagcaaagagaaaacaagaagaagaagagagaaagaaaagggaagatgatgaaaaacgcattcaagtatgtacttactgggttgaatttctattaaaatggaacctacaggctgggtgtggtggctcatgcctgtaatcccagctctttgggaggccgaggcgggcggatcacgaggtcaggagatcaagaccatcctggctaacatggtgaaaccccatctctacttatacgaaaacaaattagccggacatggtggtgggcacctgtagccccagctaattgggaggttgaggcaggagaatgatgtgaacccaggaggcagagcttgcagtgagccaagatgacaccactgcactccagcctgggcaacagagcgagactccatctcaaaaaaaataaaaaataaaaaataaataaaataaaatggaacctatgaaagaagtgaaaatgagatcttgatttgctagataagctgtcactagtttatcctagagaccaaaggccagtttttgaagtggttatgggaatggactttggagctagggaagtgggttcaaatccaagatcagtcactgacagaaattgtgacattgtacacattatagtgaggaactatgggtcacagttgtctctctgtagaatgtggataaataatagttgcaagcatttgacagttaatacatgttaaagcattgtgaacactgtgtagatcaataaatattaataattgtttttatacctaggggaaagtcaaatgaaaattcacttaaaatgttaagttttaaaatatcatataactttgtagatactggaattaataaattaggattaagagtctctctccacccctagtttttaaaaagtcccatgttgagaataaattgctcatgtatttgaatttctgtttgtcatggctttcataatatatcctaagcataaccaaaactttaaattcctgacatctgctctctaggtgttagtgttaatgggatgcctaagatactcatgtgatgtttgggaca

SEQ ID NO: 121550 - DNA, 1137 bp, Homo sapiens
ataaaataaaaatggcatgagtttaagatttagagagtttaaaaaaagcaaaacatactgttaccaaaacgtagtaacgtttttactcctgtaatgtatataattttttgatgaattctcattattttctatgaaaattctagtaatgtatgaaaggtactataatgtctattaagtcattgtattaggtttttgtttggatatgtgttccaaaaatcacaaatgaagtatgattttttaattttggtcctctttatatgtgcttcaatcagaatttcctaagcctaatgagtcaaaatagccttttaaaaaaatcagaaagcagcacctgcttttaggtaattctgagaatatttggcttgtggataggatatttacttttcagtcaccacctcgattggaaggctttataaattagaaaaatgctcatttaacagttttggcatttttatcttttcttcaacataaaatatttgttcacagattttgcaccatttttgaacaattcacgtaagtcaatgggtggtaactcatgagctaactggaagatgggttaaaatactttacaaagtactaacttctattaaaagttgttttgctacaattttcagtggaattgtagtgtgttaaagttgttatatccatactaagatatattttaatttgagatgatgctttatttggatcactccaatatgtatatgtattacaaaaaatctagtgaaattaatgttttatcaaattacttgcattaagaaaatgactagcattttaaactgagagtatgtacaattcttattgtagcaaaactcttaacatagcagctgaccttttagaataaagactaacttttaggtgctggtttttggttactgtattttcaaacactgatggtgtctgcatttctgccaaaggtattttagttttatagataatgtgatagtgtataaaggtttaataatgatacctccttaaataggaagaggagattattctgttacgtttatagcctcttatgatacacattctttgataatttaaaagctttgagtcaccttagtgcacagtaaatctcttgtagaattagttgattagtaatgatttggatataatgtcacattcatttgccaactggtt

SEQ ID NO: 121551 - DNA, 1139 bp, Homo sapiens
gaacaaaaaagatcataaactctctgaatgaaacattctaatgtataatataataatttattacatttcagggttgagggatggagtcttgcggttaaatcacatttccagttcagtgaggattaactcatttataatgtgaaattgcttggattaaattatgttcttagcacatagaaacttgtctgtatcctaaaaacctttccatttgtgtttcatcatatccattgatttgtagtggcttgaggaaatgtagcatttttattaactctggtaacttgtttgatcaatagcagtgtttattaatattgaaagggtccttgatgggggacaaattttaattgtttctggtgattttattaagcagatttccatcttagagaaaaagtcttaggaagttttcaaatctatgagaattaataggtatttcaggcatacaactggtaagaaatggtcctgaagagagagatggtaattttctgatatctcatgaatacaggtaaggacgacatggagatgtgtgagctgaatcttgaggagactggcctgactcggaagcgtggtgctgagatcttgccaagacagtttgaagaaatctgggaacgctgtggaggcatccagtaccttcagaatgcgattgagagcagacaggctcggcccacctatgcaacagccatgctgcagagtctgttaaagtagatgttgcacaccagccttacagctgggagcctttgccatggtacttaggtagggtgtgtgcccccagatttaaccattccataatcatgttagagttacttctataaagtgaacagattttattaatcacggcttttggtgaatttgtttaaggttaattatggtagcaaattttggacctaaacattatttttctgtatcccgctgtaattcccaaaactctcattattctctaactattacacatgggcatattctgatgtttctcatcctttgccagaagactaccttacatccatcgtaattgttctctaggaaaagagaacttttttcaaaattcaaaatactttttaaggatggcacagtaccatataactggagtaataaaacatgagcttacattcttacaataactaaaccacttaaaatgatcaaggcac

SEQ ID NO: 121552 - DNA, 1597 bp, Homo sapiens
atcaatctcatgaaagggtacaaagttagaatggtccagcacagatgaggctgagagttcaggagtaagggttcctttcttagttccccttaagttcttgtaaacctaaaaaatgactaagtggtttatcattcctggtccctaacaaagaaagtgaaaagataattattatgacatatatctttgataataagatactcccaaactcacgtttattttgtttctacatatacaataagaaatacatatacaataagaaatgttgaactatgtaatacctctatacattcatggttaattaaaataaattgtacatatcacacagatggcagaatgtctgacaataaataaaaaattttatacttcatataagttaaattattacacaaattaaaatccacatgaaacccaatttctcaagtgaacatttgctttaaagtaagactttatctgggctatctccccaccccacaccatttataatgaggtgagtagatattgggagagtctcagggaacagagtccctgtgaacctgttacagaaaaggggtcctagtccagaccccaagagagggttcttggatctcacgtaagaaagaattcagggcaagtccacagtgcaaagtgaaagcaagtttattaagaaagtaaaggaataaaagaatggctactccatagacagagcagccccgagggctgctggttgcccatttttatggttatttcttgatgctatgctaaacaaagggtggattattcatgcctcccctttttagaccatatagggtaacttcctgacattgccatggcatttgtaaactgtcatggtgccgatgggaatgtagtagtgaggacgaccagaggtcactctcatggccatcttggttttggtaggatttagccagcttcttcactgcaacttcttttatcagtaaggtctttatgacctgtgtcttgtgccgacttcctttctcatcctgtgacttaactgtctgggaatgcagcccagtaggtttcagcctcattttacccagctcctattcaagatggagttgtgctggttcacctgcctctgacaaactaaccatggcatgttaattagggttcatgctaagctgccataatgaagaggtaagaatatagtgactttcattcagtacaagtttatttctctttcacttgatgggtaggacagcttagctctatgatgccattcagggacccacacttcttccatcctatagctctgccaataccaagggcatttcctcattcacatggtcaaagctgggtcattggtacatccctgtttccacttgtgagaagcagagaggaagctgagggaaagcaattttctcctaagcaaaagacaccaaagttgcccacatcatattagtgggaactagtcacatggccatccttgccacaagggaggctggaaaatgtgctttctagatcagcagcctctttctatgagaaataggaaaatggatttgggagaagcagcacctagctatctgcacagtaggtgaagacagggaatctctaccccaggccaaagcaatgctaagacaccaagaatgaggctagtcaagta

SEQ ID NO: 121553 - DNA, 1030 bp, Homo sapiens
ttgtctcaaggattaagtcaataaatagctctttgcttccacgatcccttctgtctttcctgtactctctactagcatgttgactggtttgatcttcaatctggtggaatgattaaaacttttattcacaggagatctaagtccttagtggtcctgtatttattagttcctgtagctctcaattatctattgaccatggaagtaccacaggctaacctagtgaatcctctggatttcagaaatagtaacccttgagtctattatgcagtttcttcttgacaaaaaggattaatcaccacttctaactaagtgaccttagtttctgcttagcagcaggaagagcctcaaatagccaaggtacactgtggttggcagaataatgtctcccccaaagacgtccatatcctaatctccagaattgttaaatatgttaggttacacaggagaggttgtaaatggaattaaagtggataataatctgactttatgatagtgagattatcctagataatctaagtgagtccagtgttatcacaatggtccttgaaagtgaaagaaggaggcggaaaggagagacagaggaaaatgtgactatgaaagtgtggctagagagatgcagcattgctgaccttgaaaatggacaaaaggggccggtcctggtggctcatgcctgtaatcctatcactttgggaggctgaggtgggtagatagcctgaggtcaggagttcaagaacagcctgaccaacatggcgaaaccccatctctacgaaaagtataaaaattagctggcatggtggcagacacctgtaatcccagctacttgggagtctgaggcaggagaatcgcttgaacctggaaggcggaggttgcggtgagccgagatcacgccactgcattccagcctgggcaacagagtgatactctgtctcaaaacaaaacaaaacaaacaaacaaacaaaaaaagatggacaaaaggaaccatgagtgaaggaatgcatgtagcctctggaaattataaaagttaagaaaa

SEQ ID NO: 121554 - DNA, 1044 bp, Homo sapiens
taggtatgcccagagggatgctgggatctcagcttggctctcagcatgaacaaagtctaggaaacatgctacctgcctagatagagttctcaggaaaatctcataaatctgcctaaagtgggttgtgaagttaagattactgggcgtgtagggagtgccgaatttccagactgattcctatcttttgtttagtgacatgcatatagagctagctctctgcctagtcttaatggaagaaaacaactgaagtcagcagaacgtctgattgtaacaggtgatctttctactggcgggcgaagaggaaagaattttctcacagcaaaaaagtgtcttgggatataggaaaagaaatagaaagatacattttccttgctcaagagagttgactttagacctatgaattattgacacatgctttttggtgttcaatgtttgcacatctatccagatcaaataatgctgttagcagttatcgctgtgtcaaactttcctgaatttaaatctgcagaatcatgcttgctcagagtacctgaaatatcctagagctgcttatttaaaattatttttaatttgctttaaaatgtattttaatcaccagggtgctttcagaagaatgctataaatctatcattgctaaataacaaagcattgcaaatatactttgtatggtagaataatgaccagattaatgcattatacatttacattctggtttattattttgttttttttgagatggaatctcactctgttgcccaggctggagtgcagtgtctcagtctccactcattgcaagctccgcctcccaggttcaagcgattctcctacttcagcctcctgagttgctgagattacaggtgtgcaccaccacgcctggctaatttttgtatttttagtagagacagggtttcaccttggtggccagactggtctcgaactcctgacctcgtgatccacctgcctcagtctcccaaagtgctgggattacaggcgtgagccaccacgcccatcctacattctgttttaagtgagaagggatatata

SEQ ID NO: 121555 - DNA, 1033 bp, Homo sapiens
aatctggacagttgctattatattacacggtcatttgatattcataggagggaagtggatggatgaagtgtcaggtatgtgccttttcgcctgcaactttaagtagttaatatattcataaatcatagatagtattacacatctatgtgtaatgtaatatacatagatatataaatataacaatatatttatgaatatattatgaatatattcataaatcataggctacaggatgagcaattggttatagtaaaaaggatgagcagttggccagagtgaaaagaaagtaagaaaaaatcaaactaaattaattcattgatgtacatgtttatttagtaaatgtttattaattacagggcacttgtatagagtgcttagggtagtggaggtggagggcagtatgcagagcagtgtaagtagttagggttgaactgagttttaagttttgggtcccgagaaacaaccaacccagccagatgactttgggagcttcctgatcctctagctcacattgctcaggttggtcccctcactcttcttttctgccttatagcctgaggactgaattctcactgttccattgcctccccagttcttgctttctcatcttgtataagcatgtattcaggaaacagtttttagctagactagtggtgacaagagaacagaacaggggcctgacagatccagaatggagcttgccttagtcttctgatgactgttttcctggtcccagcctgctccgcctctgtttcacctctttgtccttctcaccctgttccagacgacgtactgaggaaacattgcaaataactgacttaccgacacaactgtggagctcagcatttataagttggggcattcactgttttacagatgctgaaagagtgtgaaaattcaatgcgtaagcatttctctctcagttcccatataagctttcataatataaattgtctaatacaataatgatggaagtttgtttaaaattgtagttgatttaaaacatacttgaataatacacataaacataaaa

SEQ ID NO: 121556 - DNA, 1098 bp, Homo sapiens
caccccacaacagtccctggtgtgaactagttcaaccattgtggaagacagtgtggcaattcctcagggatctagaactagaaattccatttgacccagccatcccattactgggtatatacccaaaggattataaatcatgctgctataaagacacatgcacacatatgtttattgcagcactatgcacaatagcaaagacttggaaccaacccaaatgtccaacaatgatagactggattaagaaaatgtggcacatatataccattgaatattatgcagccataaaaaatgatgagttcatgtcctttgtaggatgaagctggaaaccatcattctcagcaaagtatcgcaaggacaaaaaaccaaacaccacatgttctcactcatagatgggaattgaacaataagaacacatggacacaggaaggggaccatcagctgattttctaagcagcagctcttattaacaccatgacattcctgaaacacctccatatatattaggaagctgtatattatctctttgtgtcactattttccacagctacagcttccagttgaccaatgagcttagtagggaatagtggatatttttctttctgttttaattatgggaagtccttttaaatttaactatttgaatgttgtggttttaattactctttccactggtcccttcctataaagctgtgctatgttgcatctctgatatagcattttgaagttggtgattccctctagtactgtcgtttttgcttcaatcacagtgatttttgcttagatcatttcaggcagtttatggataaatctgaagatgatggatcatgaaatcagatatttatttatttatttttttgagacggagtctctctctgttgcccaggctggagtgcagtggcacaatctcggctcactgcaagctctgcctcctgggttcacgccattctcctgcctcagccttctgagtagctgggactacaggtgcctgccaccacacccggctaatttttttgtatttttagtagagatggtttcaccgtgttagccaggatgatctcgatctcctgacctcgtgatccgcccacctcggcctcc

SEQ ID NO: 121557 - DNA, 1024 bp, Homo sapiens
gagaagccctgtctctactaaaaatacaaaaaaatagctgggcggtatggcgagcgtctgtagtctcagctacctgggaggctgagatgggagaatccttgacccaagaggtcaaggctactgcaagccatgattgcaacactgcactccagcctgagtgacagagcgagacctgagaccctgtctcaaataaataaataaataaataaataaataaataaataaataccaaaatccagtaagtattagggggagaatgtaaggatttgacatggagaaatagacatcaacagtattcctagtttctgatcattaacaactgggtgcatggaggtgctatttagagatataagaaggcctggaaggagaacagtcttggaaaagagaggggagcccaagttccctttcagacatattgagtttaatgataattgtaagatgactgtaagacagatttgcaaagcaaagcaaatcagtggcgttatcaatatggagcttaaaggaaagtactggcctggaagtaaatttagtctttgtcagaatttagaggctttttaaggctatgggaaaacaaatcagtattagaaagaggaggacctagtactgagcccagaggagtgccaacatttagtggtcatgtagagatgaagaagcctgcaaagaagttaaagaattggaggattaaagcaataggagaaaaattaggaaagtattgtcatggaaaccaatagaagagagtatttcacaaagaagagtatagtcagctttgctgcatgctactcagaggcttaataaggtaagaactgaaaggtgttccaagtcataagcttttcatatgattaatatgtaactgtgataaccagataatttagtacccttgtcacaaatttgctgaagatattctaaaatcttaatgtgctggcagtcttattattacttgcatataaacagcttaattttctgagctaatgctggggaagaatagtataaataatccaaaataataatttaaaattacatgtgt

SEQ ID NO: 121558 - DNA, 1006 bp, Homo sapiens
ttattttattaattttcatgaatatctctgtttttttatggtaagcattttttatgagaaagaacatcaagttgaacaaaatgttaggaatttaatgttgccagtaggatattcttttcatgatttcaaataaaatcaaatcaactcaaatcagaacatttgaacagtaattcatgctacatttaaacaaaatttgtgtatgtccacttatcaatatatgtttactgttgtttagtttttatattttgccagaagatacgttccttggagaataatactgaatatatagcaattatagcaattatagcaatctaatcttaaataattgaattaagagaaatcaagttaaaccgctacagagaactccagtgtgcatttcttcttccaatttttctgctaactgacataaaattggcagtaatctttagcctattttttaaatagtgatgcatgaatcccagccagacccactgaatctctgggaatgtgaagtttctaagtttcacaggcaattctaatgcttattgttcatggagaaccactgtgctatagaggcaactgatttcagaataaatacacacaccaataaataactgaaagaacaaaatatctttgtttttgatgatttaatatgggtactactgaagttttaagatgctgtagtgatcaccggtctctcaatatgatgctatgtattttctaatttaagctgttactgaggagacactgtatcgagcaggcatcacatgctagctgtttcggcaaatgttgggttgacataacctgactcagcaactgggagagactttctgcccatcaacaaatgctatataaaaatagattaatgtatctctttgatgcatttcaagtctatgaacatgagacttcattccttgcaaattaattaaataccaagggaattaatactgaagaaactgtacatccttaggtgcaagagtgtcaattaaagctggcagaacaacaattcaatcacaggggttattac

SEQ ID NO: 121559 - DNA, 1055 bp, Homo sapiens
taggccagctgctgtccggaaaaagcgtatttaagagtatgatcatacaggtgagactatgagcctgataaggggtgaagaaggcatctgcccggtgccagaaaacaaaaagtaaaggcaatttagtcaataaatttcacttgcacttgtttgaacattgatgttaaacttagaattcctaggctgtcatttttataacatgaaaagtaattaaaactcagacttcatgaggctttctagcatttggctagaatcttgctgttaaaggaaaaatacatgttatagactccttgaatttataataatcaaaggttaatacataaatagccacaaaatatacaaggaagtattcaaaaataacatgcatttttcaggcataaaacagcagtatttattcttgtttgtattttggatgttataaatgattctgttttatcttgtggaatccatggtctgtctccaaattaatgtgtttgaatatatcttcttgattagatcttttgctgtgagcaggaggaaaagaaaaaaaaatctatctaccttaaatcagaactgcttatattgaacttgattgcatgattggatattcaagattatttaattaaaactcaattgcagtctaattttcttttaacatttgattaaagctgtataaatagatatcagagacatcgttccattgtttgtagatgatctccagtattagaaaacaaatatatttaaggacacacatgtgtttactagtttggcatgtagttaacaagcatagactagtatcagattgtcaaaggtcttggtttgagtcctgacttcatcatttatttgctgtgtgaccttgggaaagtagttcacctctctgaacgccaataattttgtaaaaggtgaataatcataaggtgattctgaggatagaaagtccaatctagagagaatgcttaaaatactatctagcataatgaactgtgtaaagtatgttttgatatgtgttcatagaacaaattttatgagagttcatatatagaggatgagataatttcaaaatattccataaaaga

SEQ ID NO: 121560 - DNA, 1084 bp, Homo sapiens
agttgatcaagacttgtctcagatactttttggtttacgtacatatatcatatggattgtgttctgtgcccactgtaccaaatagtgcgagctcatttcttcattttaagcctccttaagaggattactgtgactactgtgtaggattgaatggccccttggtgttactttttaagctctttgacaaacttccaccatatcctctaacccccacaagaaagggtgccgagtagagtgcactatctccaaagttgccctctcctccagcaaccaaggcaatcagtcacacagacaggctttctttcttctgagggttatattgcttatcactgtgaggagccagatgttaacaaacttaggcaaattataactaatatccgagatccatgttattaaaggataatatctgtagccatggcatgtgagcaataataatattcttcaattgtttatctgttctattggttcctggtcattaaagggcataacattaaatcataatttaatagaggcatttctgaaggcaaactggccaatataggtcagatacactttttagtagtgatctaaggtgatatttggctgaaattagagatgtcagaagaatgatgagttgactttttcttttttgttaaatattggttgtctctgcctgtttttgataaggtgttggatgatattcattcacttgttcatttgccacagacatatctgaccttgctaagtatgagaacttagatactaggtaaagtctgagaactgcaataatgaaggcatgtgctggaatgttagggtcactagtaactggtactgctgggttggaactttagggagtattgaactctctggcaaatatctaaagtgtttatattatgtagtaatagcagaggatcacacattttggccatctgataactaagcagaaaaactgacaattgtgaaaattaagaacatgacttgaatccttagaccaagaaaaaaaaaaaccaaaacaacaacaaaaacttctttgcagggtgcttataggcagagggttatatgagtgcttataggcagagccaattttttctcaaaaaacgaatgt

SEQ ID NO: 121561 - DNA, 1050 bp, Homo sapiens
ttaaaatgaataaattatttctgtattaacattcatagattttgaaaaaaataatgttgatctaaaaggaaggatgaagtatctgagaaggagagctacccaaatataccatttttttacaaattgtaaatgaaaaataatttttacaaaatataaatacaaaacaaattataaatacaaaacatgacactttcactgcgtgtatacttttaaaaatttatttaaaaaatacagaatctgtaatgtttttaatttatgtattgcatgtcctcaagatgcatgttttttgcattgtaaatatttttatatagaaaagaaaacatctctttaggtgtcagacatgtattgatttaaaatgaatcgttaatttttaagtgatttttcacagaaatgtttttctccgagatgcagttcatacctctatctaatcagcatgtttctgcgtacagtagccaagctattaaaaatgaataatgcttttggaatattgataagcacaggtgaaatctgaatttagagtattacatgcatacttatattaaatacttcagagacctaatgtttacaaagtagattaaaattctacattaaaatagattttaaaatttggaagaaagcatattagcaggagaaatctcaaaagttctgcagcctacatcaggaagcatttttacttttctctgttttccttgtaaagtaaaataaaagctaagcaattcattaataaaaatagaacatgcaaattaaatattctgaatctggaatgagtttatacatttacttctctaaaacaaactaattttctatatcaaggcaaaatatagcaacaaaataagcatttttaataagataaagaaaagtaatcatagctctgagcatgaaacagttcacctatttcagttgagagaggaaccatattcttttctgaaattatacatgtcttgatcatatctaagatctacgaagcctggctcagtcagcaatcaatccatcagagagaatagaattataatttgcatcaaactgtgctcaagtagacaaaatagagat

SEQ ID NO: 121562 - DNA, 1107 bp, Homo sapiens
ctctatgcaattttatatcttaattttctacattcagttatttaatatatttggaaagtgtattaatccatggagtgaggtgggacactaagtgggaaaacattcagcttctcagttatttgtttagcaacactaactttttctttttatttgggatatttcttttattatgtacttcattttcacatatattgtctttgtttattgatctgcctgccagtttgtacactgctatggcactaatttagttaatctacttttattatgtattttaatacctaattatttcaatggctttttattagatgttcttcctgtttatatatctaagtggccttgagaataattttttcaagttcaaaagtaaaactgtgtagattttcattgagatatttgttgagtgcactgaatccttaaaacagaagtcttgttttttttttttttcttttaagctgaagaaacattttaaaaattatgtctttgaaaagaccagtcattgtggggtttatagagctccaattatttatatttattatcttttctcattattttcatttcttcttttctattacatatcaagtgaatttctcaaaatttttcatcatttactcaattttctataataattcttgagtttatcttcaatatgaatttcaattttgttttttctttttttgagatggagtcttgctgtgtcacccaggctggagtgcagtggtgcaatctcgtctcactgcaagctctacctcccgggttcacgccattctcctgcctgaatttcacttttcttattggaattttaattcttttttaattctgtcctcagttcatcacattccattttgatttcactccttatatatgtttttttgtcattcgatgtgtttatctttttatcttttattggatttcagctttttataatggacatgtatcatttcatgccactgaacatgtcaaattatctcctctggttattctcgtttctttagtaagttattttcagagctttgccctgctttattgaatttagggcattattccttgtatcatttactgtttctcataggatctgtatcattgtttgtttaattggcttttttcctt

SEQ ID NO: 121563 - DNA, 1037 bp, Homo sapiens
tattgaaagtgtcactagctaccaacaggatgtgtgtgtgtgtgtgggtatgtgtgaaaatatatatatattttatatataagtgtgtttacatatgattgtttatattttttctaaatctcttataacccttcaaagttgtgttgaaacatatgtcattgctcagctttttatggccaaatattcagaaaacaatcttttgacagttgaaatgccagttttcagaaagaaggaaaattaagccatttccctcaagcatcatctagctgatggttgctgacaacagattttctgacacttagattttccaacctttttgactcacatacgtatctatgtagatggctcatggtacaaacttgaataacaatcttaaattgtgatattcagaaatgtcagctctggccctttacaaaatgaatactttgaaattgtgtctctctccctaatagttttgttttggaggggggaaaatggtgtgctccagaaaccaagcagtcagccttttttttttttttttttgaaaacttattggataagcagcccaagaaaaggcgctagaagatgtgagaatgattctccctcccttcaaaaagttttattcttattgagacacaataagaaaataaaaaacaatttaagtgagaacaaaaaaaaagattgcttgtaaaagataatccatggtatgactattctgaaaactgcattggtacttttcacaagggaatacagatgaccaagtcataatgagttgaacctgatgaaaatagatgggcaggaagtatttaatgattctcagtctttaataattaaaatataattcagccaattagtaatataatgtgccaaacaattcacttgcagtaacaagttttgaaagattggtttgattcaggtactaagtagtcatcagaggtggcattgtgttactgtggaaaagctgatttccttgggtttctacatacatttttctatttggatcagataaaataagtaataagtaaatacataaaaaaacctcttgatattaaggcctc

SEQ ID NO: 121564 - DNA, 1588 bp, Homo sapiens
gctaacaatttttgaaggccgtaagttaaacatgttaaaaactgtagctactcactcagccgacatctagtaaaaaagatgcggcaagatcaacaaggcatatagcttgcgcccgccagaagttccgcggcctccacacccatcccggcatactttgcgccgtgcacaggcaagccctggtgcgcattggccccttcggccgccgtcggccggtagttactatggaaacccagctgccatcgctatgtctctgcaaaagacccctccgacccgagtgttcgtggaactggttccctgggctgaccggagccgggagaacaacctggcctcagggagagagacgctaccgggcttacgccaccccctctcctcaacacaagcccaaactgctacccgcgaggtgcaagtaagcggcacctcagaagtgtctgcgggccctgaccgggcgcaggtggtggtgcgagtgagcagcaccaaggaggcggcagccgaggccaaaaagagcgtttgtcgccgtctagattacatcacgcagagcctccagcagcagggcgtgcaggtgagatctccgcgggggaggaaataagagccggaagacacaaaagggttggcagatggtcgggccccacaggcccccctagcgggaagggagatgtggagggtctggagcgtttaggacgcgtttgttgcaaaggtactccgggacgccaggacctggcagagtgaatatttgacccattcttctcctagacgaaggtaattattggcctcaggcaaattaaaaataaaagaatgcaaattgggtaggtttttatctggggatatttgcttcagtgattttgtttttaaatttaaagtgatgaaatgttaaaacttgaaatgttagttgtaaatacttgcccacgtggagtgctggacactaaatattttgttttgttttgtttttattccgcaccatggaattggcaagtgaagagcacgacctgcttccttccgatcatgtaaaactttgcatggaatggttcttgagtatgttccgcaaacagtaacgttgggaagtggggaagaagttgcgtccattttcattttataatgattttcattttatagtgattcccccaaaatttcttcggccttcttaggtttaacttaaaagaaaaaatcaagccagtattgtggataccacatatacgaaatacttctacttacttaacggagatgtccatgagacaaatcactaaacaaatcttaccttaagcctactcctaaggcaagaaaaaaaatgaagccatcatttaatccacacaatagcactgttaggcatgttttaatatccctgttttccaaatttaaagaggttaaacaatgctctgaactttaggtagagcaatatttgaactcatgtattcctgaaaccagaatgtaagttgcttccaattctgccgataattagaatgaaagaaaattagaaatcatagggatcaacgatttcagttttctcattttatagagtaggaccccaaaggccagagatgtaacttatccaggatgacattgagttggtaaaagtgcaggcattgttacttcc

SEQ ID NO: 121565 - DNA, 1068 bp, Homo sapiens
gtaatataaactaagaaatagtttaaaatggaataaaaacagcaagtgggaaatagcagttaattgccactaaatacaattttagtactgtcatcacccaatgtgcaggtgacacctacaggagagaaatttctttttagataaaaagcaaatcaagtcataacataaaggatttgaaatgcttttcaacattcttttgttttgcagtgcaattttaccgtattgtgataaatattgtttaaaaatgaaaaccattcaacctttatacaaattgaaaagaataaaactattttcaaattataaaaggagtgacatttatgaaattttaagcaaaatcaatttctgaattcattttatgtcacttttaggaaagttttaaaacatcaggcaaagttctttttgcatattttatgtttttctgattttaattagtgtaggtttctaatttatgttttagagtaattgcatcaaatatttagtaatcatactcttggactttttctgtttcaggcagaaaatataactgtgacaaaggattttaggagagtggaaaatgcttatcacatggaagcagaggtatgtacttaacaaataattggaagcagcatgattttgtggagacagtcatttttattcttgaactgaaatgaatggtgaaaaatgcttctcatgatattaatagaagattatttttctcaaaatcatcttggtgttatatatctatttcggcttttaaataaacttgagatttaaaagaaagtttaaaatggaataaaaacagcaagtgggaaatagcagttaattgccactaaatacagttttagtactgtcatcacctaatgtgcgggtgacactacaggagagaaatttctttttagataaaaagcaaataaagtcataacataaaggatttgaaatgcttttcaacattcttttgtttttcagtgcaattttactgtattgtgataaatattgtttaaaaatgaaaaccattcaacctttatacaaattaaaaagaataaaactattttcagtacactcagttaatgacaacatttagttcctgca

SEQ ID NO: 121566 - DNA, 1054 bp, Homo sapiens
ggccataacatttcaaattaagcacatggagtgatttgtaattttgtgttaatttctccctaagatgttttgttaaaatgattttgtatataataaatttctaagttgaggaaggaaggtaaaaaaaattcctgataaccttttctttatgaagtctgctaataacaatacctagtatatacttagaagaaccagccaagaaaaattacctttcagcaaccactctttacttatttctcttttgtaataataccaattttatgacccaggattccccagtatttaacggaagtaagattaaagaccaaagcacaaaacctctgttccttgcaatatagtacttcgtgtttgtaatcaatgtgtggtaaatttaacacatttaccacttactgattagtctttgggaaaagaatggtggaagtcattcaatgaaatacctttctacctaattggttagacatactggcagcacagtgtaatgaactggcctggagttgggaaatgggaatttgaccttcattcctgacaggaagtagaggaaccccagcaaagtcgtatctcagagcttcattttcctcatctgtaaagttttaaaggttgattaaattatctgtgaggtctaattctgttcaaatagccagtggtgataatctcatttgtatactgtcctctgtattcatggctcaactttggcttttatatttagtccctaaatagaatacatcatttaatgtgtagcttccagacaagctgtgtcttgcggccatgacctgattgttgttaagtgtgaggttttctgaacccttagcagaaggacttttaatgtttttacaacacactattgtattgctataaattgtgaattgctttaaaagtacatgtttactaataaaaagaagtacaggcacactttattttattgtgctttgcattattgcactttgcagataactggtaaccatgcatccagcaaggctgtcagtaccatttttccaacagcaggtgataacttcatgtgtcacattttggtaattgcgatatttccaacttttaa

SEQ ID NO: 121567 - DNA, 6522 bp, Homo sapiens
tgttacagtgggatcttaatcatgataatggtggcacacatagtgattttgattgatatatatatataatcagtatttcctaggattatagtcatttgccatttattacacaaggagataggacttttcaaagcctgtgaaaactgccatttagttgtttttaaatcctctttaaacagttctaagaacaaagtttttgaccaagagtaacttatttctaagttaggaataagaaacctttagtcatcccagctttatactcaatcacaatgttaacttagataagtcacttattttctatgagctttacctccctcatgagatcgttaagaatctgtctcttttaattagaaaataaataagatcattgaactattagtgttttctaggttcttttttctcattttaataaaataatttggattatgtcattacatataagtataccaatggggccttactgacaagtttgagagtcaaacaaaaaaagaaactccatatattaagtgtactgttgttcccttttaggagattgtaagaacaacgctcttgtaccaggaaccattcaagtaaatggccatggaggacagccatcaaaacttgtgaagaggggacctggaaggaaacctaaagtagaagttaataccaatagtggtgaaattatacacaagaaaaggggtagaaagcccaaaaagctacagtatgcaaagccagaagatttagagcaaaataatgtgcatcccatcagagatgaagtacttccttcttcaacatgcaattttctttctgaaactaataatgtaaaggaagatttgttacagaaaaagaatcgtggaggtaggaagcccaaaaggaagatgaagacacaaaaattagatgcagatctcctagtccctgcaagtgtcaaagtgttaaggagaagtaaccgaaaaaagatagatgatcctatagatgaggaagaagagtttgaagaactcaaaggctctgaaccccacatgagaactagaaatcaaggtcgaaggacagctttctataatgaggatgactctgaagaggagcaaaggcagctgttgttcgaagacacctctttaacttttggaacttctagtagaggacgagtccgaaagttgactgaaaaagcaaaagctaatttaattggttggtaacttgtaccaaaatattttacttcaaaatctataaagcaggtacagttaaggaataagtagaactaaggcttctgcttccttgctgctgtggtggagtagggaatgttatgatttgatttgcaaaaaaaaaaaaaaaaaaaaaaacaaacttacgagacacttcacttctttaaatgaatatatatatatatatataaatatatacatatatattttaaatgtttgctatttattgcccttagataggttatgcattttcacattcatttcattcactgtttgaaacgaaagaaattgatctataatgaattcctgatttatttatagaaaagacaattctgctacactctttaggagcataatattcctagtgatagagcatttcatgttaaaatgaattatttttgaccaagtgaggtacatttctattgatacaagtcatgcccctaaaagatagatgttatacagagtagcagtgaattaagaaatgtttcctctaaaagataaatataaaatttccaccatttgataccctaaacagtttaattttaattatagaatgttcatctacaaagtatctagaggaggcttttgctttattccatttctgccaaacaagagaaaatgtactgatgaagggaaacatatccacattggaaaacatttgactgtctaatttttcagaccttgattcttatatcactcaatctctgtttattgtgccaaagactgagaatcagtgcagtggaaagcctgtttttgacgtcaggacagcatacacttttcaatattggaaaggctatatattctaaagagcaagttattaaagagttatgctgagatatatctttttttggtactaatagaaaataatgcactggtgggtcctttgacagagatgttctagaggaaatgtttaagtggttaaaggattcaaggaaaatacaggaaaaaaggtatgggatttgatgtttacttgttgatctggattaatgtcatttctaaactttagacatatctaatagcctaaaatgacttacaaagaaacgtgtctgtgtgtgtatgtgtatatattgataaatgggtataattaaatatatatacaaacacatacttatatactattacccaggtataaattcttttttcaggattttttagatagcagtagaataaaaataattttaaaatgtcatactttatagtttaattttaagggggaaattggttattttcaattattaaaggttaaaataggccaaatcactttttatgcaatcatgttttatacagtggtctcattgcacattgtgttttttctgcactttttacggtatccttatcatgctggtatgtcaatatacaccctaaagaaaaactccatttaatgattgtgccttgtattctattattttttgcatcattagtaaaattaagttgtctattgtaaatgataactatatgacttaggagaatgtattgctatatgtactgctatggaaaaggaaagcagttatttatttgtttatggtacagttagttattttataccttaaaaaccaacatacttaccatttctattgtttaaaaattactgtccatttttttaaaaatttaaagaatgtagtattttctgaggactggtatggtacaaaaatgtaatcaaaattttcagatactacatttttaaaaagtgaggatggggaaaatatgtatcagcatgaccctgatgtagaaaaataaagtctgcaattgaaccttggcaaaatacattacataattatttctgataaggataaatattagctgtcatttaactgtcgtgaagaatgaaaaagtgatacatttgggctttttagatcatttgtaactaaatttgtacagaaattctcctgtgaaattaagtaaaccattttccagatcttgactgcattgctgagattttgcagttgaaaaataatttcaaatttttcaggttttttgtatatttatttttttctaacaaatatatttaactataaaattaaaattcagtagttaaactcttcataatgcagaaatggatggcttgattgtatagaaaaatgagtctttcagttacaccattcttgaaaataatagtgtatgtttgaaatttgtcattaattagttgcttttgaaggcaatctatttgaaatatgtaatttcctgatgttatctgcattgtgttaagaaaaaaataataggctataaaatcaatttttgtaaaaaaaatgtacagttttaagttgtgtacagaaaaaggaagagcgtacacagtcttagagtggaatatacctctagtacagtgtatgtgttaattccaactcaagcaaagaaatgagtatttaccatctttcctataacatgtaaatgtattattcctgttctacagacactgtatatttatgaccttatttggacattattagacactggtttcttagtaaagcacagtaacttggatcagattctttgtaaccgaaacacttaaacatgtattagtaataccaatatatttagattttatatttttataatttagcttctatgcattacagaagttgaattaagaaatttaagtcatcaccatatttttgttttctttaccacttgggaaaataatcctctttgaggcagtaacactatgtatgtactgttaataggccagaaagaaatattggcagttgtcttaggtaagcaataaaaacatctccaatttactgaaagttcagaaatataactcttacatgcatggaaagtgtaaaccaatttaggtatttctaagtacccaaccctagtattctctccctcaactccaacattctcaagtcccagatgaaaagtttcagtggagcattagtttaaatatttagtctaatcagagactcacagccctgggcaatagatacatagctttttaaaattttatcctttgtgacctgctatagtggcattggactattttctgcatgtattataaactaaagattggccttatttcaattgtttttattgcacaacttcactacaaatttaaagactgctggcattattataaaactgtcttcctccaatccaagtaaataagtatgtggaatatttgtgagctggattaggtaacatctgagacttgggattgactaaatttagttatcacttggaaatgaattacataagatacagtaatcagagaaaatatctttatgcagcatgtatgttaacatctagaactgtccctcatctgcagtgcagtagaggaatcagacattttaagaaatgtattcaaatatttttatcttatatgttagcagcatttacatgttttcagatatgatttgtaatataaattaatttctccagttaacaatgtttacttcaattctgacattccattttatacatatatacctactgtatatctctctcaaatgtcagctagaagcaactttttcagttttctatctaatgaaaacggatatattctgaatgtttttgttacctgaaatttatttttgagtaggttgaaaggaccaagatacttgagtgattaaaggactgtaagtgttctgcttatatgcaggagttacatgattttaaaagtcataataggggaagtagttttatcatctgattactcctattaacctaaaaagtatttctaacataacagattgagcagtggttttgttacacttaggcaagaatttattttcccattaaaatttgaaaaatacacttttctttgcttctacccttgcagtttcccttagttcccctaatttccaagtgatctgaactaaaattaatattacatttactaagaaactatttttgttaattatactgagcaaagtttgctccaaatgaaaagtcattacgaactatgtatagtacccaagaaaaggtcaaattgagtcagaagactgtaagtaccacttttggcgctccagagataaaccttgtacacactgcagtagaacagtgagtagaaaatatgagctataaatagatattatttttagttttgatagctctgtgttgaaatacttttttaatgcagataaaaattatcaggaaattaaccttatggcacagaccaaatacttagtgcatggctgagtttctacaattcaaggagccaagaaaataggttcaagatggaatatagtacatgcatataaggcagatgcacacatgctggttactttaagattgtgtgtgttgattagtcacaatgatagactataacatgagacaatacaaagttacatttttggaccatattaaaactgcaagaagacaggggtcttactgaagatcttttagaaaacttaaatcctgtcacaggatatttagacatgtgtagaatgtagctcaatttttaaaaagtaactgacctagagggtgaaagttgaaactgacacattttcaaattaagattatgcttattttgtacagaaaacaatgtttaaacacaagcagatctgttgtatgtaataagtaacacagagttttaaaacaaattaattatttagctttattgaagtttgtttttttccttccgaacctggagtatcatattataaacagcagtttcacaccagaatagcagtgccctttctttttgtacatactgattggacctttctttactgttacgtggacactttctatgttagttttgatgcataattctttgaatccttttatacaaactagaatgtatgtgtaagaatacctgtccctgcaatgtagtaactacaaacttatttttaaataaatagaaaacttgtttttctaagctattttgtagagcctcatgatttattatttgctttttaaagttttttggcatcacataaagcacttagtacataatctcaacaagctgcttaccaaagtggtcatatggcagataccattatgtaaatgctggttcattagagtttccagtgccctgtgtgttttgcaaagtgtgaaaactgtcagttaaaagatatttgggtgccgaaatgtaatttaattccaaaacaactgaaggtcaaaaacttatatgcctttttatgtgtacatttaataaaacaattttattgatttcttaccgtaagttactgtgatgagtgataaatacttcactattcagatactttcgtaagagatacatttcagtggaacactttgcataaatattttctcaaaaatgtgcaatttctgggaaaaaaggaatgatggaaagaaggttattgcagttttcctagaaattttgtcagattggcatgcatttttattgactaagaatcccaattttagcatgaagaccattagatatgaatac

SEQ ID NO: 121568 - DNA, 1048 bp, Homo sapiens
ctttactattccctatattgcagaatgataatttgacatgcaagttcctatgatgtggaggatttttaatcttttaactaaagctatactagtgtaagtgcttaaattcaaactgctaaatctatacagtaaaacagcatttttaggatagtgatggcatcatgctttccgtcatataactttagcatttacagcgatccttcactaaatattcactttcaaaggctcacaatcatatgaaatccactataaatctcatattttaacatatttcataatagtacaaatattgaatccaaaaatattataaactgttttattcgttcacatagagctataagagtgactgacaatactattttatttacagccctgaaaggaaaaaaaggatcttaaaaccccagctaaaatcagaaagctctacctctgcattctctacacctacacgatcaataccgccaagacacaatgctgctcagataaacggtaaaacagaatctagttctgtggttcgaaccagaagcaaccgagtggttgtagatccagttgtcactgagcaaccatctacttcttcagctgcaaagacttttattacaaaagctaatgcatctgcaataccagggaaaacaagtaagactcactttctaaattgaaatgtatatgatgattttcttaatttaagcttttactttgccaaatgcaatatactgagttttagtaattcctagcagacactgttgtttttgccttctttattaatttcctattttaaaaaaaagtttttaataagaagaattaaattgaggtttaggtcattatagactaatgcttaaaaatggcaactctgatctaaactacctgaatttaaatcacagtacccacactagctagcaatttgccaagacttgccttcgaaattttgaaatgatgggacagcttctaaaagggctgaaactattaagagtttctagttggatacgcctttttcctattagaaagtagctttcctaagaaagctttaagcatccttcaggttttgttgtcttgg

SEQ ID NO: 121569 - DNA, 1050 bp, Homo sapiens
cagtgtgtaaaggaaataattgctagttaatcaactataaagtataatgacatctaaaatgttttatgaatctggtaaattcttgcctcaaaggatgaagagaaagatgctgatgtgccaggaacttctactcgaaaaaggaaggtaatatagttttagttttagcagaagtactttatatgaattaaaatgtattaagagctttctttatttttttactcttagcattttaaaagacattaagtatttcaaattagtttcaattacaaaatgtatgttttttagaacttggtgaatattttcttttgtttgaattattgtatattacccaattatctaagactacattaaaagtacaaattttattgtgtaagtgctcttttattaatatatttgaacacttttatcacaggaccatcagcctagaagaagattacgtaatagagcccagtcttacgatattcaagcatggaagaaacagtgtgaagaattgttaaatctcatatttcaatgtgaagattcagagcctttccgtcagccggtagatctccttgaatatccagtaagtatttttgaaaatattttctttacctgtcagtttgctacataccttttacatgacagttggctattttagttactttttatgattatagtttatttctttattattttatacatgttctcattatccatttggctacatagagaatccaaattttgaatagtgtggtaaaatggaaggagccctgaatgaagacactgtaagaattgggttattctgttcctactagttgtgcagctttgagcaagtcccttagttttctcatctgaattttttttttctttttttgtcttccctacactgattccatgaatttattatggcaattatctagaaaaaaagaataatgcctacgtccttacaggattatggagatgtaaagagaatatataaaaatagtttttaggctgggcacggtggctcatgccagtaatcccagcactttgggaggccgaggcaggcagatcacgaggtcaggagatcga

SEQ ID NO: 121570 - DNA, 1112 bp, Homo sapiens
tggagaagtcacagtagagatacagtgctataaatctgagttggggccacatcgtgggtggctttgaatatgaatctaaaatataagctctgagagcaaggggctgttgaaagtatattaacatgagaataacatgttttacactatgccttaaaaatgttaatttgactgcagtgtctaatttaattgacagagaagagacaaaaagcataaatagcagattgactgctacagttgaccaactaagagttgatgagggcttaatttatgaaagtgagaaagggacagatgcccagacatacttgaggatagagttcacagcccttgaccactaattgggtttataaggaggaggaaagggaaagaataatgaaaaaccaagattcccattactgtaagaatgatatgttgttaaagaaaaatagaaaaaggaacaaggatatctggggagtcactattaagtttagacgtggaattttaggtgttggtagaatgctcaggagaagggttaggacaaattgcaggaattttggaattcatttacacagataaaccacaagtatgtgaagcaaaaggtacagtgtcaagatgcgttaagaacaaaattttaggaaatacatttaaaaataaaagaaagagttggaagacaagaaatgtattagctgtttgaagactgaggaatggaagaagcacagcagatacctaagcaaagactgggagatgagacttgggtttggtgtaatgatatagtgaggccacactgaaagctctacatagagtggaggggtcagggttaaatgtgtgtgcataaattattggagtaagccaatggagaagaaagcaagccttcagcttcaacttttaccttaaaatatggttttacgaacaaatttttaaggaaaaaaattatcatggttctaatcttacatgttaacatttccttgttatgtagggatcagacttgttataacataattccactttataattcaatgaagaagaaagttttgtctgattctgaggtatgtaatatttcattattattaccatattgatattctctatataaaaaaatttacatattgtagttttcaggtaaaagctgttgtgaa

SEQ ID NO: 121571 - DNA, 1851 bp, Homo sapiens
ttgagataaagggatacgtttgagaaagtcaaaggttagatttgaatgcagtatgttacagtgttaataatagaatggctttgccaaatatagattcaggaatggccaactgtcaattacggcaatgtatgtgtacttattaggtctgatatatgtatatataatttgtttctttctcccggtgaacctatgaataaaacaatacccctagaatttggcagtgtaaatgtagacataataaaaagtgagactctttatgtcagctacactatattgtttatgaaaagacagtggcagactaatgattatgtagattaggactttttaagtcttaattcaagcagaattcttcttgaattattttaggcatacaaaaataaatttacaaacttatctatttattttagatattgcctcagcatttgtggcccccgtggatctgcaagcctatcccatgtattgcacagtagtggcatatccaacggatctaagtacaattaaacaaagactggaaaacaggttttacaggttagaaccatttgatgtagctactatcaaaggaaagctggtgatctttccacccatttactgatctttagcagtgtttctcaactttttgtatataggaatgcacataagattatggggattatgttaaaatgtagaatcttattcagtagatttggagtgggacctgagattctgcatttctaacaagtcccagtaatgtcgatgctgctggtctttagacacttaaaatacaattcctagatcctagatacagtttttcctagaggctgacatgatttgatattcactgtctttatattgtattttataaagcaaggcaaggtatttcattttctcctagataacattaaaatatttgttcattgatttttaatataatatataataaaaattttgtattcgtattatgtattttgttcttattttgcctgtattcagcttatcattacttataacactgaaatttgaaaatactcagtttttcatagttgtagtttagcatgaaaaagaattagagttaaatggcccaggcataatttcaattaatttgcattatctaggtaattttgatgaatgtctttaatcgtcagtaggctttattattacctaaaatgttttgtcaaaaaatatgtttatagtttttaaataatggaatcctgtttttagttttaatttttatcatatgacctttgcttagcagtccaacaatttaatttgtgtaacattgcattaaaagtttttgtgaccagttatttattactgaagtcctttccgttattcttctttttaacatagagaagctttattcatattttgtattaatatttttctatataaaatgtgcctttggttctttttatgacttaaattttatttctgtatctcattgtgaggggctatcctgtgcctgtacccactagatgccagtagcagccccctagttgtgaaaaccaaaaatgtgttcagacattgtcacatgtcttctggggagcataattgtccttgattgagaaccactggaataaagaaaactaatatattagactttagtttctaaagatttttctgatcttcttaggtgtacttgctgttgcttccttgatatttgtcaaaaagcgtagagataaggagaagtcctccctgctatgtggttcccaaccatcccaccctcaaagcattcttcaagtctttttcaatatcaggtgttggaagtttaagagaaaaaaaaaaaaaaaaggaattcctaactatattcctctttctcccttgaccccttaaattgctaaagattggaaattaaacctagtgcttcagagatga

SEQ ID NO: 121572 - DNA, 1063 bp, Homo sapiens
tattgtaatccaaagtcagagaaaaaataactgttggagaaaataacccagtctcgtagacctcagaaatgagaaaattgtcatactgattagctaagattagttctctgcaggaattatcactttgaaaatttaatgccaataatatatttttttttatctcactgctaaattagagctgtttaaaattataaaatatcttaaatcaattggtaaccatgttacatggcttatgtttttgttttgtttctctcatttattaaaaagaaagtttgaatttgaactcacattgaactgttgtgaatatgatagcaatgcagccagttggtgttataatgccttggatattttttaaatgaataagtgatactgattcactgttttgtttcctacctaaatatattgaagggtggttactgttgttgttctatttggatacacattcatacgaacctatagagtttaatcgtagtttgtgatgagaattttgattgtacacaaacagtggcgtattttctagagtgtatctgccaaaacttagtctaaaggaaaaattacctagcacgtttctagattttgggttaccgcaaccctctagtgattctctcagctaaaactgttaaagattcaagcatgcagaaagcataccttcataatttatgagtaataagcataagcatcatttgtcagttttcataattctctctgttcctacattcaaaaattgaagctttgattgaagtatttctagaaaatgtcactttagttcagttttaccttgtgtatactttatcaaagtaaacatggcaattatgaagtgattcagaaaactttgaaatttgcatattttatagaaatgatttctgcacatgtacttgattacagagcagattttcaggtataattttggagaagtaattatttagagaattacttatagtatcatttaaaaattaatttaaattttagtgacccttaaaacatactttcctttgttaaaataaagagtatatttacaaatctatacaaaatatactttaattttgtgactgttatttttaca

SEQ ID NO: 121573 - DNA, 1639 bp, Homo sapiens
atatgtgaaagtacatttttcatttcaatgttttctgcatatgtacaaactacttgctaaaaaagttaacaacaaaagtggacaataaacttattagtcaacgttattatgcaacatagattaacttattttgattttaagaataaaatggtgaaaccagaaaataacttttcatcttaacttataagtgtgtattcaaagtaatgttatttagaacactttggttatgatttagtgatgttaagacaacttgagagaaaggaggagggagaaaatattagaatttctattagctgaaaaggcattagattttctctttgcaatttcagctgataccctgtatattggattaaaggaaacacatccaggttgtaagattatgactttattttttaggtttattatttccgacaaggacatgaagcctatgtcgaaatggcccggaaaaataaaatatatagtatcaatcccaaaaaacaaccatggcataaaatggagctacgggtatgacattgatttattatttaatagccccaaaaatacaattatggaatttggagaaaattgtatcaaaggttactattaacacaataagaaactgcatcatgaagataccttgtttaattgaagcagtcctagagagtaggaggtgtttaattttcatccagagaaacacaagatttgactgaatttatatactccaatgcagtttatgggttgggtacaaaatttagttatagtgaaaattaggtaataagtctaaagtaagctttgtattcgtaaatttgatgcgtatttctagatttgtcatcagtagttcagttaccaataggtctttggaatggtgatagaaaacttactttagtaactatactttagtaaagttctccttatttttttttccttttttacgttttaaaaatttcattgtaacttgcatactataaagtgcacaaatcttaatacagagctcagtgaatttttacatgtacacagtcatcaccatccagatcaagatttaaaccaagaagttttttctcaacaatgtttagcagtctattttgtggtttattttgtaaagatggttccttatattctctgtctctctcaggaacaagaacttatgaaaatagttggcataaagtatgaagtgggattacctaccctttgctgccttaaacttgcttttctagatcctgatactggtaaactgactggcggatcatttaccatgaagtaaggactgttgaaagaggcaatggttttcttagtattgtagattgtttttcaagattcagatacatttgaacatcttttaggtatttttaggtatgtgacctaatcaatttgtttctgtttgtaattagataccatgatatgcctgacgttatagatttcctagtcttgagacaacaatttgatgatgcaaaatacaggcgatggaatataggtgggtaatttatttagaagctatcgatgtttgatgtggtttttttttcttagtaagtgatttactatttttcataattgagaaaaagattatcagagaaatctttttgctatttgtaggaatgttaatagcaaagtaagatactatgtcagaggtattgttaagttttgtttaggaatgaaaacagtc

SEQ ID NO: 121574 - DNA, 1050 bp, Homo sapiens
attttttctagaataagtgttttgttgcttaaaggatagtcatctctcagtagacacggaggattggtcccaagacccctgcagataacaaaatccagggatgttcaagtctcttataaaaaatggcatatagtatttgcatgtgacctacacacagtctcctatatactttaagtcatttctagattatttataatacctactacagtgcctacacatcattttatttgtgtggattcaacatagtattcagaatgtagcaaattcaagttttgcctgttggaactttgtggaattttttttccaaatattttcagtcaaggttggttgaatgcatggatgtggaacccatggatacacagggccaactgtatataatattgtacaatggtgcccttccccttttatttaattatctttatagttattttaaagagtagatttgtggattaatgcttttttgattattacttaacaattattacttaaattttgtcagagattggctgtgggagaactaactgaaaatggtttgacattagaagaatggttgccatcaacatggattacagataccattccccgaagatgtccatttgtgccacagatgggtgatgaggtactttaaaagttttaaattatccatttttcctcacatagttttaaacattttttaacagctcttgaaatagacttctggaaaatagaagcagttttgtaaagtatctcattctagatatttgtatctatgtatggagaaagtacaattaggagtgaaagtctaataatcttctttgaagctgctgtaaatctgaatattataagaatgaaaattttgttagtgttttaaaaagaaatgtatgttttagtaagaggtttttattgccagctttctttttctttttaaattaaaatatattcatttatcttaaggcttaatgtataacatgttaaaggaaaaatgaaatttagcaatttgttttcatttaattttatttcaaaaagtgttagtgttttgtttacccacagtgttcacagttcattagatct

SEQ ID NO: 121575 - DNA, 1018 bp, Homo sapiens
tcccctgggtaggaacacttctgactctgccagttcaatatccagctaccctgagagcactagtactggaccataagagttcccctgtctggaactcccacctccccttaaaaaaggaatccccatatctccttaatgttgacaccttctgtgctctccagggttatctttttgctgtcaatagaactgagaaaagtgaccccctcttatttttatatgctcacagaatttgtaacatatgcaacactcagaagtcagtatttttcttaaaatcttggaaggtacttaaatttgttttttcacttaaagttgtgactttatgtatcttcaggttttgggggagtttttttgcgatatttaagtaaagcctatagaatttcaagaaacttttgaagatgagttgaaaattagggaagtttttttgtagtttaagtatttgttctgtcatttctctttattataatctttcttttcgtttttataaaacaagtcttaaaattttatcttgtgtgttatctaataatcccttctctccttctagtgactactccagtgattactctgactggacagcagatgcaggaattaatctgcagccaccaaagaaagttcctaagaataaaaccaagaaagcagaaagcagttcagatgaagaagaagaatctgaaaaacagaagcaaaaacagattaaaaaggaaaagaaaaaagtaaatgaagaaaaagatggaccaatatcaccaaagaaaaagaagcccaaagaaagaaaacaaaaggtttggtttttaacattacaaatttggtgttttctagagaaacagtttaaagcacacatcttgaagtacaattgatcacaaacattgttgaagtgtatcagcaaataataatagaaaaaactcagaaatacacagtagtaaaaaagtttacctaaatatatttagtttattcgagtttttagatatttaacatgtaaaagtatttacttacaaaattgccatattctaaacattgaacatttaac

SEQ ID NO: 121576 - DNA, 1017 bp, Homo sapiens
tgtattttgcaactaattttttaaagagaagcagctgactcttttattattttattattattatttttgagacagtctctggagtgtagtggtgcgatctcagctcacggcaacctccgcctcctgggttcaagcaattccgtgcctcagtctcccaagtagctgggattacaggcatctgccaccattcccagctaattttttgtgtgttttagtagagacagggtgtcgccacgttggccaggctggtctcgaacccctaaccttaagtgatctgcccaccttgacctctcaaagtgttgggattacaggcgtgagccacaacaccctttgcaactaatttaaatcaaattttaaatatcccaatatgactgatattataagatatcactgatattttctgtaatcataaaatgttattttataaaattatgcaataagacatgtattcaacatatcttaggaaggcgaagtagttgctgtcagtggtggaacatccgaagaagaagagagagcatggcacagtgatggcagttctaggtaaatgaatgctttttatttttccaaatgttatataaagtctttagaaaggtgtttttttttttaaccagcaacacgtttcaaagtctctgtaagttcaaagttcttcagagagtttttgaagttgtatgaaatgtagattttctgatatatgttctctatagaaaataattttttggtgattgcaactagatctgcaaaatgatgcttttaactttatcatcttagtattgtttcttctgaataccgttataatgttgaattgcaaaccagtttcattactggttttgaaaagtatgaagttaagaaagcaatgcaagcctcctgagttaactatcttatatagtggaatttatggaatactaatgataagaggaataagctctcctttttcttgttatgcctaccttatttgaccagaccagtgaggattccttcaactccttatactggcgattcacattgttgcagagctta

SEQ ID NO: 121577 - DNA, 1050 bp, Homo sapiens
gtcttttatcatgaatccttatgtctgtcattaattagaaaaaaaaaaaacagcatttttgtaactaatcaatcagcaagtaaatatcagcataaccatgataagcctttaacttgatgaatgttaaaatatttgagttggtactataacctcatccatttaagtgatatcttaaatatgaacaaatgtttttattgttgttgtatgttaggataaattgtctcactttgtcacccaggctgtagtgcagtggtgcaatcatccctccctgcagccttgaactcctaggctcaagcaatcttcccaagtagctgggactataggcatgcgccaccatgcccagcttgaatttttttaattaaaaaattttaacttttaaactaaaaatcctgctctttaaacaatctgtgaataaatttaatttatttttttctagaatcatgctcatgagcatttcctggatcttggagaatccaaaaagcaacagacaaatcaacacaattatcgtacaagatctgcattggaagagactcctagaccctcagaagagatagaaaatggcagtagttcttcagatgtaagatatcagcacattcataaattagatgtcatttttacttatttttttaaatatgagtttcattcttcgcatttattgatatgtttgtagatgtagcttaaatatggcattttggggtcttatgatacagcttttattttctaaaaatctatttctaggcatggcacacatacacataatttcaaatccacaaaataaactcgtgaattaattattctcattttatagataaggattctgaggctcaaagatatttagactatacagtcacctattaagaggtagagcagggattaaatgcaagtttgttttacttgaaagccaagctttttaagtggtaccatgaagctgtagtgtagtgtaagtataacaacaaatcaataagtatttgacaatttttgttagtttttaatctctgtaccagtttacagctttctcagtgtaatttttaaatattcctcatgcgtcat

SEQ ID NO: 121578 - DNA, 1528 bp, Homo sapiens
tgagttttttcagtcggtgaaacctgacctccctgtctctggaaagagtgtagttctttcagggctttccgtgtaacctcagggtctgttgtattgaatttttaaagagattccagctatctatatggaacagaagattatcaaagcataggccctatcctaaaaaaaaaaaaaaaaatccaatttctcactcttggaaaaattaccctaggaatcaccacattcccagaatctaatacttggtttgccagagaccatagcaggaaccagtagtatcaagttggggtagacagagtttgtctttccattatttcagtcatttaatgccggatgtcctgagcccacaacctatgaaattaaacttagaaatctttatcacatgcttccatcttaaaataaaacatcaggagtagcgttcctttcctgatacctaacattccttttggaggaaagttatgtgtaaaattctagattaatgcatatggcttttgtctttcagtaggcaagaagaatggagaactgcaaagggagaagaagaaataaagacttacaggtcagaagagaaaagaaaacacttaactgttccaaaagagaataaaatacccactgtctcaaaggtacatattaattattttgatgtttaatatttgcttcttaagtatagtgaccattttaaggctccattttgtaatttaacatggtattataaacaggttaatgataaaaattaacatagtaaatcttggttatctctggattatctattgtttactatttaaaatttttaattccatttctgctttgtagcataccctttcccaaagtgccaattcttacatactcatgaaattctaataaattacactgaagcctcatcaagaactttctttagctcttcataatcttgtgtgccatctttgtacagtctaaaaatagcattttgttatgtttttctatgtgtttttgtggtgtcttgcatctattcattattctagataatcaagtcagctaatgctgctatagataatatttctcattttcttcattaagagaggtagattgtccctaatagttttgacttattggcttttctgtcatcctactctggaaaaactgttgcacccagtagatttcaattggtcatggcctaattgagagagatacgtacttcctgagtgtgaaggaatcacaaatatcgctttttcctttttttcttttcttttcttttattttggagaaaaacatcttagcttgaaagcttcagagccttagagtctgaaattgaggaagcctatgtgaaacttctttttaggtccaagtcactatctaaagcaattattgaaacaaaggaaaaataaataactggccttcttcaccagcttcgtgttccttcctttttttcatttgagttttttaaaactcctaaatcagtcttcttctctagaattcacttttctgttttattactcatctcttcaaaatactcaagtagtccttttttctttactgagtgtatcataccctggga

SEQ ID NO: 121579 - DNA, 1079 bp, Homo sapiens
tgaataaatgaggcagtaaacattttttttaagaaaatgggtaatcagatgtgtcattttaaaagaaaccatgatctaagtggaaaaccttactattgccacttattagatatgtgacttcgaacagttattttggttttctcatctataaagtggagttgtttatacatacctaatggagttaccatacggattatgagtatctgagtcatgataaacacttagtaaaagttagcaaccatcctcatcgttatttttgataaactaagatggacagatgttttctttcctttttttttttaactcccatcatttatagttgatcatttaagtcttttacccaagcaacatttatgtttaattctgaactcataagtgaggttggtgagtaaaatggtttgaatagtagctaaaatattcgtaatattttgtgtggtattgtataggactgaatcaagttttaagtcagcaagcaaaccaggagatcagcccactggacagcatgattcaaagactacaacaggagcaagacctgagacgttctggtgaagcagttatcagtaataccagccgtttaagtagaggtaagcaggtattctattttaagtgaaatatttaaaaatttgaaacagcctaaatctcccacagtgttaagtggtttaaaaaaattatggtacatccgtaaaatgaaatattaggttgccaaaatgatcatggttttgaagaatatttaatgacctaagaaaatggttcataatgagatttcaagttagagataatgagtttttaaatgtgtatgtcttccacattttctatagtaaacatgtagaatagtcaaagccacattcttgaacatctcatcacccttattgttgtatattattaaactttaagagtcaaaacaaatttatgaaccattaatactcttgggtttgtctagtttgcttcttatgaagttttctcaaaaatacttagcatttttttaaagtaatgattttgtatccttggggcttaatagtctatagttatgattcattgacttatctaatcaactgaataaccatgttttgttttcatta

SEQ ID NO: 121580 - DNA, 2027 bp, Homo sapiens
cagtaatgggtgggtagcatatctagacaatgtggatatgctggacaaagggatgatttgtgtcccaagtgagatggcacgtgatttcattatgcattttggaacagtgcacagttaaacttatgagttgtttatttctggaacagcatttttggagtcaggttgaccacaggtaactgaaaccatggaaagcaaaattgcaaataagaggggactcctgtgtataatcccttacttgtttcagagaaaatttaaagcagctacttttctgatcataatacttaaggtagaaaattaaaatacctatttacaattaattcaggaaaataatattttaaaaattgttgcttaataccattattcgtattcaggtgtttgctttctattagaaatgatgtagactttttttctacaatgatacatttttatttttccagtcttttatggacttttctttttgcagatagcagatcagatgttctttcatagtgattatcggccacttattcgtgatgccaacaattttgtattagatgaacagactcagcaagcacctcatcttatgcctcccccttttttggttgatgttgatggtaaccctcatccatcaagatatcaaagattagttcctggccgtgaaaattgcagggaggagcaactcatccctcagatgggagtaacttcctcaggtaggtgctcattttcttagacaatcaaattttcttcttcccaccgaactgttaaaattgctaattgagtaaaactttgtttgcagttgttaagtggataagaagtaaaagtatgttttatacttttatacaggtctttgatcatgcttaaggattacaagttaattatggaacatgggcgatttacagtaataattttgatttattatccatttgtaacccctagggatcaataaggtagttcctgtatttggtgtgaaacaagtgaattaatttacttactcagcaacatttattgataatctcttctgtctctgacacctgctaagccatggctattcagtagtggattaaacaaacatgatccttgctttcatggaatgggttagtagattaataaacacagttcattagaataaacaaatacatagttcaaattgtgatgaatgttactaaagggaataatagcatgatgtgagagagattgtagattgcctgttcacattgaagatgttttaaaaagttaccaacttttaaaggtttataagaggattgacatggaaagtgttgagagctgttttagtgaagtataatggagtgttgaagaattaaatgagagttaaaatggagtcaaagtctacaaactgctttccctcttttgacaagaaatgcagcactagtgtattaagtaaaaataaggaaaggttctgtaaagaaggttaaaccagttttgtcattatgaatacttctactatatttttagactagaaaaatatttatgaaaatattttaagttctagacttcaatcgacaaaagcttctaagtagcttttgtgttgagtgacttttaaataatgaaattagattctgtaaggagcacagaaaaaatcaacctcaaacgtgcatcttatttttcttaaaggatttagcatgaagttgcaataaagatggacatactggatagaaggggctcctcttggaattagacacgtccacttagaatggagggtgagaagaagcattagaggaatcattcctgctgctactcctagagtagtgcagtccagtggacttatctggagtttgtgagattaatgtgtctcagtacgtggacacagcatgaactcaaagaataagtagtattcgagaagtatggacagatactcagactcagattagataagtttcagtattagagaagttctggtcataggactgaaattaagagaaatgtcttcagtctctcggagaggaattggcaaaatcagattgttcccaagcctcaaaatagatagctactttagggtttcagacacagggaaataaggaaaagactca

SEQ ID NO: 121581 - DNA, 1771 bp, Homo sapiens
gggtagaatttttacctctttcagaacactgctaaagaagttttcaactggaacatagtctgaagaagcactgagagcaaaaaattcagagtggtgattggccacctctgtttgattgacaggttgcagggaggaaacccattcgttctggattaatggaactggaaaacagaaaacaattatcaggtaaaaaaaaccttttctttaacctttgaaattcaccatttaaaagacgagtcagactaccagggaatttattaccaaaaataataaaatctagtgtcatttgagcaatgatctctggctactacttccaagaattaccaaaaaatccgtacagttgctacatgtcagcttttgcagaaagggcatgattgaacggagatagatggagtgtaagacataattatgtgttaaatctgagtttaaaacatgaagcagaattctatgggtgggggagttggtattcttttatttcctgaattgtgtttggtctgtggatagaatactttatttttcaaggctattaatctggcacttttcatgaatattcataaattttattactgtacaatgcttgttttacttaatcttcacttcattaggatgtatgcttttatcttaaaattattgtaataatagtgaccaattcttttcattttaatggtagttttcttactgttggttaaatatatttcagattgaaggccaaggacatggcgcagtatttgactgcaaatgctctcctgatggtcagcattttgcatgcacagactctcatggacatcttttaatttttggctttgggtccagtagcaaatatgacaaggtagagtatgatgactatatatcatgtccttatttttttttaatgcatgtttaggggttgtatgtttttggagtgggtgagaatcagcatctttacattcaggataaaattcgaagaatcttgtgttaagtagtctggagacttagtttcggaaaggaaggtgaagacagcagttaaatctcactttaatagggcttattatttgaaaatctgcatatttcaggaaaaaaataactcttagcctcctggggcaatctagattggaattcttaacttggggtatataaactggagatggaagatgttatccatagtgggactctgaaattatgtaaaatgtttttttaatatagataatacgtacttatctagggtacaaatctgtggctttcatgtggctcttaaaaatgtattatattacctgattgtagttaatgttttttattaaagatcctgtccagtttttggggggcttttttttacagagtaggggtgaaatgtctcactatgttgcctagactggctttgaattcgtgggctcaaacaatcctctcatttcagcctgctaaataactgcaggtggcactacaggcatatgccctgccactttgctcagcagttaaagaccccaactttaagattagtgactaaaagaattaaattgcttacttgtggtggaatggtataaaaggttatgatagtaaatattgagtagtttataatttagtttaaaaaattgcaaattaaccagtgaaattttatataataaaatttatgtcctggttgagtttatattaataattttatatcatctcaaaacatttagagaaaatgcttattaacccttagaaaatcttatgtgatttttatagtaatattacacaaatcatacttactgtatacctaaggatttaagataaagcatggtagctctgtggaagt

SEQ ID NO: 121582 - DNA, 5896 bp, Homo sapiens
gattctttaatattgagaagaaaatcattgttttttccttggaaaatgtcgattttatttctagggtagtacatagtgaccttgaatcacttttgaaaatgttattttgtgacctagccatgaaaattggaatgtttgcatataaaattctaaaaagcccataaagtttcagaagttattagaatgctgcataaataaagatgaatgctgtctttttaaacaagatctctgggaaaagtgcattttggtaaagcatgtatgatttttctttgggggatcggattccttttaatacaggtttgtaagtggcagtcgtgatgggacagcacgtatttggcaatttaaacgaagagagtggaagagcattttgttggatatggctactcgtccagcagggtaagaggtcaaatttgaaatattatgtatatattgattttttaaagtatgttatagtgcaggttggtgactctcagcctataaaattatatatcatgttaaaattactacttttctgcgataactagaggtacaattggagatgagcagtgttgatttttatgaaatgattcattggcatatttcaggacattgcattaatttttttaaggagatgataaaagtactgtaagaaaagttttaactttaaatatttttttcagaaaccagaacatattatgtttcgtttatcacagagggacaatattttatgtccaatggtttcttcaagccaagataaattaaactgcgtgttgtagctgttattttggttttaatatttttctccacttgtatttgtgtgtagtcatctcagatggatgggaaagcagaacagtcagcaggggatgacagcaacagtaaaagatggagagtgagcagcatggcacagaattcctggatctagatagagttatagcagtgatatttatgcaagatcatcttactaatggcttagaagtgctagaattctggaaatcctggatttcctgactcagtgcagggatttttaccatcattccatgttgattcaaacttctcagttactgttaagtgatagttattatgttagtgaatataaatactaattatagattatatgttttggtttttgttgtgtcagtattttaatagtcagtgtaaaacacttcctcactttcagccaaaaccttcaaggaatagaagataaaatcacaaaaatgaaggttactatggtagcttgggatcgacatgacaatacagttataactgcagttaataacatgactctgaaagtttggaattcttacactggtcaactaattcatgtcctgatggtgagaaaaaattctaatctttatttgatataactgaagctgactatagaatgaaacattctcattgaggaataaagtcttttatgttagctaaaaactcttgcttgctggggtaacggctttgtgagtgattgggaataattttaacagtgcagttaaacaggtttggcttggaaatatatagtagatatttgctgtttttttaatatgaaaagatccatccaccaagccctggacaatgatattagctcagtttcattattatatatacatgacaaatttgaagatttttgccaatttaatacttcttaaaactccatttctagaaatagtgccatattggtatttcattatgtttgtttttctttcttttttaatatctatgattctttgacacttcaaaaatatttcagggtcatgaagatgaggtatttgttcttgaaccacacccgttcgatcctagagttctcttttctgctggtcatgatggaaacgtgatagtgtgggatctggcaagaggagtcaaaatacgatcttatttcaatatggtaattatcattctcttcattttatacctactaaagatttgggagctttttgacaaaggtactctgcatgtcacaaaggaaatccatttaaaaattggttcattattttgactttaaattcccatcaataaagaatgatttattccacacttttattgacatgctgaatttaaaagaaaattaattgtgcatattacagtgcctgtacattgtgataactgatacagttttatcagttttagcagtgaaactttggaaattcacaagtatgaagatacaatatagagaagaaaaaatacttggaaaaccatgtgaagaaattataaataaatactcgtattattgtacttgtttaatagtcttctagcacaatagaattttactcaagtacactgattttaaaattaaggccaaagaatcaagcatttcttgcttttaatcaattggtagtatattaaatatttgagtttatactcttctcttcacattttgtttcttagatgttaacataattggccaagtatttgaattacaatgttttaatatatcacatacaacttaccgagcagtgtttctatttactgtatgaagtattaaggtctcctcaactactgcagtttgtgtagtcatattttttaaatgtctactttctgtatattagagatacctttcaacaaagaacaaaagaaaaaacagtttccactatttcagcatgtttaaatttttttaaaaaaccaattatagaaatctttagtaatgaaccataaaacaatacaattagtacatgtggtcagaattattttgccaaataaattatttcacaaaacagttgtgaaacatggtttgtgaaaaaattacacgaatgtgatgctatgcttgattgataatcagagtaaagttatttctatgtcgtgagtaagcagatataatagcagattttttagtgagggaaatagctttagctatctttaaggctgtgccttagaatacattaggtaagaaataaggtttgtaaaaccctctatttctagaaaacagtgttaattatttggtgtgcacttgttagtgatggatggatttcctttgtgattgtattgagatttttttaaaaagccacctgtaaatatgctagtaaaaaatattttctgcttttctatccttgtgtttctgatttgctcctttttggaatatctgttgaataaggaaattagtcatttctcaatctgtctttatagcttaaaaaaaataatatgtgagctatatatatactagtggcttcatttagtagttttgtatttccaaaggacattattatattggtagagtgtttggagggaaacttttctcccataattgaataccgctttaacttttcagttatataaaggtgaattttcccttatcaggtaagttggtcacactaatattctaccttttcagtagataacaaaaactgcagcaccttgagagttaagtgatttgctcttagaccattaaaaattagtaatgtaaccaggagtagaagtcagccataatatattgtatatttttaaaaattagctgagggattggttacattactgccttaaaaattgtttattgttaaataagagtgttagatgaggatatttttctggttctttttatggataagagataggaaaactctaaagagcagaagaaacaaatacatgtaataagttgaattggatagtattcatagaattgcagacagtgagcaaaacataaaccaaaaaagctaaaaaacagaaagtgagccacccttcatctcattaaaataaagatactacctttaattttttgtatgatgtttaatggtttccaaaatgctcccacatattttacctcctttgggtctcatgaaaaccttgtaagatgatcaagatagattttattattcttggtcttaggaatggagaaactgtacattacagagataaagtgctttgccccaatttactgagttcacacagctattatgcgggcacttggagcataaacccatgactctggttgtactcaaatcttgtcatggttggctttttgagcttttgtcaatgttactgcatagctaacttttaacaatactcagttagtgatatgtctatgaagaaatgttttcataatggtaataaatctgagtggatcttttgacatcttactctttaacttgattttttttcctgtctgtcttttatgagttatctaattgccctaattctttttgctcttcactcttttgttcttttcattgcttgttttatttatgggcaaatggaagataaagcatccagcattgctattaagaaaataaagagaaacaattcgagggagggcctgcgttctcactgcttgctatcatgaatgttgagttttggctataattatagctatttggctctctgtagctaatcaataagtttttcagttactaaaataccacgatacttgattgcatacaaatttaatccctaatgttaagttgtagtagtaatcacaagttcagtttagtaaatattttttgagcaccatgtgaagggtctagtcatatatagtgctttggtctattagaggatgaagaattctggtggaatactccttttttgactagaaatggtgaaagttatgtgaagtatttttaagattaaataatatttcatgtgactgttaaaactgaagtttataaaacagataagtaaactcaccattccacctacagctagaaaataaggaatgtagactatacctttagaataacagttttagtacaaatttcttaaatactggtttttatcaagtatattttaagaatactttaatatttctcctgctttttgaataataattgaattttccattggaaatttatacctttgcaaaagataatggaaatcatgtaacatataatttagtattttgtattcatcagcattttactgcattttttgtgtaattatggaaatgtaaattctttttttgaaattttagaaatagccaaaaatcctgttatgttaaaaagcctttcaagtgaaaaggtgaactttcaaatgcctgtttgatacatagtaattacattttaataatttttaaatataagattataaaacattaatattttaatattgcactgatagtcatcattgtaataagtattctaatttttttctgtatcaagccatgacttatacttttaaaaatttcttgtgctttattttgggaccatctaaatttgtcagcaaattaaagagtttgagattgggaattgagataaagctatttagttcttttatgtttaaataatttacttcattctgaaatcttataaatggattctcaactttcaagtagtattctccagagaaactgaggggtttatttttcttgtttttactgctaactttcctcctaatagaggatctcaatgataaaagcagttggggagtgggtgctgggtttgtttttgttacttataagaagtatatgacacgtgagatgatgttttaaaagaggctaacatagggcatgaaatggaatagacagtatatgtagcttgtactccccctaccctttctgttgtctcatctttaactaaaaacttttaaaagcacttattgggaaagcctttgtggttctttttgttgttgttgtttttcttttttaagtgaacaggagaagaaaccaaagagaattttgtagaaaatattatgagacaactttattctttaaaaacaaacaaactacattctaggccttcagtacttttatttctttacgaatcaactgaacagtccttacataacttgagtattcagaggaaatgtagtatatatttggatattttactgaagcaagtagtgtatattaagaatattccaaactataatagttgggtataacttagtaagcccacatttgtttggcattggcaggaggtaaacatcagaatagctttgttttgatgagagttgttctaaactctaaaggctctatactcccattaaatgctaaaaggcagat

SEQ ID NO: 121583 - DNA, 2525 bp, Homo sapiens
ttgcattctgtatcagtaaaaaagataattctctttgctcagaatatatattaggttggtgcaaaaataattgcagtttttgccattattttaatggtaaaaagcttttttttaaaaaaaaggcaaaaccgcaattatttttgcaccaacctatagctcagaaatattttatgtatatacttttttccagtaaatgatcacaaaactaaaactgctctaaatttgttatatattgtgaaagttatataggcttaagctctaattatttttgcatttcatcaaatagtgtagaagaactatgccaaaatgtacagtaagtagggcttcaaatataatcagtatattggaacattacatacacattgttaaatgtattagagctggtgtcatgataaaaatcttcattttctctaattggttgactgtaacattaaacatttaatatcagtagtattgatataaaatatgtaatctgtaatacagttaggcaattaatgtaaatacagctgtgtgtaacctgttttctgtagactgctattttgaatgagcattcattgtagttgacgtaagagtcaaagtatcttcagattttcactaggttaaatgtaatatccctactttttggggtcttaaaagacatgttttatcacattagtaggtcaaagaagggaaaagcttaattaatgtaaaatactgaaaaagttcagttattgatggtatacataaggcacagacagcacctattttgctaatgtattcatgtttgcgaatagcttagttccttatatgtttgtacgttgctattctatatgaaaaactgagaacatgttaaatttgattagaagtaagtgtaactagtaactgcatgtctggtgtgacagtgaatttggaattgttccatgtacgtattgttgtgtaataaggagctcctacaaaatctatatctagaatttctacaagatcttctgatttatgacacataatgatttctaagttgtttttaggaagggagccatctgttgcttcttaattttgtccttctgggattattttttgaaacagattatttctgctgctactggttcctttaggatatttttaattctttattttttgtattacagcccaagacctgcaaaatttacagagcgccctcggcctggagttcaaatgatctgttcttcttttagtgctggtaagtttccctcattctaattttcgacttaaagttgttcatttagaagccttatagtggagtgtgtaatatttaggaaaatatttactgttgtattatcaatcatgttcttatacatatgccagagctaataagtaactgagaattattataaactaacttagaaatatttcatttatgcaagagtttagtttatataatcacatgactgtttttctttaagaagactataatgttctagtaggagagaataaatagtttcaaaatcgaccctgttaaagaatgaatgtttaaatagttgtttcattgtaagaatggtattttaaatctggtttatgttttcatggattttgaaggtattctatagttaagtaaaataaatttgattcatatttgtacatctttatcagttaattcgctacatattgttcttatttgcactttaaaaagtgattgtatagcagtgctaagattccaattcagatttgtgtttatgcagcagcattttgaatggatgttagggtatttttaaacaagttataaaaaaaatctggttatttgtagtaaattgataagaaaattaaatgaaacatgagtagatccaaatagtgtctaatacctgttcctcctacctttattttcagttttactttttccgctcattttataattgtggataggagtattacctgagataagggatagcaaactaatgaagtgagtctgtctttgccatactaatatccaaacatgttcattttctaacttctagatgttcagtgccactgccatggattcagtattccttgtagtagtcatacaaatataggcatcatacatgcatccagaatactctgaatttttactcctttttcaaggacaatttgatttttttaaggggttagtgggtagatcatttagcaaaagtacttaaatattttattatatacaggtattgttttcaatactgtggaagagtgttactcttgagtacactgcatatacaaataactgtaatgcaaggtagaatgaatatgctacaaaacaaagtcttaggggagttctgaagagagcagcctcatttaattgcaaagtttgtaaagaaaagttactgagggagttgggccttaaaagtttgataagattttgacacatgggaaatgagacaacagaaaaatttcagcagaattgcgagagaaatattttctagtgaaggtgactgataattttaacatggtatggttatatattcacttagtgaaattattttttgagcaaagctttacttctataaatattgaaaaattcattctagtcagatatattcata

SEQ ID NO: 121584 - DNA, 1880 bp, Homo sapiens
gcctgaggtgaggttaagggtatgtgataagaatactagacaacaatatggatagttgaccaaagttaagttttactggtctttatagtggttagtaacccatttattttactccaaagcttaatcagaggaactggttttatcgttaattggggggtgttttaggtatcattggcagagtctgatttaagatacagcatttaacatactctgtttggaaacattaatatgttatatttattgtcagtatgatgatttatatgttatatttattgtcactatgatgcagaaagttgtctgaattatatgcctccataggtcctctgagttctttctaatgtcagatatgaaggtgtttctttaagaattagattggaaggtcgttaagcattctaacatgaacccttagtaaaactgtatcctgtaaaatattcagtaattttgcaaaagtgtgtgttttctcttttaaccttgtgttaaagactagaaaatgtggcaaaaatattaagttttgaatctgggaagtagatatatggggattaacgatactattctttctactttcttatatatttaaaattattataataaaaaataaaaatagagtctgaatgttctatctctattttggctatataaaatgggaatgttcatttgtaaatatagatattcataggaaactccatatcctttacaatttctttctggacttacactactatggcagagtaaacaagtaattatgtatttttattgacttcatacagatgagattaatttttttctgataactggctttagataatgtcatgtttttagctgaagatcagtgataggaaactcacagcttcctgagagaaaaagccccaaacaagcttacttttagttttgtattacaaaacaaaatagataatattagtcaccattgtagcttgcatttgttttgcagctatgatttttttttttttatttcagaagttcaatttcttttacagaaatccacattgagggtactttgatagtagatagggaaccaaaggtaaatattaattatcttatcccacttgtcttatttgctggtgagtacacaagtgctctttttaagtggtttaataaagagctttgtgtaagctaacacaagtatttaacactttttggtatttaaaaatatacttgttcagaagtggacagaacaggtagatttatcagtgttaagattttgaattaaaatttatggggttaattctattaatatccattcttactttaagggttctgatgactgtcttgtgaaaatatgggcaacagatgatgggaggttgttagctaccttaagaggacatgctgctgaaatatcagacatggctgtaaactatgagaataccatgatagcagctggaagttgtgataaaatgatccgagtctggtgtcttcgaacctgtgcacctttggctgttcttcagggccatagtgcatctattacatcactacaggtaattgtcttaatccctatacattgttgttgttgttgttgttataatgtaaagtaaatttaatgaagtcacttttggttattaaattttaagaagttacttttataatcacctttataatccagtatataaggccaactaaaatgaagacaggagtatgtctgctttctttataaatatatggactttaaataacataaccttggtaaattcttgccattttctaactgttgttgttagttgctatttgtatggcaaaaagtagattttattttgactgtgtcactcttgtaaagattttttttctgtgattgtcttttcagttctcaccattgtgcagtggctcaaagagatatctatcttctactggggcagatggcactattt

SEQ ID NO: 121585 - DNA, 1056 bp, Homo sapiens
attcataagaatgatatgaattgtatcagtattgtgaagcataacatgatgtcatgattttacttttgttatatggtctacctactgtagtgtacttaaaattctttgtgtactgaatgcaggtgagaaccaaaattgcttcagttttgggaagataaccaaatgtagtgaatatgttgattcaatttgtgaaatgtagagaacttaatttgaatgaatgccctaaagcattttttttactcagcaaatccctaatgtgtttccgatgtgcgtatagaccagctttctgggagtcatagtctgctacagctcttccttcacttccaacagataatcagtgatgtgctccttatcccttttattccccaaacagctgttataaccatgtctttgattattcttttttgctataataatttgtgttaccacttattctctcctgaccatactattttaacaactttcagctggtctcctttctgtcttagcctaattcacactgatgccaggatgatctttagaaaacacaagtatgatcctgatactcacctgtttgatatcttcagtgaccctcattacacaccacttttcttagtaaaccgtaaaaggcctttcacaaattttttttactttttcatccttatgccttcacctcacactctaaattaccttgcaggctgcttgcagttctatgaactactcacattgtttcacattttcatgcttttgaccatactttatagtcacattatggaatgctctttttaaaataataataatgatattattaaaataagaatatgaatactgtcaccagcaaaagcagtgttagaagataaagctgtaaccatgtgtcagacactgtctcatctcttcaccctcatttagttttgtgacaatcctatgaggtacgcataggtgagaaatctgaggcacaagaagtgtatgtaacatgtccaaagtcatgcatttgaccctgaaggctgtcctctaagctacattacattgcctcttcttgcgtgagactctattcaagcatcaccacttctgggttcc

SEQ ID NO: 121586 - DNA, 3472 bp, Homo sapiens
ctagcttaataaaatttaaggacttccaataatccaagagacatttcctttttactcaaattaattggtctcttattaatttctttagaaagtgaataattgccatttgcccttctgccataaaactataaattaaattgaaccatcttgtatatcttattattaaggaagatttacttatatacttttttaatttaaaaggctctatactcaagtttgagaaatataagagaatttttgtctttaaggtacttaagatctgataggagagatagacattttccaaatggtattataaaaaaatgggagttcatcgaatgtgagtcctagctcatccttctatctttataaaaattatctacctatttgatatggtcaagccttcctcaaattcaacctcttcagttgtacaactactgaactatacttacattttctcctttaaatcctatagttagaaagtttgaaccaccaccttattacctgggaatctacgtatgttctttctgtatgtcttattttttagtgctgttaacacaagtttgtcaatgtttgagagccaggactctgctaagtaccttttctttcagaatatagtcatagtatagatagccaatagttaattggtagctaagcattacaaagggtagtgtggaatatagttttagctataaatatgtttcacctaatgtgattctggaaaatgttgcttgaaaatttgactgtaaagtaactttgaaaaggttattcttttttttcaattggcttccaaaatgaaaatagatttaatcccagtttaggtcaaagattcagtaaaacctgtgtttaagaagcagtaacattttcttttaagagaagtagtttttgcttataaaatactttatcatctccgatttttagatggtctttataacaaatttatcttaaaaattcttacctatatactaatgcttaatcatcgagaaatgggtcttgatatattatttccaacaatgatattttcacacctgaacactgttagtttcctaaaattcgacattttggaaattttggatagagggaattaaagtacaccttggtaatactatcaatgtttttgtggcatgtcatcacttattttcttacaacagacagctgagtctgagatgtgagtgatccttggtgtttggataagatgattttaattctcatttggcaggaaaattgatgtctatggtttttgtgtgattcttgcattaaataagtttggagccaaagcattggaggatgtcttttaccaggccattcctgggcgtgaagaaaatgtgtctggggtctaagctatgattgaaacttattgagtctctgttaaattggtatataaccaacttaagcctaaatatgctaattgacaactgtcaaaccttgttttagaaattcccaagtgttggggtagattgttgcatagaacttacatgctaacagcaagagaaatactgtatcagaatataaaattattgctgtgatgaaagaacatataagcatagtgtaattattctttgaaatattactgcttaggaacctgtaaaggctatatatctcctcaccaggcccaaagattttttgggggtttggggtgggggcagcgggagtgtggagtggttggaaatatagtgtgagccaaacatttattggatgtgaataatataagcaatactgagattcttcataatacaaccaatatatttatgttttatcaactttagggcataattactgggctctgtaccttggctaagtagtattttgtatatatatttagttttctttagggctaaattcgaccgagaaaccctagtgctaattacccaatgtagatggcagtcactgttagaaaaaaaaaaaaaagcctgtattagaagatcatctgtaggttaataatgtgcctgcagatcagtcaacatatatttattgagcaccttctttgtccataagttaccagtatagaaaataagtacagtagtaatttagatggaagaggacattttcagctggagtcaatgtatcaagctttgggacagaagataaacttcagtcagatcttgaataatgattagaatgaatgagttgaaagggagaactaagggagagctaatagattccagagaaggaatcattatacaggtgtttggcaagattcccagtttaattattattttttaataatgcaaatgacgtattcctttatcttcacttgttataaagatgtttttaaatatcattctgcatgtcagatttcgagtgttcaagtgttactgatttatgaaaagtacactgggttccagttttaagtgcctttgtaagaaaaactatttcatagacagcttttaaggaaataacatataaatgctttaggtttttaaagagcactagccagagagtaaataaatctgagctttaatcctagcttcatgccttactttgtgatttttggacaggtcatttaacttacaaattaagttataaagtgagaatgatagtgcctgacttatttcaggtgaaacaatgtttttattcattactttaaagacttttaactagaagccatatatatcagaaagcttctttatttttacctgcacatgacaaattggagtatgtgaattcttaaaaggtgatcatgtaagaaaattaatttccagattacatttattttccttctttttcttggtagcggatactctgttttcaaggaagctgaatgggaaatacagacttgagcgacttgttccaactgcagtgtatcagcacatgaaaatgcataaacgaattcttggacacttgtcatctgtgtactgtgtaacttttgatcgaactggcagacggatatttactgtaagtaattgctaaagtattatttatattcatatatgtaattgaggaaatattgcttataggtgaacttgaagtaaaaccttgcttttttttcttttaataggaaaccggaaattcaggtggtttcacttactctaacagaagagtttagttaaatttggactttatccaaattcagaaagtttctaaatgacatgttgcagcacagtcacagttattatatggttgtacatcatgaataagtatggttctcaacatatatcaaatacacagtttgacattttgcaaaatggcataaaataattttaattttgaactaaggacatctaagtatgttgagagattattaaatgtgcctttttataattgtatgagattattgaatatacctttttatattatctgtagaaaatcacttgcttgtctatgagaaatttcccttaaaatagtgattttaaaaaagctaaaaaattctgagcatatctaatactcttattacctgttattcttaacagttcattcttcaaaatatctgatgttttgtttatagagcctctttgggtttgtttatttgttattgtttcttgtaacctgttga

SEQ ID NO: 121587 - DNA, 1050 bp, Homo sapiens
ctttatagccattttctcaagggtttgatgcctggctttaacgtaacttctgttagaaaattatgattagcaatttttttttaccctcatatttccttttcattaaaacacttttgtggatctctaaaatgagcaacatttcaagtaattttatgccttattaaatactttatgccacacaatacatttatctgatagaaattctgaaatcaccaacaccatatatagacaactatttggacttgtaatgaactaatgaacttggagggtcatttttatagacattactctctgatgtctagtcatgaatatagcattattttcttggaaaatctaattatcatctaaaattggagatggcacatatgaggggtaaatcagtttggaatttgttttcatgtactcttaagttactcaattttagtgtcatggagttccaaactgttgttttacagtgatagttattaatcgtatttgtagaaagccaaagcctttattaatacagatggtggagattaaaatgaaacctgttactgattatttagaagttactcccttttatattttaatttaggaatcatttctgtagttgttaattataaattataattacttttgcattttatttacagaaaacctgggagctttccttccaagtgttttctttaattagaatcacagaataaaactagtcaagaccagccatggtggctcacgcctgtaatcccagcactttgggaagttaaggcaggcagatcacttgaggctgggagttcgagaccagcctgaccaacatggtgaaaccccgtctctactaaaaatacaagaaaaattaggcatggtggtgcacacctgtaatcccagctactcaggaggctgaggcatgagaatcgcttgaacccaggaggcggaggctgcagagattgtgccagtatactccagcctgtacgacagagtgagactctgtctcaaaaaaaaaaaaagtaaaactagtcaaaagaggataaaaaatgaattaagtaaaattaatgaaaaccttctcataaaata

SEQ ID NO: 121588 - DNA, 1512 bp, Homo sapiens
tgagggtaagtaccatgtcttttctttttccctcttattctctagcccatatttggctcatataggtgctctataaatgtttgttgactcaaaattgagtgattaaaatgtttgacattaaaaaaaaccacctaacttaaaaaatgtttatttaaaagaaaaataaattgttattaaaacaactgtaaacattttaaaatatttaaaactgaaaacattatgtcattgtgtgttttctacttgaactagcatcagactggtttccaggaaataaaataggaggaagattaaatactattcctaataattatcatatctaccctttttattagtgctcttaatgtagttggttcatgaaattttttgcttacttcttggaatcatcattttctgtattttatttcagtttagtatttgggttttccttttcagacattatgcatctttatggtatctgctaaattttaaaaacatagtatgtttcaaacaggaggtgcaactacacaccaaaattgaatatctagaaatctggaaagtagctgctgtgcatactgattattttagttatagtattaaagcgaagagagaagctatcatgggtgctatgttgctcaggtgactatttccccttactcttctattcccaatacctgccctcctttttttgtagacaaaaaggtgactacaagattatctttttatattgcaacccagttctttgtactttaactgaaattgggactatcattcattatagttactattacggtgatttatttgtcctgtttctatgttggttggttgctacttgctggtacagtatgatgtagagaccagatggtactgtaggagtaaaccaacctgtgttgaataatttcccagattaattctggccctcgaattatgagtatttggttgtcattacttccttgatacccgtgttaataacaggtctttccattgtggctctatagtgaattaaacattcctccttatatgattccctccgaaacaaaattgaacctgaactatctttgacatgtttctctttttgtttaaaaattcagtgggaaagattacacaaacaaatcttacaacaaagttgatggcctgctttgtagtattatcttacagctttcaaatcaaaactgatgtgaattatttctttatagcatatcattttttcagtccattttcaaatacgcaattgtcattctctatagcataatatacattcatacactgtaatatgcttaggcattagtgtttcttttttatgattaaataaatttaaattccttgcatctttatctctaggtttatttttgtcagtctttgaatttaagctagtctctttagatattttagagttttcctactgcttttttgaattccttgaggtagattgagttataaaaaattagaatgaacgtatgctctatagagaaagtttggaaaacagaacagctcaaaaattaatcagtctcactccttaactgctgtacatacttt

SEQ ID NO: 121589 - DNA, 1045 bp, Homo sapiens
actcagttatattcttttttgtcttggtctttgttttttagtgttttccctgaatgatcttcatatttctatttgacacaggttttgttgttttattaactattttctccctagcccctcccctgcctttctatttcctcccttttttttgcctcttaaaaacaggttagctgtgagagacttgcaaggtgtattagcattttttttttttttagggaaataatgttcattatgccaaagtatcagatgtacaaaatatatatttatttattttttcctctgcttaaatttcttttgaaattaatggttgacaaaaaaaagggggcaaaactttgaagaaatgaaactcccttaggtgagtttaaattgttgcttttgtagctagctgtgttttaatttcttctgtaactaataggataacatttgtttttaggttatagatgtgatgagggatatcccctccacttcatataaaccatctggcaagcaattccagtagtaattaggaatcactagccattttcccttttagtttgcatcacatatttttccagagtgattattgggtttgattttgttgaatactcatatctgtgtaggtgaagcaaattatgatattattttctcataaggtcatgactttttattttgaatttcttcagggatcctttaaagttacgtattcagtgttttcttagacatcttttggacctgggaagtccatgatcagatcaggctgaatagatatttttataaacaaaggaataatttgttcagctccataaggaagcctcggggaaaattgggctccaacaaaagtcttttaaaaagtaaaagaaaactatgttcagttaaattaacttttatggcacatgaagatttgattgtttagggacagtccatatcaatgttagtataaaatacctttgaatttgcaaaacattttgtctcgtctgttttctatagcaactctttaagataaccctacatttttaatttaattttattcttttgagattgagtctcgctctgttgcccaggctga

SEQ ID NO: 121590 - DNA, 1003 bp, Homo sapiens
aattatgaagtaatacaatagtatttttttccaatataattttatttagatagtgaatattgtttatttactgaaagactaataaaaatattagcatttcatgtcatggtttcaaatgccggtataaattaagcagtattttgaagttgttccaaaagtgctcaaactttttatagtgggtagctttattttatgattgaaagatatttaaagcagcagttggaattttgcctttctctctgtaaggtttttggtaaattatgaaattcagcatagatgttaagtgttcttaaattttttaataacaaactatcagttcttaattcttaattattctggagatttactttacatcaaagacgcaaaacaaaatattttatacttggatgaatttttttattgttgctcaaagattttgaaaattaaaatgataaactgaaacctactatatttgtcttttacataataggtgaagtattacagacacttagcacctgatcacttgctgcaaatatgtcatcgactaggacctcttcttgaacaagaaattcctcaaagtgttcctggagtacaaactttattaggagctggaagacagtctttactacgcacaaataaaagtatgaaaattttctcataggatttagacattatttatctcacttttgtttttgtgttctttgtatgcataaaaatacatgtgtttaataggctgcaagcatgttgtgtggaaaggatctgctctggctgcgttgcactgtggaagaccacctgagtcaccagttaactatggtagcccacccagcattggtgagttgtttgagttcactagtagttaatagcctcttggtaaagagcttttgaaaatgaaaaggttttttagttactgtggtattagagaacttcatattatgtacatctgcattcaaaaagaaaaaaatagattttttttcttagtagtagttttaatagtgaaaaagtcatgtataatgagggattgtgc

SEQ ID NO: 121591 - DNA, 1053 bp, Homo sapiens
catgtagatgggaaggagttggttgagaggaagttagtgtacatactagaatgtggaggtctaatttatagtgtaggatttccgtgcagtcagagaagttaggattcaaagcataagtagagggattggatcttaaatatttattaagagggacagttgtgttaataagagacagaattggtacaggtgtagataggtttacagatttgatagggaagaaacaaagcttcagctttaaaaaaggttctcctgtaaagtaggttaggtcatctgctgagaaaatgaggggtggggaagaggattcttgggaaagagaggataatagcattgtttgttagtctgtttccactgttctttccagagaccctttcatggtggtacctcagggactgctaagaggaagcaagtagagagtcaagcattgagatatgtgttccctgatgccacttaagtaagatactttctgagtacctttactttaatctgttttgtctaaaatttgtttgaagacatgttctaaggctttctttaaaaagtgttttaaaactgttagaattggccggacgctgtggctcatgcctgtaatcccagcacttgggaggcctagggggcgaattacttgaggtcagaagttcgagaccagcctggtcaacatggcaaaaccccgtctctactaaaaatacaaaaattagccaggttaggtggtggggcgcctgtaattccagctactcgggaggcgaggcaggagaatcacttgaacctgggaggcggaggttgcagtgagccgagatcccgccattgtactccgtcctgggtgacagagggagactccgtctcaaaacaaacaaactcaccccaaaactattagaataaagaattataccatgtaaaaaaattttactgcatctatttttatgtgctgggataggtgctaacaaaatgttttgggttttttgagagtggggaagtcagtcgtttctgcatattcttaaatcttcatatatccaactagaactttattaagcacttaactataagtactgcattaggtat

SEQ ID NO: 121592 - DNA, 1379 bp, Homo sapiens
tcattgtataagaattgtgttattttgagtactgtgcttgaaactgaaacattaaaaatgaaactggtcattcaagattatttacattggccttagtataagcagttaaaggatgtttcgtccttaaattaatacacagtaacttttcatcagattcctagatttgagtttaacgttttactaataatgctttaaagagaattttaaaattacacaaattagcacatatgacgacttaaacatcaaaacttgaaaatttgttattttaagcagttaaatgttgtcattttgttgtattttaaattattttttatggagcatccctactttggtttatggaaacctcaattctgaatagagtctcttttttttagcaagatgtaattggtttatgatgaataaaatttggaagcgtagtattgcattttctttttttgtttgtttttcttatagtattgcattttctttaaatgacaaatttgtgttggtatttgtattgataatgtaaactgaattattatctaaatgaattcttaacagttaagtaaattctgaatatgacatattctttgaagcttgtttattcacaattacttgagcaaatagaccatcaagatttttacacttaataaggttctatattaattttattataattataaagaaataataggcatctaagggtccttctgagaatagttacccaggttagaggacttgacttgtactgacttatatgggttctattaagtttttaatcaaatctacgtgtcgatggggagaaaaactaaagttctaataaggaagctgtaacataataaaaatatcagtaaacttggaatcaggagacctgggtttgattactatttctcctattttccaaatgtgtgccctcagacaaactgctgcctttgaacttcagttttctttatgtatgaaatagggagagtagttaagcttatgtgcttatgaagataaataaattttgggaacactcagcacaaagtaagtactctgtttttctgtggagaagctattacagttaaaaaatcagaaaatgcattctttctttaaagattatagatataatttaacccacactgttagtaacagatttataattgtaagcttggatgtttttagaattttaggggctgggattttaatataggccttacacagtaattatcacatagtatttctataaatttatatttatatattgtatattatatattataaataataaaatataattaatgtatatacaatatattgtatttctataattttgtttatatgctacagtagtgtacaaataagaactatattccaataaactggccttttagaactcaaaaacataatagagagcagaa

SEQ ID NO: 121593 - DNA, 3684 bp, Homo sapiens
ttactgtgggatggaacttggcctatgaaagttgtgtttatattgggacatattttgtttaatagcttaaaaaccttaattttgtgggttgtcaaaatgagtattttaggaatctttaaaaattgcttttcagaagtggatttatcacttcagtattgtgattggaagttactttaaaggagctatattttctgtaacactttctcctaaactgatacaggttcgttgtgtgaatatgtgtgtggggcagttaaagcagtcgcaccggacccaccaagcctttgaaatttatgtagtgtgttgattttatgaggcttttgtaactgttttgagatagttatgattactaatgttacttcatcagaacttctctaatgactaggaagtttcagcgagcttagaatgagtgtcttttgtgaggtgaaagcaggacatgattataatggcgctttttttggtatgtagtgtatttcctaacttttgtgtataaatctcttgtggtttaatataagatgttgataaccgctcaaggctgttgaaataagcaagggtactgaggtttaatacatctaatggagatttaacagtgtattagtgtattcattttcacactgaacgtgtgttaattttcaaggagtgatttgggttactttcattcaattcttggccaaagtgaatggagctggaagtaaactccaagatttactaatttgaaattaatttttaggtttacaaatacttgatagaagtcttcagtgaatttacatgtcttccttgatatttgaaaaaattatcgcaaagattataatactccatttttaagatggggcaggttttacaaaactcgtctttgcatctgcttttacatctgtgcatctcttaaaaacccacaaaccttaagtcactgaggaatgctgcattttcttaatcttttggtaatgttacattttttaaatgaagcagcttaatgttatctggctaaattatggtaatggctaatcctcgtaggaatatcattttgtttttttgttttttttttcagtaaaaatgagctatcaattttgattttgagttaatttaatttttggggggagggtggggggaggaattattagtaaagtgaatttctatccctagtctgcatcgcagatttaagatacagtaagcattctttctatctatgtattatgctcaaaattcacctattttgaatggaagtggtttttcttgcttggagttttctccttactagaacaggaacgttggcatactcatcagacagtttagaaatcttattagaacttggagttctttgactcgttttctcttttcattcattcagcatattgcttactctatatctactggatgcaaggtaccatttgaggtgctttctcatccatcaaactgtatatctaggtgtgtgagttaactttattttacctttttagttgagatttagttaggtctaaaaacatttggaacactggatttttttgttcaatagttgatctcgctgtttaatatctaagtcagcacatgcaaagtctcttgtacagtattttctattttaattattctgacttaaaaagttttacgttgttgtatatcgagttgaatttatttaacattgatttgaaaattacttgttgagtcattagtttctactctacctggaaatgatttgttgtattaactaataaactgagcaatattttaaatgggagaactcatatatcacatcgcattgaaatttctaggaaacctcaaattattgctgcttaaaatggggtgtaatatttgtagatgtgaatttaaaaatagtcactgatcatctgtagttagtctagttacaatcgcaatggttgaattttaatcaagaggaaagtagaattttaagagcagttttaaaagtttgcaggttaaaattgatgcgttcatttcaagtgtgattgagaaaggaaatggtcgtatcttatggttgtttctgtctctggtataaaacatgactgattatcaccatctaccttaagatttaaaacatttttaacaaagtaaatggaattggataggaagctaaaagttgtttttggtactatggtatacgtttaattagattttacattttttaaaatatgagatttattttaaagaaaaggggcactttttccaagtatcagaattcttaaactgtagaataaaaaactttttttggacgaaaggaaagctttgtcatttgtttatttcttagtttgaatagtgaatctagttagtttattaagtctgctttctagttgtcacttaatgatgattgcatatttacgagatctagaggcagaattttcaagcattttaccgaatttggcactctcttgattacattttttcttgtaagacttctcttttttccccccaagaactagttcatgttttgccaatctgttaaaatgatttaattttttccttgtaaaatagtgatacttgcctttcttaaaattattccactttattagaaatcttttttgtttgtttgcttgtttgttttaagtgaaaggattgggagtcaggagatgtggattgtggttttaagccccgctgacagttaaactgtaggtaatcttgggcaagtcatggaatttctctttgtcccagttatctcatttgaaaaataagtggattgaaattttttcaatctgaaaatctgtgattttgaactagaaatagcagtacattgtatttaagaactaagctttatttcattcttagagcttagttttccaaaacacagaaaagtagaaatcacataggttacaaaattatataaatgcttttcatagtgccattctttggtggtaatatcatttcttgttgcaaagatgatttgagacactaactacgttgtaaaatgccccaaaattaccatgatttccatcatagtttaagtactagttttcattattgttggtctcaaattcagagatgaataggaatgatggataggatttatttaagtatatatcttaggtatacatttatttagtgtgtgctgattaatgtgaaagttaaggtataaaacctagagacaactttcagggaaaaaaaaaagatatcatattaaatgttttagaagtagggattcccattctatattgaagataacatagtttcaacacttgattattataattttttggggttgggtgaacatgtaataaagtaaatgtgtgtagttgtagtagagttactatttccttttttagtagagtatcaatgaaatagaagctttgcgtggtagtctctaaaacagctttaatctcatatggtcgttataatgatgaataaaatatgttaggcgtgaagggttatatgatgaataaaatgttaggtgtgaatatgttgctgagaggctgaaggagcattcttcattctttcttacatatagaattattctattgatgcttataccattttttaaaatttgaggcatttacaaactttttaaatgcaatacttactatattgttaatattcttaaatagttgtaaagcggcatgagcataaagcgggagctggaatgtccctttcccaaaccataatggtttttatttgattgttgtgaggcagaatcgtattgagggagtctgttttccattctgtaaaatgggctaataatagcttctactt

SEQ ID NO: 121594 - DNA, 1036 bp, Homo sapiens
gagttggcagcgtggaagacgggacggcgccggggcgtccaatatggctcgtccaaggtcagggggccaccaggtcctccccagcgactggaacccacactcggttggggaaggcggggtccgcgcgctatccgcccctctgcgcgtctagcgaactggagtcatttttgtcttgtcttccgccccttgcggactgtcctcttctgcgcaggccccggacaccaactactacattcagggacacaaatctccctcggggtggggcttcgacttgtcccggggagggaagggaaaggtttcctcctccctgagaaatcagtgaggatttctcagctggttcctaagcaagtgctttgcaccctcccaccgccagcctcagtgtttccaacagtgtcaacgagtgtgggtattaaatttgaagcaaaattacacctaatgtcttgctttatcaaagaccatggactaatttgtgtgtgagagtgactgcattattttaaaatactgaagttttaaaaattcaaaagctttccccttcttatatgttattactaaaaattgggtagaaacttgtctcctaccccactttttaaaaataattgaaagtgtttaaaagtcttagagtttgttgtgcacatactgtgtccctcacgctgtgcagaatttgacttgcattatctcatttaatcctgaaaacagcttgagcggtgttacccccattcagctgggacttaaagacataaattgtcctgcatctcaccaaccaataactactagtaaagatttaatcagatgctatagatgccaaagtcttattctcacccatttcgtactcacttacgaaagggtgggtcaagaggaattaaggaaatccaaaggtactcccagtttaagaagacagatggcatattaagagcactaatacttgagatttattatttaaacttaattttatgaaggtattttctagccctgttttactagaattaggatattaagtgatgtcaccattttcagcattttgactgagggttaatga

SEQ ID NO: 121595 - DNA, 1020 bp, Homo sapiens
tccccttatcagctcatgggtggttatttcctttacatgtatatcacacaaggaacaatttggggattcccccacccaccccgaaaaagaatccagctccaaaggtaaactgacatctccgttatcagagacagaaaactatcaacaatttttaaggaacctgttaccagtttaaaagaaaatagtactatatatacatatatatagtgcatctttaaaagaattaggcagagtatacatatttaattttaaaactatgatgattgcttcctgctcctctcctcctccacgggctccctggagtccttgcaagctggccaggatgtctcaggctgagtttgagagagctgtggaagacgttaaacaccttaagaccaagccaggggatgatgagatgtgttcctctatggccactacaaacaagcaactgtgggcgacataaatacagaatggcctgggatgttggatttcaaaggcaagaccaagtgggatgcctggaatgagctgaaagggactaccaaggaagatgccatgaaagcttacgtcaacaatgtagaagagctaaggaaaaaacatggaatgtaagagactggatttggttgccagccatgtgtttatcctaaactgagacagtgccttgtttttcctaatactgcagatgatggaaactagggaaaataaccagttaacccagctcctcaaggctgctcaccatagggctctaacagattaggggctaaaacaattactgaccttctctgagtagtttttatctgatatcaattaaaagtgtatttgtgttaaaaagagaaaactataatgaacgcaggttttggataattaagaagcaacctcaacaagtttctgagatccattattatagaagtatggagtaacaattaacagggcattctagttaacagaagcctgaacacaagattatttcttgtatttattatgtatttgcatgcacattgcaagatcttaagaaattcactaagtagtcataacctttgcttt

SEQ ID NO: 121596 - DNA, 1033 bp, Homo sapiens
gagtgaggggccagagaaaacaaggaaaggagggaactccaatatgtgcattcattagtgaattgataaggacattctgaggattgtactgaatgtgtcttggaactgtctcctcaaaagacaaaggggagaagtatttctccattgactccttctcacaaatcctacttgagaatccatgagtactgagtatgactaactctttaggtgagctgccctgtgcacaaaacagtttgcaacctatatggaaatatttgccacaaatataactggaatcagagatgagaccaagaggatgtgaggtggtacacaggaggcatctgatacaattccagtgtcttaaactgtgattttaattacctctgtgaccaggtggttaagattattttatatttcggttccatttaaaattttattttgtcattgtcttgtattgttaatttctgattttatttttatagttagagaatatggcaagtagaattgttactttttgaaatttattgagattctatttggagcttagtatatgatcaattttgcagatttttttttaatgaatacatgaaaagaatgagaactctctgtagaatacaaatttcagttctgctctttgtccttttgctcaatttaagattgaaagagagcattcatttccttttaaaaatgttattttgtcagccaggcatggtggtttactcctgtaatcctagtactttgggaggccaagatgggaggatcacttgaggcctggtcaacatagcaagaccccctctctatttatttacaaataaaaatgaaaataaaatgtgattttgtcagtttcttcttatatatttctttaatgtattttcaataaagttaatggtccccattttggaggtttggagggtgttaaatactcacaactctttcctttccagtttataaactaattgagaaagatactcgaattggattggatcggatgaaatattagcttctttgcatgctacactgaattaggggacttctctaattcaggactgaattt

SEQ ID NO: 121597 - DNA, 1107 bp, Homo sapiens
cgataaaccagcagtaaaagcagctgattctgtagaagatgaaattgaagaagtagcactgagatgactgactagagtatacattttttctaattgtaaatattgaaatattttaatacagtatttattataaacatttagactttttaatgctaaaatgtccttattaaggaatgatttttaatagctaaatacaatgcagttaaaaagaagtagatcatacatacaccacatagatagtttgccaagaatgaaggaggcttttttgaatgaaaccaaaaataaaaatatgtcttgaaaaatgaaatagattttaactcttcatccagtgctatggcaagtttaactgcactggaggtggtattccttttctacttttattcctatttatgtatttatttttaatcatattctcactgtgctaaatacagtcttcccactaattgttgaatgaaaattaagggtgaaagtctgtgttgggaagtgtagctccggatggtggagaaccagtgcttcttaggagcccttccctttatggatagggccaggggtccctatcttacgtggcagtcctaagctactcttgagtgatagcagtcacaacattgggatttcccattcctctgaaagtacccacagctaaacactactcatttcccaatttcagtatttactgaaatcacttacctacaattctgttagaatattatgttgagttcggaagacatttctctgtttgcaaggacagttagttgctctctgtcatagcccgcagaagcttggctacagtgtaattcctctccttgttctcctacactctttgtatctcagtgactgggtgtaagatttcatgccaaatgcaaggaatagtggaaatacataccaactgcaaagaatagaaaaactttatcccaatatattatagaaagatcttcagttcaattatgtccagagtaatataatttggcaatgttaatgcttttaagatttgaacttgtcctcaaaccaaggagacaacaatagtgtaatactattggacttacaggattagttttaaagcaactttgaatagaagtgtttcagacataggacttctgccttgttgac

SEQ ID NO: 121598 - DNA, 1034 bp, Homo sapiens
catccatccccaccatacagcattatattagttataaaaaataggcaaagaacctttcttccccaccagtatctcaaagaacaaatttttttataaatgagaatcttaaatgcaatacgtattaaatatattattctctaatcccagaatatcaagtatagaaatgaaatttatgatgtcttttctcacttgatttataatacccaaattaaatatggtggttttatgaaagttgatagttttcctatttaaaaatattgactgttacaaaatcccatttaaaaaatttgatttcatacagaatgggaaagagaagaacttgataaaaagcaaaaagaaaaggcatctttactggaaagagaagaaaagccagagtgggaaactggaaggtaccaactaggaatgtatccaattcagaatatggataaattgcaaggagaggaagaagaaagactgaagagagaaatgctacttgctaaactgaatgaaattgacagagaactccaagattctcgaaatctaaaataccctgttttgccattgttacctgattttgaatcaaaactacactccccagagagaagccccaaaacatacaggttctctgaatcctcagagagattatttaatgggcatcatttgcaagacatcagtttctcaactccaaaaggagaaggtcagaattcaggaaatgttagaagtccagcctcccctaatgagttcgcatttggtagctacgtgccttcgtttgcaaaaacatcagagaggtcaaatccatttagtcaaaaaagtagttttttggatttccaaagaaacagtatggaaaaacttagtaaagatggtgtagatttaattacaagaaaagagaaaaaagctaatttgatggaacagttatttggtgccagtggtagcagcaccatttcctccaaaagcagtgacccaaattctgtggcttccagtaaaggagacattgaccctctaaattttctccctgggaataaaggcagcagagatcaagaacatgatgaagatga

SEQ ID NO: 121599 - DNA, 1025 bp, Homo sapiens
ggtcaagttagctgagctgctaaaagaaaataaatctttgaaaaggcttcagtacagacaggagaaagccctgaataagtttgaagatgccgaaaatgaaatctcacaacttatatttcgtcataacaatgagattacagcactcaaagaacgcttaagaaaatctcaagagaaagaacgggcaactgagaaaagggtaaaagatacagaaagtgaactatttaggacaaaattttccttacagaaactgaaagagatctctgaagctagacacctacctgaacgagatgatttggcaaagaaactagtttcagcagagttaaagttagatgacaccgagagaagaattaaggtacaatttctacagcttctaattgtactttcttgggatgtttctcattgggcatttaatgtgctctcttaaaattgcttattgcagtttggtatttgcttggaaatgaaaactatttttagtactgttttgggaaaatttggattttatatttaagaggaagatgcaaaagattgtgtacattaatgagctacatgttgattgacggatcatagtcattttgggaaaatactctatttggttatctgattgtttctctaaaattggaaatgacactaatagccatagtatataaaactgacgttttggggccactgtgtaagagatgccacatgaacaatgacttctgtttttatatttatgcacattatttattgaagattaattacagtacatctttttggacatggaatgcacctcctcccccgaatgaaaaatctgttaaaggatgggtgggagactgttgactgactagtctgagaatacagcagctcttttaaaagtatttctttcctgaatggagagaggaaaagagtcctatcccatgatttttacacagggcagtcagttgccaccttctatatatatatgtatcaaacagaagccctgagtcaggttctgttgcttaaaattgacaagcagtttggaaagcaaaggtacgaaaaagtatggc

SEQ ID NO: 121600 - DNA, 1221 bp, Homo sapiens
cttctcccgcactcgccgtcccgccttccagttccactgaagccaataaaaagggccgtctggagacagaagccaatgggagctcgggtagagtcatcatgattggctgcggtctcttcgtagtgcagtctaggcctccgcctccgttaccctggagcccaggttaccgccgctgccacccaggagccccgatcctcgcctctgtcccatccttgtgttcaaacctcccgcatctcggcaacctcggcacccgcccggcagcctccgcaggaaccaggcacccgctctttggcggtcagacgccgaggccccagctgggagtttggtcctaagagggaaggcaaggaggcgggacgccgcatcggctctgctgaagagcctgcgggttggaggtgggctttgaagtgggcgtggagacggcgggggaggtggaggtgcgaggtgaggctgggttgaagcgtctggtagctagtgaaggggcgttcgtggatgggggcctgcgggtggttcttaaagcagggaagatgaagggattagggatgggggaggatgtagggaccgcgaggagaaggaagacctaggaaaatgagtaaagagctcggcttctgagagggtcccgaggaagggaggttgaccggcactggggggactgggaagttaggaggagaggagctgggaaagggtatttacttcctgggaccgagaagagaagaaagggagcaagcggatctagagaagtggttgttattaaaacaaacaaaacaaaaaccccggaggcccgtggagactcaagactagagaggaggggcagggccaagggccaagacggaaaaggaggctttggtagctctcggataataatagatgtgttattattaaaactgtggttagagtggaaagccgtacttgtccaggctgtgatacttctatacatccttcagggatgggatgagaggagtaaagatggttagaaataaaagaaaaaagaaagtgcctttttggcatactcgagttggagtcggtactcagatacgtgatgtttacgttagatagaccgtgggatagtgtttaacagtgaagagccctggtccagttcatctgatataaaccccttttttgttcactttgttctttggaaagtatacttgggcacatacatatttattcccctcctttatcttcacgttaagaacttgcattagagatatctttgcaatcaga

SEQ ID NO: 121601 - DNA, 1035 bp, Homo sapiens
aattgaatgtttcccttctggttcatgacagctttgcagtggaatggaaagctgaactcagatgccagcatccaggcagatggggccccacctccctacaaacttaggcacttttaggctggcacagcctctgggacaatttgggaacaattttgttggtcacctttgttactattgacagcttattcccaaggggatctactcttttgagctggttgagtatttggcagaactccaaggggttgtttcctggagctgacccctgaagtggaaggtatccggcagggtgtgtctgctttgctgtggggtcttggtgggccctctgccagcattgcttctcagctcttggagcagacagggaacgttgggtgcgactgagggcagggggttctaactaatttaggatgtgtttgccatttcctactgggtcatggcccaaatatgaaatgactttttgtcatcttcagtctagtggctttgagagtggaggactgagagtaagagacatacaattaggtgacttgattgacaggtcagttcagtggtatttggtaaatgcaaatatagttaaagtcagcagctattgctacatactgatctaatattaaaaacaaaacaaagcaaaacaaaaaacccaaagagcaataagcatagcttttgagttagcttgttttccttctgcatgttccacaagacgtgggagtgtggtcttcttcattcatgacattcccatgtgtattaaagctcagtggttctctcacccttttgtgtgtgtgtgtgtgtgtgtgtgtgtgtgtgtgtgtgtgtgtgtggtttgttttaaatcacagtctctgcttatctttcactggttctcttttaataattatgttcattagcgtggtttcttcaaatgggaattggccacctttataagcctgggcccttcattgatgggagtttagatttcactgttcttttatgagaaacaaactgcttactagccaaaataaatgtttgggttgagtatgcgctgatttctttaattctggagtc

SEQ ID NO: 121602 - DNA, 1150 bp, Homo sapiens
agatgaggtttcactatgttggccaggctggtctcgaactcctgacctcaggtgatctgtccacctcagcctcccaaagtgctgggattacaggcgtgagccaccgctcctggccttaggctaaacttaatttagcagtttatttcacaggtttggaaatggaagctaagagagatgccaagtaatatctccaaggctacccatctgtcagggtcaaaattaaaaccaggacaatctgactctaaaatatatacttcccccggccccacctccccccagttttcctcattgtcctctgtggctcatttgtcttcagataaacttgtttcccattattgttcttattcaatctcaatgttaaaaaaactcttattcaaattgattatgtctctttatttcctagtgagtcccaaggttccagcatcagctagtgagtcccatggtgcagcatcagctatgtataccctggaattcaaacatggctagacgtgtctggaagcctatggaaggaatctggcaggggctgcttaattatataagttaactgggatcctcccgggaaagaagtaatcctacaagaagagagtagaggcatgcaagtttacttagcagtcagtgccacagagtagggggttaaggctgagtcacgtgcaaggtaattatttagcctgtcttccaatcaaatccctagggactctaggagccaggaggttgccagtgaaggttccaagtgtcttcactaagatttccacgggtcattgagtcttcatgcggagtcaggagaccccgcagcttactccccagggccctgtgggggtgagtcacgagggcttgggtgcaggcattggggtcctcaggagattcacagatctggagtcaaagggtaaaggcttatccattcagtggccaacaaggctgcttcaaagcacatctgagggaggagtttgcttcagagctcctgaagttagtgggggggagtggttgagggtaatagagtactaaggtcgtaatgggaagcagattcagggaaataccctgaatctcaattgccatatttataaatgtatcaacaatttaataaaaccatttgagcaaaacaaaacacttcttgttttgttatgcacttgcaactattaaaattaactgacaa

SEQ ID NO: 121603 - DNA, 1856 bp, Homo sapiens
atagaggagggtatgtaatcctactttactaaatccctgtggcttaagggagaatgacacaaatgtcaatatccaagggaacctcttaatacattttaaccttttcatttcttccacttcacacttgtctggcaaacctattagagaaataacttttccgtcttgtatttttcttctaatttgtgtgtcctgaaaataactttgttaacatagtgtgcctacctagtaaaccttctgaatgctttaattttttgtaagtctttcattcttaattgatcattttgtttaatataaaagactagatttaaaaccaagttcccccaggaagtattgttccattttccatattctttgtattgattggaagacttcatgtctgctagattagattcttaaaggtaggttgctttgcttctttttctggaaagttttagggttttcttggagctttggaatttcatcagtatgtgcctttaaaaaacattctgctcagcagttaataggactgctcaatctgaaaactagtgtcttttttcacttgagagcaagttctgttatttctttgccctttttcccccctcccttccattgtctttccttttcatcttcaggatcttttttccttttggatgaagttttactcttatgttctaactttcaatactcttgacttatctagtaatttccatctcttggtcttgatattctgcattctgaaaggcattcgtaacttttatcttctagatctctagcctggtttttagctctatgctatcctgctttttattctttttatctactttctaatttggcagtcaaacttaattttcaggagctcttttgtttcttattattcctttaaaaatagtggcttgttcttgtttcgtggatgcagcattttctttaatctctccaaggatattaaaaagcatttttttaagttttgtatattctgtaagttatctctatgttctccagcattagttctagttgttagtttttgtctttcttaggagccagcttggcttcccccagtaactcacagacctgctttcctttgagcaggagggctaaataagactgtgtaggagagtgggggtagcatgaagcagactggaactcctcaggtgcccgtgaaagagccacacccaggcagcaatggacttcagtgcgtgtccctccagggtgaacttcctttccatttttccctttctgtgtctgatgtggggtcagggtgaccacagactgtgctggcctctcaggcccctgaagcctcaccaggagttttcagcatataggcagcgagtgttgtttggagagcacttctctggagctctggccacactgggaaaaaaactgtctaagccattacaaatgtacttcttttatacattgattgccctgccatagcctgctccagattgttgtgttcattgtctcaggcttgtgatttctgtgcaagctccttgggaaggactgttcttctattggtttgggctgtggtttcccctgctgtgttttctctacctgtttggttgtattttatgtattctgggtatttcttaaaattttatggctggttcctgttcctagttttttttctcctccagtttaaattggctcttgggtaagaggggaggtagatgtatttgcttgctttgttgtcttgaacctgtatggtcagaactattaaacatgaattaggaatttgagattctcacctttggatttgctcatatttttgtatttggcataaaaattgccaaaatgaagctgttttagataactgcatcttgtctatcctgccaggattggaattgtctactgttttttgatttctatagcaagatttcata

SEQ ID NO: 121604 - DNA, 1033 bp, Homo sapiens
tattacatgttgaaattgaactccaaccttcccttcagattgttttttctcgtctttttcatcaagccagaaagttcagagccactttaattcttatttctccctaatcacccccatcaaatccacaaccaagtatgatcacttctacccccaaaatgtatctgcagcctgtctgctgccctctgccgtcagctcggctgccaccattgcttactgcaattgccaaagtactcccctttttcccctcctttcctttttgctgccctttttttgagccattctccgcacagttatttaggtattttcttaaaagaaactagatcattttgctcccttgctcaaaacccttatatgatttcttttggtacttaagataaaattcaagatcattttcttggtttacaaagcccagcatatgtttatccctgtccaccctgccagcttcacacttcactagtgctgctccctgcccaagaatgctcccatcccagtccttcacttggctaactctattcatccttcagatgtaagcttaaatgccagttttcaaagaagacttggccaaatcgctcttttcagacatgttgctccttcttggcttggtcaaggaaggcctttctttagagctgatcctaaatgacagaaggagcagcctgtgaaaaacctgaggctactgccttccaaaccacgagactcaattgctaaagcttttggagaagaggatctgtacacagaaccaaataattcaaagattttttaatcagacaaggcatgcgttgcaggaagcgaatctctacaagtctagatgccgttggcttggcttaacaatggattcattagcgctcagtgactccagcacacgtggtgccccatacttggtttccttttgggcaggatgcaccctagagtacagaaagtgtgaatttcaaggtcagtgaaacatgagcccaaatatcagttctctcacttattagctgtcaaacttgaacaacatatttctttgccttgagccagtctctaacccggcaggctg

SEQ ID NO: 121605 - DNA, 1019 bp, Homo sapiens
catcttgggttgctattaatgggcatctctgcaggccctctgagcaaggtaaccccccacccagccatacacaagtggaacagtacctctgagaggaatctcagtaggtcattgaaaacatgcggctttctttccacttttatatttggcaggtcgggtgggtgtgatttaaatctgggctctgatgctgaaacccaggattttctcttatcaatcacatggaggtgatctgttatgatttccaacatctctgttcctgacatttaaaaaacccctgccaagggtgaattttcttgtcgatgtaatgcaataactgacttttttttttttttttttttttttttttttataggcagaaccttagagaagaagagtggaagatgacggagatgcattttgaagcacccctggtactcagcacacacatgcttacctaatgcatcactgtgacaaaagccacacgcattatcagtaactttgcttgccacggaaaaggtgtttttgaaagatgtggctataatgagaattgcatgattgctttaaaccaaatcaggtggtggattttttttttcttattctatttgcctgcagttgcctcactcacctggaaataccgtcacctgttacaggtgtactttcttaatgactgaaagataagtgggtagcaccgtcagagagaaaatgttggatctgccctaggttatagtagatgccggaattgcgtaaacccacttctctttaagctgcctggattgcacctttgaaatatgtctgccaagttgttagaatctttgaatcagaaggaaaaaaagcagcgctggttgacaaagggtgttgaagatttttgctgcagaatcagttacaaacatcacagttcccatgctttgtaataacacctggtgaaaaagttagatattctagacttgttttagtaatggaaactcttacctccacatattatcctacagatgtttccagaaatccctgttgtaacatcaagtgatcagaactaagttact

SEQ ID NO: 121606 - DNA, 1097 bp, Homo sapiens
ttgtgaagggactatattttttgagaaaggaaaatctcagttagatatattttgtgaacccttgattagacatattaaaatataccaatgttgtagtaaaatttaatttttccttttgttacttttcatttgcctctaattttgcttgctcatatttctggccaatgtacagcctcatatttttcagagtaatacagatacttgttctcattccgtatatgagcacaagtaaggtttcagagcaacacacatgagaaagagagtaacccggaattgtacttgtcaagcaaaatctatactcctattggagtggatgctgatgaacatcgaacatatctacttcattagagcagaggctatttttctgcattcttgtccctataacagggatgcttaattttttttttaacttagagttttaaattgccaaacatgggaacagccttgaataggataaattttcagagggctgcctaaaatattttatttctagcatcctgattctggacttttcattataattctgagcaggaaatttataagaaattgaaagagcagaagaattacagccctgtcacatgtgcccagcactccgccccatgccttgctaaatgtagactaaagaacttgttgaatgctaaggctgaaatcccaacctgagatttgtagtccaggattacaaccagaaggaaagtatgacagatttctacttaactagaatggacacatgatccacaattttctcttcaagggaagctgttgtcaaattatggatattactggttagttgtcattaagtaagatccaggtcaaattccatttgacaaatcccagggactatccaggaatttttttttaactggatattgtgtttgagtatgtgagtcttctgataaaactcagaatttctttttaagcagttgtaaaaattgtcatgttgtaattcattactcagctaacatttagtctactcttgctagtgagtgccaagaaccaacttggtaaggttgaggctttgcaagttaactgctggggttataggatcaataccatacttgctagacaaagctacccagatttgtcttatattataattt

SEQ ID NO: 121607 - DNA, 1241 bp, Homo sapiens
tttatgaattattttgataaattactaattatcttatctactgactgaaatcagtggtgttacattttcttgtccaaagctgaaaatgtgtatacacttaaacttgcacatttgaattcatttgctgaccggaatggtcaaatctctccacctctagtcagagtataattttggttgtaattaaatttttaaaatctgctgatctctgtagaatcttagaggcttgatgatgatggtgttggtgaaaataagaaagaattgcagtaaagtcttgtctggtgacccagagatcaccatgacttgaggcacaaatcactgtggggaaacaattttttgtgatgaaaaggcagcatttgaatactcctgttagtagcagaaatatattatgaaaattaagattattgtctgattgaaacatgaaacaactcatgtctttattagtaacatcataagatagttacatttatgtgctgttagaatatgttgatttttatcaggctttccttgttttgatttatggctgttcctgatttttcatatgtggaaatatacctacctcttccgttggaaagaacatttaaaattaaataaattttaattaaaaaatcaaggagtcttctaatgtaaattttaatgttaactttcaaatccactagtattttttttgcttttatgacaaatagcatacaccaaacatttctgtgaaactatccttctctttcaatgtgtttaattttggagtaacgttttccttgtgactaagttgcaagatcttatttattaactaggtatgaagtataaacccattttggtgcaatattcttgactccttggtgctaaagattgttaaattcaatgcttgatgttacaaggtgttgttaaaacacaaaatgaataaaagtgagagtagtcagaactataacattcaatttgctatttacaaatgaagtatttcatgtaatataagtgaacaactggaaataaagtaggaaagaatttgtatcatgttttactacataggttaattttttaagggatgttgcaaagggattactagagaaagacaaaatgtgaccaaaaaaaagcatgaatatttcttaagtatctcaacaacatgtcaaagctgcatgtgtaggatgtatgctgtttgtacaaactatttcagaatattttgtaagctataacatatttattgtgcattaaaattaaatactttttccccaaaggcatgcagtcatgag

SEQ ID NO: 121608 - DNA, 1049 bp, Homo sapiens
tgcaaatattccaaagtttaaaaaaatctgaaatcagaaacacatctggtcctgagcattttggataaggaatactcagcctgtataggtcttgttggttcttattcaaaggaaattttatatagccttgttaatgttaaagaggatctaaattcatagcttggccaagatctgcctcctgtcttttcagatgcctgtagattaaggatgattcacattgttgagcttgatgcagattattcctctgaggaggatccagggtacaagtcattatagtatagttcaccttgctgctttccattgtcatattatgataattggcagcttaggaattcatacatatattattgggggcccagtttaaaacaatacagttaaaggcaacttctgtaattttaaaagaaaattagtaaatctgaactgacttagatcactttatgacaaaaattaattattattacatctataccttgattaaattaatattctgaaaagaaagaatgtcattgagtttgactgactggaatatctctgtagatttatctatattaaatgaattattcaatgtgtgtagtgctgtcatattttaaactatttagaaacctaagaaataagtactgttttgttgcagatatatatattggcacatctaaaggcaagaatagtagaattaaaagtaacataggcaacagttctaagggcctatttaagctcactggagtactccatttgaaaacctacaactgtgaaagtcctttgcatttgaacatacatttttatttatatggtaaaacctcaaatctaaactttaaaaatatctagcttaatctgaagggaaaactttttcattagtactactttatatttttcatttctaatctgtactcaagattaaatattaaaaaataatgtgtattcatttattgtacatctcagtggcttactgcctaataaaattttctgtatcttgtaattacctgttgtttttctaaagcattttttggagcccagttgaattcctttatccatgtgattatgtactcatacta

SEQ ID NO: 121609 - DNA, 1056 bp, Homo sapiens
agtaaagcaggcgaataaaggaattgttattcccattgccaaacgaattctttatgtctatgtcactaccagaatccaagcaatctttatgtgtatgtcgctaccaaaatccaagcaaacactctatcatattttttttaagtgacactaaatttgcagatttctacagtgtgacgtcattgatgttatattgggggaaaaagtatacttggcctatgaaaccttggtgaataaattacaaagatgtgtaccttgttgttgtgcacttacctccattaatactagcctaataatagctgcatttagatgtgttcacaaaacgaatgctttagtcgtctgggttctaaaaagctagtgcatttttttctttgatgctagttaaagtaggagttatgactgttcagtttttttcttagaaatggaatccgaggatttaagtggcagagaattgacaattgattccataatgaacaaagtgagagacattaaaaataagtttaaaaatgaagaccttactgatgaactaagcttgaataaaatttctgctgatactacaggtgagtttttcttttcttttaagttagtaactgtttgttgggtatcctctaaggtaaagatatagtactaatcactttatttataatttactcatgtgtttattgtctttctcctccattagaatgcaggctacatgatggcagggtttttgtctgttatatccacagaactttgaatggtgtctggcacatggtaggtaggcacttaaacatttattgaacaatgattaatgggtgaaaatgcccagagtttaatactctagctcttctaaaagtattagctcagaagcctgattctttactgtatttcaaatggttggtcatttgaatggtgacctttggataattttcttacatctatactaacctttaaatagatgaggaattgaaaataaatggaagaacctgtgatctaatcatggtggctgactgttcactttgaaaaaacctagaaaatgatagttttagtgttaagcaaaatcttaatggagtataattg

SEQ ID NO: 121610 - DNA, 1727 bp, Homo sapiens
aggttatgttaggactggagcagtaggtttaatgaataaatcattgatgggagaattttctaagttaattagtacaagtggcagtgggagagatttagttttctatggataggtaggatgctaaaattatagttatcctgcaacagcataaaattttcttaaactacatacaatttttaaaggctacttacaaaaaaactcacttatttccaaatgttttctttccttcaaaatatatagcttttggataaagtataccttcataaaagataaatacacgataaataagttacttgtatttatatgaacttttacaattttaaaaagtattataaggactttatgtacattgatactgacagtacaaatgtttgactatattttgaaggaaaaatgcaatttggcatttgttttatgtcttttcttgtgatatattttgttccccttatttagataactcgggaactgttaaccaaattatgatgatggcaaacaacccagaggactggttgagtttgttgctcaaactagagaaaaacagtgttccgctaagtgatgctcttttaaataaattgattggtcgttacagtcaagcaattgaagcgcttcccccagataaatatggccaaaatgagagttttgctagaattcaagtgagatttgctgaattaaaagcgtaagtattagcattttaactatgttcaactatgttacataatatgtaactacactgcaaagagagaaaataaaaaacatggcagtattgtgagaaaatattaatttttttaccaaatacttttgcttatagttaacaagagactaatgtaaactcttttctatgcacgtttccacaacagtttacttattttaaactgcctaaaaagatttttttaaaataacttattagtatttaattttacccacagaaaaaagcaatatcccatgttttttggaaaattgaatgaagcattatcaaatttaagtagctatgttctttttcttaaattttgactcaaatcttttattacagtattcaagagccagatgatgcacgtgactactttcaaatggccagagcaaactgcaagaaatttgcttttgttcatatatcttttgcacaatttgaactgtcacaaggtaatctgaaaatgtcaaattcaaattttaagtaaaggataacttattacaacttacttcctaatattaaatcatatatatgaagtggaaatttgaggcaaaagacattaaagttgatcagatgagaatatggggagaaaatgccacctaaatgtaaatgcagagaatatctgttatactagcttttccatgtataaagagtaatccagggaaatgagcatgaacattgtgtatgtgctactagttagattcaggaaacatctaaaggaaagtagctgcttcactgagtatttgtaggaagaaggatatcagatatttaagctagagctttaaatatctagagcttacataaacttttcttatgctatggtttcatagcaccaaaatgtacattaaagtgtagctatgtaacttggtggtcaagtaaactatatatctgtgtgtgtgtgtgtgtgtgtgtgtgtgtgtgtgtgtgtagcgttaattggtagttctttaaaataaaaaagtaaactgctgtagaaactatttcttgctcacttggttcttcatagtctggatttttttgggtaggaccaagacaatctctt

SEQ ID NO: 121611 - DNA, 1049 bp, Homo sapiens
cacaatacatgaaattctaccactacttagtaaatgtagatgtaagcactatcaaagatatttttaaaaatttataaactaccagaagctagagatcatctcttaagcatttttatacgctaagtaccaagtgcatagcatagctcaatggctcccataaatgttgataatattctgtaagatatgtgatgtatacatttaatatttatatgtcaaatgctaggggtaagtttaccaatttttttggtaatctgtccatactcagaaaggtaattatgatagttcctcagttattctgcattctttttcaggctggtatagctgagtgtgacagctaaagattaatctgtatttattatgtttttccccgaaaatccttttgatggaagatgctctttaacaaaagatgtcatccttcccttaactaaatgtcattatgaatgatacttattatagcatgttgtaagagactgatgctcttggcacttttgtaacatctagaatgccctcctgtttctaactgttgtgattggcctttgctgtcccctgttggtaactgctttgttacacttctgttacttctgaaagtggacagtggtgataaactaatgcaaaattacgtcagctacatattgcaaggaaactatttggtatgcattgttatcagaagagagttggttatctgcataaaaagtgagagattgcttacttgcctatgaaataaaatacatgagccttggaataaatatttttgcttaagtctttttgatttttttttctaggtcctgatgaatacgtatctgggtggtctgggtggtgggcattttactgcctaaaaatgacaattatcttttgctttgttaggtaatgtcaaaaaaagtaaacaacttcttcaaaaagctgtagaacgtggagcagtaccactagaaatgctggaaattgccctgcggaatttaaacctccaaaaaaagcagctgctttcagaggaggaaaagaagaatttatcaggtaactattaaggtatactaatactttctgtggtaggtagt

SEQ ID NO: 121612 - DNA, 1041 bp, Homo sapiens
tgtcagtgggatagatgattattcttttgcttgagtctagtgcttcaagaagtgggacaggttaggtacagatgaattactgttcatcacatccagtgtgttctccttccctcaatttgcttgtttattccctgttaagaaatgggaatgtagcctgtagctcagctaaaggagagttattttggcctattcttaattctgaccaacatttgtaatatttatattggaaaaggctccttacagtccagagaatcattttgcaaataaactttagaaatacgattgtttttcattactatcttttataattacatttctattatatttagacttgactaaatattgacattaaaagaacattttgtttgtcaaggttaagctttaaagtcttatcactatgatttcatcttgttcatctctatttcaaatacctagctcaagaataaaggagattttcttccgctccaaaaaattaaaaacaaaaacagaaaaactgcagccattttcttggttcctgttatcgatagacaatgctaggtactgtggaggtccacagaagtgctataccctggttcttatcctttagctatttgtaattggaaatgtagtttcatctgtatactttgcctttcccacagtctaaccctaactccaattgttactgattagataatgaagaagtaggcgatcacctgtgtcacttttgtcattgcccagcacgtaattttgttagctaagtcacttttgtattggaattatgtcactctaaaaaatgtctttttaagagatttttttcaataaaaagtatgtatattattaaaaatccaacttgagatgaaaaaatacattgaaaattttttttttcaaatttaatgttaaaattattttgtttcacgggtaaaagacaaacctctagatcagaatgccgagatttggttgtgcctggatctaaaccaagtggaaatgattcctgtgaattaagaaatttaaaggtattttaattctatatcattatataaagcaagggttcctgatctggga

SEQ ID NO: 121613 - DNA, 1367 bp, Homo sapiens
ccaagttttgttttttgttatgtttaatcatatgattttggtaagacatcttaaaaaaaaatgagagagtaaattgagttagggcagaggtgaggacataaataatcctgacctcctgacatggcagagcaactttgtgtggacttaaaggaaataattttagttcctggtacactgtgatttttagtggttatactattattataattgagttaaacccctggcatcatgatgtgggtcttttcaattttatgttctttgtaatgcctccctctttcatgacctatgctttaagtattaatttttcctaatcctggctgtcctagagaacagtgcataattgtgtcaaaaagattgttctctggatttagagtaactactctcttaagttatgcagttactagttttgacttatttttggtgataaaatagccatcacagtaacaaaatacttaaatcttttttcttgtcatgaggcatactctatgttgaattcaaactttctaaccctttccatctttaagtgaaatatattttagcaattgattaatacatccactgaaagcaaattggccagatttatggttatgacccttcccatttctctaattaataattcaggcagttaacctttgctgggggtttgtgagtctacatataattataatagaaaattttatgagcaatccatgtatagataagactttagtatattgaacagtaagacagattagtagtactactatttatgggactttatttgattttctttttcatgtagtctgttcaaaatagtcatttcaaggaacctctggtgtcagatgaaaagagttctgaacttattattactgattcaataaccctgaagaataaaacggaatcaagtcttctagctaaattagaaggtaagagtaacaaaatcagtagacttgtatgtttagttaagaaaaccacttgatagcttaagaaagcagactagccacctaagaattatgatgtgaaactgtgtctatgttcttttatcttgaatttccgttcagttatatagggtatatgaaaagtactgaatccgcagcaaaggaaatttatttacctaaaaggtgcataaaagaaagagtggagggaaaatgcaatggaactgagttttttttctcagttggcttgacaaatactttctggaagggatacaaaagctgtttttatatgacagctctcatcttttatcaagcgtttggttttctactgcatgggtactgtgatacatgttctagggatatataagtggataaaacagtgtcccaaggaggttgcagttcagtgtggaagatacacagagatatataaatgcaatgctgaatagaatgtgg

SEQ ID NO: 121614 - DNA, 1519 bp, Homo sapiens
gtttgacccaaaatctatttgtaagacaccaagcagcaataccttggatgattacatgagctggtaattactttggccccttgcttgattggcagggtggtatgatagaattaacatgggcttctgggccaaataaatctgggattaaatcctgctcttttactttaaagactttccatcttcatattattttttcagcatcagtgttttcatctataaaatggaaagggggaagtggttgcaataatgcatatttttaaggattgttgtgcatgtagtttctgtcatatcgtaatctgtacctacaacctataaatattctaaggatgtaaaacgtcttgataatcatgtattgccatacagatatctctctattaagagagagattttaaaggttagcattcttagagcagataaagagtagatgaattttttcacataagtggtgttaattggaaagtgatagcttctggaagagattggtttttacagttcatgtagttctggaggtattcaaaggtgtagtatttgagtgaataggaatgatggataagtgaagaagttcgatgatgagtgtgctgatagggaacacaagggatactacaaaagaaaatgaatgacatttcagagaaaggaaataaagggatgcgatacattataaccatcaaccggtggctatatctttaatgtcttaggggatagcttaaatccgtgttgtcttttgcgtttcattttcataatgtaatccttgatcttaattagaactggtcttaaagattttataacccagcctcttacctacttaatatagttttactatatattgcctcattttattatatgtagaatattctaaagaatgattgctaactaaaatagcgataatagatatttcttgtgatactaggttaattattgttaacaaatatttgtggagctcttttgtgccaagcattgttctaggtgttgaggatatattaatagcaaaaaggcaaacaaagcacaaatgtatactggacagatttaagctcaaaggccaaactcctgtgatgtaattggctttctgatatttctagcaagccattatagaacattattgtttaaaaaaaaactcaaaatctatggccggccacaagctgatgtttgctaaattcatataaaataaccctaaccactttgtattttaaatgccatcttttcaaacaaagatttcttgtctgcatacaaatatttactttcagaaagaattccccaaaattaaatatccggtggtggcatatctggaataagtgtcagctatatcatgaaaactaacttgggttctgtttgatgtaacacttttaagtttatatcagtctaaaatacatgaaactgaatcagacttatttgttaaattgtaatgttttaaataaaaatatatatatatttcctagttttagaactccagttgtaaagaatgactttccacctgcttgtcagttgtcaacaccttatggccaacctgcctgtttccagcagc

SEQ ID NO: 121615 - DNA, 2197 bp, Homo sapiens
cgggtgactacaacctctgcttcccaggttcaagcgattctcgtgccttagcctcccgagtagctgagattacaggcacgcaccaccacacctggctaatttttgtatttttactagagacagggtttcaccatgttgctcaggctggtctcaaactcctggcctcaaaccatccgcccgcctcagccccccaaagttctggggttacaggcatgagccactgcgcctggccagcgttactttttgttgtgttttgtcagctgctagtgagcagcttcattttgtttgttagtatacaattcatttggaaatgtaaattttcaaaaatatcagaatagcaatatgaggtactgctagaatgtattatactaataactaaactaagaggaaagattttttgctgatgaggcaaaagttggtttctagtaactgtcctagaggcagcttaatactggtagaaaacatgggccttggagacactgggcatgaatcttagcctcactacttacagtctgtgtgatcttttgcaagttacctaaattttcggtgcccatttcattatctataaaattagtaaagctaactacctcctaggatggttgtgaagattaaattagttaatatagacgtaactcctaatacagagcatgacacttagtaaatcagaaatgttagtagcaattgttatttaaataaaacaataaaaaacccatgagtaattaactataaaaatcaactgataaaaaaattagctgacagaataagaacagtggttgtcagggaagggaggaagaatggggagttactgtttaatgggtatagagtttcagtggtatttgcaccaccatccatcaccagaactttttcatcatcacatactgaatgtacttaatgccactgaattgtacctaaaaatggttaaagtggtaaattttgcattatgtataatttgcacagtttgaaagaataatggacaaaataatgagctgacagtagatactaactggaaagaggtgatagtgttttaaggattgaaacaatataataaattacaaaggaaaaacaaaaatgatccagtttgttcatgcattgattcaaaacacatttatttagctattactagtgtcaggccctgtttgagttgcaatccagaagacgagtcacagatgacaagtgaaggggcttggtggagccttctagaagaggccagtgtcagaagagaactgaaacgaggccacagtgtggctagaggtcaggaaggggaaggagtgaggcccaaggtttgctgggcccttaagttttaccctaagagggtgggaagctttggaagaggttgaagcagggaagtgaaatgatccaatttgcattttggaaactctaaccacagtgagtagggcatactaagggggatgcgggaagtcctgtggaggaaaccagagttcacattagtgttgagtcagaaataagaattactttattctaaaaactgtcagcagccgtggagaaaggacattgaactgctttcttcccttggcaatgttcacagttttaaatatgaaaggaagaagacagagaaggcacaaaaggaggagtggggaaaccttgatgaaattacaacacatacatgtttagaagcccaatactttgttacaggaaatatatatagacaatgtatctcaatcctagaggtgaaaaaattagaatacttatctttttatttaaataggagattacatgagagattctaccatttggaacctaaagcaggccttagttaaattgaggtttattcagaccttgtttaacttggttaatcagctaatcaggaggtctttttgtttcaccttctttatcagctcagaataagtcctctcagcactccatctgttcaaagcatttataggtacacagagagatcctccaatataagggaaggaatgatggggctggttgtatagtacatcaactgaaagtttgctggggaagacgctgaggttctgaaaaattaagtaacttgttgaacatcactcaggacaaagttgggggctgtattaatgagttcttacactgctataaagaaaagaggtttaattggctaatggttccacaggctgtacagtaggcatgatgctggcaatctggttggcttctggggaggcctcaggaaactttcaatcatggcagaaggtgaaaggga

SEQ ID NO: 121616 - DNA, 1053 bp, Homo sapiens
tctctgcaatattgaaatgtataatatccaattattattttcagcatgctatgctaatcatctaaaaaaaatcaaacttgtttctcctatttgaggctttgtatcccttcaccaacatctccccatttctctcaacctccagcctttggtaaccaccattgtcaaaggtagtatgagctctgctctatgagtttaatttttagatttcgcatataagtgagaacatgaggtatttgtctttctgtatttagcctatttcagttcctcctggcttattttaacatgacatcctattttcctctagatatcctcatgtgtcttctcagttaggccttccttgcccacactgtaaaacttcaactcccacctttcaatcaccagtgttctccattccccaccggtttgtttttctctgtatcttaccttctaacatgttctgtaatttacttatttggtttgttgtttgtgtccctctgcacttgaatgtgagctccatgaagatagggatgtttttctgatttgctcagtgatattagcccctgcatccagaacagtacctagaacagatagggattgaatttattagttgaattgagtaaactgtctgtcctcagctcttttgctattgtaagttgttaaggatgacacattaaacagacattgttggactcattttaagttttactgtaatttcctaatcccactaacaataattagaattgcataaggctgtcttattaacttaccaaaaataaggtatgtgcattaccatgtgtatcaactcttcaataaatattggtttcattatacatttccttttatcaatctatttgaattacctaatttaattgctttcgtagaaattacttggttaatatttattatttatttgttttttggctatattttagtagtatcaaggtattgagacttaatagaggtatttatttacttgtatgttttcagagaatgtagagtagtcttaatggcattttaacatttttttccttggagtataatgaaggtgtaagcttacttaagtcaagggccaag

SEQ ID NO: 121617 - DNA, 1446 bp, Homo sapiens
aacgcaagagttactggaaaaatatgttagaggcagttcacacaatccatcaacatggtatttaacagtttttttatatttgtaaggttaaaatctttgttaatagtgtcatcttagagaaatatacctataattttagggcattggttattggtgtctttaacgagatcaactaaataattagaagtttatttaaagataaaggaacaaaaccatttcttaaaacaccgttaacccaaaggatataggacatcaactcaagttccgacatctgtaatacaaaatgtatttttctcagtattaacgtagtctgtcatccttatctccaaatacttggattatagcaggtctaagactttggggttcaggcatcctgaaaatatgagatgtttactttattcattctcctaatcattttgtattgtatgccctgtgtgagaagttggtttttttgtttgttttttactgttaggcctaccttctgggttggtttttacttgtccttggttctttttagggtttttctctgcctttaccttatcctatatatttttttgttcttaataactgttatcctagttaattgtaatttatctcctcctcatctctctctcttaaattatcttaaaagataattcaccagtgatcaagatcagggctataggggtggagatgtcaggagcattagggtcttactgtctggcagtataatttgtgatgctctctagtgggcagtgaatcacagtggttaagaggatagattctgaagccagactgtctggcttcaattctaactgtcacttaggctgtgtgaccttgtacaagttacttaaactctcattgccttagcttccttgccttatagtggggatgatgataatacttcagcattgatgtgaagattaaatgatgcagtactgtataaacaatgaacttagaacagtgcctggcacataacaagtgctatgtaaatatttgcagaatatataaaaaaattattgaattgggttcactaattgaaggaataaatacagcttgacctgtagactgtgaattttttggtccttagaatgttttgcattgtttaatattacagtggatttttattttaaaggcattgttcacagtgatcttaaaccagctaactttctgatagttgatggaatgctaaagctaattgattttgggattgcaaaccaaatgcaaccagatacaacaagtgttgttaaagattctcaggtaagacttaatgttggttctctcacagtagagttcaattctttttttacctgtgaagtattatattgcaaatgagtgttatatttttaatcacctcattcttcaaaggatttgaagtcttttaataagaatagatttaaaaatataaaccatgatcattgtaatgtagaatagaaagtcaagatcaaatagtaatatctccagcaa

SEQ ID NO: 121618 - DNA, 1034 bp, Homo sapiens
aaaagtatggcagatcaatgagttgtaaatcagcttgacaatatcttccatgtcaaggccctaaagtagatatattctgtgtttaaagcaaaccatgtattttagaagaaaatgagctcattgtaaggttggcatatcctactgtagaaactcagaggactactgtgagacaaagctagatggtatttttgtttgtatattggtgggcttatttaaaaaatatatttttttaaagttgagtatgttacaacaagaaacgaatggtaagtccctcaatggcctcaaagtttatggccattaataggattttagcctggagagtttttagggcaggctttactagttgcccagtataatcatagaaaaagcacagcattctgaaaggagtcactttgctgattatgaacccaactcgttttgctgcagttgtgaagaaatttgatatatatatcttaacgttgtcagcagttatttgaaatttgcaaggatatcattgaaatttataattacccaagtttccaaggatctggcatttgtatttttaagaatctaaaacttaaagtataataataataataataataataataataatctcaaaaaaaaatctaaagcagaattaaatattttcattgatttgtgttttctctgacttggcatataggttggcacagttaattatatgccaccagaagcaatcaaagatatgtcttcctccagagagaatgggaaatctaagtcaaaggtactgaaaagattatttacatcacaattatctggcaacagtagggaatgcactattttctgaataaacttaccagataacaatttctttaagttctaaaactttttaggccattacagagacattgctggtttttttcgtttccaattcttactatttttcaccacttattcgtttgtgaattctacatttccaagtacagctggagaatgtaattgttttctggcctgccactggctacttttccactgactttatctcgctacctcgatgagtttgcgttagcctc

SEQ ID NO: 121619 - DNA, 1023 bp, Homo sapiens
gatgtattttgtactatatgacttacgggaaaacaccatttcagcagataattaatcagatttctaaattacatgccataattgatcctaatcatgaaattgaatttcccgatattccagagaaagatcttcaagatgtgttaaaggtaatattaatttcatgtaactaattatttacttaaaagaaatagttgaaataattggaattatgtaactggcttagatataactgttctattcaaaagaattgctaactgaattagtttttttactttgaagatgttttaaagcttgtaaatacttggggattttgcaaaagtgccttgggagaaataatcttgtcataatactttagtgggatatctaaaaagtaacttttataatataatgtaatctggaaaaatactttatcaatatcatatatgaaaacctgctttgtttttcttttaaaatatctttgttttaatagtgttgtttaaaaagggacccaaaacagaggatatccattcctgagctcctggctcatccatatgttcaaattcaaactcatccaggtactacttctttaaaaatttgtttattactagattggtagtataaacagtctgttacctattaatataacaaagacagaatctaaattggctaccctttgtcagcctgcctttttccttaaggaagttccattattataaatagtaaagtaaataaacttttttttctttacttctggtatttatttttacttattccagataacgggttataatcagtgataaattataagaatatcactttgtgctattaaacaaaatgtgtatttacaatggacttatatttttcttactggtactagtgtattattgatttattttatagttaaccaaatggccaagggaaccactgaagaaatgaaatatgttctgggccaacttgttggtctgaattctcctaactccattttgaaagctgctaaagtaagtatgtctattctttacattaatttttactgttttatatagt

SEQ ID NO: 121620 - DNA, 1108 bp, Homo sapiens
tacacttcacagataaagactgtgaaacacagcatagctcagtgattgtcccaatgtcacacaagttagtagatctggtctaaaacccatgtctctggaggaactgttatgtttcttttctctctcctcatgagaatatacagctaactgggtcatgtctctttttgctctatttccagaaagttcagagccagatttgaagctcttgtgaaagaattacaacttcttatcatctgcatatttatgtcctttttgcattggtcttaaacttttacttttttctatttttcctggtcataattatttatttctacttatatttctactcttatattattctagagccactatagactacactggacaatttgtagaagagacgggagtatagataaatgcatgaatgtaaagaaaaggaaaaaaaatcctcacaacactaaaataaagcattgcttcttgggaagaagatcagataattagctgtaatgagcctggctacatttagaaaatctctgtgtttggattatatatgatttaattagtatttggacaactatgattaatgagaggacaaatctctagaacactattgagtaaaaaggatgattttagattttaaaacttagcaaatcaaaatgaccctagttcagtatgcctcattgtgttacaggtaaagaacagccatccagtgaaatcaactactctggagcggcctggtttttgagcatgaaattaagacactgagtgtgacttctgtcctccatttgttatatggattgtccttcatattggatcatgtgtcctcgacccacctgtccagcttcatccctctcctgccacttcccatctggcatctgacattccaccgattcacaaacttcctagctaatacccacactgagtcctctgatagattccctttcactacttccccttacatgcccagttcatgtcatctctcttaagaaactttctttgatttcggctccttattgatcagattactcaatcagaagccgtcttctctatgcttcataagattttgaaaatgccacgattattattggcttatttgtctcccctgatagattgtgaactccttaagttt

SEQ ID NO: 121621 - DNA, 1055 bp, Homo sapiens
acatacagtgtaaatgattccaaaataattgtcattaaatgtatattatttattgtgtcattcttctgtccaagaacctttggtgttttattgctagctgcctgagccaatttcaattccattgcctccagttggagattctgcctgttgggtctttattagcaaactttatcttttcgggaagagagagagagagagagggagagggatttagtttttaaggaactggctcatgtgagtttagttttaaggaactggctggcaagtccatagggcaaactggttgacttgaaactcaggcagggtttctgttttagccttgaggctgaatttctttttgctcgggaacctgcagtcttttctcttaaggccttaaattgattgtatgaagcctacccacattataaaaggtaatctgctttattcaaaatctactgatttaaacgctaatcacatctaaaaaataccttcacaacaacttctacacctgtgtttgaccaaatattaataattgggtgccatagcctggtcaagttgacatataatgaaccatcacattatccttcttacatgttttatcccagctgatgtctttaattggcatgtgattgatttctgcccattgcttttattaatttcatttgactcagttaaaataatcagaatgcattttggtccatctttgaattcccactcttctgacttgcagtgtaaggaatgtgttttgacctcctattgttagggatacctttgaaatgcttttgacattttattttttgtcttagtcttacctgatttagaattcagcaaagcagttcacgtgagggctggcaggagctgatatctccctctcttctttcctttggcattgctctatattgcttgtgtattcatacggggcaagaggagtgagggtctttaaaatttttttttaaattgttgtctctttttctgttccactctttctgaggttatgttatacttaaatccaagaacccatacatgttccatctcacttattgggaacttccagcttagtcttttcttttccattt

SEQ ID NO: 121622 - DNA, 1005 bp, Homo sapiens
aaaaagtggatgttcctcaaaactcaaaaggaaactcaaaatcacttcaggaacatcttaattctgtattcaacggcagaaatacagcatattaaatggcataagcccactggatttattcagatctaaattaagcattgataggatggacctgaaaaggaaaacttatcgtgttcttaacaaattcataagtccagtaaggcaacttaggtatttgcatgaagaaggcactttttcttttgtcaaataaagattctgcaaagtttctgtccaagaactttttagcttttatagtatacaatatgtcagagaaagttacaactctgattacaatgcataactgtttatatgaaaagagaaagtttgatatcttgacatacatttaatgcactagttgtgttctctgtaatgactgaattcatcctgcagtttgatgaaggtgaatcgggaggggaacctggatcttgggaacttccaacctacccagcctcttctgatatctcttagacacttgtaagcagaatttgagccaaatagtctcaatgaagcattcccttcattcatttctggccagattaacttaattcacgctcatttctagctcaccctctttctttcttaaagcatgaagtagaaggtagttcatggctcagcttaaactcccattacattgaaagatttcagtaaagtaaaatttcagtaaaatttgttcccaattttaccagtctgagtgatcctaagctgcacagtattcattttactaagggagcaacagccaagttactgcacagtcttccactgtttaaattgtcttgtagcagtatagtgccactgctgttgttttttccatcccacgtttcattttccctagaatatctccatgttccagggaagtacaggatcagagaataggcagcgttctttctgagagttgtacgtagttacataacgtatcaggattttcttgttcagttttatctttgtagatccccttctgctattgtt

SEQ ID NO: 121623 - DNA, 1592 bp, Homo sapiens
tgatccaactgttagcatttgatgtgttttttcccttccagatcacatggactctatctttctgttgtgaatctctcttgtggaggctttagcagttagttgggcagggtcttgccttgcctgtcctcttctttattgtgcacagccatgagtggactgttgtccatcctctggagcatacacacaaaagcctgtgttgatggtgcagtaacaacatatggatcagtggtccttgcctttgctaacattgtggtatcaggagtgcttgaggggactttcccccaaaccacctcatccatacatcaaatctaagtaaaaacaatgggcttgctatgaacatgtaagtttaacacaagcccactggcttttgtttccaactagaatggttctttaagctgctcttatagatattttggagcttctgctgcctggcaactcaactctgtcagtttcatttagttgggtcagttttatagtttctgcagaactggaagctggccatttaaaatagccttggttccactgacacatgtgatgtgattgctggaccaactgttcacaagttgtgaagagattacaagacagtagtgggctgaaatatgctcagtagagaaaggctggtgttgactgataccattaccacattgaccagtgggtacaggaagtaggtagttactgttgaagtataataaacaccaccaggctttgtctaggctaaggcacttctttagtatgccctgggatctcttgggttattttcctggttacagagaccaatttattagctctaagagcttgttggagatgccatcctaggaaggtagatgccttccagttgtgtgtatgtgtgtatatatgtggaataaatatttgaaatgggtttcagacagctacaacactgtttgcttcacagcactgcttccctaccttgcccatatgctgcaatactgacatgccagtctcaccccagagattaggagttactggtatggaatgtggccagggtgttggaggtttaaaaggtccccaagtgattcaaatgtgcggccaagtttgagaactactgctctggaaggtactaaaattttaaagatgtggtccctgcctttaaggaaatcatagtatacataggccaaagcaaaattacatggaagtaaaataacagtgtaagaatgaaataacaatataaaatgataaaaataacgcctggtaacttcgtttcttttatttaggctagaatttaaatgacagaattaaattgtgcattgagagttttgatagaaaatggcaactgagacttctggaaaaagaagcaattgaacataggcatctacttttgttcctcccaaaaccccactaaaatatcaagggatcttcttttgtcaaggcctaaatccgcagggatggggagaatgggactggagacaacctgaagaaaatgttggaagctggaaggtaaaggacttaggaggcttggaaaaacagaatctggagtgagcagtggggcagccaagaaccagcctggtttacattaaagaattgcccaaaggcttaggaattggcaacatcaagtacttctgggaatagggatg

SEQ ID NO: 121624 - DNA, 1004 bp, Homo sapiens
ttccaaagtacagacattttatctcagaatcacattgagcatgcacggaagcaaattttagcttacataaagttaagaaacactagtagttgatttattattagttgtaatatatcttctatgggcccatagccttatcaaaactagcactgacaattcctgaagatatctggggctcttggcatggtgagttggtcctgtacttccaggttcatgctggtacctttgtggatcatcatgtctgtcatatggaccttagtcaaatgttatggcaaacagcacacagcatatagctcagggacccttgagggggctagtgtagagtgagggcttttaagtggaggcttgcttgaaaagaactgtgatctcttaggatcagttgcccctcatttccaagcagtgcttggagggctttgggcccccttggttgggttcaatccttgacctgtgtagtctgtaagttgctgtagatacacagctgcagcagtaacattgttctttaatccaggagttgcctttgatcttcagcccttcattctcactcttggggtctcttttttgcagaaggtgagccgtggccaggcttcctgtttatagcctccctctgttcagtggtaaacctcaggatttttggatgaagatctttggatgtgtgcctccttggtgcccattcatggtcttgctaatggaacaggatttgggttcatagttttgaattgcctgtcacagccccgctgtcatggctgaacttccttccccaccccacccttcatcccagatagagagataatgcttattgttgagtgattcaaggtactgtagacatcttccagctggagtggatagagtttgaggatagtggatagagtttgaggatgagcacagtacatgcctagtgagatcttccagctgatggtctgggatccttaaagaccatgcaacgtcctcagtacttctcagtgccaattgtcaggggatttttggctgccacgtgcctctcaact

SEQ ID NO: 121625 - DNA, 1035 bp, Homo sapiens
tattacatagtacatatctatttcaactaaactaaatctgtcttgctgacatatctagatatcttagtacttggtgttaccacgtcatgattgccatagacataaatgtctctttagtccaaaatgatgggtcttttaagcttgttcattcaaacgatattactgaaagactggtaaattcaagaggttgtagtaggcactattggactactgatgaaatgaatgagacagtctgtgttcttagcagaggagcttagaaattttaatccagtcactgaacccttgaaactaatttgggctttgctgtgtgttgacattgttgtatctatacccagaattgcagactcattgattacagaggggcttttgcatttaataaacattcattcagtaagcatttactaagcacatacatttgtttctggttgatttttatcttctttaatttgtctcttagccattacgatgacccagatatcttgccttggagtgttcagaataatagggtagaatctgtaggacaaggttcacaaacagctatttctaaacaatgcttcttggaggtaacaatttgaagaatattgttgtaggataattataattataggtaaacttcctaaatctggaaaccttggaacctgtcatattctagaaccataaaaatagtgctgctttaaagcaaaagcagaattagatagagggagatgtccagaagagatgcaagaccaatgacagccttggccaaccctgtgggatctgtgcaatcagaatgactcttttgccaactagttgtccctagttgggctgaaatgaccaggcctttgtactctcacactgatcaatcagtggatgggagatgccaagcatgacctcagtctaggaagttcactgcagataaaacagaccctaaagggtgtgatagctgaagtgctgatatctgtcagccaacagatttcttagtaaccaaggcaacatggtgggtgatcttcacaaatgggtgatctgggcttcatgcatcatagtgttcaccctagg

SEQ ID NO: 121626 - DNA, 1031 bp, Homo sapiens
gagagacttgttaaactatttcctcaaatcaaacatgttttggggtaagagagttctgagaaactcacttttttctgctttctattggcaacaaggctatatttcttaccgagatgaaaaatatctaaatcccatgaactagcaaggaatcaataagaatgctgctagtttggttaaggtggttcaggtattccagggctgtgaattccatgggagacagctggaatttacgttcattttctaccactgagtttttggttcactggaatcatagattttcaaagattatcaagctactcacagtcaaatagggaattgatgaggaatagaggtcacaatttcagaagatagtcacagatcatgatgagtatgaatcatgctttcagtttttgcagctgcttatagcctggcaaactacaggatgtgtctggtcggcatttcccaacacctgccccatgtttcgttcatattcaaaggaaatgattaagctaaaagtgaattctatatatgaaaaagaactggtatccttggattatggaagtgaaatatgaataccaggtttctcccaaaacatttggttacatggccagactgtggctattgtctttgtccacccagaatcctgaaattataatttctaatgaaattctggcatgagctgagaggtggtgaaacgtcaagtgagaattgaattatacgctaataaaattgtacctagtggttcgaatggatcgtctaaagggtttatcaaacttctctaatttgaagggtctcaaactccaaaatctgcctccttgttggtgggcacagctcttttaactgggagagattatttgctgctgggcttttggagtgtcctgtgggcacaagtgttggcaaggatttgatcagtttttgcacagattttggggctcctccatgctgtgcccttcttttagggatttagtctctcaattttcaaccactggtagccacagactattttctgacacctcagatcaaccagactgagtctatttgtttgaatttta

SEQ ID NO: 121627 - DNA, 1059 bp, Homo sapiens
ctcttagtctttttaacaagtaagaaatacattaaaagcaaaagtgttatccctgtgactttgaggtaaatacagactaaacaaaagatttattaaaatcaccccatcatcagttaagtgagaaagacttaagttagaaagaaatataaagctttgaaagagaggggaggtaaaccaactatgttcttggtcttattctttgaagtctataaaattaatcaatgccagagtttataaaaccagtcctccttcaaaaagaacttgctgtaaaactgggcattggatagcatacttaaaagaactgctaacctccccttcttaaatacagttaagttcacataaattccaagaatcctgtttgttttctttcctctagataagcatagatattaaatagaatgaatcaaaatggaaacatcaaatagaaatcaaataaagtacataaatgaacataccttgattcctgggcaatgggcaaaaaatgcttcaggactctgagaatgatagagagccccatgaccaacacagccccaaggggaccggatagtgaggcttccacagttaaaaagatccccagagcgatagcgatacttggcagcttcattaacaatctgagggtcagaaagaaagacggggcatggcacaatgagtccttcccttccaatctccttccgttcttcctccctccctcccttccttccttcccttcccaaggcacaatgagtctttccctccctccctgcctccctccccctcttccttccttccttcctgcctgcctgcctttctttcccatagcacaataagtctttccctcccttcctttctttcttaagacagggtctcgtccctccctccctccctccctccttccttcctttcttccttcctttcccatggcacaatgagtctttcccttccttccttcctccctccctcccttccttccttcctttcccatagcacaatgagcttttccctccctcctttcctttctttcttgagacaggatcccatcactccctccctccctccctccctccctctcttccttttctt

SEQ ID NO: 121628 - DNA, 1058 bp, Homo sapiens
gtcttttttctttcaataagaataaaataaaagttctaaaaagtgtatcagtttaattagcagttttttttctaatggttcatacaataatgatgccctttattgaaatatttttttctatctctgtataattctttttgttaggtaatattttttcccttttaaactctatgtgctgatgtagaatggctttaaaatatcgcccttttattcagtgttcaattttttttttgcgccagttttccaatttaccttgtaaaattgacaccctatgaacaaagtttattctatatgtgtagctccttgctatagaaaatgcattggaaaatatttaccaaaggaattcaaatatattaaacatgaaagacaaacaattgccagtaaaactggtgataggagaacttttgctacactattaaatgctgcataccagagagtacagtatacaaacaaacaaaaaaccctaagggtaattgcaaagattgaacaagttgtgttataaatgtggccaaattttaatgtgttgtgtgttaaatatactgatgcatattatggaatatcagtctcatcaaagcttctttttttgtttacattaaatgagacagggaaatgtaatgaagttaatttggaaattttataagaaatatgaaggtgccttatcatatcattacttttgtgatttatatttgccaacttttttttttttttgaaatggagtcttgctctgttgcccaggctggagtgcagtggtgtgatctcagctcactgcaacctccatctcccaggttcaagtgattcttatgcctcagtctcccgagtagctgggattacaggcacgtgccaccatgcctggctaatttttttctatttttagtagatattggatttcaccatattgcccaggctggtctcgaactcctgaccccaaggtgatctgcccatctcggtctccaaaagtgctgggattacagacatgacccactgcacccagcaaatatttggcaactattttgaaaagattcctaatttatctcattatgcaaaagaactggaaatgt

SEQ ID NO: 121629 - DNA, 1100 bp, Homo sapiens
atttaaataaatggacatattaaaattaattcttattctcctgttctcaggataatgtttaagcaaatctaagaggaggtttttttttcttattgtaagtatggtgtttttaaaatagagaataaaactttgtttgctttgttattccttagttaattgttaaaataatgaggccttattatttggggtaatttatttaagacaatagagcaattaattgctcattggcaacctgacaaaggaaatgggccaagatgccaacccatttcttgtggtctgccagcccttagaattgtgtgttccagggatttgctaatcaccagctggtaactgatttacaaggctggaaagacaggaggactcttgaatcatggccacttacaagtaagatggaatgtgtactggctttaagccttgtctactggcattcagatgttgctgccaggggaaagacttgatgatggcaaagagcctgtgtgctatctttggtgcatttttccgatgtcatcagcattgttcttgaccctcactttggtttaacaattaagacctgctaagtagaatatactacttcagtgatatgtgtgtgcctctctgtctatttgtccacccgcccgtccattgatctatccatctgttcatccatccatccatccatccatccatccatccatccatccatccgtctatgcatctatccatgcaatgaatactggggttaagccatcaatgaatgggctagaattaacctctgaaagcattgtttacaattggggctggcaatctttttctgtaaacgaacagatggtaaatattttaggtttgcagaccatactgtctttgttggaactagtcagttctgctgttgtagggtagaaacagccgtagacactgtgtaaatcaatggcatggttgtgagccaacgaaatgctgtttacaaaaaaatcaacttgcagctatagttagcccacccctcatttagacagtggaagtatccgactcaacatagtttgggagctacacaaaaacttttaaagaagtgtatgaatgcttataagttttctaacactgctttatgttccaggtttgttagcttaatt

SEQ ID NO: 121630 - DNA, 1011 bp, Homo sapiens
tgctactttctagaaaattgatctgagaacttaattcagtttaataaagttttatcacatgtaataacaatttttaagaacaattttagatttacagaaaaagtatgaacatagtacaaagttcttagataccacacacagggtttgccttattaacatcttacatacatgtaggatacaattattatagttaataaaccaatattgatacattcttattgactaatgttccttctttattacgatttctttagtttctaaagtttatttttttgttccaagatagctgatatgttttatacatttatattgcatttattcatctgtgcagtaatgtcatggagccatatcataaatgctatttctgttttaagtaatacagaatttagagaaacaaaaaataaaataaagctttgctacagtgagcttcttaaattattttatgcacaagtgtcacctcagaaaaaatgtccttttttttttttcctgttctgtatttagcggaagaagtccctatagaaccatacaacatcccactgtcccaggccgaagtcatacaggaagggagtgatgttactctagttgcctggggcactcaggtgagtagcattgatcccaactgttaaaacctacgttgtgcttggaagctctcattttaaatcctgatacatgaaaaattgaaaacgatgttttctttatatctcagattaagtctggtgctactgatgctaatttcttttttccctcaactttattggtgtgtaattgacaaatgaaattatatatcttcaaggtatatatgtgatgatttgatatatgcatacattgtgaaatgattgccataatcaaattaattaatggatccatcaccacacatagttactattttgtgtgtgggggtgggggcgaggacacttcagatctattattttccctagtcactgctgtatattagatcctgagaacttcctcatcttataactgaaagtctgtggtacggatttctgagtg

SEQ ID NO: 121631 - DNA, 1250 bp, Homo sapiens
ctccctccttttaacactgaacttgaacaactgttttctagtgtctgtatttaatttcttaaattcattatatttttgtagctgtgagttctattcccactaatttactgtttttgtcaacattactgatcttctagttgtttaaattcagctcttattcctgctatggtatgtgatactggctgctatccctatgaaatcttttcctcttaagtttctgcaatacactgtctcctggttttctttctagctctttaaccgttctttttatctcctttttttctttccttccctccatttttccctccctccctccctctctttcttccttcctctcctcttggtccattttttccttaaatgttggtgatttttaccctttacttctccctctacatgctttctacgtatttgtatgacttcatttaccttctacatgccatctttgtaatcagtatctgtggtactgacttctctctctaagcacctctttccatctgttttctagacatctatacttgttattttcgcagaatatgggcttcaacatatttaaaacaaatttataaattctccatgcagatcagttcctgagactttaaatactgtctctaatagtgacatcagcattcaactagtttttgaggctagaacctttgtagtcattctctgcatatttttctctttatttcaggttcatgtgatccgagaggtagcttccatggcaaaagaaaagcttggagtgtcttgtgaagtcattgatctgaggactataataccttgggatgtggacacaatttgtaaggtatgaatataatggtgatagaatgtcatttccctgaaacctttggccaaatatgttgtatatttgcaaataattcttttgaaattgtgagctatgtgagcattttcaattgatttaaaacttttaaatttgcagcatgaaagaaagttgtataaacagcttcatgctcaaggaaacaaatcactatagaatttatttttcctcctgtagtttcctttgtttaaaatattacaaaatggggtcctttatgcagtcaccttgggttgaattgtgtgagtcatagagcatatcaaggatgccgaaggcacctgtgtttttgacttcttattagttatggttcagtaagctaggtttaatttagtcaggtaaattaagtgatttggctgaattttcatttatcttctctccaaaagtaatggggatggattttttaaaaacataactc

SEQ ID NO: 121632 - DNA, 1009 bp, Homo sapiens
ggagaggtaccatcatcagcaacgaagagagtctcaaatagacccaaagcaatcaagaagctggctttcactgtcacaaccggatgaaagcatcccaaaacaaaacaaaataatgacgctaataagtcagaggtctgatgcatcactttctcattcagtagagatcgcttgtctcctctttcatctttcccagtaggatagagccctaaggaaaatggatctgcattctaggatcagacaaagatgcgaccaacagatttaacacagtgatgcaaaagcaaactgctatcgatgtaaatataaacaacttcacccttctttctgcccctaactctactctctttgcttccacggttgccaaaatgaagtattagtatacttgtgctttacaataagctgctacaaatgctttttgaatgtttaaggtattatttatatatatatagatagatacgtaaataaagttctaaaagtgcttgccctgaccatatgtgaatgccctccgcactgcgccatcataaaacatcatatccccatacaaaagcaccatctacactaaaaatacaaaccccaggataagtggtggatatatgttgcaaacaagaagacaactctagtttaactataatttggaacgtctggctatttgaaagaaaacccggtgtctgacttgatttgaaaatgcctgcaaaaagcgttattttcatgaagctatgaataactcaatctgaaatattgctcttaattacagcaactacaaatagaatggctcgggatcatttgtaagcatgtcaagtgtttagatggtgtcaagtgagtcttcacaaacatttactataacaaatcttacatcttctactaaattataaaacactcttcacctaaaaacatcctaggctatacttttacagtagtatctgcaggttattttcatgtaactaacccaagaaagagcctgtaaaagctatgaaaatgccaaagctcttaaaagtggtaaatataaaatgcc

SEQ ID NO: 121633 - DNA, 1023 bp, Homo sapiens
catgcatgctcactaaaaataacagggtttatggaaagaaaaagtgcgtgtagcaaaccacttaaaacagcttggtaactagagcgaagaagggtttttaaccagagtcaggaaggattgagcctgttgatttatggagttcagggcaaatgcatcaaagttggggagaaagatgtaataaacacttctaaatcagagcagatgggccagcctgagccaagagacatagtgcatggtactatatttctctgaggcttgagtcagcgctgtggctctgctttgcgttttgctttgttcctaagtggcataaaacaatgtgctggggcagattgtacatatgccaacacgactaggttggttgccgccacttctcactggaaacacatttcatacttgtgccaggaaaatggacttttccttgctcagtccattccctcatgtgtttcactgctgagttaggttttgtcggtggagcctgggtcacatctttatcttggctataatggaggctggaaaacatagtttttttatattctaccttgggaaagtggaattcataattaggagaactatcaaaatgtggagaatatgttaaaaagttttagatttttcaggaatcagaagcctaccacacgcacatgcactcatgcacacacatgcatataggtgtatacacgcacacgtatgtgtgtgtttcaatgtctgtaacttttgatttataaattttaacataatttattcaccactatgacacataacagtttagtgggcttgcattccctgctgtcttcatctcatatttcctcagttttgagttatgatattacctgtattttattttttctactgattacctctttattgtaatttattttaatttctatatcttactccattaactttgcttagaatcttttgacctctcactatgtaagaagatgatgttaatgccctctactcctatatccactgttctttcctcccttccaattcccattttctgtcagctgattatttttacat

SEQ ID NO: 121634 - DNA, 1070 bp, Homo sapiens
ctagataaatgagttcttgttggtttctttctaaaagctgcagggtactggtgctttgcttctaatcattaattttcctttggttacattcacattaataataatgtcattaagtcatcttctgttagggcatttttctataaatttctaatttcttatgtcagttttggaaaataataaaatgacccctttctcttggctcttactattttttctttaattattttaatcatggaactacttatgaatttttctggtagaagccttagtataccattaattctgatactattttgcattaactctttgtgatattttctagacattgctttagctggattggtgggcaggaaaaaaggaggcgattaatcctccatttctgtagattgagattttgaggtgtgacagatacgatatgtagtaacagtactgcaaatccctgtgctggggcttgaaactattaatcttgttgtgaatcatatgagacatgtttcgtatgtctctccgtgtggttaaactcttccaggggagcttgggctggtggtgccaaagggtggagggggattgactaatctgttaaatagccttttatctgtgagtctagtttctcattagtatttctgaccagaagaatagatggttggaaatgtggacttttgtttttaattagtccctctagggatgagaggcttatttggaagaatggaattttaaggaagcctgacaacctcagtttccatgtgattgaaaatgtttggcagctgaaaaatgtttcacaattatgagttagagccagattttccactggctaagctgttctttgggagttagatacagggtaactcatatttccactttcaggtctcagtggctccgtttagggtgctgttcatgggactctaatgctccttccttcccaatggcccagaaggctcccatgaggtttattcttctatcatgtataataaactgatgaaataaccatatttcatctcatatttatgcattttaatcaggttggttgatgtttaccacagacatatgtctacaagcatttcattatctataaa

SEQ ID NO: 121635 - DNA, 2029 bp, Homo sapiens
ctcttgtatgtaacttgcctttgaatattcgaagacagcctcctcatagtcctcttatatctaggttaagcattccatccgttcctttcaggtgttatttaaatctcctggtttgcagatgcaccactattctgactaccattttttggacatagtctttatctctgatggcctttaacttaaaatggcattaaaatggtcctttagatatggcttgagtagctgaatgcctagtagagctgttttcctagaaggagatatatactttctatacttctgttttggaatacctgaaaagatagtttcttggcattggatatgttaagcagatgcacatatgttagggatgttgtagacaaaaagtgaataaaaagtatgttgggagggtggtgtccttacaagaataaatttaaatggctgttaatttttaacagcactattatgaaatatcaactataaaatatagggcatattacagtatataatgttggtaataatgtctgagtgaatattcttttcttagaaggtcacttaggtgcttttgttttttgaacaattcctgaataaacttgttagagtactttgtatctgtgaaagattgcatcccttgtcaaaaactttcaatttcacaaaaattccatcaacattttcccttcacagcaacatgatagtgctttaattttctcaatgtttggccacattgttaacttatttttttccccacttttcttcattctgctccttcctttgaggcagtgtttacttgttctttatagagttaacatttggtgcaatacaactagattgttagaaacttttaaaaaccctactcagtattgttattagcattgttttgtccattaccaaccattcacctgtttcctttcctaggataatgttaactgtgctttattagatgctctcagatatttaccaatgacatttttgtaaatggaatattgtttactcttaatcctaaagtttactcttaatccttaatcctttggaatgtctgttgaccttactgtaaatttaaggctgtataactgatagatttcagcaaattatggcagtgagagttttgatggtatctattttatgtcaagtaattcttcagtgactatgttaacatttcactgcattgtgtagagtcttattttgtttttccatgaggtaatttttaaaactacagggctattgagagatatttagtccagtaatacattccatataggggcattcaacgagaagattcttgtgttacaaggaaaggatgttaaaaaaccagaatctctcagtaaattgtggtctgtaacaattccatccctggggaagggcggcgcattgaaacttccatgactattaatcttgagagagagcatgcattgtcttgttggactgaagcctctagccatcttatcaagccagagctacaaaagtaggataactttgcatccctttttggcccactggtgaaaatgaaaatggtaggagtggatggacaatagattaggttctttgacaagtaagtgttgagtgacagtcatgaatatttcccatttcttgattttaccaattgtgtctctaaattcactcaccagaaatatacaataagaagctgaattttcttggattacttaacttgttttagtgaatgggtgagaaaggtttccagctgtagctgtcaggtttttttctgcagcaggcgcctgccttcagcgtttttgaggataacacgatacactctttcttcttttgctaccattaagcatattatgctgccttttgtaggcaggccaccaggctataagtcggactccgtagtctggttatgagctctgaggcatggagagggatctctggccctggcttttctactggttgctggatgaccttgggcaagtgagtcaacctcttctttatcttctttccactttgtaaaactgagactttctttttttctctagtcttaaaaaaaagtttgcaaccattaaatataaagggtaaacaagagtttcttgagtaagtt

SEQ ID NO: 121636 - DNA, 1033 bp, Homo sapiens
acaccacgaaggagcagcacttttatgtcatggcccttcttttctactctctgtcaatttgaatgaagcagaagagaggcaagtattatccagttagaaataaaagagagggccgggcacggtggttcatgtctgcaatcccagcacgttgggaggccgaggcaggtggatcacttaagcttaggaatgcgagaccagcctgggcaatatgatgaaacaccatcactacaaaaaaatacaaaaattagccaaacatggtggtatgtgcctgtggtccagctactcgggaggctgctgtgggaggatcacttgagcctggaagggggaggttgcagtaatctgagatgactcccctgcactccaatgtgtgtgacagagtgagaccctatctcactaaataaataaatggatgaatgagagaaagacattttaaaccaatatgttaagaatcacactttaggataaccttgatattgtaataatttatgattctctaacctgtgaaaattgtaaattgttaagcaataaagagaaaatacacttgtggatatgcagaaatgtgagtttctcagtgcatgggaagcattgagagaaggaaggtgtccatccagtctgtggtcccctggtcgtccctcgcctcccctatgtatcttgtcttgcttaggttttgacctttgtcttcatgttatcctgcattgctatacaacaattggggcatcttgtggttgaagttttaaggtaaaatgaaaccatggttactccttgctgtttcattggctggccctgcagttcttcatgcttactagcccccttcctgccattgctactacaaaagccctccagacctcctttggtgggaggagacatgagaatgtttttttatctcactgacatcctactgaaatcagggaaagacagggcagtgtaaagctttcagctcattctaacctggcagacttcttcaccattgcagctgtatgctgtctacccaacactggcttacagaatccaaaatggctctcccagagggctt

SEQ ID NO: 121637 - DNA, 1043 bp, Homo sapiens
tgggatatggtatgagcccagaatgcccaggcttctggcttgactacaggatcagtggtgctgtcattcaccagggctgggactgctggaggtagagctgaagtggaagggagagttggggcagaatgagtggatgatggacaattgctgttagctttgcatgtgggaaagtttaaggtatccagtggctggtgtggtaccttagagaggctctcactccaagtggcagatctaggtatcattagtataaatacagtaattgaagccaagggagtgaatgaaagagaatggagatgaattctctgttgaatgatcaccagacttgccatgtttttctatagatagataccctggttggaagtttgtgtgtgtgtgtgtatgtgtgtgtgtgtgtgtgtgtgtgtgtatgtgtattgtgtgtgtgcatcccagaatagccatagtggtgtggaggtgtgtatgtcttcagtgtatttggtaggcttcctggaaactacagttttaaaaatgattgacaaccataggctggaacttcttaaccatgttaacatgaatttatagtttgtttattgtggggctgttctgtgcattgtaggatgtttagcagcattcctgatttctacctactagatgctaataagttcctcccacccaatcctcatccccagttgtggtgaccaaaaatgtctttaagcattgctaaatgttccttgggctagataatgccacctgaataagttcttctctgaatttatttacagcattttgggaggagccacattaacttttatgttccagaatgcttgaaaaacacattcatgtctgcagttatcctgactgatatttaggaagcagtttactcctccatcctggaggatcaattgagtaattttaccattaaaaaaaaaatcatttgctgcacataaaagtacagatagctgctagatgcaaattaaattttgttttactttatatgtgtatgatatataaatgaaaaggggtgaccaggacatgttgtactccaaatagtgaaatagcctgta

SEQ ID NO: 121638 - DNA, 1084 bp, Homo sapiens
tcagggtggtatcacttctcacagatgaatctttacttctggcatttactcctaactctcaaaaaattgtggtattaaatattttatatgactcctagaattgtggctgtaaagtcccagcctctgtctcaatcttctgtcaaatgaaggaagaagaaaaagatgaattctagcttttgcaacatgtattcagtccacgctcagaggccaattcctaccttcccaaaccgtgatcacagcccttgattgacagaaatgggagggaaaagggagagggagagaagagaagaggtttttcatcttgaagacaggaagagtcatatctggagagctgaggaaggtgggaggcctcctctgtgtacttctgttgtcacttgattggaatgactaaggacattttgaaaccagaaactgcattttatcactgaatgcagaattgggtttaggatcatccaggcttatacaacatagggggaagatggagtgactatcctgtggtaagaatgaatccatcttataagagtccatggcacagtggatatacagcatgcttatctaagcttaattactggttccatgtatgtacttcggcaagtcacttaacctctctagtcctaaccccacatctgtgaagtccacttagggttatgaagatttaatgtaattatgatataaagtgcttagtagttatagaagcaattgctatggtttaaatggtgaataaacagattgtttattggctcaggaattatgtgataactatttaagaattgtacttctggttgtcccgggagattaggattcttgtttggcttcactactgactagatagtattaatagttaagtcatttaactttgtagaccctggtttccttttattcacaactgttgaagttgaggatctttcatttggtaagcttgggaattctattttgttttgctgtttaaaaacctaggcctcttgttgttaacaatacctctattaactaatttgagttctgactcatctgctagatctaaatagccgtgggaatgtgaagcttttcacaaataatgctatgatttttcagataagtttttgct

SEQ ID NO: 121639 - DNA, 1035 bp, Homo sapiens
gtatattaagaattaaacatagtcactataactaacataaaatatcataaacataatatcaaaataagatcctgaaattatgtgataattgtcagttgcaaaaattgtcaatgagagtatcagaatataatcgtatttatataataatatgaagacaccaaaacaaagcatcttgtagcactctcagactcccaggaatgtgttcatagatcctcaggtgtccctagtctatattttgagaaatattgatctaaaccaactgcattctttttacagatgagtgtcatccagagtgtttgtgacttacccattttataaagacagtggaatatctgggattagacaggagtcttgaataaatgtaaagtgtgtgcacatgcactcttaattcaaaatcccctgccttccacgaggaagataatagaagttttggacccgttatacaatgttctgttgttcatggcaaaattattcaccagctaaccacagaatgacttgagacaatagtgtaatatttgatggaggaattatatttaatattttggataatttgagtttggatttattaatatgagaaatttgaaaggtacacagtgtttttgcttaattcagattttatttgcacaaatagaaagtatagaaaatgaattttagtaaaatttagtgagcatgatatccataaatgtttgcctgttatggcttttatctactgataaagaagattagaaaaaaaactagacacttgaaaaattttttttcattgataattttcccatataattttgagtaatctgagtaataaaatatacctttcagtaactctttcatgcagatattcaactatgcaatatcctgtattgagcttcctctctatggaaagccttgttccatattataagtgaaacctgtatcaaattaccagtgccttgggttgtttaaactgagatcacctaagtttgaggtacaactgctttcaccacttagcatgattcatatttctctatttcttttttggggtatattttttaaggttaa

SEQ ID NO: 121640 - DNA, 1050 bp, Homo sapiens
gagaattgctaaaaagctagtcacagactgcaaaacaacattttggtcaacaatggaccacatagaagatgttggtcccatgagatcatagtggagcataaatagaaacctaataatatggtgcttgatgtgggcattgcagatcaagtatgggaaatgattgatatttaatgctgcttctgggatatttggttttccatgtgaaaaaatatgtatataaataaaaatatatatcatctaggtttgtgaaagtatagtctgtgatgtttgcacaaccacaaaattgcttaatgcgtttctcaaaatgtattcctgtccttgtgactcattactgtatgtgattaaactaggtgagatttgacggtcttctaaaccaaggacatgggagtaggttagagaaaggtgaatttttcagatagtaggagagagaatctgaatgaaagacttgctgactcacaggagtggggtggggattgaagtggatgagggagaggcagacagaagtcaagaataaagcatagcttggtttctaggttggatgatttttgaatagaggtgcagtttcactgagatggggaatatcattgaagaacaggtgtatgcgtgtgtgtgtgtgtgtgtgtgtataaggtaatgagtacattttagatttgtatctgaaatggggatgaaaatgtgtttctggagctcaggagagaatctaaggtgtaggaaatgggtaaggattcattctcttatactgatatactggtggctgagttcatgggtatagatagggtcacataggaagagataatcttaagaagggaaagtttctgaagaagaagctgcctgggttgaagaagaagccacaccaacatttaagagaaagaaaggaagttatgaagcagagtgagagggagtggcttcagaaaaggaagggagtaggagagagccattacatgagacaagtgcagaagagtttgacaatagcatatatggccaagaatattaaatgcttccagaatttaagacagctaaagactaatggtcctaccttgcatgtagcaa

SEQ ID NO: 121641 - DNA, 1034 bp, Homo sapiens
caagcctctctcatcatttaagttacataactagtagctaagtctgagactcgctccctagtccttcaacttgtcttcaccaccaacttttctttcccaagaggcataatggccttgaagaaacagctttatttaatcatacagactgcagttagaacctactacttattaatagctgtgttttcttaagaaacttattttcatgtataaatataaatctcaattccttatttgtaaactgaggatgattatagctaacatatagggttccatgagctaacatatacaaagtggcttgtgcattgacagatatttaataggaatgtaataaattgtttatattcttttttccatattctaaaattgaactgtatccaatattaaatccacctgccccctctgtcaatattctgtgcttcacagtgctaatgattttctattacatttttttcagatatacccccatgaaagaacctctgttaaattttcagtaaattaaaacttaaacgtctccagatgggtccatgaatgactaaaaaaaatcttctagtgaaaaataacaagatcgtcaacagaaaaagtgacaaacataaagtatatctagccattatagaaaatgtaaaaaaaattatttgtattcacattaggcctattttaacacacaacactgtgtaaatgtccagattgacttttgttagaccatattgtcagatttattttagtagaagatgaagcacacacttcataatggagtataaaatttaccaaagttgtagataatccattcaaatggaatgtgtctatatgtgttttggactacttaacactgcaaatgcaacttcaaataattaaattaaaaacataaaaattattcccaaaagtaatatcatgggctactttacattttattcaatttaatctagcaaaaaattttgaatgccagatactgcaaagaattctacaatcacaactaaggggatggtcactgaccttggaagagctgatagtctagtgagaaataaaacaaatatatg

SEQ ID NO: 121642 - DNA, 1049 bp, Homo sapiens
ccgcacccggccgtagattttcttcttaacttgccttgccattcacatgtatatacctaccacacatagattttcataattgtacccaaatgctatagtttattgtgtacttgctattatttgctataaaatatttctttataataaacctattgtgttttggggtggtctactattaaaagtatagtttttttgttttttgtttttttttttagacggagtctcgcttttgccaaccacgctggagtgcagtagcatgatctcggctcactgcaacctccgcctcccaggttcaagtgattctcctgcctcagcctcccgaatagctgggattacaggcacttgccaccacacctggctaatttttgtatttttagtagagacaggggtttcaccatgttggccaggctggtcttggactcctgacctcaggtgatctgcccaccttggcctcccaaagtattgggattacaggagtgagccaccatgcccagccaaaagtatagattatcaacaataaattttaatattgggagctattcaaagtgcattctgtgtactttttctgtctcatactttctacagtctcatcctttctatagtctcatcattaattttataaaaatatttatctttgaaatatttacttgtgtaataatgactttgttattttaacaaaagagtaagtattcatgtattttggcctgtggttttttttgtttgtttgtttgtttgtttgtttgttttactgaatagcttgtggcttgccatctttatttaaccatctggtgaaatgtttctcttccatactaaaatggctttattctttaccattttacttgttaaaacttttattttagtatcggggtacatgtgtaggtttgttatataggttgtgtgtcacggggatttggtgtacagattattggccacacaggtaataagcatagtaactgataggtagcttttccatcttcaccctcctgccaacctcagccctcaagtaggcctcagtggtttgctgccttctttatgttcatgtgtactca

SEQ ID NO: 121643 - DNA, 1021 bp, Homo sapiens
tcagaatactggctgactctttaggtatgtgggcttatatgaattttttagctctttaatccttagtttttccattagtagtacccaacttgctgaattgtgaggtttgaatgaattattaaagttaagcttttagaatgggacctactacccagaaaatatttaacaatattattgtaatgtatcactgtcaccatttattactacaatctctcttgaattactcatcacttttctgacatcatcatatgaaacaagttttttaattcatgccagcttctccctcttacttacggtttaggagttgcctctaatgcctaaggaaacgtgtagccctctggttgtactgcaaaagtggttgcattttgaaggcaggtgtatacaacttccagagtaagaatatgtgtattcaggtgtaggcgttgtcagtttccaataagataatttataatgcttaatttatattaggaagatctcacattgttctcttctgtaaattatgcatgtatttgtaaatctaaaaggaactttgatttttctctctgattaaggtgtataattataatcttaaataaaagtgaagttcaaagtagcttcatttaaaatattaatagacaaaacataagatcagttcttttagggattggtttgtcagccacatgttagatctgcttagaaatcttcagtgaaataggaaacattgtataaatgttacctaatgtaaatactgctaaatttaagatatactaaaatttgagtattttccctttagtctcaaataagcaaaaggaaatctgagttatatgaaaatgaaagcatgtattcagcttttataaaaccattataaataagttatttttcctaccaagttaaataggatatgtttacatgttttaaattttagttttattagttacagtatcatattgtgaatagtagcaaatatgtccttatatagttctgggttcttgctttataatgtacatagacaaatatctttttaaaaaaatttttgtgttcc

SEQ ID NO: 121644 - DNA, 1036 bp, Homo sapiens
gttcttgctgttttataattaccccaaatgttctctgttacttctcctaatgattcttctttttttttcttttttctttttttttttttttttgcatacagcagagaatgcctgtgggtttaaaaattttttaactaatcttgatgaatcaattataatttataaaagtggagcataacagttaagagctcatgctatggaattggacagagctgatttcagatactgttctgccacatgcaaagtgcataactggactagtcacttacctttctgaacctcagtttcctcatctctgaaggggatgatgaaggttcagccctctcatagggctcatgacaattaatgagataatgtcacatgcttaataccagcatcttgtatgctccataggtgttagctgtctgtttgtaataatatttttgtgtttggttacacaaacccactttcttcatttgttttctgctattaatgccttttgaagtattgtgttgtttgtgaacacatagtacaaattgacttttgtttttttaattatcaattttgtttctgtaactgcacagaaaagtgataaattgtgagcttatattttcttttaatacatagatatcgcctcccaacatacatgaattttaagacactaaaaaccccttaaagatcttttcttaatcagtgtttagtaaatgggcttacattctagcgtatagaccaattcaaactgttctacagtagagaggaatttgtatgttggccagtttttcatacagtgatttctaactctttccccttcagtatttccctaacatacactttctcatccagtatttcttttagaattctcacacttttgccctcataactcactttcatattcctagagctcttttcttcacactgattgtgctgctccttttcaatttttccaaccttatggaattattagtgagaaaaagcaaaattattattatttgagacggaatctcgctctgttgcccaggctggcgtgcagtggcgccatcttggctcactgcaagct

SEQ ID NO: 121645 - DNA, 1035 bp, Homo sapiens
tttcataaggtccttggtgtttcttaatgtcttcctttctcttttttccctccccttttcccctccccttttctcccctcccttctcccctcccctccctcccttccttccttcctttcattttttctctgtgaccatctgtatgttcttttctttttgtctgccttttagtattaaaatggtcacctgacgaccatctgagttgagctttgtcaagaaccaagggctgaagttctttttgttcagactatgtttctgttaccagtattgagggactaaggactttcaagcccttctcattctcccagcctgagagatattaagataagggaaaactagattttgcaggtaaactttgatttgttgaatgcctgctttgtgccagacattgcatgctacgatatattctattaaaaggattcaggaagggcatttactcttttagctactggagtttgattttctttattatcatgctgatcagtgtacactggcagtgtggctgattgagtggaaaagggagagctacactgtcttgtcactcacctagttgataacagattcaggacaaggactctcgtctcctttctaatacaatattagccctaaacccaaagaagttgagatgttttgtcattctttagtttttcccaaagggaacatttttcacaacataaaaagttagctgattggaattaacttatactttataagagatcagtgcatatctagaggcgacatagtagaattttcaaacaatcagaaatctcataaatcggaatctaagggaaaacaaatataccctcctgaacgttgtataattgggtatacagaaaactttctaattttattttgccttcatttttagactaacttgcaattaccccaagttgctaggtagcaaaattattatggtactagctcagaatttgctgtattttaatcagccttagtgactgaaaacacagagagaatgtcaatgagggagaaaggttttcctttactgcccctagataaagcagatgaaaatctgtt

SEQ ID NO: 121646 - DNA, 1076 bp, Homo sapiens
catatattcttaaaaagactgatatcctattcgtagtcttctcttatatatccttgaattatcttccatgatttttatattttatatacttataatagcgtattataacaacttaatgctacataatttacagtaatcgtttccaaattaaggaagccctatgtgtaaaatcacaaatttatgtaacataacacaggaacttttattcatataagaaaatcattattcactttactgttttcctttatttcagcatcatttattacaaaattaatactgttttcgaaaaaccaaaacaatatattataaagcacaacgtggagtcttctctcacctccttgtcattcccagcctcaaagggtaaccactgtttacagttcaagtgtgtcttcacagcagatgtttttctatgctcgtgcagacatatagatgtattcctggaaagagtgatgcttgcattcttgaggagttaggagcattgctatttgaaaaaataaaaatccagtttgatgatgttagtcattatgctgaaaggagtgattttaacaaataccaacagaacttcttgtggtaggccagctttccaagttactggttcaagagaacagtcattttataacaggtataaaatcaaagacgtttagtaaaatattttgcccttaattctccatggatagcttgtttatgaagagttcagtattcagggaagatggaaaaacagcccagtgtcagctaaagtaataaaaccgacttaatcccaaattgacaatttaaagccctttaaaattacttgttgcaaacaagaaataatccacccagtctgtcatctcttttcagcttattagtagtggaatctcttaggtggctctttaaaccgtgtgtattaaaagtcctaaagttgttcgtggagatttccagttgctagggaataccaacacttatttggtgtttgatattgtaaatcatgatagttattggggccaaagggaggtctgtaaatgtccagtaggttctctttggagctaatttgtgctgtttgcattttctttctgccccaatacacttgtcactggaag

SEQ ID NO: 121647 - DNA, 1053 bp, Homo sapiens
cacttagagctggttagaggactccttcacttttgttgtccatgtggttcccttccgtggaccagccgtaataaagagccaaggtagtgatggtggccacgtgcctcgttgctatttttaaagtaatattcagatgtggttttaaatttagattatgtattccttttgaaacataagaaaaacatttaaacctatgctgaaaatacgataaaagaaaaacaactccaatatgctaaaagttaaatatggtatttaagaaaatagtcatgtatgcaattgagaaagtctataatttattttacagaaaagctggaagattatgactagatatggaaatattttttctgaatttttttttatatttcctccgacttacctctttttgaaaagagagtttttattaagtgaaccatcacgatattggctgaaaagttctacattctattattgtattgtaacacacatgtattgatgattttcattaagagtttcagattaactttgaaaaatattccacatggtaatcttataaattctgtttaattacatctgtaaatattatgtgtgtgatagtattcaataaagtaaaatcaaattgtctttgggttgtatgtgttctttttttttcctttagtaaaaagtttttgtttcagagtaatagcttgtgaattggttaattaaatctgaattaaagtacagtattcactatagaaatggtgacttctcaactttattgtatttggttcagttctttatgaccaggatggttatatgttgacagaacttctagaatgtttcccctcattcttccctcttgcctgaacaaggtgtcgtaatgaatgtactcacctccccagtgtgtggtgggtggtgaggcagaatttttcctactgcctctcttccgtgagatggacagcctaagcctgtccattacaaaactgccaagttttagctgtagctgtagtgtttgtcgtgatgttgcaaagcaatttttgcccatgttctttatattattacttggataaaaagaaaaaacaacagtagcaacaacag

SEQ ID NO: 121648 - DNA, 1037 bp, Homo sapiens
gattacaggtgtgagccactgcgcctggccaacacacgtgtttaaatagaagactgtatatttcttctgacatcttgctgggaaattttacctcagagtgaaaagaatgttgttcagttgtcagctctaaattaagttgtgttctcaggcaagttgacaaattgcctaatcttttcttatgcctgatttttaactgttaaaatggtgattggaggtggttagggatgacaagacattggggaggaggctcacatctattaaatgccaattatgtgccaagtgaacaatactttatttcctcaggcttcaagtacaaattactgaaactaaactaatggttacctgtcttgtgtgactgtttttgccaagtgtagattcttgtaactgtctttgaagtaggtgaaaaatcaaataaggtattgtctccaaagccctagaacatcagcctatgcctctatgacagacttttcacacatcattgtcattattcgttgacatcattgattcccagcccccaacaggaaggaatcctgacttattcatcaccgtgcacaagagtagctcaatgaataatggaatttgtggtactcctgttataagtataataatttagatggaagaaaataagtgataagtataaagtgatctccgaatgtaatctctttaatgtcagctatgactaaaactaagagccttatgttcacagattgctacttagtgatgccatttttttattagaagaaatcgactggtacatgtatatttcattgtgaggaccccaaatctacttgttggcttaagcaagttgaaatttatttaaggaatctaatttcagcaagaactctaggacttataagaattattggccaggtacagtggctcatgcctgtaatcccagcactttgggaggctgcggtgggcgactcacttggggtcaggagttcgagaccagcctggccaatatggtgaaacccgtctctactaaaaatacaaaaatttgccaggtgtggtggtacatgcctgtaatcccagctact

SEQ ID NO: 121649 - DNA, 1074 bp, Homo sapiens
atatacattttatatgtatatatacacagtagattgactatgatctagaataatgtctcaaataggaaatgtttaaatactgtgtgtttttatgttttcaacaggataacatgagacgtgggcatattgcaatgatgaattaaatccacatctaaaaaaattaaatgaaggagggaaccaagtaatatatttcataggaagagcagaaattatactgttttagtgggatttttttttctttttttttttttctttggtgagccataaaattccacaaatgggagaatatttgtttggcagagcactcttttttatattgaactgccattttgacagttggaacccatttattaaaaaaaaaattgcattcctctatgatgtttaatctagtggatcatggatcagtaataggctacttaaatccctgactgctaaaaaggatttccggtgatctaaacactacttgctaatgtttaaatgaattttaatgaatgcattctgcatttctggaccactagaatttagtaatgtgaaatgaccctttttacagaatatttgcacaattgcttaaaatttatatatgagatatatattatatataacattttataaatcatgtcaatatgaaacatctttgatctggttgtcacactgcatttaaatatttagtactgtactttaaatcgctttccattaaatcaaatccaactttattttctttcttacaaaaataccagttatacctttgtgaaatgaactggcattactatttcagttcaataacagctaatcctaaaaccaccctttctcctagccagtagttcctctagatactggtctctgaaaatgcatttgttaaaaacaaaacaaaactaacacataagaaccttccctttgtgttgtgaaacaaccacataatctccacaaccttagtggatgactgcttgctatgataattcctcgaagacccaattagaagattttcatcatcagttaaagagagaccacgggagaaaaaaatatcctcctgttggcagtataatttgtttgtttgtttatctagggatcctcaga

SEQ ID NO: 121650 - DNA, 1155 bp, Homo sapiens
gctttctccttgccacagagatagcaggatacctgatttaaaatgcaggatacctgatttaatttcactgtattgtatccatggaaagtgatagttcctcaaaaggaaattggaaggcaaatacatcctgcttagtttataattaaaagagtaaagagtcttctttcccttcctcctttcagattgaggagcatgccatacaagatttattggttttctatgaggcatttggcaaccctgaagagtttgtcattgttgaaaggacaccgcagggaccactggcagtacctatgtggaataagcatggatgctagttcactgtggagttgagatgcattttacataattatgagtttgttcatataaagaaaagctgtggaaaagagtcttagagattttgtaatatcattctaaatagattaagaaaagatataatttctttactgcagttaaatcatataatgtttgtatgattaaaaataaatttctcagaattgtgattttagtaactttatataaaatgtgtgagacaaaaacttattaaggttaaatagaattgtttcttctgaataatctaacaaaggaaaatataagtgattgaatcataagatataaggggggtaaagtattaaaaataacttttttgtttgataacttgagaatttagaagattttgccaagtatgtgttgttgcttgacttcttaaatatggcattgatgaatttaaagtaggagcatcagttattacttctgattcattaatggccagaattttgtgtttggtgtaatagttgtgtcaccattcttgttgctttttaaaaatcaggctaatcatgtggtccatgtctcttcaaagcttgacctgcacaaatgccatatttctatttggaccacatattctccattttgcattgagcagtagagtacagtggaaagggaataagaatactgattattctgaacagtttagtcccaagagaatagcgttttaaaaaagaaaaacaagatttggagtcattgtgggttatttttggtgggatggaggatcttaaaaatgcctaattgtgagagaatcaattgctgaaagtgttaaaatttctgaaaataaatgcttaattacatatacaggaattaaatagtttggaagagggttgg

SEQ ID NO: 121651 - DNA, 1033 bp, Homo sapiens
gtaatctctgcgaaagcttccaggttcgctcatcgtaggtcactggaaaaaattgtagcattgctaaagagtatttcagagaaaattttgcatgcaaaaatttaggaagatgagtgaaactcatcattctgtaatctctgtgaaagcttccaggttcgttcattgtaggtcactggaaagaattgtagcattgctaaaaagtatttcagagaaaattttgcatgcaaaaatttaggaagatgaatgaaactcattattattattctttcagtccctggctatcttcttcagtgactgctccatccatggtagccccagtcacttttgcatctattgtagaagaagaactacaacaagaagcagctcttattagaagtcgagaaaaaccgttggctctgattcaggtaaataacatacttagtagggtttaatttagagaagaactacatttcctacttaggttttaagaaaatcgtgtttgtttgttttggacaggtgcttgtatctatgaaattaaaatgtaaatgccaggtaaaattaaactgaggcatctagcagtgtatgtattagttgtagatattcagggcaattaatttatgactaataaattatgataaagcttatatttttgctttggtgatactttggattattttagtttttttaaaatgaccagtagagaatttggcagtattctctagtgctgcacttggcttctgtatcagtaagaattctaagattgtaagcaacagaagcccactctggctaacttaaggaaaagataatttatttgagggatattaagattccatagacttagctgaaagaccagacagccaggcttggaaacagaaaagacgcatagtagcactggaaagctcagaagcaagatttagaagacttgtacaacaacagaaagtatctcacagaataaagctattggaatgaatgaattttagcaaccattttcagtttctttttccttctgctcaagattcaaattgaagagcgcatgggtatctcatgattctac

SEQ ID NO: 121652 - DNA, 1047 bp, Homo sapiens
tttaatcagcctgatttttagcacctacagtaatcctgacatgctcaataaatgtgtataaatgaatcacgaagtcaatattttaggtcctgttaatttactctctgtttgactttgtgttgttaaacctgtctagtcctcagttttctcattgctgaaagagagcattggagcaatctagataatctctagggacctttctagctgtaaaattccataattaggtccatctgtattgtacctttttaagtttttctccttactggaatgcttcttactgctttcatcatatacctcttttttattatcttctcaagttcattccatccatgaggccctctcaaatgattaaatattgtgatttttatagttgttatagccagtgtgactcaatttgttatactgtcttaaattctgttctgttattttatatgtcattttgtatgttgtttcctcaactagcttgtgaattcttagaaggtaaagatcatattttatatttctgtcctatctgtaatcctttgctcataaagtatattagttccttacaaaattcggctgttaattatctgatttagagattattggtttatctggtgtgtgtatatatatatttattattagaaataggctatttcttgcagtatctttctctatgatattttatacagaaggttttataaatatagattattttgtttacttataattttaaaggtaagcttgactgcactcatttaatttgcctctggagtcaggagtttacaattcttcctctgtatctattaataagcagtttgactaatattactagaagctttaatctttaattttggcatttgttttgcagatgctctacccatggtaccccaggaccagaaggcaaccatatttcagatttaccacttctagacagtcccaagtaaggttaattgataagttatgggcctccaaagctaagttgctgcttagcattgaaaacattaaggctgagtgcagtggctcatgcctataatcccagcactctgggagactgaggcgggtgga

SEQ ID NO: 121653 - DNA, 1055 bp, Homo sapiens
aaaaaagcactcttagatgacaaattttgttttaaataagaaagcataagagcattatttccccaccctttatatattaagtgtgatgctgagatttgacttttccctctttgtattagcttgagaagtgtttttctaacaacatgggagattataaacaagtcaggcattctagtgggcttctagactgaaatgatcaatttaagttggccattttatggtcctagtgtgagatcaagacattttggtgtaattttgtcagctttctacctaaaaaatagaaatatattttgatgtatttactttttattatggttgccctttcaacatttagaaaataatcttaaatctcttttctagtgtactaattacttcaaattttttttttacttaaatctcttttctagtgtactaattacttcaaatttttttttctaggtataatgtatacaaagaaaaagtgatgcttgttttctttctttttttagaatctcaaaatgtagattttatttgtagtgttcttgtggtggctgatcaacttctcataacccggttgaaagagatttgtgaagtagcattaactgaaaaacgtgagtaattttgagtttgaatattaatatgttttcaggttcatcaaggattactgtactttattgactttatgattccacttatggtaaaatagaccatttttttggtaccacgaaaacctgccaaaatatgtaaattattacatgccatcatttgtaagtgaattcttattttagaaatatgtgaaaatatatatgacttagaattgaaatgtaatatttgtattgaaatgtcataaaaccttgaagaataaagatggtgtcagatttatttgctaatttcaagggtgagagtttaaaagtgaaatttttgtactcttgccctgatcttggctttaggtgtttttagctacccattttctactatttgcagtgattttaaaaatttaactttcccattatatatctgaacaaagcacatctctttttttcttgaactcttctttcttgctctcttcattatct

SEQ ID NO: 121654 - DNA, 1201 bp, Homo sapiens
attgcaccattgcactccagcctgggtggcagaacgagaccccgtttcaaagaaaaaaaaagttttgtttttagctattcatgcttcctctgtaagtgaaaaggttttggagaaggataaactgtggagttgtttcaactgtgcttggcccagattagctactacaaataagtgaattacagagacttaaatatgatatcacttagtattatattattaacagtttttctggaataaaaaaaaggaaaatcagaaaaatactttttgaatatttgtattcggctcccttttcaaatattgtctttactctaaggcccttatcttccctgtggtggaaaaagatgaagtattttattgtatgtattcctgcaagttatttattctctgccacctttaagagaaaactgaaagttaagccaaatcctataatctttttcactaaatatgtaaagaaattgctcttgcttcaattaaacattttcttgcagttcatttctgtgtgacgtgaccatgaaatcagtggatggaaaggaatttccttgtcataaatgtgttctttgtgctagacttggtaggtgcactttttaaagctgctgatttatttgctgtagtattgtttcactattcttattgcattgaacttttttttcttttagaatattttcatagtatgctgagtagctcatggattgaggtaagatttaagtaaaaagcgcctaggttggtaactatgtttctttatattttgtgcaaagtatgtagtaaagaaattcaaaatcagaactggatattttagctcagtttttcatttatattaaactttatgcttgaggctgctggaaaatagcaacacttagaatttaaaattattgccaagaagctacttaaataaaaatttccccgttattatttagaaatgtattaggaacaccactgtgtttcttgttttctgaatttttttgttcctttttcatgttatgttttaaaattaaatttaatattattttagccatgtgttttgtaaattttatgttttgcatttgatgtgatttcctgttcagagtgttttgtaccaataacccaaattagaatgtaatattttattgtttagaatgaattattttactttattttgtcttattttatttaggcttccagttgtgcagctctggaaatgccaatacattctgatatattaaaa

SEQ ID NO: 121655 - DNA, 1439 bp, Homo sapiens
ctttctccctacccatcctttttttggggaggtacatggatatgtctttcctccatttgcgggcagagctatctctgggacttcttggattacattaatggataggaaagctgttggtgggtttgaactctggtttgtgtatgtaacagggatctggagtggcaggcaatgtggtatgctggaaaggtctttcaagttagacatacatatctcttagctttactattcctggctgggacaattttcttttacctcagtttctcgaactcctgggctcaagcgatccttcttacttcagtttctcaatataagaaatgggaaagataatatttgcctcatattgttgatatggttttgtcatatgtaaattgcctaacaccatagtatcatattatgaatcagattatttgaaattctttctttttttaaggtatttatgttgcttgtggcagttaaaccttcgttgtagggtgggaagagaggaggggtgtgtatcgtgtttcctgtttaaaaataatgaaggggccgggcgcggtggctcacgcctgtaatcccagcactttgggaggctgaggtgggcagatctcctgaggtcaggagtttgagaccaagctggccaacatggcgaaaccctgtctctacaaaaaattacaaaaattagccgggaatggtggtgaatgcctgtagtcccagttactgggttggctgaggcaggagattcatgtgaacctgggaggtggaggttgcagtgaactaagatcatgccaccacactctagcctgggcaacagagcgaggcttcgtctcaaaaaaaaaaaaggaaaaactttgtgctatggctttgatttgtcttttgtcagtaatgtttaatctattttgaattctaactaaaatggaagaaaaagtatgatatttctttatctcagagtaggagtttgttgagatacttttctaggatacagtattatatttagatgtaagctaatttgttggattttttgttgtatgtttatttttgtaggggaatatcaattgttaatttttatctatccttgataggttagatggagtcagatttgaaaatgaaaaaattaatgttattgccaagaacactggtaataaactgaagctaagtcagaaaaaatggtaagtaaggaaaggaagattaacatttcatgtctggattttggcacttaagtgtggaaatagatctctgcttacccacatatgaagcaaaatgtataggtagataccctcttaccttttctagtattctgcatttctggaaatgttggggagctgttgaagtaaattgataaaatattaactgctgaagacatcaaaggagttttttctttccgatgactttctaatagagagtggaacttttaatttttattttttcttgcctgaattttgtgccttgttataattaggaaa

SEQ ID NO: 121656 - DNA, 1045 bp, Homo sapiens
aatattcttgtattttaggaaatgccaaatttaaaattttctaaatattgttaaaaaaattgcattttaaaggagaattggctaggtatgaaaaaggatttccttcatattttttgaagcataatttgtttttgtcttctttctagcctttatgaaattccagctgtgtcctcatcatccttttttgaagagtttggcaaactgttgagggaagcagatgaaatggacagcattcatgatgtgacatttcaagttggcaatagactcttccctgcacataaatatattttggcagtgcattctgatttttttcagaaattgtttctttcagatggtaatacttcagaatttacagatatttaccagaaagatgaagattctgcagggtgccatctctttgtggtagagaaggttcatcctgacatgtttgaataccttttacaatttatatacacagatacttgtgactttttaactcatggcttcaaaccaagaatacacttaaacaaaaacccagaagaatatcagggaactctgaattctcatttgaataaagtgaatttccatgaagatgataaccagaagtctgcatttgaagtttacaaaagtaatcaagctcaaacagttagtgagaggcagaagagcaaacctaaatcttgtaaaaaaggaaaaaatattagggaagatgatcctgtaagaatgttgcaaactgttgcaaagaaattcgacttcagtaatttgagtagtaggtatgatttctcttttatatctgttcctgtacctcattcagtcctcctttaaaaaatttcccacccttactgtgaaaccccatctctactaaaaatacaaaaaattagccgggtgtggtggcgggcgcctgtagtcccagctactcaggaggctgaggcaggagaatggcctgaacccgggaggcggagcttgcagtgagccgagattgcgccactgcattccagcctgggcgacagagcgagactgtgtctcaaagaaaaaaaaaaaaatcccaccctttttgccttgctttgct

SEQ ID NO: 121657 - DNA, 1573 bp, Homo sapiens
ataaaagagttgagtataaaaacttatatttgattttgggatgtgtatcacttacattgaaatggatatagcttatacttctggatatttacttcctgcaaaatagagtctcattaagaaaaccaagctctgaaagcatcagtcagtctcaatcagtatagtctttttgtgtgaataactttttagcgaccttgtcagataaccattttgtgttctagttttcttaacttgattatgagggaattggacttttaaaaatcagcagttccaatttttcaaatgaaattgtgcttggaataccggtatatgaaacagataaaacaattgctactgtggattgggaagcctgacaccccatctctcatcattctccatcccttagcaagtcccctggagctacttttcagggactctgaggtttgcagaaccatttacaaccattgaattctgtaatgacttttctaagattttgttttagttatataattgagttatgcatacatttacttttttcttgagagtaaagtttggattttcatagggggctcattcttcttgtaaagagatagtactacaagaagcctgacttgtaagttgtagctttaagattttgtttttctttagcattgtagcacatctgtttgccctaaacaggtaatactggaaattgctacttcttaagaggagtgcctttgaaataatttctaatgcttcaggcttgcttaatatacttttctgaaagatatttctttaaaatcatcttgatttttcttatagtagctatctttttctgtggaagaataaacattgaaacatactaatgagagcttttattttaacagcattgtctcttgatatcttgatttaaggttttggttgttcaaatgctacttgctttatatttcaatgtgatttggttttgttttaggtgttttgctggagatcagtcaacagttctctgaagcagtgtcgatgggcctatccacgtcaggtcttcatttctgatattgctttaaatagaaatgaaattctatttgttacgcaagatggagaaggatttagagggagatggtttgaagagaaaagaaagagttctgaaaagaaaggtcagttcatatattgaacaatacgtaaaagtacctttcaattatcctttaatttgacaagtattaggttcaactgacaagtgttattaggttttacttttatgtatttatctttgtgattagttttttaatgcctgtttcctattagagtgtaaggttagtgatggcaagggccatgaatattcgtctatatccttagcctttggcatatttcctggcgcattgtagtcactcattaaatcacctgttgtatgaataactcagttattgtgtgccagaacaaaatcaagaatgtttataattactcagaaaattataaacgtattcttcaaaatcataaagccacagataaatgacttttgtaaaatttaatgatttacttgtatttcttttatttctttatagattattcaagtctgtaaacatttaatatatatttactatgtgccagatataggggaaagttt

SEQ ID NO: 121658 - DNA, 1060 bp, Homo sapiens
gcagtgaacaagacagaatcccttctttgtttaagtttttattctactagggggagatagaccaaaaccaaaaccaagcaattaaattaatgaacaatggccgggcatggtggctcacaactgtaattccagcactttgggaggccaaggcgggcagatcacctgaggtcaggagttcgaaaccagcctgggcaacatggcaaaacctcatctctactaaaaatacaaaaagtagctgggcgtggtggcacatgcctgtaatcccagctacgggggaggctgcggcaggagaatcgcttgaacccaggagatggaggttgcagtgagccgaggtcacgccattgcactccagcctgggtgacagagcaagactccgtctcaaaaaaaccaaaaaaaacaataacaacaaaaattaatgaacaaataggaacatgcttgataaatattgatgtattagagttatttttgcctgcaactggaaccaactatggtaacataaacaaaatatattgaagggatatcagatacctcgcagaataaacaggtcatcaacaattaactgtcaaattataaataagaaaaaattcctcaaactaaaatagagtaagtataaactaaataaactgatttgaaattttatgtctctccttctccagataatttttttttgtttttttgagacggagtttcactcttgttgcccaggctggagtgcagtggcgcgatctcggttcactgcaacctctgtgtcccgggttcaagtgattcttctgcctcagcctcccaggtagctgggattataggcatgcaccaccacacctgactaatttttgtatttttactacagatggggtttcagcatgttggccaggctgacgttgaactcctgacctcaggcgattcatccacccacctcccaaagtgctgggattatagtcatgagccactgcgcccggcagagtgtggctcctcaaatgcaagaagagttaaatgtttatgttcagatgcactcccacacagacacaaacccagagctagggacttgtagggacagtgtatt

SEQ ID NO: 121659 - DNA, 1002 bp, Homo sapiens
taagtttgttaatggtagagaagattcctcttatatctgaaaccttggggtatctgtttaattcccttattgtcattatagggaaagctaggttagtaagagttaaagcatctctcagctccattcttacccttttccatctgtaaaaccttggctttttttttttcagtttctgctggaaagttggatgactgccaaccctgctgagtttgagaaggtccctgggtttgggtttcctgccatcctaggggttgccatttaggtgttagcatttagggctacagtttgaaatagttatggtctggactgaattttggtcctttccttcctgtgagattttattgccccatcgaaatcctcagtcactctagccaccttggctaatagaagccaggaaattgtgccgttgtcaccttgcccttagcttgactgtcttattggcatcagagccctgctgatcagtgatagatacataacagtggatgtattccactgacggttttcccctaaatcctgtattaaccattcagcattctcatgttggtaggctgtctgcttttgttcagcatatttttttactttgaccttccaacacttctttaattggaaggggtgcagtgataggtgtcttcatgtcagttccgtctctgatgtcagctgtagcacttcaggtattatggattatcaggaagaaaccacacacattttaatgaatttaaatttgataaaacttcatagctataacatttgtaaattgcacagtaaattgtcagtttcttaatgccaaagatataaaaccttagcagaaacttgttgcctacaaaaagctggaatagagacagattatcttatgtagctcttttggggcttcttgattccatgacaggatgcatggctggtaaagactgtttatgcttgtggagtcctgctgtatctgttgttgctaaaccattgctcttttatactggtggtttacttactattctggaagaacttgcttta

SEQ ID NO: 121660 - DNA, 1292 bp, Homo sapiens
aaaaatacagcatagaaggaatgaaggactggaaagaaagagaaactccagagtacaaccaatgtgggttaactttaaacatgagagtggaaaaatggagtaaggatgactgataaaaatataggtaccataaatatgaaaggtcgatagatttaagaaaaaaaaggaattaacccgtttatgccagaggttgcaaatgttttttgtgaaaaatcagatcttggcgatgaccttgagcattaggatataaataactcccgtaagcttagtgttccagtaatggaacactaagcataaatgggttaagggcatctaaatatggaggtagttgtgttctaaagtactcaaggagagcgagagacagattttgaatttttattttctcttctctttctcttataggtcacccttgcaattatggatatttaaaagggtcagacagtgtggagggggagttcccctcctcactcccccttggtgcttgactccaggaataatttataaactgtggaatttttttaaatgaagaacttgtatttgatatgaactttatagagctatttataatttttttgatttaagtgccaaaaaattgtataaagatatatagttttatactattgtcaggaggatttaaattatcctaaaaaggtaatttattctctgtaacttcctcaatagcacctttgtgtcctggctttttcattttttaaaattagttttcacgattctgaagtaagtggtataaaaacagttaggatgagttcacccatgcctgactgcacatcaaagtgtcgatccctgaagcatgctttggatgtcctttctgtggtaacaaaggggagcgaaaaccagattaaggcctttctctccagtcattgttacaatgctgcaactatcaaggatgtttttggcaggaatgccctccaccttgtttcctcctgtggaaagaaaggagtgttagattggcttattcagaaaggagtggatctgttggtgaaagacaaagagtctggatggacagcattgcacagaagcattttttatggacatattgattgtgtttggtctctattgaaggtaattgtcatttgtttattttaaacgtatttagtctggaatatgtttttcttaatcattttcatacatcctacatgctttttggaaaatatttgcattttttcttgcttgtttgctatctcttactactgtaactgatctttggaattaaaactccatatatccttttacttaacttttttgtgatgtaaaattttaaacatttatcatgc

SEQ ID NO: 121661 - DNA, 1049 bp, Homo sapiens
tggatttgaagccattcctgtgggcgctcatgttccttatccccttcctggagtcacaagtttgagtccaccctggggatactgactctggggaagcaggtcgtgaaatctgataagtggacattgattgctatgtaaaaaggaactgattctttttggagggtggagggttgagagagacagagaagacaggccctttgtttttgtaacaggcagagctgtctggctcaaagagttttagttcagctgcgaattaggtaacataggccgtccttgactcctgttttccaacgtagttcataaaacttgactgtgttagccagagattcatgtagcaccttttaacttatgcctcgaagtaggccatttgaaatttatcagaaatactgaaaggatatgacttttatgagtagtagtgtttcagtgcccataaagtggtgtaaattcacaggcttgccagccccctcttgatcatttctctttttgtattttgaattccttaacttttatttgttttagaaattgaggcaaggtagatgaggacaaaactggtttctaaaaataattacatttgcaaatatttgcagaagctttagtcaaaccagagtttacttcaagaaattttttaggccgggcgcggtggctcacgcctgtaatcccagctactggggaggctgagaattgcttgaacccgggaggtggaggttgcagtgagccgagatcgcgccgctgcactccatcctgggcgactgagtgtggcaccatctcaaaaaaaaaaaaaaaaaaaaagatgcctgtaatcccagcagtctgggaggccaaggtgggcggatcacttgaggtcaggagttcgaggccaacttggtgaaaccccgtctctaccaaaaatacaaaaaaatcagccaggcatggtgatgtgtgcctgtaatcccagctactcgggaggctgaggcagaatcgcttgagtctccagctgccctaccaaactgcttttgaattcaattattttgaattgaattccatggtacttttttctactacactatact

SEQ ID NO: 121662 - DNA, 1737 bp, Homo sapiens
acgtgtccttccgcaacctgacacatctagaaagcctccacctggaggacaatgccctcaaggtccttcacaatggcaccctggctgagttgcaaggtctaccccacattagggttttcctggacaacaatccctgggtctgcgactgccacatggcagacatggtgacctggctcaaggaaacagaggtagtgcagggcaaagaccggctcacctgtgcatatccggaaaaaatgaggaatcgggtcctcttggaactcaacagtgctgacctggactgtgacccgattcttcccccatccctgcaaacctcttatgtcttcctgggtattgttttagccctgataggcgctattttcctcctggttttgtatttgaaccgcaaggggataaaaaagtggatgcataacatcagagatgcctgcagggatcacatggaagggtatcattacagatatgaaatcaatgcggaccccagattaacgaacctcagttctaactcggatgtctgagaaatattagaggacagaccaaggacaactctgcatgagatgtagacttaagctttatccctactaggcttgctccactttcatcctccactatagatacaacggactttgactaaaagcagtgaaggggatttgcttccttgttatgtaaagtttctcggtgtgttctgttaatgtaagacgatgaacagttgtgtatagtgttttaccctcttctttttcttggaactcctcaacacgtatggagggatttttcaggtttcagcatgaacatgggcttcttgctgtctgtctctctctcagtacagttcaaggtgtagcaagtgtacccacacagatagcattcaacaaaagctgcctcaactttttcgagaaaaatactttattcataaatatcagttttattctcatgtacctaagttgtggagaaaataattgcatcctataaactgcctgcagacgttagcaggctcttcaaaataactccatggtgcacaggagcacctgcatccaagagcatgcttacattttactgttctgcatattacaaaaaataacttgcaacttcataacttctttgacaaagtaaattacttttttgattgcagtttatatgaaaatgtactgatttttttttaataaactgcatcgagatccaaccgactgaattgttaaaaaaaaaaaaaataaagattcttaaaagaattacagtgtgtgcaagtttgctttgaaaaaaggatgaagggcaggagtattcaatggtcttggttccgatgataattattacttaacatagctgagaatcaaactgtagcaatgtctaatataaatagacttgggagatcgttttgaaatggtggatccttttagtatttaaatggagagtttgagtattcatgtgactgtatggtcccaaagttaatgctatttatgaaacagttttgtaagaacataatgaagttggtaaaagctaagcgttctgcacaataaacagttcccagtttggggctttttcaaggctaatgaagttattgttggtctagaaaaatagtatttacttaataaaactctgtttgaaattgttctgtggatttttagagcagaatttgaaacaaatgtaatgcaaataaatataaagataaagtgtcttaaagacaatattctgaaataaaagatataaaatataatttaaaaaatatttctcaatgtcttaatgtaaattgaa

SEQ ID NO: 121663 - DNA, 1035 bp, Homo sapiens
gctgccaagcccagctaatttgtatttagtagagacagggtttcaccatgttgaccaggctggtcttgaacccctgagctcaggcaatccaccctcctcggcctcccaaaatgctaggattacaggcgtgagccactgtgccaggccacaaattttatttttattaactataatttgctaacaggctcaaaagctgaagttttttttccttggtgggattaatagtttttcaaacctatggtgatattctctcccaatgaaccccttagagcactggaacatctgtgagccagaagtcctcctacaccctcactgagaattattgaaggcatttccctccactccttaccacatttctgaaatcttacttttcttatccatactttctttgttgtacagtattggaccaggatggaaagttaaaaatccaaattaatttttgaaggatgaaagggaaagagtaatattctaaggatgtgtataatttcgttttctccaagtatgtgattttgtatttgtgcaatggcttgatgttattttttaaaaagtggctgacattctgggcagaaattgcttctgcctagaatcaggtgttaagaaatcaattttctacattatgctggctaaatacatgaacacatagtggcacacacacaaacacatattcttcatatgaggatttagagggtagctagtggaatcttttcatttgggggctgccatcaatctttggaaacctgttgtaattgcctgtatggtatgtgtttgaagtgtagtgtttctggcaaatgtaagtcaccaggaaggccaagtgcagcaccctgtacataataggattatgcagaggcatgctcactctgtctgtgactgctagagcagggaaagcaggcatccccagcttaactaataaccttcattcacctactcaaaatgctttgtggcaggcttcctgtttttcttcaaaccactgctttttagacttttactttcctgattctttctaggaattgagtgatacaaaagattctttttaat

SEQ ID NO: 121664 - DNA, 1072 bp, Homo sapiens
tccatttttctttgtgggcacctttttctttatgcagccagttttacaagaagcaggtgaaattcttcagctgatatatgagcaagttatgtccattaaaattaatgagagctgactatgtgcactgagggaagaatatacttcaaaaagttaatttacacaatgtttcttgttacgttttcattgtaggatttctttttcaattatgcttaatgaattgtattgaatgccctgtctctaaggttagtgacattaaatatgcttctagttctgtttcatgtcttaggctgtccaaagcaatcttttagaagtggaattaatcttatcacctatgatgtttagacaaatgtaatggttttcaatatagttcaataccaaagtctccacagaaagagaattcgattaagagactagtaaaggagacagaacagattgcttgtaaaacatgtgacttttggagataataagtgacactttatttattaaaagagcatttctggttagaaaaataaacaaaaccatcacataactgtggggatcttcaggggaggaaatgggccttttctcccagggatgctttcacgggttgtgcacagtttgtcaataaaccttggtttcattaaagagtgttcatcctcatactaatgaaccaaatttgccgagaaaccccagaacagcaaaatggcaaacctaacccacacatttatgttattgtctacttattggcttctggatacaaattgatcctctgttggcctgtctgtctcagaccttctaataggctcaggaactgcctggggctttcacttacaaggagccaatgaatctggtcatccttggtggttgttattcttaataatcttttcccccgttcttccaaagggacacctaataagtgccttaacgctctatcaacatcactgacattattattgcagaaactttttactgtttcctgcttctggtagctttaataggatcttggagagcacaaaggtaatatttctgcttgtcagaaggattccttggattgagcttctgtaatttgagcatttgcttttgaggcagcaga

SEQ ID NO: 121665 - DNA, 1080 bp, Homo sapiens
gcacaaagggaaagaaagcagatgtgaatgcttatgttaaaagtcagctaatttaaacctaaggaaaaaaattcttagctgtggagagggccagaatattgaaggagctctgcagcatctcctctggaggcatttctgaataatatctcttgaatggcttagctgtacagggctgcctccaggcttagcagagaatatattctgggtaccattgtaagtgttagggaaggcctgaaaatcactggcagaaaggctaatgttatacagttcagattcccccaaggaagaaaatgtttatgcaattcaactttggtaacctgagttgtaagctacttgttttctgcaaacatcagagttaatagtaccggtaccctaaactactagttcacagcatatttttggatccatttttctttccactgaagaacaacttttaacttgttatcaggaatgttctcttagattcagagagaaccacagaagtccgttgccagtttgttactgtgacctgtgggacaggggtaaccccttcagaagtcctcacccacctgcacacttgccacactccctgtgactacttcagactgcattaattgagcacagagccatggggccaggaaaagtgtggcactacagagaggggcaagtgaaatgctgaggcttcctgggaaacctggactgactcacctgcagcctgagccaggccctgctccagtcccacactgctttatgaccccaggactgtctctgtgccctggctgtataaatatctccctgaggccttcaggaagtttcgagtagcatagtacgtgagtaagttatgcagtggaggaagggaagaaaggaagagtgtatttgaaaggagagctgttgacaagaagtcctataccccatccatctttctcctaatatttttaataaacatgtattaagcacagtttgtatatgtaatgcatttattgaacagtggaactcataggattgaaatatgaaattttttcccccaatcttcaaccacattttggagttaggaaaggtgttgctgagtttctttttgttttatttcttattttcgtattt

SEQ ID NO: 121666 - DNA, 1044 bp, Homo sapiens
atgggaaaaggcatattctttattgattaggcaaatgctagctattttaatctgtatctcaaatagcgaatttggatttttgaagcttaggtttgtttcaggaattgtcccagagcactgcctgtctttccagttacagtgccgatcctaagtggaaaaaatggaagtatatgaacagactagatatttttaacttttcatttattgtagttaagggttatgggttacttttacataaattacactggactaggagtcaaaatagtgtgagttcaagttctgattcttctgtgttctatacacatgagttggggcaagtcatcaaccctgtctttgttgcccaccatctgcctgttttaagttataaggctatttggaagtgctttttagaaatataaggtactacttattcaaattatttggcaacttttggactatcaagaagtggctggttttggaaaagtgaatctgtgtgttactgtttcttaagacttgaaaaattttctctgtgcatgtgaattatgcatacaagctaaatgtattcccagtatttagtagagggcagaataaaatgtaaagttcaatgtatactctggggactatgttaaaattatatattccttttaagaaaagctgaatgacatttaaatgacatttttctgttctacaggaaccaaaggcaaataccaaagtaatttgtaagcgttgcaaggtaatgttgggagagaccgtgtcatcaggtaagaatttcataacaagaagccaaaatgattggcttcttgcttaaaagccagaatgatattttatagtaaatatataggaaagatagatgattaatatatgttgtggaattggtgcttttcaaaatagaccccaagtaacataccatccaatataccaagaagtttgtatattttgaccttcataaatacagagtattgaattttaagtattaagaagttgagtcattttcagagtttcatagcctctttgtagatataaagcaatagtataaagtttgttcttgggcctatttcaagaaaa

SEQ ID NO: 121667 - DNA, 1014 bp, Homo sapiens
atcctcagagtgactgtcttgagtaagaaatgaggtgactttaaatttgcagaggagggaacctcatctttgcttgaattacctaagggttgaagttattgcatgtactcggtgacaggcccactttatcctgaaaggttcaggggatctcagtttacattgtagttgaaccaagagtgttttccttctctcaatctattttaggcgttggttgaattctcagaagaagtttctgaaacatgcattcctagacaacaatagggattcctagaagttacagttggaacatgttaaatcagtgtaacagtatttccgggttctgcttacagtaaaggatatgctggttcattattggctgttatttgtgtttcattggaacaggatgataatatgaaaaatcttttatctgttgcccccattttttctgttcaggaactgtatcttctgtgtcagtcccttttacagtcatggaactgagaactaaaagggcagcactcactctccctaaccctgaccatcggcaggccctggaggcaggagcaggagaatggggacctgggtttgaaatccagcttcttgacttagtagctgggaagttgtgtttgtactacctcaggttcttctaatacagccttctaataaggcctattttccaaacttgtcaagagagttaaaggatgtaacatatgtaatagttaatgctcgacaaggtcttttaaattggttttatagactttctacccccttttccagattgctcttattagcaaactagcaaattatctagtttagtgtttcaaacctttttgtttcaagactgtgattcacatactctgcaggtgccgaggaaatgaattccctttctctttttctctctgagaaacagtggacttgacttagcctttgcctcatttaagcaaggcttacccaaaaaccttttcatgtcacacctgtgtgcctggcatatgcatgcctcttcagtaatgcagagaaatccttagtaaatgactcaag

SEQ ID NO: 121668 - DNA, 1055 bp, Homo sapiens
aggaagtgacttgaaagttttagccttcagtttgtgtttcagggttttttaaaaagatgacttttcaatgctaagaacacccttttaaggacaactatagtaaacatcatactggtatactgctattttgagtgtcaaactgtgaccctcggtgtggaactagctacagtaggatctattagagcacacgcattagattgatcccccgcagcaacgctctcccaggattcctctatatcagaaactgaattttaaacccgacccagtgcatcatgctgggtggccagcagagggtagtgtttcactgaaaatttgtttgtgggtctggaaaaaatattttggattcctaggtctccttttaatctgctcaaagttaaagaataatactgtttattgcaccttagtgctatagggatttctggccaccccttaaaaactgttaagatttttaattgccaaggcgtaaaccttctagcatcagttttttaaaatcttaaaatacatacagaaaaacacaaaccaaatccacattgcttgattctgatggatatgacctcatttctttaattagatttttatagacatattttagttcattcttttaaatgaaagtttccttatttcataaaagaaataatagaaactaagggaacatgcggccttatgctgctctttcccatagtgtgagaaatatacatttttccccacagctttcaacgttttaccatagctttcattagaaattgatttttgatctgggaaaactggactctttttggagccatttcattcccagggaggtgtccaataaacattagtttgagatctttgtttgttcatatggttatatgctagactggacataaaccttatttaaataaaattaaactcaaagttggctgggcacggtggctcacgcctgtaatcccagcactttgggaggccgaggcaaggggattacgaggtcaggaatgcaagaccagactggccaagatggtgaaaccccgtctctactaaaaatacaaaaattagccaggcatggtgatgggcgcctg

SEQ ID NO: 121669 - DNA, 1045 bp, Homo sapiens
aatctaaccagacttaatgtattttaggatcaaaacaaagtagaggagcatatatatatcagaaatgttacataaacaaatatgacagagaaataacatgattctaaattgaaataagtataagaaaattttctatgcttttacttactaaattttcacagtcatttttccaattcctaggaaggaacacacaagtagttatctttcaggctgtctttgaatacttccatgaccctgaacactagctgaggagagtttcaaccactgctaacagtaaggaacattttcaagttagtcattacctttgtagtaagatcatatgaacccgttttaatactttgtaaccttggttcctcctgcaaactcttttgtaggtaatgactttacatgagtttggaactggtctctagtgggaagttgtgggaggatgaacacagaagagctggagttattgagtgactccaaatacagaaactatgtagcagcaattgacaaagcactaaagaattttgaatactccagtgaatgggcagatttgatatcagcacttggaaaacttaataaggtatgtctgtattatccatttcataaaaggagtaaaaattagaaatctgtgtttgtacttgttagatttctcgaaatcttgaagtaagaatgcaaaaacataaatgaaccttagattactcttggtagtgctatttttcttcatgagttgcatgcctgtgtagtcaagcatattaaggctttggaagttttaattcaaagaaataacaatgcttgaaaaatatagttatcgccatgattatcagctataaaaacagaagagaaggaagcaaatatgctaactatgagggctagtaaatttctgtaatggagcatcagatatggtgctggaattcctggcagcaaaatgaaaacctacaaatggaaagcagtaattcctgtgttctttccaaatgatatatagcaacaaggaaacattttctatcctggcaagctatagttataatttggtactttttacaaaggcgagtatatacaagca

SEQ ID NO: 121670 - DNA, 1059 bp, Homo sapiens
tcacccaggctggagtgcagtggcccaatcttggctcactgcaagctctgcctcccgggttcacgccattctcctgcctcagcctccccagcagctgggactacaggcgcccgccaccacgcccgactaatttttttgtatttttagtagagacggggtttcaccgtgttagccaggatggtctcgatctcctgacctcatgatccgcctgcctctgcctcccaaagtgctgggattacaggcataagccaccgcgcctggcctcagatatcaatcttaaatatttgagttaagtgattcagaaaaatgtagaacagtctttaatgtctttttgttttttattcttagatatcatttattaaaagttttcattcaaagttgttgagactatagtacattctacctttttaagcttgaaaactggcctgagaaaaaaataggataccttgatctctcagcaactttcaacatggttgactcttctccacttaaaacagtcttttcctttggctttcattgtaccacattttcctgttcagttactctttctcagtctcctttacaagtctttcctcctctacccaaactccacacagagtttcttagggctcatttagtgcagcaccttcttatattttcactttgtaatctctccttagacaaacttagccatacccatgatttattttttattttaaattttattgtgtacatttaagatacacaacatgatgtgagataccaacagataataaaacaattactgtagataaacaaattaacatagccatcatcttacatagttacctattttttgtgtatgtggcaggagcagttaaaatctatttagtaaaaatcccaaataaaatattattaattatagtcttcatgttgtacattagatctctagatttgttcatctgacatttcccattttctcctgcccttggtaacaactgttttatcttctatatgctgactcccagctggacatttccagtgctggcagcagctttaaactcctgcttgcttgacatcgccatatagatctttaaaggc

SEQ ID NO: 121671 - DNA, 1044 bp, Homo sapiens
tggtactcttgatatctaactattcaaacaaagttatttgatctgtttggaccctattattattttcggggagttaatatttgtaggcaatgcatgatggcattaagtatctctaatatctcattactaatattcttattaaaaaactaaaatgtatatggtattttattacttagcgtactttaacaacctagtgaggtagataggtcttgtggtggagtgttttgttgttgttgttctcttcattttacagatgaggagactgaacttaacaatgaagtgacttcctcaacatatacagctagtaaatggtggagccaggacttaaattcagtcctctgactctaaagtatattcttctttcagtctatcacacttgtttccagggtggaacatatgactgtagcatgggtgtttgcatacatttttggaaaagaatgatttattttttaaaatatgaaactaaatgtttcccttcttaaaccactttatttatacctcagaacaaatatgttgttggaaaaggttgctgctgctgtggaccagtcagcattctacagtgccctgtggggtagtcttctcaccagtcctgctgtgcgtttacctggaatcacgtatgttcttgcccatttaaacaggaagctttctatggaagatcaactttatataattggcagtgatattgagctaatggtaggtctaaaaatatggttgctcatttcacaaatatttctttagagtcaggcactattccagacatatattgaggattgtataatgaacaaagttcctattttcatcgagcttacatttatcaaggaaaattaaaggccaaaataataattattatttttaaaagcttaactcctggactcaagtgatcctctcaccttggcctcatagccttctttataagaagtgaattttagataaagtaatatagccagattccgtatggaatttatgtgagaagatgtactaaaacagatagtgaaagataataggaagaaaaatcacatttattgcttacttatacaatatttt

SEQ ID NO: 121672 - DNA, 1242 bp, Homo sapiens
tggttgtatataagttagtaggcaaagaaggatgagctaataatcaaaatactgtccaaaactttgaattcatcaaaggaatcaggactagtaccattgtcttacacatcatacagtgtcccactcaggcagtaatacatatgtacactttggtcgtccatgctttttgtgtgttttgtctgtcttcacaactctttactgcctagagtgaggggacataatataacttattgtggatgttctgagtattcagttatttcactgttagtaaaattggccaaaaaataaaaaggataattctggaagaatactatgatacttatgtattgaattggtttccctttattaaactatctaaaatgatctctcttgctgacattgaatgggctactaattggtaagtgtttagtgctgttctgagattttgctgttttggtatttagtgaacaacagttttgagaattccattttaagtaattttgtgatttgtttccatggaggttttgataacaacggtgctatcataggacccagaagcacaagacacagtaatcctgaagaacatgccacttactatttcactaccttttcaaaagaattattagtccaggtaatgaatacttttattattctttggttacttactgaccactagaggtagtgaaaaagtgtaagacgaggtcttgccttaattgaattcacagttgaaggggtggagacaagacttacaaacttcccaagaatttttataacaagaaaattcctgtaaaatgataatcatatgttagactaccatgtaagacaaaagactttttttctcttactttgttgttttcattactttattaaaacatagttgtagcttctcacctgtctgctcaatggaagttggagcttttccaaaaatgagtcaggacctgtgctatttcctgtgaagctctggagaagtttatttcatattatttttaattcaattatatttatttaagatatttgaaatagaagaaaatacatggtatctgaagcatttttaaatgagtgaggttataagaatatagttgttaagtcactaacgggaaaataattgcctaatagcagacactgccatgataatgtggcatagttctgagaagaatgatcttaaatagaaattcatctgtagggaaaacactcagctcatgaatatatttttctaaattttctttgatattccactatgtctaaagaaaatttagacacttt

SEQ ID NO: 121673 - DNA, 1038 bp, Homo sapiens
taattacaagtagcttttgttgaatacttattatattctagaaactatgctacccatcttacaaatattttttctaacccttaacagtcctgtaaattttggtattatcctcattctggatgaggaaactaaagctcaaagaagttaaataacttgtctaatgtaacagaactattaactggcaaaaccaatttctctgattctgtaatttctattgtgtcaacctgcactttaaatatttgttcagttatgtaatatcttatattaccttctcaaagaagtgtgaatttagcttagcttctgaagaaatactattttaaaaatacttgtttttaaaacattgtttcattgggccaattttcagataagcatgatttgctcatgctgattaattactgtctttaatttgaatattaattttaggacctgtaattctagaagatgtcctgattgaagtgtttagaacattatattctcaatgcaaagcagagttggatcttcaaactgaaccacccttcagcaaggatcatgctcagttaagcaggtggattatcaaaaaattaaatgtgacatgaagacataatatgtattcacttaatataaacttgaagtgtaataacttgggatcctactctatgaagtttgtgttctaataagtaaagctgatttaatactagtaaagctgatttaatactgacatactagttgtattgacagtgcctcactatataaagacaattgttttaattgttacaaaagacaggaggaggaaataggtaataggctaaagggttgccacttgaaataacaaagttctttttccctgatgcaatttcagtaatagtggctattaacagcactagttggttttgttgttgttgtttttcaaactaagaataataatttgattgaaactggtcaaggtaaacctttcttaagaaaatcctgaatagcacagggaagcagacaaaattcttcacaatcaaggctgtgaaaatcaaatcactactcagtttgtatgtgccaagggaaataaaa

SEQ ID NO: 121674 - DNA, 1050 bp, Homo sapiens
aattagtactatacacatttcaataaaaatttcacattcatgtggccctgaacagatgacctattagattttatttgtagttattaaaatgtcattttttaaccttacatatctcattcttggcattgtttagacattaggaaagtgatttcatgaagtagatgaaatagtcatttgaaaacaaggatatagatcctagagacttgtatatatgtatttttgtcctcaagaatctaaccttatgtatgctgtgtgtgtagtgcatagtaaatacttggtgaatgaataaatcagtgtggggctgctttaagagtcaacagaatgggcagattaagttgtgaatagtctaaaacatctcaaaagtggtcatttctaattcctaatatgtacactttgctactcagccttttgttttcttaaaaatctctaacaggtatcatcagtttctcatgaaaatcctactgaagtgtttgaagatggagaaaatccaccaagtagtcgatcatcagagagtggattcactgagtttatacaatatcaagcagaccgaactgatgatattgacagagaactgagtgagggccagggggcagctgccatcccaattggtagcacatcctctgagacagaaacagcatccactgtgggatctgaagaaaccatcatccagaccccttccgtagtcactcaggggacagcaacccgaagtaggaagacagcccaaaagactgcaatgcagtgctgcttggagtatgtccaacagtttcttaccagacttatcaacctctacatcattcagaataactctttttctcagtctttggctacagaacatcaaggggatcttggtcgagaacaaggagagacttcaaaatgggacagaaattcacaaggagatgtaaaagagaaaaacataagtaaacaaaaaacttctaaagaatacctgtctgccttccttgctgcctgtcagctcttcctagagtgctcaagtttcccagtttacattgctgaggggaaccatacatcagagttacgttctgaaaaattgga

SEQ ID NO: 121675 - DNA, 1937 bp, Homo sapiens
cctctgagatcagtgccagacctcatcaatggtatcatgattctttccctaaatttgctagcatttggtatgtactactttgtatgtcactaagccttccaccttttctaaaagaagaccgtcattattgtatgccccctaaaaaatacagaaatgaattatgtatttgtggtttgctgctaattttaaagtctttagagagcttagaaacagcataactaaagtgaggtattaaggaggaaaaaacaaaactttcacctgcaataaaataaaatgtaattttaggaaaatataagtagatgatgacactaatgattaaaaattttgatcagtctacatttctacatttcaattattttaatgcattttgtatttttcttcttttactgtttttctcatatatcagtgagccaagtacaactcatcacatcaaaaggaaatggtgaaaagccacttaccatggatgaaatagagaactttagtctcactgtgaatccattaagtgacagactttccctcctaagtaccagcagtgagacaattccaatggttgtgtctgattttgatcttccagaccaacagatagaaatacttcagagttctgactcgggatgttcacagtcctctgctggggacaacttgagttacgaagttgatcctgaaaccgtgaatgcccaagaggattctcaaatgcccaaggaaagctccccagatgatgatgttcaacaggtagtatttgacctgatatgtaaagttgtaagtggcctcgaagtggaatctgcatcagttacatctcaattagaaattgaagctatgcccccaaagtgcagtgatatagatccagatgaagagacgattaaaattgaagatgactccattcaacagagtcagaatgctttgctgagtaatgaaagttctcagtttctgtctgtgtctgcagagggaggccatgagtgtgtggcaaatggaatctccaggaatagctcctcaccttgtatttcaggaaccacacacactcttcatgactcttctgttgcttccatagaaaccaaatctagacaaaggagtcacagtagtattcaattcagcttcaaagaaaaattatcagaaaaagtttcggagaaggaaacaatagttaaggagtcaggtaaacaaccaggagcaaaacctaaagtaaaacttgccagaaaaaaggatgatgacaagaaaaaatcttcaaatgaaaaactcaaacaaaccagtgtattcttcagtgatggtctggatttagagaactggtatagctgtggagagggagacatttctgaaattgagagtgacatgggttctccaggatctcgaaaatctcccaatttcaacattcatcctctctatcaacatgtgctcctgtatctccagttgtatgattcatccaggactttgtatgctttctctgccatcaaagccatcttgaaaactaaccctatagcttttgtaaatgccatttcaactactagtgtaaataatgcatatactcctcagttgtctctccttcagaatctattggccagacaccggatttctgttatgggcaaagatttttatagtcacattccagtggactcaaatcataacttccggagttctatgtacatagaaattcttatttctctctgcttatattacatgcgtagccattacccaactcatgtcaaggttactgcacaagatttaataggcaatcgaaacatgcaaatgatgagcatagaaattctgacactactcttcactgagctggcaaaagtaatagaaagctcagcgaagggtttccctagttttatttctgatatgttatctaagtgcaaagttcagaaagtgattcttcattgtttgctgtcatctatctttagtgctcagaaatggcatagtgaaaaaatggcaggtaagaacctggttgc

SEQ ID NO: 121676 - DNA, 1052 bp, Homo sapiens
atgcaatgtctcaacaacaacaacaacaaggaaaattgccatgagttcactttttcttggctactggaagatgtaactccaccggaggaggaataaaccaagaatgaagaagacaggggatccaagaaatgggctgcaacacaaaagagaaagcaaggggaatctctgggataatggtaacaggagagatatcaagatgacactgtgtagcaaacctagagagtatcaacccagggtagaataaaaagacatctaacagaaatgtctcaaggaaaaaagagaagagagggaggaaaagatacaaattaattacctgaagtatttgaatatgtaattagagatttacagttgaagtatgtagggatgaatttttaataggtacagagaaaatgaagcaaacaaagcagtttattagctctaggaaaaacaaaaagttgtaccataaaacaaatgcaatgctagtacaatgcacattgcaaccaaaaataatcatgtgaacattggatatggatttaaataaaaatatgatataacaatgttgagaggataggtagaaaagtataagagagctacatctttgtcttccaaaataagtaatgaatagataatgtctaaaattgaaaataaaatcaggaaataggaaaaatagtagtatatgttatttagacgtaatggaaaagaacataaagagttgagcatggttgctttggggcatgggaagggatataggacaatactattttttcttataaagcttattgttctgttttattttttgaggtgatgtacctttattgatgaaaaataaataaattttgagcctgggcaacatagggagactctgtctccacaaaaaaattaaaaaattatctgggcatagtggcatgcctgtggtctcagctactcaggaggctgaagcaagaggatcgcttaaacctatgaggttgaggctgcagtaaactgtaattgagccactgcactccagccttggagacagagcaagaccccatctcaaaaaatatatacatatattgtatatatatatatatatg

SEQ ID NO: 121677 - DNA, 1042 bp, Homo sapiens
gcttttattagtggaattggttcgttcaatcagtgtcatgagagcagaaactgttatccagactgtaaaagaagttttaaagcagccaccagccatagccaaggacaaggtaagaaaaaactcttcttcacatgtgtttacaattctgtttcagaaattatgctggtaagatttttttttgtacaataatgtcctttcaatatagtacagattgcagagatgactgcatgtggccctcacactgcttcaatcaaaacaattatcaatatttgtagtgacttgctattctgattattcggtagccagtgaagagcagttaactgctcatatcttcatatgtacctcaaaggtagtcagggaccatgtgactaaattctcaggagagatttttctggtcatttaaagaacataagccagagctcaagatttgcttctctcagttgttgccatttttcatagcttctttattgctttcttttctgaatgaatctcttaattctgtgaactccccaaattttgctataaccttagttctagtcaatgtcatttcttgaccatgtataatactgtgctatgcaagtgctacactatgaatgacatagtctctgcacacacattgctgtgtttctaggcaaaaataaaagtctacaaattaggaatattacggacttttctactttttctgctctttgttcaagcaataccaagaggtcatattttcccagaaagtatttaccaactacaaacattagactttgagccaagccaaaatagacctaatcacatcctttaaagaattatgatatatatctgaaaatgttgaatgatgttttccttttatcttgtgtttccaaagggagtaagatgtgtgtgaatagtcagtgtccttattaagtttttaataaaaactggggcatttgtcataggatttttagtttgtattttgagtacctatttgtgccagacattgagcaacacatgagggatatgaaaacaaattagagccaatccactgtcctgccccaccaacctgtgtcccctt

SEQ ID NO: 121678 - DNA, 1021 bp, Homo sapiens
ctgggcaacatgatgaaaccctgtctctacaaaaaatacacacagacaaaaaaaaaaaacactagccaggcatggtggcacacacctgtggtctcagctgctcaggaggctgaggtgggggaatcacccgagcctgggaggtcgaggctgcaatgagccaggatcacaccactgcattccagcctgggtgaaaagatgagaccctgtctaaaaaaaagtagtacataacttatattatgttcaagaaatataaaaataaaaactgtaaaagcgagaaacttttttactcagtttctgcaaggatgagaaaattctctataataataaagttattagtacaggagatcctttttataaatctactactgaagaagaaaatatattcaagaaacttggtcttaaaggaacttttcaatttataaatttgtgtaagtaaaaaattgtatttagtcatacattaataaactgcctctattaaaaagaataaaagtatattaaattgggaccatctggaagatctgcatatacgaatagcctggttccaggttacctaccataacagggttggctatatgttgcaatgtttcagagaccagatgtgacttaccaaaaccagcctagctcatgtagctgaaacaatactgtactgctttaaattaaatttgtgtctaggggcccagggcaatgaatgctgatggcttaatccaatctaaagggcttaaggaataagtaaaactacattatatccaaacgtaatcaattagataataataaataagtattcagaaaaagactatattctcctagatgctgagtaatattctgaataatttcagggtattaaaaaatggacaacaatatatttaaattacatattaccgtgaaatatcttcatcagcagtgagttcctgctccatcagtaaaaatacttgtacctgaaaatggtgaaatgttaaatgtttatttaaactggatatttaatcctttcaagttatctttaagttgtattttcattaacgca

SEQ ID NO: 121679 - DNA, 1039 bp, Homo sapiens
aaggttttcattagaatttgttagtgaaacaaaatcaagaatcacccctctcttccccagagttccaagtaacatggtcttgcccatgttagacacatgctatgtctttctcatctaatctcttttaatgtaatttgcaggaaagtgcagatcaccttgcacatgaagtgagcttggcagtatttcagctggctggaggaattggagaaaggccccaaccaggtttctgaagataattttcatattcctgagaaactggactttttacaagtctttacaaaactgtcaataataatggcagtactaagagatttataatcataatgtttacaatgcagcctactggattgtctctagatctgtttttcttaaacactaacagaataattctttataaataggtaagccttacacttgttaaagaaatttacctctaatttcagtctcactaatgtaaaatactgggacttaagtatacaattcagtcactaactgtacagttttatgtggggaacaattcatgcaggctactggaaaattaaatcttattaccaactccttgtgatatctttgccatcaccatcacatgagcaagatgatgttttgcagcattccccattgctgatacaaatggagagggcagagaagactttatacaaccagtttttccattgcagagtcttaagaaagattattagatgacttacctatatgactaatgccatcaggaactcagaggtatgaatagggggttgtccatccctcttccatactgaggtggagatgctcatgcaatacttttaaggatgcatggtccagccttcagttattcttcactgctcttggtgaaggtatgtgggagaaaaactaattataatacgtttcccagcctctgatggagaaggaacaccattctgataccagaacatggttaataaggaaaagagaaaaatccccaaccaatcttaattgaaccaagtctgaaaccaatggaaaaaaaaaatgggtagtgtatattttgcaggtttaagacaactca

SEQ ID NO: 121680 - DNA, 1037 bp, Homo sapiens
gttttaatgtaattttatatttagtctggcacttttcgtagaatgtatgtttaacaggttaagcttctgaaaggaagtgtaatagagtaacaaatatgaaatgcttgcacttaggttgcagacaggagagttattagcactaccgatgctgaaagacaagcagttacacccccaggattacaggaggcaatcaatgacctggtgaagaagtacaagctttctcgagcttttgtccggccctctggtacagaagatgtcgtccgagtatatgcagaagcagactcacaagtaagctgggatagttctattgaaaaagagcctaatattaggtgatgggcaggcaaactattttaatggtttttagaatctcactatgatgattaaggctttattttgttgagccttttaggttcacattaagactacaaaattattttcaccagcagtaattatacaatttaacaaaattagacccacttagtttatttccccaaatatttttgacttattctagacttcctgaaagtgtcatatttttaaccatggcaggaataactaataaatacttagtttatgcactataaggtagatgatccttttctcttcttttaaaaatatactcttgtgacatgaaaacaaccagctttgtagttcatttctaagtcaactgatagcattctggactcttgatttgtttttcaaaatatttcctttaaatgacagccttactctgtgcctgtttccctgacaggggtcaagacttgtggtctggatttttattatttggcctcttcacatactccttaaagtgtgtgcaaagccagggcaaagtacagtgagtgcgctgaatagggaatcaggaggagacatttggcagctttcctgcagaagcttaagccatctcagagtctaatgaatatccatgatggatgaggagatggcaacagaggcattagtacttacttactgttaggccaattgtggattaaagttttattgaattttttcagttgtggaatgatagctatttttataat

SEQ ID NO: 121681 - DNA, 1492 bp, Homo sapiens
tttcaggccataaggtctcttacagttgtttaactctgctgatctagcttaaatgaatctgtgtggttgtgttccagtaaaactttacaaaaacaggtgactagcctgtgccttattttatcaagaaaaatgtatttcatcaagtagttgagcatagtatgctaatcttgctcagtattaggcctctagaaggcagtaaaaaagatgagtatttccaaatgagataagactcttgaggagcatgatgaattatatattgtaatgactatccatgacattatttgccatattttgatgaatactatgaactcttaattttgcctagctcatccccttaagttttagaataaaactatactagctgcaatgaattatatccttcaaagtaaaaaggatacagacaggctctaagtaacctggttgcacagaaatgatttagctggttaaagggaaaacatgaacttactgtgtgtgcttgcctcttgtcaaggtggtgttttctttgtaatcagatgtttaaatttttataaccagttatataatccgcaaataaaatttttcccctagtactatcctctgggttttaatgtgatcttacattaatttcatacattttaaggctgccactatttttcccctcagtttctccagattgactaggagggaaaagtgggttagctagaataatagtacttatgactaggttttggatagtgttttgagactgattttatattcttttgctgcaggcactgtttagtacagctgttgaaatgaagataaaacaatcagcagaacaactggaagataagaaaagaaaagctgctaagatgcttgaaaacattattgacttgtttaaccaggtcagaactgatggggcagtggactcttggttacctttacattattcagaagatggacagaacagagtgtgggtgcatacaaaattaaagtggagacgtcctggcctggtggcttccttctaatagtggtatattcagttgagatttataatgaaatggaatgacagaacattttttaatatgcttcccttcccctacctcttatgatggaaattttcaagtatattgggtagcttctacctaggatcacagattcagctactcagtgtatacatatatattattaatttttttttaaccaaacctcgatgaaattaagtaaaaataactggttgtcaggccaggcacggtggctcatgcctgtaatcccagccctttgggaggccaaggagggcggatcacgaggtcaggagatcgagaccctcctggctaacagggtgaaacctcgtctctactaaaaatacaaaaaattagccgggcatggtggcgggcacctgtagtcccagctactcgggaggctgaggcaggagcatggtgtgaacccgggaggcagagcttgcagtgagccaagatcacgccactgcactccagcctgggtgacagagcgagactctgtctcaaaaacaaac

SEQ ID NO: 121682 - DNA, 2132 bp, Homo sapiens
cctaaggacaaggcctagtcaggcccacctaaacctaactaaagtttggtcaaggagagaatttttgtcattagccatcttttatcttagcaaattgtattggaatgtgtccgcttggctatattaaagggtgagcgtttatctttgctatctcttagcaaattagcctgtgattgaacatcagtttggcttaatacttattcagtaataaaactgtttcttacccttcttttttttttggagaggttttctggggtggtgggagattctgtttctaattatttccccggtgtccaccaggtgaccacccttggcaccacactacttgctcggagagttaccagggttcatggacaaaactggaagtctgtttgcctatactttctcattatcgagaagttttccaacttttttgtacctcattttgtacctcgttctggcatttatactagttttagttacctttccattctctagaaagcaggaattacaaagtcagattcctgcaggatttggacaggtaaagtgaatgagggcagcagggggctaaaaacaggtcagtatgtgccagctgatgtcaactgtagtcacactcttcaagagaagcaggaaatctgaattttcatgtgatgttcctatttgtttaaaaagaaacagtggctgggcaaaacgaaatatatcttgaggctgctagtttatgacctgattttaatatatggttataataagctcattcaagggattccatctggggcccatttgcctgcctttcacagggattgggttatttcacagtacttgggttattgttttaggattttcattttctgtcttaaaaatttattacagataaaataacctagtttaagaaactgttacttctcaactcactgtcttccagatgaaatatttttagcccttgccattcctgaggtctcctacatccaatctaatgctgatctttcttttgcagtttttctactatcaatctttccttaaccattcttaaagctctctcagatccatccatccatgactttccctattcactattgctgatccagccactatttcttactgggattagtcctagaagcctcctcattccatttcttaaccttctaattgaacttgctgctatttgcaaacaaagttttattggaatagagctatgttgatttgtttatgtatggtctgtggctgcttttgcactgtaatggcagagtaattgtgacagagaccatatggcctgcaaagcctaaaatatttactgtctggcctgttacagaaaaagcttgcaattctgctctaagctattctccacactgtagctaaacagctttctaaaacagttaggtcatgtcacgcccccacttgtaatctttcgtgtcttataaggagaccctcatctctctcaccgtgctttacccttggctgcgtgcttccagagtgtgttcatgcttccattgtatacgtaccattttgtattttaatgcttaatcgtcttcctcactggactcggccccagtattttgttcccctttgtatctctgggatactaggtatgcaagaaacatttgacatctgagtaattgctgtatttctttaaatgcatgtgttataggtacctgtctattgcactaagactggtgtaaaacatttgcaccacaaggctcaagagtttgacattggagtttattttgaagcaaatgggcatggcactgtaagttctcttaattatagttggccttagctggcacttttctttatgatgagacttctatatctgggaggtaataataggtaatattgtactttgttgaaataattggatgtgacaaaaagatcctttggttatcttatatattgatgtattatgaaactgtgattctcttttacatggtaatgattcttctttgaatgtgaagagatatactaaggtgttttgaatagttttttaaaatttacagttcttaatttttttataagtatgttgtctatgcattttccggctggccataggagaggaaaagaaaaattcagtcgctatggtgaattgcaaagtgttggaaagttgataattaataagaaatgaaaatgaatttaaggtaactagtgataggcataaaatg

SEQ ID NO: 121683 - DNA, 1033 bp, Homo sapiens
ttccttagttgctgatgtcatttttctctctcactatatgatttataattgcattttcattttatatcttcattgcttatatgtgcttttattataatacacttaatgtttttgcaaacataggatacagtgtttttgaaatggataaaaacttccactcacatgggctcatgattacctctatttattaaaataattaatattcttttcttatatctagattgtgaaagatgcataccaagaaaagacagccacagtttatcctgaaccgcaaaacaaagaagcatttgtccgctcccagatgtatagtactgattatgaccagattctacctgattgttattcttggcctgaagaggtgcagaaaatacagaccaaagttgaccagtaggataatagcaaacatttctaactctattaatgaggtctttaaacctttcataatttttaaaggttggaatcttttataatgattcataagacacttagattaagattttactttaacagtctaaaaattgatagaagaatatcgatataaattgggataaacatcacatgagacaattttgcttcactttgccttctggttatttatggtttctgtctgaattattctgcctacgttctctttaaaagctgttgtacgtactacggagaaactcatcatttttatacaggacactaatgggaagaccaaaattactaataaattgacataaccaacattaaaactcataattattttgttgaccattttgttaaaatctacttttcaaaaaaaaaaagctagaaatgaatctaggcgtaggtgaacttttgctaagcagaaataacactactttgttgcctagagaaagataacttctcaagtatttttattccagtcctagatcatatatgttcttttgtgcaacggaattctaacagttctaagagaaagatcactgctgtttacagcgccttgtgcagccttagattttaatattcttttgtcattgttacatctcatagagtaaagctcttattacct

SEQ ID NO: 121684 - DNA, 1231 bp, Homo sapiens
ctgatttagatttgcccccatctagaaatttaatcaaagtcttagagctggagagaacatcagggttactgagtctccctctctgccttagggttcaatacaaaatttaacactgtttgatttggaactagggaatggtttggggacagtaaatgttgaggctaattaggtgatttagataatccagagtctgtgtaaaattaaaatcctatttgtagtgagactctgaactagctttctcagccttttgctctacctcctgcacaagaatatgactcagagctgggagtaatggcatgcttagccttggatagctgtcctcctctgctttcaggatccattttcattactctatcatcttcctctttctttcttttcttttcccttgttcccctaatgtatcaattggaaagtatctagcatttcatggtacaatagaaaaggaagtggactaaaaggaaacctagattctattcccatctttttcaccaattatgtgatctcaaccaccaccacaccactctgggcttatttctttgttgatagaagtggggatgaaattaggtaatcatattaatgtcactggtttttgtatagaccattatatgtaaccgttcacttagttattggcgtacccaccacattgtatcgtgtgaagtataaacactttttttctttctttttttcataaggttatagctcagcaagtgtcagataaacacttggaagagggtcggctttatcctcctttgaataccattagagatgtttctctgaaaattgcagaaaaggtaaaaccactcttgttcaagcttcattatttttccttccttttcttgctaaatatgcatttttaaatattaaaaatctgcttccttgaaatgtatatctgtatcaacttactatgtcagaagtcagagaaatgaggcacactgacactgtagagcttaggagctacatttgcttctcagagaagaatggaagtattgggccgaataattaatttccctctctatcgttctttttttctcctaaaatttaaataattcattagggcttcctgtcagccagatttctcccatttcacctttttaaagttgttcttttctatatcacattagtgataattaaccaaaatattacagatatgttagagtaacatttagaccttgaaccaccttccatatccatgtcactatgatgtgtggcatcataaatgacagatcacaac

SEQ ID NO: 121685 - DNA, 1669 bp, Homo sapiens
tatttaagctggtttatctgatactggcttttagtatactccagtgttacaaaaacaagtttttaaaatttgactcacaattcagtgtgtatgtatgtaactacatatgtgtttttaagaaaaaacattttgaattagggatttgtagtatattattactgttcacatgcaaaaatcccaaaatattttaaattgttggaaagagactgcagcaaaaccaaattatgctttgttattacttgcttaatttaataatctgaaagaagaaaactagactcctgtaataataattcatccccaaactagaaattaaaatgttagttgagtttgagtttcttatgggaaaactgccaaaatctctttagaattatagaatgtaagtaatagagaaatattttgtggctatatatatatatatatatatttttcaagaaactttaaattttcaaattgaatatgattatgaacacaacaatatgttacactggtagatcattgtttatgtcatattggttttcattttgcttgtttttagataaaacaaaatatgtgaagttagaattcaaatgccacgatacaaatatgtgaaagtattcagaatgtaaatcacaaattcactttcacattgaaataaaaatcaaggctaaatgacagctcattaacatttgagttctctattttgcggattattacatgctgtatttaactttagtaaacctctttgaattttcaaagggtttgatgaatggcacaggccagttcttgatactcaactaggcagaagaattcatggttggatgattcaaaactagcacttgtttgtccctggaaagatattggaaatttcacagataattataaaatttaccaaataccaaggaagttgattcctttaatcttgcaataaatttcacagcacttttggtatccaaattagaagagtaagtagatgcttggaaacacagatcttttatttttcatcagtttcattctgttgcctaattggtcaagttcccatccaaatgaccaagcttctttcttcaaattcaattagagtagcttgaacctaacaataaacaatacagttcaatgagcaaggttgaccagttcattattttgaattcagtattttttcttggagcaaatcttggttgtattaacaggattaaatacactgacaatcaaggatatcaccagtttatctgtggccaaatagcaagccacataatagtggctctgttgtagtaaaaagggtaaataattgttatttggcttaacctaaatgtgacaaaaatattttgttcccactaacaaagacaaaatggggtgaaatgtaacccttaataagatatcatgtagaacaactttaaaattttttcttttcatcactgaggctgccctagggattgcacacctgattgtgatggccttggaaaaagaaggtttaccaaaagagaaagccatcaaaaagatatggctggttgattcaaaaggattaatagttaaggtaagaatttgtcatttttaaccagaataaagataactatgccattctggatggccatctcaaagacaactctgtttctaccacctccctttacactatattaaaagagtagccattaaatacaaatgatcatgtcatacagaatactgatactcttctgaa

SEQ ID NO: 121686 - DNA, 1440 bp, Homo sapiens
tagttttttaatcctctccagatccatgcagagcccaccccccaatacacatgtcttactatgagaatcttacaggttctgtttcattattggaaggtagggggaagcacaggtagatgagctgaggagaaataccgtaaagaggttttgcaacttgaaatgagattgcaaatggcttccatttcactaattccaatgaatgtttttcagtgtttatcttatttgaattttcagcagcattccacattgttgactcaccttgtttcttgaaatactcttttctgttggcttccatgtcagggcattctgctggtttcttcttacctctttggctgtttgccttttctttttcttctgcaggttcatcctttcctgtctagctattaaatgacaaaacacttcatttttaaatgacctgctcagtgccagctccttttctttttgttctgctgtatgttcttaggtatatactcaggtccacacattcaattagcaaatttatattgccagcccagacttctttgtattccaggtctatacacccatgtctttatttaaaatctccacttaggcgcctataatcccagcactttgggaggccaaggcaggcagatcgcttgagcgtaggagtttgagaccatcctgggcaacatggcaaaactctgtctctacaagaaaatacaaaaattagcctggcatgatggtgtgtgcctgtagtcccagatactcgggaggctgaggtgggaaggattgaatcccttgagcccaggaggtcgaagttgcagtaagccatgatcatgccactgcactccagcctgtgtgacagagccaggccctgtctcaaacaacaacaacaacagcaacaacaacaacagcaacaacaacaacaacaacaacagaactcctgctggatatctcaaagttatctcctacttaacctactcccaaatcaaactcttatttccccaccaaacctgaccttcttccagtgttctccttttcagtgaattgctgatagctccctcttcagctttcccaccaaatacagtctatcactaaaccttttgcatttcctatcatcaaaatctgtgtttttcatagatttctcctcatcaccccagtgcaaattgctatcatctaagtaatctatccacatttactcttgcttccccttcttatatgttttctgcataatatctctacaatttgtcagatgtagatctaagtgctcaggcttttgtggtgaacagagatagttttctttttgctatagaaatctgatcttattagttcttcctcaaaataatttgatggattttcattgtacttaggataaagatgaaaatcctgaatgtggcccaaaatgcatggtctgatgcatgtttctctcgtcactcattctagccacacttcctttctcaggtcctgaaatgagccagg

SEQ ID NO: 121687 - DNA, 1142 bp, Homo sapiens
attttgtgcatgaaaacttgaaatgcaaaattgtgcagttttaaataactaagagagtataattggattgtttgtaacacgaaggataaatgcttgaggggatggatatctcatcttccatgatgtgattattatgcattgcatgcctgtgtcaaaatatctcatgtaccccataaatatatacacctactatgtacccacaattttttaaaaaaagtaataaaaaataatatgttgcccttagtgtcttacatttttattatgaaattgaatatttttacttgaagttataacttgctatgtctttacattccttggtatgtggagaatttggaatgtcccatacttaatattttgatttgccaccaagattgctctgaatctgtattcgcctttattgccaagtttcttcttaactgggagtttgaaaatataaactttaaccattttttctggataccacagaacccacaacgtattactgttatcagtttacagaaaaacacaatgactaatacgtgactaatgactgatgtagttgatatgagaaagactaatcatatcaatgactaatataggttcatatgagaaagaggaatgggaacctctttattccacatatgcttattattcaacattgccaaatttcaaaaaaccaattgcagcctccatgtgactcagttgtagccacattctccccttttccattaaactgccacacagctcttttcacttatgacctgatagagccaccccaggaaaagagaaaatggttttcagacaatttgtgtctgtaaattgtcatttaacttactttgtttttaaatttttatccctttcgaattttctggagctttgtgaagttagttactacttaataatcctatctttgaaaagagttagtgctgtatcagcaagtaatctgaggtgggaatagtcccaaattatgggcccattcgtcttgagaccttttcattttatattaccggaaagtaaaagcccctttcctgacattgtagtgtcagttttctagttagattttttttttttttttactccttcacctagccacaactttacttcatttgaaattaactaaatttgtttggctttgattataaatttatcttgtttgtttaaat

SEQ ID NO: 121688 - DNA, 1045 bp, Homo sapiens
ttttgcataacaaaacaactttaataaacttcagtaagctttagctttcccttgctacccaaagtttatttcataaagagctcaagagacaattggcaagttaaataattcaagagaaaaaatgttcacaagaagtttttatttgctttgcattctattccctatgctacatattaattgtacagttagcttcaaagtaagtttgtagtaaaaattactttcacaataaaaaaggtacatagatacaagcaactagcaaattaacttcgcaaagaataagatgtgggtttacataagccatttatgccagttaactagaccagttctcaactctctctttttttgaaacatctgtatcagtatcatctgattgtatcctaaagcagatatggaaataatttattattcttgggtctcttctgtgaccccattattgtcctgtgcatttatctcaagatcagattcattattaaatctatccagacaattcctctatcatgtccttgatccatttctataaccataacccagtttctataatcataacccaacttcaccattttatatctttacaccatctcggtaacttctgattttctttaggatcatattaataagtattcaggaacttacctttaccctgctattgactgttttcacctacatataaatccctttgtgatctggcccatgcacttcaccttcctgtctgccatcctccacccctccgtgtatcctttacaccattgtataaataaatagttttagttggctgcacatgtcattgttctgtcacacttcttctctgtataaactgctccttcttcccccagtgcttttgcttatttaattcatgcttatctttcataactcaggttaaatatctagactggattagagaagttttctgtatagtatcctagcatggatacaccaaaatagcatgtatcacactgtattgtaattatatgtatttatttgacttagcattaagtcatcaagatattagaggtcagggcctcattcttttctctcttcctttata

SEQ ID NO: 121689 - DNA, 1921 bp, Homo sapiens
gggattacccctgcctgctgtttagatacttacatggacactaatttctgcccatcaacctccctctctttctccttcaatgcccatcaacctccccctctttctccatcaatgctatgttggttttttttatttgccatcttggcaggtttagggtagagcagcttcaaattcttcctctcggtcttctccacaatgagagctcttcactcacaggctgaggatttgatatgggtcttgtggcacttaccaagtctgtcttttctgattacacatctagggtctgaggaatcaccaccaggtgggtctgtggtgacagtggacctattatgagccagaacttggctggggctccatttattactggctcctgtatgcctctactctaacagggagaggggaacagtgttttgatgcttcaagtctccaggtatcagtgtcaactgtgtgctcattagttctcagacatttgaatagtccttctccagtgcatagttacttgggtaaagggctgtagttccctgtggataaagattagggggattattaccctgtattcttgtcatggtgttataaggttctttcttctgggaactaggcctcttcttcagtttatgggttctgggtctaaaaattaactcaggttcggaagctgagcaagagattgtgacttcattggggcagctacactcaactttgtggtcattcatctttggtttcttttgatagtaaatattgagtagtagctttgttagctctccgttttgcctctagggatgcaagattccgttaattatctcaaaaacattttgtgggttagccacacacaccccacttttgccactcttatgataattgtgtccatctggcttctgattgttaagcattctcacctggtcttagcatccttattgctatcagtcaggctggttatatatcatccttttcttctgtcactcctgaccttcaggggagaaccaccactgaaatttttagtaatgttgatgtcttctcattggcatattccttatggctttgggaaatggtgtgttttctgggccttcctgtggaatatgttcatcttatggattttctggcttttacatgtgtctatataccagactgcccagttctctgagcctcgcaatcccctcttctgtcatttgccacagcattcctggcatttcagtcatattagtatcagccattaatttgtccatgtttctaggaaccatcctagcaatgagtttgcaccatcttctgggattcttgccacatgttaaatcctgtatctcaggagagtgcctgcaaatcagtaagctctcccttttcctaggttccagcccttttaatcaaacaccctcagaatttaattctacatgtattctcctggctaatacaaatactggtcttgtggctcctttggggtaaagtctctttcttcctttatcaactctagtatgtcccagataggttatattgtgataaaaccttagttattggcccagggatctggaggggaggcagaggtagatggtagttaaggggcacatgttaacttatgggggtgaaatctctacccttatcatcccaagaaagaaggggaaggccactttgtgagatgcgaaagctctgggggaatctggggattcaggatttcgacagacatcaaaccagacatcccattccatgtggcaaattcccattcttttgtaactaggattctgacttagcagatctgctttccttgagtttgggagcttgaatattctgatgattgagccctgtttctggacataagctttctctacccagcagctacagaagctgagaacatctttgtatctacaaaggagggcctctggctttcttgttggcaattactttctctgagctttttgtgttttttttcccattgtcc

SEQ ID NO: 121690 - DNA, 1085 bp, Homo sapiens
tttatggtaactttttttaataggagttacttaaagatccactctacattggactacggcagagaagagtaagaggttctgaatatgatgattttttggacgaattcatggaggcagtttcttccaagtatgtatctttatttaacctatattttagtcagtaacaataacataacagactattaaaaaatccaagatttatgcaatatggtttaataattagaagtaatttgaatgaaaaatgcatatatcctatctatttcctcataactgttaatggacaaatgataatatcatgtgtctatccagaatagattatttctgttgctgtccctgaatatacttttttttttacaagaacctttagaacctgtggctgttgaaatgcatgattatggtaaaggaggcagtgaccagtgactaaattacctgcaaacctttttacatttatcgacaatctgtactttctggttgatgataaaatctgatcttcagtcatctttgtagctggtatttgactctcttatggtcaaccaccagccacaaaggaaaagcagaaaaagaggtggggattgagcatgagttggtacagtccacaggggtccagaatggagcaaggacagggcattccatcatgatccatgcatctctgattaaatctataatatttgattaaaatgcagtgctatgtaggttgagagtctcttatccaaatcacctgagaccattagtgtttatgcagattttgaaatatttgcatatatatataatgagatggtacccatatctacacaagaaatttatttatgtttcatataaatcatatacacatagcctaaaggtaattttatgcaaaagtttaaataattttgtgtgtaaaacaaagtttatgtacatcgaaccatcagaggcaaagatgtcactgtctcagctacccatgtggacaatgtatggttgtttggcatcaccattatccctgattctgaattttatatgctagcaataagcaatcattttttgcacttatcatgcataaatccttaacagtataaaacataatataccattaatgcaatgaaaaaaat

SEQ ID NO: 121691 - DNA, 1026 bp, Homo sapiens
agggatattatctgagataacatgaagaagtaagaatattatctcatctcccaaatctgttttgaaggaagaggttatgagaaaagtttgaactatatatatgaaaaagcatccatattttaaaattgtctcaattctaacatgaaacaagaacaaaaataggagtattcttagttggcatgtctaaaattaaacattttaaattgatcaagaataacagggatggtgaaaaggtattcattataattccattcattaaaaaatattgataaatacctttcttatttaaacttttttattttataactgtatatatgtatatgttgaaaattaatgtttttatatccaactgtgtaccagaaagtatgagtcatttctgtgccaaaacacttttggatatctcattcggtttctaattatgaaacatttcaggaagtattgcaaataactcaaatagccctcccgaaatgcttggttttggtgggacgttaccggtcctttatttgttgaactctcttcaaaagtaataattctttctatgaatgaatctctactcagtgcaagagattacaggtggccaaatgactcttattctgaagctgaactcagatataataaacattggcatttaattggtgttaattttggtgtaattcattgtctctcttatttaaaaaaatggtgtttcctgaaaccagtgttatttggaaaaccttggctaactaacaagttcctgagaaatattactggataccccaaagccttgacttgaccactgtgcaagctatgcatgtaacaaaattgcactggtaccccctaaatttatacaaataaaaaatagtatattgccaagaatgtcttagtaattcaacaaaagtgccttctttaaaaagttcaaaaatattttaattttataattatttattgagatcctgctgattttataggctcacattggactatgacagggatccaaaagaaatatataccttataaagaacttataatcaattttgagaaacaaaa

SEQ ID NO: 121692 - DNA, 1045 bp, Homo sapiens
caaaggaagtaccctgagaactctattctgaaccaagtcttattgatatgataatagtacagctataatttttgaaaacatatttctcactcgtgctagacttgaaggaaactagtgacagattttcagtagtagcataaatttgaatttgtgcagaggtgatctagatctgagggaaaatgggcattatttggtttatagagtagaattgaagggatcgttttcttagtacccagcagtagcaacctcccctggaaaattctttggaaaactgcctcatatcagaagaatttgcttgaactgtatttggcagtataccaagtctgtctgtatggcttatatttttctgttgatacattttcttttctctgaaaaggaaaaacccggcaacaaggcctgtgaacaaacagcagtttttctgtttaggtttatataggcctattcctacagttttcagcatatgcatgtgagtctctgtcagttttccaaaacattagaataggaaatgagactgattgattgaatagtttgatcagttagttttgggtttagatacactaatctgcaagaatgtagacttccaatgtaaagatcagcaaagggaaagacttctggataaaggctaagtcaaggctgtaggatttactttagtagcagtttgaaaggaacttgaaaataaaacttcaactaagaagctattgctcttcaagaatgctgttttatcagagaaacaataataaaattcttagaataaattataaatgaaattattagaaagtttatagcaacaacaatatgattaatgaaagttgtattaatgatagagattacctaaagatttgggacatgagatcttgagccagcacaggtaaatttcatgtgaacattggggcaaatcttaatggtctaagtaaagtgttatatgtttagaggtaattgaattctaccgtatcctctttttcttcattaatgttttttgtgctttatgcctttgacttcttgcataaaagcatggagtcattctggtgcacttccatcatagaat

SEQ ID NO: 121693 - DNA, 1021 bp, Homo sapiens
gaatgggagtttctgggaaggggtgagaggcagtcctaaacctttaggtagtcctggatactagagctgcccaggtgaaccagaactatttttaattggatttgccttttttaaattaaactactttagaatccttaggaatatctaggaaacttttgaaaaccagggaatatttttggcttatagttctggtttagcatgtgacttttattttttattttgttataattgtctgtatttctagaaattctcttaaacatcaaatagttgatgtttaagagggcaactagcttttaatgcttccagaaaagtgatcattttaatgttaaatattaaaaacattttcactatttatctatggtaataagcctttgattttgatttatacttattctgtaatattatttggtccatttatttcatttcccttgaaactggcttacccctactttaaggtatgagaaaaagaaatacatggtgtaatttttttcaaagatatgaaacaagtcagatggaatgtctggactaattcaagtcttaactgttacctcagttgattttgtagttaaagataattatttattaaaagtggatttttatttattatagagatatagatgatgatttcttaaattatgaatttaaactaattattttttccaagcagaataaaagttatttttatgaaaatgtatatatgacttgtgctaaataggagtgaggtagagtattctatatcttaagtactggaaattcagtgagtgcccagaagtagtttaaaataccaaactgtcttctttcctaagcattgccttaatgaggaaaaatttggagaatggaaaaaatgtagacatgtttctaacatcagttctttacatcaagatctaagggttgtctaaatttgtgcgtagacgtataaatcttcaaggcagtgaaacttatcttttactgtaaaatgccattaaaaatataaagtaacagttcatcggctctccatattcatctagagattttaaatgtg

SEQ ID NO: 121694 - DNA, 1064 bp, Homo sapiens
atttttacaggtatcttctcttaatggatctccaagatagaaatgaaaaactcttttatagagtgctgacatctgacattgagaaattcatgcctattgtttatactcccactgtgggtctggcttgccaacaatatagtttggtgtttcggaagccaaggtatgtcaacttttattttatatgcaacttgtgtctttatttatttttgtaagttttttaacgaatttaaaatttattattattattttaaatttgacaataaaattgcatatatttatgatgtacagaggatgttctgaaacatgtatacattgtgaaatggtagaatcaagctaattagcatatgcattatttcacattcatatcatttatttgtggtgagtatgctaaaatctacttttagcagttttcacgtatataataaattatccttagcaatagtcactatgtggtacaatagatgtcttgaactcattcctcctgtttaactgaaattttgtatccttttaaccagcatttccctaatcccgcaacccgctccccctacctttctcctatcctctggtaactaccgttcttctctttgctactatgagtttgactatttttaggttccacatgtaagatcatgtggtatttgtctttctgtgtctggcttatttcacttaacgtaatatcctaaaggttcatctgtattgttgcaaatgacagaatttctttcttctttaaggctgagtggtatcctagtgtgtatgtgtaccacattttctttatccattcatctgttaatggactcttaccttgatcccatatcttggccattgtgaataatgctgtagtgaacatgggagtgagtgcagatatctcctagacatactgatttcatttcctttggatatgtacccagtagtgttattactagatcatttggtagttctattcttaattttttgagaagcttccatactgttttccataatagatttactagtttacattcccactgaacagtgaataagagtttcctttcctcaggttcctcgccaatacttattgttcatct

SEQ ID NO: 121695 - DNA, 1086 bp, Homo sapiens
ggctgccataacggaataccatgtactggctggcttataagcaaaataaatttatttcttacagctctggaggctgggaagtccaacatcaaggtactgcaaatttggtgtttggtgaggggtctgcttccttatttgtagacagtggtcttcttgctgtgtcctcacatggcagaaggggtgaaaagctctctgaggtaccttttataagggtaataatcctatacatgaggggtctgctctcatgacctaatcacctcccaaaggcccttcttcctatgccatcgccttgggggtgaggatttcaatgtgaattttgggggactcaaatgttcagaccataacaccaactatcatatcatattggtgtacttatcctggacccagaggaacagcagtcatagtctagataaagaagtctcttgggcttcagtgtctccaatcagatgcctctccagagggactccttatcccaatctaccacatcattttcttaatgactacgggagctgctctgatattactttgtcttgtattaatgccagcaaatatcttaggtccattatggtttatgcatcaatgcataatttctatttagttttcatgtttttgagcttcatagcttgttattatcatttgttttatacaatcaatgttcatgtaaacaggtaacataggtataataatagggttgtaatggatatactgaggctttagacaggaggaagcatttgaggtaagacataaagggcagagaaacagggaagaatatcttgaccatgtgccatggaagaataaaagggtgtggtatgtatggacaatggtgagaagttttgtatgcctaggagtacataagaatcaaaggctacaacttgggagaggaatgttgaaacaggtaactcagaatcatataaggcatttcctgacctattttaaaggtggaatcacagcaggtcacaggtgacttactcacattcataattttaaaatctcttctaataatgactttttatttttatatgtactgacattgataataatgattatatcttctttcatttttgtgtctttaagtagtttccttcc

SEQ ID NO: 121696 - DNA, 1047 bp, Homo sapiens
tagaggaaaaggtgatacttttcggcagctcttctccaaaaacaagagcccagacaatgaaagtagtatcagacaaagtgtgtgaatggagtgccaggtcagactccatgtgccactcacttactggttgcacacacagtgtggcaattattggaagttgataaggcgagaagtggctcaactggtcctgcccagacagaaacgtgtactgagtgccttcagatcacgttagcaatctggaaatccaagtcctctcggtttctggagtgacacggttaagagtctgggaatgcgtggtgggtggcctctgtcttggacactttgcatggcttggtagaagaactctgtcccagacatgggactgtgggtaaagccatttcttttctttctttcttttgttttgttttgttttgttttgtttttaatttggctttctggaagttaaaaaaaaattttgtttagagctgctctctttttattaaaggggaattcagtgtacaccctgttcagagactccttttcggatcctggtaacatttcattttccttcactggtgatgcaatataagcactcgggatgtctctcaaataaaaaatacctccgaatttatcattttgcttccacacttattttacagccaggtttgtctcgggattgttccttttgtgtgtgtgtgtgcgtgcgctttggacatttcctatttattcaggagtctgaaaatgccatcagtcagcacagaggtttgtttagttattttggttgtctctttggtggactgcatttcacattaagaacagaagctcagctttttccttgtcgtgttcctgatgatttgttgatcatattaatgacttaaagacatgatttatttaacaagttatagtcagtgtgagtgattttttttgtgtgtgtggtgacaggcaccttttacaaatctatgactgtgtgctatctgccgtcatgtagcattattaaattgtaaataattccaacttatttctttctttaaaataaatttaattgctagtttgattgttttttctttt

SEQ ID NO: 121697 - DNA, 1034 bp, Homo sapiens
gattgccgaagggaggccttcctttcagtggacccgggtcaagaatacccacattccgaagggctgggcacgaggaggcatgggggacgctaccttggactatgactatgctcttctggagctgaagcgtgctcacaaaaagaaatacatggaacttggaatcagcccaacgatcaagaaaatgcctggtggaatgatccacttctcaggatttgataacgatagggctgatcagttggtctatcggttttgcagtgtgtccgacgaatccaatgatctcctttaccaatactgcgatgctgagtcgggctccaccggttcgggggtctatctgcgtctgaaagatccagacaaaaagaattggaagcgcaaaatcattgcggtctactcagggcaccagtgggtggatgtccacggggttcagaaggactacaacgttgctgttcgcatcactcccctaaaatacgcccagatttgcctctggattcacgggaacgatgccaattgtgcttacggctaacagagacctgaaacagggcggtgtatcatctaaatcacagagaaaaccagctctgcttaccgtagtgagatcacttcataggttatgcctggacttgaactctgtcaatagcatttcaacatttttcaaaatcaggagattttcgtccatttaaaaaatgtataggtgcagatattgaaactaggtgggcacttcaatgccaagtatatactcttctttacatggtgatgagtttcatttgtagaaaaattttgttgccttcttaaaaattagacacactttaaaccttcaaacaggtattataaataacatgtgactccttaatggacttattctcagggtcctactctaagaagaatctaataggatgctggttgtgtattaaatgtgaaattgcatagataaaggtagatggtaaagcaattagtatcagaatagagacagaaagttacaacacagtttgtactactctgagatggatccattcagctcatgccctcaatgtttatattgt

SEQ ID NO: 121698 - DNA, 1096 bp, Homo sapiens
tatgcccatctttttttaaaggaagttgtggggaaatgtaccatgatgtttgaaaatagatttcgtaatatatgaatcactccaagagaaactgttacagactcctaccattgggtcaaaactgctattacatagaccactgtttttgttttttgtttttttttttaacaagctgatcatttttctatgtgaaaactcatggggtgatctcagctcaacagggtcatagtgtgaaatagattggtacagtttgccttggattactgcttgtggcccaagtagtatatatagaataaaaggaaacagttcaaggactcaaaaatagtaaaagccaagtattggtcttccttgggagcaagacaaagtgtgtgcttagtgatagccttgacctagaaattattattttcataagcaaagcattatgaaagaccagttgcaagaccacagtagtaagtttaagttcagattattagtcaaactcacaagacattgttggcttaccttactctgattttacttagacaggtacataacaggaagcacaacagtagtttcacagaggactcagtcactcagatgcagcttctgaggcccctccacagtcaccacaagggttgaattttggtcctaaggttgacaaggggctgacgagagcatgggtcacatcaccactgggaagctgccatgcatgtctgaagtcttgcatcttaaataccgtgctagtgctagccatgtagaccttgataaagcatatgaatagttcccttttttagtgtggatatagcccataaaattacaagttatacaataaacaatcctggcaccaggtacagcaagctgaggaacatttattcttggattagtggtgagtaatggcagatgctaaaagaccctcatcagccttcagagttgtagggagtttgagttgaggtcaaatctttcctcaggaagctaaagcaggtagtcgtagcccagctgttaacctttccttccatcagtaattcagactggctatttaacagtctttcccaggggcaatagttctctagtgtctttcccatcctttcctgactactatgatcaaacataacagtct

SEQ ID NO: 121699 - DNA, 1050 bp, Homo sapiens
ttctcataggcttgtgttaacagaaaaaaagtaaggaaaatatggacaggatgcataataattttgtgctgaaacatttctacgccttagctgtttagattttttgtttccagtccacttataaggagttgattacctcaaagaaatcaatcaactctatcttacttcctgcatagccctctagaataataaagactaagatatttctttgaaatattcttcatgccattatgctgtttttgtttgtcatttatttctgttttgactatattcatcaagtggaaaaatctgtatgtttagaaaattttcatgatggcattctttgtagctttaaatataagcttaaaggatgagtactgcagagaatcatgcaacttaatgtcaaagaatgagactgttcttgtgattttatcaatatcctttccagtcatctggctgagaaatgagtgtacaatgacaattacatctgaaaatcacatcataattattttattgatctgtttagttctataaattgtctcctggcttctgatagctatacaatttccatcctttatgttcaggagtctatatatgtcattatctgttttgtgattttcagtgattttctgtaatttctttcatgccttcattggtttttaagaaattattcagagatttaatttttaataaaaacctaagctaaaatctctttggccattttgtgtggccattttttaaatattttgtctctctacaatgggtaagtggtagaactctagaataatcagaaaaccagttatgttttgtttaacacagcataactttacaactttaaaacatgcctttttgaggtcctatgcaatatgtacagcaactaagtagatttctttagaaataaagcttaatggattttaatttcagaaggatggctatttaatttcatccctatcaaatattaaaactgttaatgtattttagtactatatttaaattacacattttaaaaatagtaaatttttgtgatttttaacagaaatattcttattgatacacaagtaatgttttagt

SEQ ID NO: 121700 - DNA, 1145 bp, Homo sapiens
ggataataagctcatttgctgctttgcaaggtggtccattcctccattccacctaatagctatctttaattgttagaaaatcctttattttcattgaaccttaggtttgcctttagaaaagcctgtttattattcttagcatgtaaatgataaatcataaattcttacctttcttactttggcaatgatttatacacaatgaaaaataagacagaaagcataatttgttttataaagtttataaattctttcttcagaatgtgtctttatacttgattagaatacctgtgtaactatgcagttggtgttcctgaaattatttgtgaattggtattttctcttataaaatccaattaatgattcatgctgatattggaaattataacattgttattatagtcctttggaagaatgacaagtgtatttttatcttacatgtcaattaactgattactaggaactgattggaatgttgtatgaaagaggttctaaggctcagcagcaaaccatacaatgctgtggatgtgggacattcatgccatgtttttgctgtttttgtcattttgagaatatactgcataaacaagcattttatacacacgatttaagaagtactctagtccatgcattgtgtttaaaatcttttattcatagaagtaataattgtcacatgaaaattctgggaccaaaataatatcacaaaatgctgattcttgaactttcacccatacaacatgtagttagaataaaaatcttttttaaatataagggaaacaaaagataaagattagcttatgtaaattgtatatacattaaagcacattcacgtttctttcctcatgggtttatcagtgttggtagtctttaagaaatgatagaattgcttaaaattttttcttttgctgctatacaggtgttttttgtatttggtatgattttgccatggtttaaccgtaattatcagcctaatctagtaaaatttgcctaatttctttctgtgaaaagataaattatgcctgagtacggagaacagattattttgtttcattaaatcttggtgtacattcatcccagtttctcatttgttattgtatgtaagtaaggagctggcatgtggcagtctggggtatacacttctctaatca

SEQ ID NO: 121701 - DNA, 1100 bp, Homo sapiens
tctctaaaccaaatttgaatgttttcttcctcagtcagctggtgatagggaactcccccagagtccatgggtataatttgagggagaaatgggaaagaaaaagagtagatgcactgggaatatgaaccatctgttcatacaatctacctgcttattcacaacctgcttgaggcttatctcttatagactgcttcttttgataatggagtatgattgcacttgttcaactttattatttggtacattagataacacccactttaggtctgatgatcacttgatgttctttggtcaaaatttaagtctctaaaagtaaaaggtaggtaaaaataaaccaaggtaaactgaggtaaaagtaaaccaagagcattttttccaaaggagattagctaatgtgtgaagaagacatagccctactccaaagcactggaggcctgtattggagtgtaccagaggtactctacagcatttgaatctgctgtacacactttaagtacctttagatctgctgaaacagagccccacgtggcatcagtttggagaagttgcagagtcttcccttaatctgagcctgactcatatgtgacactataccagatgctttgcttagagcagcacatacacatgtcctctatgttgccaccaaagcagcttagcagacttctgcctctttttagttacaaagagtgcaaggtacaaaatttctcttttacacggcaaggatttctctgaaatgcacagtctttggggcccttagaaacttcattgaggtgactggtctctgaattttcatggattctcccatactttgacatgcatgtgacttatcaaggcagctaagataccgtcagttcttgcccactaaatacattcagccttatgtcatcaaaatgatatcctatgggagtatgacagccaaagaggttgatatccctgaaataagacagtgaggctttaatggcatctctgctagatgacagaaaactacttctgatggtttctgtttattgaggtagagataaatcattacctagttctgtagctgcctatgaggtaccaggagctacattgattttcttctggtaaatgaggatatatct

SEQ ID NO: 121702 - DNA, 1105 bp, Homo sapiens
tcctctctctctctctctctctgtgtgcgtgtgtgtactttcaaaaattatatacacagtatttcatttctttgtgttgggagacaattttcttttgcatttttgcatgtcttgagagtagaggcactgtctttttgtacagtcttttaaaggatatttgcattgtgaacaaccttgaatgttagtgtctccctctagaagaaaggacagctttgcttactcttctgtataataaatatctccctcaggagcaagggcaggcatgcttataaaagattccagtttcctgagctcagagttcctcttctgtaatgcagcgcattaagtgtacaggtgttacctggccctcttcacatagcactctagtgaattagagttcagtgaactgacacaaatgtttatattctgactactgctattgatgtgagtgctaaactcttctttgtctctgacctaggagtctcttgttatctgccaggacccatgaaagtggcaggttaagttgtttgcttgcaagtgtgatgaaatctcagatcctttacagttagttcttgatactttgaaataacagtgattaattaaatggaatgtatttggaaagatttattgaaacttatatttataagttttacaatttttgagaagttcatttaggatattatttctgtttgctttggtacaggtttcgtttataatgtcagcccttatatggagtatcatcctggtggagaagatgaactaatgagagcagcaggatcagatggtactgaactttttgatcaggtaagatgtgctgaaagtaaccaaagtattccggtggaagagtactcagatttatcagtgtgacatttgtagaaagaaaggaaatagttgcataaattccagatgcattggcttgaattttgaagtgtgggaagatgctcacaagtagcagctgttcatttaatttgccctttgagttattaaaattttagagatgtttcaaatctgcgactaggggtcttcttttaagtgttcgctgcctcctttgttggtaagtgtttattcagtcttgattagttttgataatgatcggcttatgggaggtagtgacaattggaagaag

SEQ ID NO: 121703 - DNA, 1042 bp, Homo sapiens
atagaatttgttttatatagttgacctttgaacaatacagggattaggggtgccaacaccctcactctcccatgcagtagaaaattcatgtataacttttaacttcccaaaaacttaactactaacagcctactgttgaccagaagccttacttataacataaacagtcaattaacatatatatgtatgttatatgcattatatactatattcttacaataaagtaagctaaagaaaagaaaatgctattaagaaaatcataaggaagagaaaatatatttatattccttaagtggaagtggatcatcatgaaggtcttcatcctcatcttcatcttgagtaggctgaggaggaggaggagaaatagggagggttggtctttctgtcttgaagtgtcaaaggtagaagtaaacccatatgtaaatggactcggttgcagttcaaacctgtgttgttcaagggcccattgtgtttgagagcacttaggtgcatttgcttaaatggcaggatctcatttgctgttaatgttcttcctgggttggagaagagtcatgtttactcttggtcataacagcattctccttggaaggtttttattgctgttttaaggcaagttcccattgttatttggtatttgctttctctctgtctgcctgcctgctgtctgtctgtgtatctatgagacagagtctcgctctgtcccccaggctggagtgcagtggtgtgatcttggatcactgcaacctgcgcctcccaggttcaagcagttcttgtgccttagcctcccgagtagctgagattacaggagtgtgccatctcgcctggctaatttttgtatttttagtagagatggggtttcgccacgttgaccaggctggtcttgaactcttggccttaagtactctgcctgcctcagccgccctaaatgctgggattataggtgtgagccattgcgcctggcctggtatttgttatctagcaatgcaagctaaatagaaaggtttaggaacatttgcctaaaaacttacctgctatacttttc

SEQ ID NO: 121704 - DNA, 1040 bp, Homo sapiens
gaagtgtaattaattatggaatttctggtgaaatattggaacacaaaaaatttgaaagctttgattttaaatacgttagtttctttttgtataaaacaaggtgatgtcagcttaagaaatgatgtctttccatttgactacttgaatattttttgttagcttatcccatttttttttaaattttgacaacttgctgaggtgtttagtttgactataatggtataacacttgtggatattagaatataatatagctttgtgagttggccgccatcctgaaagaaaatacctgttaatttttttcctgggtttgtaacactaataattgcattgggtatacatgcaaaaatctgaacatattttaaacttgtaataacgatcattttatgcattgaactcagtaaaagggaaagataaggcatctttctttgagttgttaatgtgtgtgtttcatttatgaagtataatctaataaattctggttaacttggactaatttaaaatatgataacacggatgaaacttgacgtttacatatgctcatatagaaattaaccaagatattagaaaaaagtgaccaaagaattagaaaaaatccaaatgaaatgagagacaaacatctggagaaatatggtctggcagtcttcagagatgaaacttacttgtttaaaacaaaggccgtttctatattggcctgtttctctcctcaggccttagaagaaagcccttcaaaaaagaagggatgttatcttgaaatcagtaatgtggactgacattctcattgacattaaagtattcttatttgacttttttttctaaatcactatacagactatcgtgaggaggaaaagaaagtcttaaatggtaagtctataaatttataataaatgaatcatattcacatgcttatgaatagtattgatacacagaattgtctggggcatttaaatttttttcttttttttctttttgagatggagtattgctttgtcacccaggctggagtgcagtggcaccatctcagctcactgtaacctccac

SEQ ID NO: 121705 - DNA, 1199 bp, Homo sapiens
atattttacagctatgattggttccaaacagactctttagtcaccattgccatatatactaaacagaaggtaaatatgtctttaaaatcagaaaagaagaaaataataaatgttaatttatgtaccaggtctttttctaaacacttttttatattatttacttctcactataattctttgaggtagatagtattgttatcccttttgtacagaagaggaaacaaagaaaagattaagtaattcacccaaagttacacactgagtggcagatctggcatttggaactcaggcagtctggttccagaacatctgctcttaacagccattcctatagcctcttaaaaatcagagtaggaagtattttatgtgtttttctgtgtgtgtgtgtgtgtgtgtgtgtgtgtgtgtgtgtgtgtaaagcatggataacaaaaaatgaatctcagttaacatcaccataagaacaaatttcctagacataaactaggattggagaaggtatttcgctgtggctgtggcttagtatgtttaaaccactaatggtgttcagatgcccatttgaaactgaagttagggaggtaattcagtaaccatcaaaactaaagttagggaggtagttcattcactaagtatttataacctgcttcatgtagaacacagccttagagatcagggatctaataggtcagatacgtagagacctgactttcaaaaggcttacagtccagctggaaaatcagataaatatgcagacaatttaaaatatctccaagcacatcctccagcaactgttgaggttcccacactttgagggatatgtagatttaaagacaagctctggcagctaggaatttttgagaatttatgctacttctatagtagcagaaccatgtctgaaccagtgggttcctctcattcttgcagcatgatttggtcattctgcaggagtgaccagcctctgcttggaaagagccaagatggccagaggcactacttatcctgttttccactccctcttgatattgtctcttcatcacacagttcaaaacccagagcacaggctctagggaggtccacttgcactggtaatatcaatggaacacagaggatggatggctaagggaaaaggaaaggtttccatgtggaataatgtattcattgaataatataaataatatatatcttacaccaaggctatg

SEQ ID NO: 121706 - DNA, 1046 bp, Homo sapiens
attatgtaaactgaaatccaaactaaattccacttatccttctcccaaatatgtgatcagtgtatgaggctcagttcattcagtacacattggcccacctgctcccatcagcagaatgccctagctctgtgatgtctctgcttttgtagaatgagttttgtggggtgggacaggtggtacagtttgacaatgaggttgacttctagaaaacattttgtggtatataaatataacaggtattttccttttgtttcaaatgagtcgttcttggagaccattaatcttattttagtaaaggtagtggtacatttttttataaacagcatttgttgattttcccttctttttataaaattaatacatgtttatatagaaaaggtataagaaaaaaatcacccataatcctaccacccaaagaacaattattaacattatggtctgtatctttctattcatatgcatacctacctttttgttttgtatatttaaaataatgtagtcatactaactataatttttataactacatttctactcattgtattgtgtgttttttacataaagaatattttcaacaggtggttttcaaccttaagcaactctgccaccccagaaacatttattatcacaactaggggaagacgtgttacacctagtcagtagaggccaggattgctacaaaatatcttacaattcacaggagagcccccctacaacaaagaattatccagcccaaaatgccagttgtgccagttagtaaatcctgcagtataccatgatttttaataactgcattgtgttcagtcatgtgagcataccataatttagttaaccaattctctgttatttgacatagtgactagaaattgttcaatacctctctaactattcaggataaagaagaattattaggtcaaactgttttaaggctcttgatacctatactttaagttctgggatacatgtgcagaacatacaggtttgttacataggtatacgtgtaccatggtggtttgcagcacccatcaacccattatctacattag

SEQ ID NO: 121707 - DNA, 1069 bp, Homo sapiens
gattgaataaatttgggaaacagtatatgccttcctgaagatttactctgaacttagcatatataaggctttctgaaattctacggaaatatatttaactttttttaacccagtatgtcacagacttatttgatagttagcctgctttcatggaataactactaacatctggaggcatactagtgtttcattagattcattttaagaaatgtttccatataattatggaaacatatataattatatatattttatctaattttgattcctagttttgtgagatttttttcctttgagcacatagcaatttttactacagttgcaggcattttctttagctagaaaaaaaacaaaaaacaaaaaaaacaaaagcaggaaaagctggggccccaagtactctgaaataccaatctgtgggcagtgaggaatcactgaagcttttaagcaaaaaagttgtaaagttgtatcagagtttttaggggaactaatatggcaatggtatatcaaatagattaagggctaaggctgttaatgtaatattttagatgagatataagaacctgatctggagttgtgacagtaaaaatgggaaggtaagggactttgtgtgagaaaatgaaggaggcaagttgctgaagctgattggctagaggaggagggaataagtcgttggatgactgctaatgatttagactaaatgaatacatttgtatttcaagacttgtcatctcagatcactatcagcctactttaaaataaaatttttgacaagcttacttagattgacgtttgagatcacataggcactcatcagaagcaggtctgttctcttcctctttcatattactttgtattttatgggttatctgaatttattttcaggtaaccttttcaagggtcccaaccccttctggcacttttgaaattataaaagaatttcaggatgtttactgtgtgccccccacatgtctccagcatctcaaagctgtaattttttagacagtaagttaaccttcattcagaaaacccaggagagagtattccacaggaattgtctatattttgatat

SEQ ID NO: 121708 - DNA, 1038 bp, Homo sapiens
aaactcttttaattactgttgcctgctggtgctgactaatgaggtattcaatattctctattttcccttttattaaaaatttggtataaaatatataaatcctttaatatatttctgaattttttacaagccattactgaacaaatactttttgatgtttctcaatgttctttaagcactcatgtaatactttcctccatcaatccaaagtccagcatcatcacaagtcctaccatgttatgagaattatgtaaaccacagtgtttgcctttgtatcctagttttaagaaaactctgttaaatttattaatcattgtcaatagttaaattgagttgagtatccaggaacaactattactctgcttcttgaaataatttttaaaactggttttcatcctattttgccattgtcttttccactgtttttaatatggtgaatcatctaaatccttttgggaatatgaataaaatacattgtaattaataaacatttcaatgtaaaaatcaggcccacatcatcattaagactgtaggaaaggaccaagaaacccaatttcataaaagtccacttgaaaataagcccaagacgcaagaaacaaaaagccaggagaatagctggatcccatccacgggcatctgggtccagacagcaaatctataaccacccccttctcttcatccacgggaagcacctccggccctgggtagtagtttctatttcctcagtctcctgtgaggcttaagagacatttaggaacagcccaaacttactcttggtgtggggctcctgtcttggtcagcaaggtcagcacaaaaaacataaaaatcacgaagactgcaagaccaacccaaaatccaatcacaatggaatctgaaagacagttaattctgggattagtatttcacagtagtttaaaacttgaacattcaagaatcagagctttttggagaggctttggtacatgaaacatgaaaggaagtcaacagtctgatccgcagttggctggagactgataagatgtaaaggatgaggaggag

SEQ ID NO: 121709 - DNA, 1046 bp, Homo sapiens
ggtgcatttatacattgtttataatatttagaaatcttatctggaacaaaactcatcaagcctgcagctttggataaaccagctcacaaaactgaaagttgcctgtctactcgtaagaagtctgaaaatcccacagaaactgattcctgtattcagtttcagactgtaggtattcaaaattaataatcataatgttttatgttctaaaattatattaaaactaaattatatataacaaaatataataaggactgaaatgtcttttcctttgagtgatactgtaatcactcttactaaacagttaattttcttatataatagaacattattaaccatgtcctttttattctttttttaattaaccacctgtgttcaaatcttatacataagtctactgtaatgaagtaatgctttgtcttgaaaggattccttaggatactgtggtgagaacaaggagaagaaattacttatgtttaaaagagttcaggaagcagaggataaatggaggggtgcgcaagccctaattgagcaaattaaagccacattctcagaaaaggagaaagaactagaaaataagttggaagaactaaagaaacaacaggaaaaagaactcttcaaattgaatcaagataattatattcttcaagccaaggtactagatacattgttctggtatttttttatatttattaaaaaaaaaaaaagctgaattccctgctaaatacattgtcatccttggttcctagagatgtttgacttgatgtatttgctgtataaaatatagaatggttccaagagtgattccgtacatgagagcctaaattttgaacccttgggggagaaaattaaatttaaattggctcatttttatggttttcttctgttagcagtcctttttaaagaaaatcagttcattctgaccttcaaagaaatgaaagtttgagcaagaactgctatagaaggtatagacccagaggatgacattgtgtagcatttgtgagttcctttactcacccagcaccatcagcacaaaacagcactttgct

SEQ ID NO: 121710 - DNA, 1046 bp, Homo sapiens
aggtacgatccattgactgtgagtcctagtgaggtcaaaggattattggaatctgggtaccagagggtgtgaggtggcaaaacaaagatgatagtcatagtaggtgattagatgagggaatgagactggggagtgattgcattacttataatagtctaggaaagacctaaactatgccaatgggaatgagtatctgagatggaaaggagttcaaggaaccaaaagccagggagttgaaaggatcacctgtgagtatgctgaaatgaccaagaatgaagacagaggtaatgtcacagtgagtgaaaaagaaatgagaggaatgatgaggaggttgctagatgaagactaatatttttatgagtaaagtgaaataatattcttaaactcatttttcatattttaaaattgtatagcatttgtgacatccaaaataaaaaaaaacacattattaaaatttatagtaaagtataatgatggaccataaatgtttttaaactgaactactttttctcattagactgaatattaagtatgatatttttaatctctgttttttattgaagaattgcccagagaagttttagttttattcagaggaactataattcctttgggatagtggttacttgtcaaaggttgagttctccaagaagcagagtttgagatgagattagtgttcagaaaatatacagaatgcagttaaaattaaaatcaacattggttaggatgaagaaaaagcccaactaccggaacttaaccaaattaaaggcatcttttcttttatgtaacaaagagtccagagataggcagttcatggctggaaagctgtgcaaggaaccagatccctttgtctttcctgatgcaaaatccctagtatgtgacttttgtcttaactgtcacaatggctactctgcctccggaccctgtccatgaggtagggtgaaaggtaaaaggtagatgccagccaaaccatcaacccaggaaagtttttgcatccatcttaatgacctttgatcttgtggccgtaagttgaatggagttcaggg

SEQ ID NO: 121711 - DNA, 1101 bp, Homo sapiens
atcttacagactgagtctacagagagagaacccatttccagagtttctagattccttctattctctttaaattctgcttacaaaccagctcattctgtgttgagctcatcagttttttggtaatatcttgttaaaagaagctaatagtagccagcacttaactccttgttctttccagtcatttctcttagttctccatggtcggctggcatgtggtctgccttataaacttttgtagatgacagtttagcaatgttttgccactgtaaaacataggctgccgtctctccagactctagttatcagtttcctgccatcctaaacttgacaactaagccagtaacaaataagttgggttcttagcatcatagcactcacattctaaagggaaaaactagtaaatggtcccatctagatggaagttggcaaggaaatatagtttagttggtacccagcaagaatgagaaacaattttgattagcatctagccaggttctgctgctatgaagaaggaaagaactattatatttctgatgattccacctactagcagttaccaagaagccaatctacattatatgaaaatggtagcctcttaaacattctttaatcttattttataaattataaaattaaatggcctaattgacacacgattaaatattttaagactaacagttcccatatttttggagaccctgtagtttgccaatatttaaccgcatttaaaacatttccttacgttgtatcttctaggtatttaatatctaattgaattgttacatttaagtgttttaaaccacagaaatgattttcttttcaaagcctagtgatttttctgttttacattaaaatttttcctatactgtgattaaatatatgcttttttagtatttatactctatgcctccttaatacaaatttatgattatttctttagtttcttctagaaatgtttaaaatgtttttcttatttcaaatgcatgtcgactttataagaaattgtagataaaagatatattacaaaaagttcacttagaaatttgtattttacttttcttctacaaaagcagtctcagtcttgtttggtttggtctttct

SEQ ID NO: 121712 - DNA, 1044 bp, Homo sapiens
tgagtttgtagccacaagagaaatggtcctcattaaaatgcttcaggtccaatacagtttagtggaagtatgtgtgacccactgtcattcttcaacacggagtaacatgtcacagtaaccttgtaatagacagcgttgcttttatgtagcactgaaatgtcatgtccagtctcccacgtgatcctcataacaagtagagaatgcatctttatgcccataattcaagaaatgcacctgagattaactcaatttactggtagatgataacagctaacatttttcacatttactttgggcacatactatacgtatattatttaatttaaccttacagcatctccatgggttatactccattattatccctatttcatagacaagaagattgaagcctaagagattaaaataaataaagccattgcccaaggtcatatagttgtagaccaggaacacaggccatccatgtgcttaaccacttacattgtcaggtctttgatctccataaaatacttctgtgaaatagtctgtcatccattcatgttgtcatttgttcatttgtgtcttcaacagacatgttttcagcctccttcctatactgtatcctcatgatgtaaatccacatgtggtgatctcctggccttgtttctacatttgtgtgagttgagaaaaaaatgatgcagtgaaccttccactaaaattcattcacttcaatgctaagtgtagtagtcttccattgatctgtagtgctaattagtatttttaaaggagagatggtaccactcatcattgctgtttgggagtatgttagcggtaactacagagattttcttacacatcttatatctttgttgttataggtaaaaccatttcagtaataggaattctaaaacagatttttacatttgtgtttaaaagcttaaaacagatattttgaaggtataacagtaatcatacgtaatagaaatgtcagtaatatgatctttagtacacatacctaaaaattttttggtaaactatggagtaaatgaccctagctgctataac

SEQ ID NO: 121713 - DNA, 1193 bp, Homo sapiens
aggcgtgagccaccgcgcccggcctgcattgcatatgtttaaaataattgtattagatcaacagaaccactgagtttatctacattccttatatttttcttttatattcttccagttgtgctgcttgattcattagactctgttgcagaggtcaatcttgatgaacaagataaaataacacctaagccaaggtgcctaccagaaatgactgagaatgaaatgacaggaacaggtaaaaatgtttagaaacctgactgttctctaaatatggaatgctttatgactaatatgactacatttctaaggaaatatatatataataactatattgataatgaaaactttaaatctgacatttttctaccataataataatttaaataattggaacttgctgatggtgacacaatgctagtaggccaagtaaagtgaggttttaaataaatatttgttaataaatgaataaatgctgttgataatagtgtagcactgtaggtgaacgttaactaattttctatgcctctccagagtattcagttaaatctgccatgtgtaggagaaatgggactttggtcttattgtgcttttccatagttctttctctaggaaaaagctacaccccatccccaaattctgaaatacctgagaccaactagactttcctaaagcttataaaggtctttgagataatgccttttcaaaattttttaaagcagtggaatgcacatcttcagttgaaatctatttttttgttttgttttgttttgttttgagatggagtcttgctctgtcaccctggctggagtgcagtggcgctaccttggctcactgccagctccatctcccaggttcatgcaattctgtctcagcctcccaagtagctgggactacaggcgcttgccaccacaccaggctaatttttttgtatttttttagtagagacaaggtttcaccgtgttagccaggatgatctcaatctcctgatcttgtgatccgcccgcctcagcctcccaaagtgctgggattgcaggcgtgagccaccacacccggcccagttgaaatcttatgtagaactctctcataggtaaaaatgatactttatcaggataaatatttaaacttatgtttgttacatttgttcataaaatagatgaggacagtaatggtcttttggaatttttgaaattagaaac

SEQ ID NO: 121714 - DNA, 1044 bp, Homo sapiens
taattgcagaactcttgtgtgaaatagctctgttatcttgacattcaaaaaaaccagagaattcttgagcaaggtagatgagcaaatggaacttaaatactttaagcaagaatttttaaggtctaaattaattttggtaattgccaagttttagaagagaattttagacattctgtcagagctagtcttgaagaattattgataaatgagagtcagtggtgaaagaagcctagaaaacacagttcctgatcgtttcaatgtggaataaaaagccctggatttcagattttgctattatttgcattgtggtaattttacataattttggtttcaaaacatatcatcattttccttttttaatttaggaagaagaaaaaactggcatgcttgctaatggtaaatattatttatattcatgttttagttggcaaaaaattagtctgttcagaatttcatctcagtaattctgaatgagtcactatctgtgtttgtttttaaatatttctaaggcattgaagttcctagcttttctcaataatgtgtttctatcttgaatccattctgttatatttaagattttttttgttatttttcttatgccctttgccttccatgtgtacatgtatactaggctgttcataagcatagatatgtatgttgatgttagcctactgtcttctacatcggaagaagatcatatttgttatatacatacacacacacacacatagataaaacatgcttgtaacatatatacatatataagtttatagattctttgtatataagcatttatctttgttttaatatgcattgcattttgtttgtttgtttgtttgtttgtttgttgtttgtgagacagactctcgctctgttgcccaggctggagtgcaatggtgtaatcttggctcactgcaagctccacctcccaggttctcactattctcctgcctcagcttcctgagtagctggaactacaggcgcctgccaccacgcctggctaattttttgtatttttaatagagacggggtttcaccgtgtta

SEQ ID NO: 121715 - DNA, 1006 bp, Homo sapiens
cattttcttaactcaagatattaaattaatgtaaatcttaatgaaaaaaattacgacaattaatgattttatgagagatttttggccaggcacagtggttcatgcctgtaatttcagcactttgggaggctgaggcaggaggactgttcgagcccacgagctcaaggacaacctggacaacatagtgggatctcatctctccaaaaattaaatttttaaaaaattagcaaagtatggtggcacatgcctgtagtcccagctacttaggagactgaggtgggaggatcacttgagccagggaggtcaaggctgcggtgagctgtgatcatgtcactgcactccagcctggttgatgagtgagaccctgtctcaaacaaacaaaaaaagatttattttggcaaataagttaagcttaagttaagctttagaaattgaaagcttaattaaaatttcaaaactaatttttaaacaagtatgttaacttatactttttctttggtatgacttgcctttatgaagtatagtaaatgtccttccctaataattatgctagtcacaacattaacgtctgaaacttacttggctaagataaggaactacatgattccattcacattcagtggtgcttcatactctaattctcacatttcccagttcttaccaagaattgttcagggctactacttcatattgcctaccttatagaacttatctttgaagctatctaatagtagctagtagaacaattaatattgttgttttgttatgtgttattactatttattattttggtctctatctgggcacagtctctttggtactgtgtgttaggactagatgtttttaacatgaatgaaaacgtggactcaaaagaaacacttttcaggtgtctataaatcttcttattttcaagtttacttagtatttggtcctggggtgtctacatgtcactcagttttgaggaaaaaatgagatgaccttagaaataacatagaaattaatgtga

SEQ ID NO: 121716 - DNA, 1627 bp, Homo sapiens
aacagttcctatcactgttcttttgcttcaagttactggtttttttcctttctttaatctgctattaatctcttttttttttttttttttttttttgagatagaatcttgctctgtcagccaggctggagtgcagtgataccatctcggctaactgcaagctccgcctcccgggctcatgccattctgctgcctcagcctcctgagtagctgggatacaggcacccaccaccacacctggctaatcttttgtatttttagtagagacggggtttcactgtgttaaccaggatggtcttgatctcctgacctcatgatctgcctgccttgacctcccaaagtgctgggattacaggcatgagccaccatgcctggcccaatcccatcctttttttttttctttcactctaacagttcattttggatctttgttttaaaattctttagcatttttcttcattatgttcatttttttcaagtccttaatattaaacatattttacagatctcagtatttgttcatttctgtgtgtcttttctgttggctatttagtttcgtgacactttttcctgcctcttagaagtctagtaattttttattggatattgggtattgtgaattttatgttattcagtgtctggattttattttcttcttttaaagagtattattgagccttgtctggtaagtagttgatcctaccacttgatttttttcaaggcttttcttatgctttgttagcagaagtctagagtagctctagtaacctctaaccctactgctaaggcacatcccaatgcccctagtgatcaatgaggtctctccacttaagcagattagagttcaaaagtctccctgtcttgtatgaactgtgagaattgtctaacttacagcatcccacttgttcttggctcattttatgcattaacagcttagtattcagcaaagactcaagggcaccctatgcagatttctggggctttgttttcacttaggcacctcctctcttgattactgtcttatattttataaattgcctcagcctttctgaacttatctcgctctcctctactcagtgatactgtcccaatctccccgcccctgctcactacttcagaacatatgtgccttcaggtaattgtaggctagctcacttgttttcttaggaatcacatttttttgctgccagttgtctaatatctgaaaatagttgttttatatattgtgttgtttacaaagaaagtacaatccctttaactccaacatggcagaggagaaagtcctctagattggcaaaaaattaaaaatttgcagctaagtttgccaacaaaagatgaaaaatgtcttccaaaaggttcttttacaattcatatggtttatctgagctttaagaacatttttatttctcaaaataacatttttgaagttacaaggatagagaatcatagaaacccagtaacttgaatatgtaacatctacctgcgaaaaaggtcagagtggtacaagtaaatattctgattgttttccgaacaatgtggaagagtctagatattatctctgatgtttctcatataagaatcaccctctcaaatttgttttactctttcatttttatataaacttaatt

SEQ ID NO: 121717 - DNA, 1034 bp, Homo sapiens
aagagttgcatgagaatatgtttttaacatgtaatgctaaattaaataaatattttttccagtaatcaagccaacgcagaactaactgatgacgaacatgagaatgaatcgaaacatgaagaactggcaggtaatttcattggttcttaaatttataatatttgaaaagataatatagcttttaataaagacattaataagaaaaataattaaaaggaaaatcatattgtctcagagctttgaatagagtgggtttgcctgtgttataaactgagctgctaagaaattgttgaaagtgaactgccttaaaaaggtttttttcatagactgcatatagctggttttagcatttttgttcaatctgacagtctctgccttttaattgatgtgtttttaccctttacagcagtgtatttattgatatagttgtttacggttttgccatttgttttcttttcatcttcttgtttttgttgcttttgtccttccttctattgtattacttatagtattccattttattcttattttggctttttagctattcttctttgttgtatttttttcttagttgccctatgagtcacaatatatgtctaccttatcacaatctactttcaaataatgttatatcactgtatttatatgaactctaacaacaataaactctcctcaaccattttgctatttttgtcaacgtttttcttctacatgtcttaaaaacaccacagtgcattattattattgttgttaaagcaatcaattatcatttaaaagtacttttaaggaatataatagatatttatgtaaaaatgtgtatttatccatatatttaccattcccagtgctttgtattccattgtgtagatttgaatttatctcaaattatttttcttcaccacgaagagcctcctttcacatttcttgtagtgcaggttactgctaggaacaagttctctcagcttttgtttgtctgaaaatatactctgcctttgtttttgaggaatacttttacttgatacagaattttatgt

SEQ ID NO: 121718 - DNA, 1009 bp, Homo sapiens
catctattttttgaaatgatatttacactaacgaaggcttctgtctaacctagtaggtttttaattgtacctactttgccaccttgtattttgttatagtaattcatgccacccacagtctatttccaatagtgttaagagttcagcaccaaaaactctctgagaaatgtaaagaacagagggaataaggcagaagatactctttgaagtgtcatggtatactgtattaagtacttgtaattacttcaaagtaattttaaaaaattttgtctcatggtgcaactctttgaagtattctatttaatatgatacagtgccaccaaatagaattataatctttcttttgtgagtgttaggtctgatggatttttatttaatagagcagatttattttatagctactgtgcacaaaattagcataacattattattgtgttgtcatagtggccaaaacaattctttgaacataaatcttcatctgtattaaattgtgtacctaggacttcttggaacaaatgtgagctatttgaaaacaaagaagacttctcagcctgttatggaaatagaagaggagtctgctgaaaagattcaatttcttaagagcagtggaacctctctcttaagtactgatagcttagaaacaaatggtaagaaatgcaagggatatgagttggtaaattattaattgttatgcttatattcagaattacaaaaattatcttgaagcctcctttactgaagcatgtagacagatttaatatcttcctagaggtttagaattattctagagaagctttaaaccttacgtattattaatatgaattcatatttggtgagtgagagtaaatatttgtaaaatttttaaaatttactacataatgtcaataaatgcatcattcaaatcaatgttttcaaaattctgtatattactaaaatatatttgtgctttccatttagaactagtagtttctgagctcaaccatagtagtctcggagtgggattggacac

SEQ ID NO: 121719 - DNA, 1026 bp, Homo sapiens
accctgaaactcagttcttccttatattgaaattctgtttctagagtggtgctatgcaattttgttcagccattatttattcttaaaccctagagaatgtctagaagacaggactgtatcctcccgttttttctttgctgaaaaaaattcttgatcaagttttacgtctttgttgttattctcctggtttacttaattatgaaattgatgctcagagatgtgtgtctgatttttaagttattttggccaaatatgtttgtagctgtgaaattatacgttattgatgagaatgttatttatctatgtgatagctgaactgtgagcgaactaatagaaacatgcttaatgatgaatctgagattcttgaatttacactgtattttcaaattgaatgtcttatatctaattcagctttcagatgattcttttgaaaattcagacaaaacagctagacaatctaaaaaagagatgaagaagaaagatacagtgccttggtggataactgaagatgattttaaagatgatggtaaatgttgctgatttttagtttcaaattatttgaccacaaggggtcagtcaagacttctggattttgttacttcactataaatatatacagaaaataatactaatagtgtggatttttgaagtttgaattgattttcatataaccagtactttattatgtatttattatgtaattgagaatctgcgttataacattatcagcttattttacatggagataatttatatttactcaaattaaggtgacaattcaggtatatttattatcatgtttaatgataaattgatttaaggtgatttaataagatattctggcagtatattaatgtcattgcattgggaagagtttaacaaacctatagaccttggtatcacagtttgttaatgacagtagtaaaaaaaaatttactgccatatgtatatatgtctctcatatatatgtatatgatatgcccaggctgaagggcagtaacacaatcatagctcattgtaacttca

SEQ ID NO: 121720 - DNA, 1035 bp, Homo sapiens
caatctcttcaaaattgccccttggaaaaacagagcgctcgaatgacaagtgtggggaaggcgggaggcgacgatgcggagtgcggaaacacaaggaccaggggagctaaactacatttcccagaaagccacgggctggcctacaaccaccgcgccctccaagcctgctggaagcctccgtctcgcttctccagtaaccggtttgccgctgtccccttttctaaggaacgtagagaaagccagggaaggaaaggcattttactgcagcagcgaaggtttagccactagagtgtctttctcagccgtggttattccgaccttcgcttgtaaaggcattgggaaacccacggcccacgtgaccagcccgggtcatgtgactccagaacccggcagctgaagtctgttaccctgacaactggtggacccgcacagaccttccgggaaagcgcggaattcagaggcagaggtaggtggtaaggtgtgaacgctggtttcccacccaaatcgccctggtcgaggccgtgcttcatactcgagcgaagggctttaattttccaggtcattccccttctccgcccggagcccacggcaaatgcgtctttgtcttccctccaattcccgaacccgcgcttctggggacggggtcgcagccaggcttgagaagcttttagtggagctcacccctgaccaagctattcaggccaagaccttaaccgcacttaccctgaactgatcgaaagtgcaaatgaggggaagaggtgttactctgcacgatggggagggtattgtccgggtctgcaagccctcttcccctcccccatctctacagaagaaagctgggatttgagctgctctagggagttcaggagctgggggtcgacccaaggttgggttcattaggtgtctaggggaacgctttccgttgcaaatcactggattctgcttgtgttcagcacataatttttgtcggtcttccctcgcttcaaaagaaacatagtactgatttgtgtactccattaactttaagtattcttt

SEQ ID NO: 121721 - DNA, 1047 bp, Homo sapiens
cccagcaccttgggaggccaaggcggggggatcacgaggtcaggggatcaagactatcctagctaacacggtgaaaccctgtctctactaaaaatagaaaaagttatctcggtttggtggcaagtgcctgtaatcccacctactcgggaggctgacacaggagaatcgcttaaacctgggaggaggaggttgcagtgagccgagatcatgccattagactccagcctgggtgacagagtgagactccatctaaaaaaaaaaaaaaattttcaagttattgtgatattaagtgcatattaaaacagagtggcagttacagactttgtatctttaattttcatgggaatcaacaacaggaaacctttagctctgtttgagacttcataacagagctgtcattaaacgttgccttttttctcatatctagaacatagatatttctcactccatatgccagccaatttattttggtttacaatatatatgtcttaggttagaattttaatacactagagctgttaggcaatttacaaatgaacctgtgtcttgtcttctattaaatggatttatttttactttaggtacaaaaggaagttacctctgtgacatcttggatgtaaacacttggatttggtatagaataacccattgaaatttctgctgtgcgagggtggtagaaatttacttttttgggtatattcttatatatattatgtacatcgctgtctgaaattttagttattttttgtttttaataaagactaacacaaacttaatgattaaaagtgattgagtctcatagtctttcatttgctagctgtgatccaaattttattagaacataagtcacttgttattgccatttttaaaagagaaaattcataatgatgttatggcaaacagataagactgataaacttcgtattgtatagctttgaaaataattatgcctagtatggagaaacaggaataagatctgattttcttagagttaatatattttagtagattggttttccttttttttattttgtacatagttaactg

SEQ ID NO: 121722 - DNA, 1100 bp, Homo sapiens
tttagtagagatggggtttcaccatgttggacaagccgatttcaaacttgcgagctcaggtgatctgcctgcctccgtcttccaaagtgctgagattacaggcgtgagccactgcgcctggcctaaatcatgttagttttaaagttagctatcaataatatatttgtacatctttttatgttactttgcttttgtggtatgtaaaaacaaaggggtctttaatggataatgaattatctactgtaactaaaatgaatattttagtttttatgtaatatttttggggaacatgtattttttattgcaattcggggcataaatggggaattttagaagcatatattaacctatctaatattctgttttgattggaaaaagtttaaatgcctttgctgtgtgacacttaatccttattgattatcgtcagcagatgtaataaactatatatctctttattattccaacttttattttagcttttcaatgatctgtttaaaaataatgcaaaccgtgctgaaaatacagagagaaagcaaaatcagaattattttatggaggtgatgactgtagaaggagtctatgattacctgatgtatgtaggtaagatctaagtggtttaagacttgtttttcattcatcttacttcttctgtgatgcaaataatgatcttgagtattgccccatcataactgtctttttaattgaagataccttttataataattcaatacgattggccttgatcatattaaagttgctagtgtttacaaataaaatattgaccatggtcatttgtgttttctacattggcaaatttcaaaaataccaattcatctggaacaatgaggtatcccatttgatcctttctcaggacgggtagttttccaggttcctgactggcttcatcatctcttaatgggaactcgaatcctctttaaaaacaccctggaaatgtatactgattactatcttcagtgtaaactagaacagctatttcaggagcaccgtttggtctcactcataacacttctcagaggtttgtattttctaatgtgtttgtttcatattttgtgtactctatgattttaattgaatctaaa

SEQ ID NO: 121723 - DNA, 1025 bp, Homo sapiens
gtcacttctaggtaactaaaatatgggataaaatgtgttaataatgttatgccaaaaataacaaattacaactgtggaataatgtccagctttgtattcttttttctttttctttctttttttttttttttgagacagagtctcgctctgttgcccaggctggagtgcaatggcgcaatctcggctcgctgcaacctctgcctcttgggttcaagcgattctcctgccttagcctcctgagtagctgggactacaggtgcctgccaccacacctggctaatttttgtatttttagtagaagcgggatttcaccatgttggcaagactggcctcgaactcctgacctcaaatgatccacccaccttggcctcccaaagtgctgggattataggcgtgagccaccgtgtctagccagctttgtattcttaatgttttaaatatggcattcttttaggttttgaaattatttgttactcagtgtgtgtgtactcaatttacagttggacacgagcctgaacattggtctgtctatagaagatatcttgaattctatgtacttgaatcaaaactaacagaatttcatggtatgttattctttttggataaaacattacatttcagcattagcattctttaaaactatgacaccagattaatttttttattttaagtaattgaaatacaagaaatacaacattgatgcttgtgtatactttcattgataacggaaatgtactgtttatcttatttttatttatctgtatatttaaagttcttgcaatgtacatttatgctttttttaaataaaatcaaaatttaaaaatagctattttaaaactatattttagaaagggttctctatttactctttttcgttcttcctgtctcatcaatgtatttattttggttaatatcaaggatatagttataaagaatttccagctatttttttttgtatttagcttggtgaattttatttgtgtgttctaaatctttttattttagaaaagctctgtagagtgtcc

SEQ ID NO: 121724 - DNA, 1055 bp, Homo sapiens
ttggcagcagtgcctacttgctctgtgtttcccaggctagtctcaaactcctgggcccaagcaatcctcccacctcagcttctgaaagtgttgggattataggcgctgtccccggcctattatattttcatatacagatgatgtaagaaaacttggagttgatgctagtaacttgttagtttttaactttttacctttactttttcagtagaaaatttaatatcacctagctttcagggtcttaaaaattatcaattgatatgggcatattactttatacttgtatctcatatgctgtagttctaaaggtattgggaatattaaattcatcctggtaatttttttccagattgaagaaggtattgttgtaatggaagatgattctccagtggaggctgtgagcacacctaatactccccgaaaccttgctgcatggaaaattagcattccatatgtagacttttttgaggatccctcctctgaaaggaaggagaaaaaagaaagaattcctgtgttttgtattgatgttgaaagaaatgatagaagagcaggtaggaagctttctgagcacctttcttaaaagatgcccatgaatgagtctgttgttatcaggtatgataaacattttgccacttctaactaacaaatatggctgcatatccaaaagagaagtgtccagaacagaaaattgaaagaaagcttaggatgtcctaggttatcttcatagcagtaactaattaactaattcaatcaacacttattgagtgatgcctgctagacacctgacagtccatcaggcattcaatgcaatgttcttttaatggttttgttgccatcattagccattgcacttacttaattatcattaatccatatagcactgtatcaggtattattctagtttaattaagacagcgttttctctcacccattttgtgggctaattagaattgatgaaaatatggccaggcatggtggctcacgcctgtaatctcagtactttgggaggccaaggcaggtggattacctgaggtcaggagtttgagacccgcctg

SEQ ID NO: 121725 - DNA, 1062 bp, Homo sapiens
ggcactattctttttcttaaagttccatctgaaaatgaagtactgagaaagtaatagtttaatgttttttttttctgtcgcataattttagtccagttactctaaagggatgtttttggttttgaacagatcttaagcattttttaatctattttgaaatattgcaataagaactatattccactagggggctctcatcttttaaaaattctaatcctgttaatattttgaagttaatactaggtaaattttgagtgtttataaataaatattgtcccatttattcatccaccaaatttaaactttaaatactgtgtcatttttgacttctgagatgttgatacttaatccgtgtatgaaaactccaaaagttatgttagctatacctttagtttatcattttcaaaactgtttttcttttttttaataatggttttcaataaactagactgttgtgataatttgctatgtacttgatacatttttgtttaatattcaggaacacacagaaaaggggagaatcatttggaatcagcagaataggtagcaaaattaaaggagtattcaaaagtaccacaatggagggagctatgttgcctaattatggtgtagctgaaggtgaagatgattttgtaagtaaaatgtatcaatttgatttatttataacttcagacttactatgacataaaaattagatatactcattattttcctttttttggagaatctgtgtattctgtttaatactttacctttatcttcttacttcagacttcctttgtatttctcattctttcattagttgtgatagtttcatgacgtgaatctaatttttaaaattcctgagaactgtgttattgcttattaaggcagaatagttcctgttaagctgagatacttctaatagtcaagcagtttaccgtcttttggttaagcttcaaattctgatgttacctttttcccaccatgtactccaggtatacagagttgctaatagatgctctaactccttgcttacttaaactacagtctgttgacaagcagcattggcattacctggaa

SEQ ID NO: 121726 - DNA, 1010 bp, Homo sapiens
tgttttgcttatctgttcatccattgatggacactttggatgcttctacctttgatccagtgagattttgaagaaacaagaatgatttagaaatattttaaatgccaaaatcagaatagcttttatttgcccattttcacaaaggttaagaacctgttttgtagatgtaaaaaaactcctgctgtaatacatatgtgcagattttttgctactgctccatttattttttcatttttctagaaacttacataatatgatacaagttatgagaattctggggagaatacagtagtggaattattttgacttatgtttattattttccactaggatactgtgaatcatttgcttatcatcttcatagatgacagtccagtgagtattgaatatattagaaaacacttcagattgcattgaattttgattttgtatgtcaaatcaagtgggaattttactgagttaataattctctttctttcaaagcctgaaaaagcaactgaaccggcttctcctttggttccattcttgcagaaatttgcagaacctagaaataaaaagccatctgtaagaattttcagcaataacacctttttgatataaacaattttagaactcatttatatagcttaaacttaatctttctcttatatcaaggtgctgaagttagaattgaagcaaatcagagagcaacaagatcttttatttcgttttatgaactttctgaaacaagaaggcgcagtgcacgtgttgcagttttgtttgactgtgggtgaggcttacctgtgtattttacgaaagtaatttttaaaccttttaatgtatttgaatattttaaatcagatctgatgttgtggtacccatctatcattgtactaaatttcatatactcgatttcctttttttttttttttttttgtttgaggcggaatttcactctcgttgcccaggctggagtgcaatggtgtgatcttggctcactgcaacctccgcctcctgggttcaagcgattc

SEQ ID NO: 121727 - DNA, 1040 bp, Homo sapiens
tatgtcgttttgttccctccctactgcatttgtaagttactgcccaatgttgcaactccttgtaaaaattatgacatactgcgacacccaaatccaagaaatggaagatttaacacccagggtttgttttattttgttttgttactttttcacttatataacttatgtactgatttgagtgtacaggtaaaattttcgcaaagcgaacatatgtgtgtaaccagcattcagatcaggaaacaaaacgttaccggcatcccagaactcccctttatgttcctctctagccactatactcccttcagaggtaaccactaacacctaattttgaccccttacataaatcttagctgcttgtttcttcactgtattctgaaaatactgacttataaagttaggaatggaaaggactaacttgctctgtttcttctttccatagcacgtttttggttcagttaagcttcagagtcaggaacaatttatttaactttttgtttgattatgggaatatttagaaatatgtgcatgtcattctaataataagtttttctatttgtggaatttttatgattttccaagtgttttctcatatgttttctttgatcctcattcacataaggatgaaatatacattttgtcatgtgaaagtattatattactgtcgttatttgttttttgtttttttgagacagagtctcactctgtcgcccaggctggtgtacagtggcaacatcttggctcactgtaacctctgcctctcaggctcaagcgatactcctgcctcagccccccaaatagctgggaatacaggtacacgtcactacacccagcttattgttctgttttttgtagatacagggtttcatcatgttacccaggctggtctcaaactcgtgagctaaagccatccacctgccttgacctcccaaagtgctgggattacaggtgtgagccactgctcaccgcctactgtcactatttgtgataataaaattgtttcttggtaatgttacatattcccaaatggtaccatttatttt

SEQ ID NO: 121728 - DNA, 1046 bp, Homo sapiens
tagactgtgttttccatgcaggtagagactatgcagtgcagttcctcactgtattcccagggcctacctctgtctataacaaaataggtacttagtaaaatttttttgatgtagtgaaaaataatcagaattttgttgggatatgaatactacaatatcatcagaaggtattctggaagaatgtagtatagactagttaaacataggtaccaattatgaaatattgatcatttatgcttccttatcctttaaatgaaatatgtatttgatagcatacatcttatgattcttgtatttaatacattacaaaaaattaatcataatttgaaaaattgcttcaatctgatattgtaggtgcttaatgaatgcttgttaagtcagtgaagcggtaacttagaattaggcattttctttggttgtaataattattttcatttatttttaaggtatattcatattttaatgatcttctggtcatttgttgctggagttgtcacattctactgctcactaggacctgattctctcttaccaaatatattcttcacaataaaatacaaacccaaggtaaaattatgtgttcttattgttaagaatcaatgtatatgagcctaagctgtttattatttgaaagcctgctaaagcagtatatttttttaatttacaaaatttgttttctttcaatttcttctcttttttttttttgttttttttaggtactctgctaaaagcagtgattttattataaaatgattttattattataaaaaaatccatccaattttatttaataatggaagtctattagaaaattttcaaaataagatttgtatatgtgtatgcttttaaggtatacaattctcttagaggagctataaaaagaaaatatggtacaaaagtttcagaaagttggaatccacaattttagggtgtcctctattaaccgtgaggacaataaattaaatcacaggttctcaaagctggttgtacagtaaatctcctggggaattaaaaaatacagattcctggggtgtactaccagattt

SEQ ID NO: 121729 - DNA, 1910 bp, Homo sapiens
agaaatgtgcataggtttatcatcaaggatggtaatatcaatggactttagtggttagcaataatggaacaggatggtacattctgataaaggataataatgcatcattaaagatccatgtttttgtaatacgggaaaatattcatgaaactacatacatcattaaaaaacatttgtttccccactttgaaggataagatcctaggaaagagagatgacaggcacaggctctgtctttagaacgtgttcaaattccggctttgttagttttatgatcctaagttcctttctgtctcagtaatttgcctgtataatgattgaaactatagtactgtacctacaccatggggtgaatgcatgaaggtcaaatgaaagtgcttagtgtctgtaccgcctaagtaaattttcgcgataatagtcttcctgcatctctcactgtagcggacaatacagaaaaaaaaatttagaaatgtgatgaattagtaaagggaaaaccccatgagactctataagagggattttacctaatctgccaacctgcctcttccaagcactcggattttggttgggctcccggagccggcgtgaattgagctctacccttgcccgtgagcgcgcaaaagagattttgttggtggggtggcggcctgatgagttgtagtctttattctagggctgttttactcgccacccccccagcccccaacacaccccttttaaaataccgactcaaaggcgtcctcctatccccctctcccttaggcgtcacgcaaagctcggacctgctcccacccggagccgagtgtacggtgaggcgcggagcgttgcggggtcggggaagcgctaccacccgctccatccctctgcgggttcgtgtcacgaagactacagttcccagcgggctccacgagctccggttgcccctcaggcagcgcccggcggctacgggggtgctgtagtttcttccgggctccctacaaccttcttccctctcctccgcaatacaggcagttactgggtgctggggctgtcctttgatttccggaaatggccggtcgccagtgttgtcagagtttccacggaagactgcgcgctactccggccaggagggcggagcggcgagacgctagaggctttgcgctgggtgacgacttcgggcacgttctacggccgttcctctggtcggctggggaccgcggccgcgcacgcgcggcggggggcgtggggctgggcccagccggacgcgacctcagcctgcggcggctaactgccggtaggcgtctgtgtgcgccgccaagtcggtggggcggggacgcgaggtgtggatggggggtcgccttgacctctgcctcagccagtagcgcagtctcggcctcgccgttacggagatggtgccctgggtgcggacgatggggcagaagctgaagcagcggctgcgactggacgtgggacgcgagatctgccgccagtacccgctgttctgcttcctgctgctctgtctcagcgccgcctccctgcttcttaacaggtaacgccgcagcgcggagcctgggcggcggcttttctccgaaggtgcagacgcccggcccgtgctgcttaaccgtgcggaggccgcgtagctgcgggactggggaccagtggggagagcgagctccgcagaggagcggcctcggggagcacggcggagcgtcgaggccggaagcacaggccggtggggtggggttgattgcctcctttcccgaggcttcgtctcctgagctacctttttctcatccatttctcaaaacgagttcttcatcttcgttgcttttcaaaagtgaaatccgtgtgtcggctcaaattgagactgtacacaggcagtcaagtcagctgacggaggagtgttcaaggtccagttcgtagccgcaatt

SEQ ID NO: 121730 - DNA, 10303 bp, Homo sapiens
cttggatagcattattgtagaaacaggaaaactttaaggtctttatgctaatttactgtagtaaactttgaacttcacacattttggttgtgtgcttgtcctacttgccattttgcttttgtaataaatgttcttcaagtatattggaatagaatcttagcagaaatgcaattcaaagtgacaaatttttttttgagtcagagtctcgctctgtcacccaggctggagtgcagtgatgtgaccttggcttactgcagcctccgccacctgggttcaagcgattcacctgcttcactcagcctcccgcatagctgggattacaggcatgaccgctcccagccctaaagtggcaaatttgacagctaaatcaattgtaaaaattctgtaacaggtttattgggagattttgaagatcatgaagaaataaataaggttcataactagagatttgtggtattttgggatgcctatattgtcatcctgatcctctgatcattactactactaaaacttaatctagtacaaataattctgtattaaagttatgtgaattatgcgaagtaaactctggatttaaactgttacaaatggctaaatgcctacttgttaactaagtaatttgatttaaactctaatctctgtctcttttttaataggtatgacgattactactattatggtccacctcatatgccccctccaacaagaggtcgagggcgtggaggtagaggtggttatggatatcctccagattattatggatatgaagattattatgattattatggttatgattaccataactatcgtggtggatatgaagatccatactatggttatgaagattttcaagttggagctagaggaaggggtggtagaggagcaaggggtgctgctccatccagaggtcgtggggctgctcctccccgcggtagagccggttattcacagagaggaggtcctggatcagcaagaggcgttcgaggtgcgagaggaggtgcccaacaacaaagaggccgcggggtacgtggtgcgaggggtggccgcggtggaaatgtaggaggaaagcgcaaagctgatgggtacaaccagccagattccaagcggcgccagaccaataatcagaactggggctcccaacccattgctcagcaaccgctccaaggtggtgatcattctggtaactatggttacaaatctgaaaaccaggagttttatcaggatacttttgggcaacagtggaagtagaaacagtagggcctctgtaaaattggagactgataggttgatcagaaactcaccctaaatctgaacgggtgccgctataatttgtgacatctggcaagatttccctttatgtatatattttaacaatccgcttggacacgaacaaagccacacttctaactgcttctggcgaactgattttatttttaatttttttcaataaagatattcttagatactgaaagaaatagttaatgagtttgcatttgtgcttgagaaaatttggctcaagtccatttggctgtagtgtcaacgatgtttccagtagtgtttagatttggtgtcttcaaaggtagttgattaaaaccaagtgtgtctttaatatcttgtatcagaataactttgtatgttaccaacttaaattgctagaataaggtaaattgatacacaactgctatttttaatttagaactttgacctaatttgggttttcaaaaccattttggctacttgtattctttatgctgttgtttatttcaataaaaaattcacacctaaatgtatacttactaaaattgtgtttacaattcgtttttcacaaaatttcctgcaaatttggttcaaattgtatagcatgtcaaggccaattaaagggttttgtgccttgttaattcttgtgtggaatatgtctgcacattacacaacactgatttattgcagttttctgcttctggtttaaagtgctattttacaacagacttcatgttcccatcaaaaataaaaagataatacatgtagtaagtttaagttggtaagtattttagagttcttaattgtgatgaatgaactgtataaaaggacaaattcaggtagtctcaaagggtttgcaggtcacactgacaagtccactttcagttgcctaaagtttatcctaactaacctaaaactcagattgagtatattgccctcttgactgttttgcacaccatgggactagaaagcagcaaagaaactctagtgtgaaaacaatgggaataggtttgggtaatttgtgagttgcactctaaataatcactgtacttacctaattaaaaataaaacagctttacagttagttttgggtaagcaaatatatatctgaaggataaaatttacctcacagactggtttgtattaaagatctaatagtttggatttttgtttcacattttagtcttgttttggccatatggtctatacttctaacagtaatgatgggaaaatgttagagttttgggggacagactctaggtcaacagtgaaaaggtttaacagccactccccacttctgaacctccatcacccttgaatttaaaggtattatacctgacaataaagttacatgtgaaaaatacatgacttgaaagacaaactttcttaaaaatgtcactaaatttcaaatctcaaggtcaaacaagtctgagatgtttgctttcagcatattttatgattacttcatgtctcaaaaatgggaattacttgcaagttaatgggtaactttaaggtgtgacttcatttaggtttcctgttagtctttttttttttttaaataaaatcagtttgtgaacaaaatggggttttcaaacctcagtccagcctcctcactcaaaggggcaaaaaagcaaccaaaaacctcaaagcaagtaaaaaacaagcaaaaagaagttcatagttattaaaggcaacttttttggctagacagtatatttagaattaccatgttaaggcttgtctttttaatgttatcattatgtatgtacacattattaatttaagatgatttatctaactgattccttttgttacctggctagcagggaaaaggggtcgaggccggtcctgacctgttacaatgaagactgacttgctatgtgggattacaccagaagcttgcagtggagtaatggtaaggaaatcaagcaaccttaaatatgtcggctgtataggagcatattctattgcagaagaccttcctatgaagatcatggaatcaaatacgggacattgaactaatacttggactttgatatgaatttctttaacaattttctctgcagtgcaagttattaaactaaagctactctattttcaaaatgtgttccaacagaaatccttcataactcctagcatggtatcttaataaagaataaagttcttttaaaaatctgctctaagtagatttttccccttttttaaattaaggatcccaacagtggtattttgaaatattctcttgaatttgtgcatttaaattttattgcagtggtatagatgaatgccactgatggtatccttaaattttatttctgctcaccaaggttaatcatgattgtctatatcttttttatagtgatcacttttgaattgtgttcagatatgcagtttcaggtgtaatcatcagagctggttagtcaggcattccagatagtggttcttttcagaacctttttaaaagggttggttaactacctcagtagcagaggattgaactataccctgtctgtactgtacatagaaaatctttgtagataaaagcaaggcttgttaaatatgatatgagggtaagattttaatataccaaatgtaacattcttagttgcctttagtttcagaggcttgtaagacttcctcatgaccatcataacaggccttgcttttgtcgtattttgtggctgaaaaagcagccttgcttcttcagatattgtagttatttggatgtataatagtttagcaagatgttacttttgtaagacatcagatgttcaaaaaagtgcatccgaacttgtactaaatactgcagtgtccctttataaaaagtcagactaaaactgacaattgtacagcgaagcctgacatttggatattttgaagttttttcataaatcatagaaattagtatatggctgtagtttagctttttaggtaaaaggtatgtttcattagtgcatttcttcctgctgatcactgtaaacatgtgaatcagctttccatttcttatgcaggtcatgataacttgtagagtagagtacaatcatttgtgctatgtttttaattttctaaagcaccttgatgacagtgagtgtccagtggtgaagcatcctctattgaaccaccctcaaaaatttttttgccaagtcctaagttgatagcttaaagtaaaaagtgaaaattatagtttcattaggacttggtgtaaagaaatcccctccccccttccccaaagggatactgcagttatatcacatacccaataggcaccacgatgaagatcagagcttatacttaattaaggttttatacacaccagttccccagtaaatgcaaatttaacaagaaaatcagacatgtcatatgttcaaaatgctcatggcaaacaatcattttgcattcctgcaaataaaattgttttatactgtaagctggaggcgagtgtaacttatttttgtaataaagtttttattttttttatgtgtcattaatataaatgtgtgttagtgtagaaatcttctggtttaaaaacttagaattgcacacatttcagtatgtttatttgtacttacataattttagaatagtggttgccaatagcctgtatgtttcacattaattggttttttgttatctaaataaatcattttagtatgttgtatgtcagttactgggatagctgggacatagagtgtaatttaaaatttgtcaataagtattcattggaatatatgtaaatgtgccttgccggttattgaaacttatctacaaaatgagtatggggtgacaaaaattagttcctggtgcttaatgaaactttctgccactgattttatatattaccccgtgcttttttaaagtacatctctctcaaaacttagtgtaagtttgagggctacacaaaacatttacatttcattctaacataatgaatataataggttgtggaaagtgggtaaactaaatgtagccttcagtaaaattgaatctcagtgtaatccttggtgctggcatttctcagttccgaggagttaaatgatcccatctaagaggtcattgccatgcctattggcactttactgtcatagcatttttaagggacactgtcaaggtgtttaagttctcagaattacttgttgggattttaggacaggtttgtttacttaaagtaagaactgcattgtcaaagttgaaagaggaacacttttgtgagttcacaaatgtgttcttaagaaaacattaaaatatggagctctgggttttcaagactatttggcattcttaatttggggacttgggagggaaactgataaaaagaaattgaagaattgatggttatacttaaagaagggtaatgtaaacagtggtgatgaaatatatacacatcaagtgaaattacttgacagtgttcatttgaatgactttgaattcaagccattataattacttttaaaattaaatatcatttgcactgttctgataatgggtgcagtttttgagcaatataatcagagctaaatatgcatgtagtgattagtgatgtgaacaattaacgttctgagaagaaatactaactgtggtattttcaaacttaaatttctgtagtaaaatcagtatcaaagtcttatcagatcaaggaaaaacaggcaatgcatataaacatacttttgaatgttgtgtggcctataaagcaataatgcaatttatatggaatgtcatgggatatgagaaatggaaatgcaaaaataactaatcctttagtaaaaatgtcaacatgttaaagggggaatgttaactaatgtaggttattgctatttgtgatttgtttatgggttcttggctttgacagcttcaaagaatggacagtgataagttaaaagaaattttgtatattgtcaaggaaagggtcttaaatccgagtcaagtcccttccttggggtaaaaaatgtattcttaaagcattctgatgttaaaaagaaaacttaagttatctaaccaaaacagacgcaagattttgtttctgcagactacttggcaatcaaaagtgatcataaatttaggttatcagttttcagaaagttgctttgtgagaaaattttgttagatatattctcccaagcatgctttttgtggaaggttttcagccattgccactgaatcagatgttaaaaatgaagggaaaattgagtgtgcacacacacaactgttgtacactcatgattgcagtttttagcttaagaaacttttctaccagttactgtgaatctgacttaaaatgtaaagtttcctcatgataaaataggaacaacatagaaatggattgatggggtgatctgagttattgtatataaaagtttttaaagaatagaatgaacatcaagctagataggcaaaaattgacacattcagaacagcttttttgactgcgaagccaaaagttgtcagaaacagcaaaagatcccttattattacagagtattttacgtagtctctattttaaggagagaaattaaatagaagggcttcatgcatttaggggagggtgctaaaacttctcaagttcgtcaaacttacaggaatacccaccatgatcattttctctctaattatgtataccacaaaattttcatctggccataggaattcactggtgggtgtaaaattaatgactaaagaaattaagtgacaaatacataaaagaaacagacttgtggggatattgttttaaggtgtattaattactcagtgatgataccactcaatagggcatgccactacttttcttaagatgctaattatgaagcagtgctcacaggcattttttaactagcaaattagtagatggacttttggggtctgtcactttttaaaagtatttaagacttaaattctattagcaccacagtctgccttcagtaatacacctaaaatatttttcaggaccagaagcattcagtttgaaaatttgcagatgcaaaccagtattattactaacgctctgggtcaaagattaggtttttaatattaacagtagtctggtaaatatttagaagtctggcattgagaaacaaaagcttgtacctgactagtatttttatttaaaaaaattagttctgttagcttatttaaattgtgttttatttatccgtagaatttatatttatttcattcctttcatctcactgaaaactgtctgcaggccctttgatttggattagatgtgtgaagtactgtcttttgccaaaaacctcaaattacctgttcttttcaacgtagtgggtttgtgcttgtttggagatcagttcaaaaactatctgtactatctgtactgcctctgatgttaagattttatgtatagcataaggaagctagctctgactatattttcctaagaataaagacctatttttgtagcatgtcttaggatctccaggagtccaagaattattgtgggtgtcctccaattcatcactcttcacttaacagcttttaagtagacacttggaatctttagaggtctgtcgccctttgattatccatacattcgaagtaactagccaatggtgaaaaattcctcaagatatcctcagttgcaatcacattactggaagatgaatagaataaatgtattaggctggtcttaatttttgatggaaatattctgttgtcccgtacttgccattggatttgataaagttagtggtaatttggaaagaatcggggacttgccaatatatttgtgggttttagcttatacccctaggatttcttggttgcgggacgagcagttttggccacttccatcaggacaagactttttaggtcacttagtgcaggttttagtttctattttggattaacaacatttatattgattatcgaaaagaagctttcatcatttcagaacagtcctggaagtttgactttgagtgtgggagaagtcctaataaaccattttggaaattagtgtctccaagtgttacagcttcctaaaatgggtttctaacacagtgggatcaaaataaggttattttaggataatatactgtaaacttaattgactgtctgattttctactttgtctataaagtggcttacaacaggttctaatctagaaaggagttataaaggttatctgtaatgtttatgaattgtcatttcttgccttcttttaggctttcagctgtattctgaaaaggagattgttgtgacaaactcaacttgttttggagagaattttaggaaacctaagggatttggcgttttatatcatttttgatgtgcagtttttgagttttcagggcagaagggcaaagtatttggtgtggacaagttgttaccacagattaaagaataagaccagggcttgctgacaataagaaatttgttaaagagttttgtaggttccatatggtaaaattaggtcttgtaattatagaaacaccatgatatacaagaagagttccagcatacctgttatggctcgttaatagtgttaactttaagttgaaatgtgaataacatggcatttgtgttacatgagtactgcatcatttaaacacaaatttgctaaagctaggtgcatctgtatactaaaacccttatgacatcatttttaagagaatatctttaatatgtcagtatttatgttaattggttgctttaattggaagactcaggaattaggcctccagttgcttttagtttaacacgtcatgaaaaattagaaaagcatatgtacaaattgtatttctcagttttatttaatatttggaatatacttagaggaaaaccagaaataaacaatgttaaaggtcatctataaaaatggcagaatacacttttcatttccactctagagccacatgtatacagtgtagttttggcaaatttcattcatacctctacctcctttgctgttttccttgaaatagtaaaaattcacatgaatttgcagaaattaagttcttaggagttcttcaacagtattaaagacaggttctgttcccttttggtttcctgcctaactacaggtacagttaaacatggaattaaaagacagcctttattgtaaaattgtcatgtaacagatcctagttgatctctggtttcctggagatttatttagcatttgggagaggatcaacaaaggggcacagcaagcagatactgtagttagtattatttttcccttttttgcttactgtctatcgattagtctttaaattactagtacattttatgataaatttctttgatttattttacctccttttagaatggaagctcctcgaagggcagggaaatctgagtaggcaggcatttaaaaatatttaaaatgttcagttgggtggaagtttagttttatttgccaaattaggcttgtgacatgagaatttgacaaaggggatcaaatatttcgaaccatttaatttatggcatggaaagcttttaaaaatgatcacaaagtgctaatgatttaagtaaattaagatgaagatccacatttaaattatcaacgtgacactttaaaaaattataaaattgtcttaagttgagggaacagttggcctagtgacttacagatttttttatatgttaaaataaccctatgtgtaagtgactgttttccttatttgaaattaagaggaaaagggtgctcataagtcatctttagcagtgaacttaacagaatccagtggatcagttttcctttatgctgatgtgtagtttaatttgtgctgctgaacaagacagtatcaatttataagccccctatctataagttctttatgaggtgaggagggggtacttcaagatggaactgttttgctaatgagggtctggttggttttgagtctaaagtttttataaggttcttttgcatagcaatttgaaggtgagggaataatgatacttgagaaaaagcatgaagcctagataactaaaaatgaggtgttgaaagcacctgtttccgagggtagtgtatattgcttactctatcttaaagtaacttagagaaatggttacatacatatgaatagcctta

SEQ ID NO: 121731 - DNA, 1029 bp, Homo sapiens
tcctaaaaagttagttactgatttcctagaagaggggtaattgttcttgaatgtgagagcaataatcactgtcaatactattcaaggttaattttctgttgattgccctgtttggaatttaaaggaagaggatgcttctacatatttctgttacttcataatcagggaattgatcaagttctagtttctgcagttaattgtccagttggacaagttggcaagctctgaacctcaatttcttcagttctaaaatgggatcagacaaaattatgtaatagctctggattatgtgattatccaagtgacccatgcttgttctgggaccaaagaaaatatactttgtaggtttgatgatagtgtaaatgaaggaagactacaaaaagagttagttttaatgctctatatttcaaacacctggatatactaaacagtgtaaaataacttctttttatttctttcagaagacgatatatggttaatttattaaagtagaatgtaagtataggagattatattagataatgtgattagagcagttacatttggtacttgatagagggagatactaaatagaaggtggaggatgtcagtatatctgttaatatttgaaaaggagtacaaactaaaagggatgattgcatgttactttcgtactttaacttgctacagtctttttttttttttttttaagttttaactaagcacgtattcctacataattctcactgtattcctgtgagttaggtactctatcccttagtttgaaatgaggaaactgaggctcagaagtcaacttccttggggtcattcacatagtaagtagtggagttggatttgaactaaggtagtctagtctcccataattttccctcttaaccactataccaggatttctcatctctgtcctcctgacattttgggctggataattcttggtcttgggggctgccctgtgcgttgtaggacttttagcagcatccttggcctcttcctgctagatgccagtagcaccccctttctcagttatga

SEQ ID NO: 121732 - DNA, 1885 bp, Homo sapiens
gccactgcgtctggcaaatttttggcagttacaaataaagctgctattaacatctctctctaagtttttgtgtgcatgtaagttttcaactctgggtaaataaggagcaggattgctgggtcatatggaagtgtgtgtttagttttgtaagaaatcgccaaactgtctttcaaaggggctatacccttttgcattcccaccagcaatgaatgagagtttctattgctctgcattcttacctgcatttatagtgtgttggattttggccattctaatagttttgacttgcggtttccgaatgacagattatattgagcatcttcatgagattctttgccatctgtatatcttttttggcaaagcatctatttcaggtctttcaacatgatccagcagttctgctgcttgatatttacccaaggagttgaaaactttttttttttttatattctgacattcttctaatggattgtgatttgagttaactttgtagggtggggtggtggtatcttagaaatggaactctttggaaataatacaggggggtattttcttccccctaggtaaaagtgctgtttgtacgcaaccttgccaatactgtaacagaagagattttagaaaaggcatttagtcagtttgggaaactggaacgagtgaagaagttaaaagattatgcgttcattcattttgatgagcgagatggtgctgtcaaggtaaatatggtggaattacaggcatctaaatcagactaacaaatttagtcattttagaatctcaaaatagttttacaaattggaggagactttggaagtccatggaatccattcaaactaaaaccttttggttttagtgatgttggcagttttctaagtaaaaatgaaaaataattgaatatctgcatctttaaataaaattatttgactgcctgcatggggctttctcttgtccttcccacattaatgataaatgatattccaactttaaatgaatcataattgtatgaaagtcctatttttatattgacttatctaattttttaaggctatggaagaaatgaatggcaaagacttggagggagaaaatattgaaattgtttttgccaagccaccagatcagaaaaggaaagaaagaaaagctcagaggcaagcagcaaaaaatcaaatgtgagtgaaatttgtatacttaaaaattgtataaattttaatatttatacactaattggaaaataacaggtgttgatcagacttgttaaatgcataacatctctttaaagaagacttgaacgtttgagagtcatagggaaacaccagtgatctaagtgtttattgaactcttactatgaaccatatttgtgaaaataatcagaattgtaaataactggaattttggtaaattggcaagatgaaaaatctgtctagctttttttttgttttgtattgggtgacagagtctcactttgtcactcaggctggagtgcagtggcactctttcggctcactggaacctccacctcccgggttcaagagattctcctgcctcagtcttctgagtagctgggttacaggcgccaccatgcctggtaatttttgtgtttttttttttagtaggggtggggtttcgtcatgttggccaggttggtctcaaactcctgacctcaggtgatccgcccacctctgcctcccaaagtgctgggattacagctgtgagccaccatgcctggcctatctcacatattttctttgtattttacagaatgttcttctgaaaatgtcttaaatattagctgtccaaatatcttaatacattttgttaaagggtggagagttttttctctgagagataggaaatactaaatctctattcatgatagactgtttcttcacca

SEQ ID NO: 121733 - DNA, 1570 bp, Homo sapiens
attggaaatttttatgcagtacttataacttctattttatttgaaataaagccattgatatctaaggccagaaaagtgccattaaaaataattttagtgtttgcataataagaaaaatagccatatttgatctatactgccattttcttagaacaattatatgaaaatttttatctgcctctctgatctaattagtgaaaacaaaagtagtccttacctctaaaaagagcacatgttcttttctggagatttctgtgttgaaaaacttggaaacagattaggaaaataatccggacctagtttttgatagtcttttataaagatgtctagtgaaggaaagagatgatttttcattttgatatttaagtagtatcttagataaatcctttgatccacttgtatttgctagttatttcatctaattttcctggaatggttgcttacttgcagagggtcttacagacgtcattttataccaccaaccggatgacaagaaaaaaaacagaggcttttgctttcttgaatatgaagatcacaaaacagctgcccaggcaaggcgtaggttaatgagtggtaaagtcaaggtctgggggaatgttggaactgttgaatgggctgatcctatagaagatcctgatcctgaggttatggcaaaggtaatgatagtcaagttaaaaatattttttgagggattaatgggagaagggccggggttggggtggggggaacataaaatgaacagtatacatttttttattttttgagacaagagtctcttgtttcccatgtttcccaggctggagtgccatggtgccatcttggttcactgcaacctccgcctcccgggttcaagtgattctcctgcctcccaagtagctggaattacaggctcccaccaccacacctggctaatttttgtgttttttttagtagagctggggtttcaccatgttggtcagactggtctcgaactcctgacctcgggatccacctacctcggccttccaaagtgctgggatttagaggcgtgaggctattgcacctggccctggacacatttttttttaaaccatatttttagagttgggagaaatgttctttactacgggactaggcagtgcgcactggaaataccatgtgcctgcaaagtgaaaatagaaattgatgcgtggatacttagccataattgtatagccatcacaatcttgtaatgaagtcgcctacatgctgtagacagttgacttccattttgtgtgttttttaagagcaatttgagtttttgagaatggcaccattagtttacatggttttggggttaaaagtcttactactaaaaacagtaaattatactggccgcagcagaggtgcttgcagttacatttagccattattaggtatcctgacttcagcagtcagtggagacattgtataagaataaacatcccttgagtcaacactttattacacactggtgcagtaatttgcagttatttgttctatcctttgttctctttttttttttttttttttaagtgacagggtctagatctgtggcccagggctagagttc

SEQ ID NO: 121734 - DNA, 1009 bp, Homo sapiens
cagctaattttttttgtatttttttagtagagacagggtttcaccgtgttagccaggatggtctcgatctcttgaccttgtgattcacccgccttggcttcccaaagtgctgggattacaggtgtgagccaccgcgcccggccttaagtaaacggttttaattattattactgttttcggagacaggttgtcactctgttgcccttgctggagtgcagtgtcatgatcaatgctcactaaccttgaactcccgggcttacgtgatcctcctgcctcagcttcctcagcagctaggactatgagggcaccaccttgctaggctaatttttaaacttgtagaggtggtgtctcactatgttgtccaggctagtcttgaactcttggcctcaagcagtcttactgccttggcttcccaaattgctgggattacaggcatgagccactgcgcctggccattgtttactttttttttaaaaggatgctttactgtgggtaggatctggtagatttgctttagcacaacaaagaactagattttagagaaagtgaagtaattgaaacattctagagaaaatacaaatctcaagtttttttggatgttttttgccactttgtattcatttgcggacatgaatacccctttcctaagtatgttcctcaagggcgcatactttggaagctatctctactgtgttacattttgagattctacttgttacagttctatccaaagtgagtttttaattgaagtgtcattctagttatatataactaaatgttgggaaagtgcctcatgcctcctttgcattatttatagatcagacaagattgaagcacctctgtttctcttttgagtgtctggaggaataccttaggttgaaatagttttaggtatttggcattgtcttttaatactgatacagcaatgaatagtttctctaggttaaatagtactgtagactttatatttgtatgtggacttataaaaatgggttaattgatgttaaca

SEQ ID NO: 121735 - DNA, 2307 bp, Homo sapiens
gagatagaatctcactctgtcacctagacagcaggagtgccatggtgcgatcttggctcactgcaacctccgcctcccaggttcaagcgattctcctgcctcagcctctccggtagctgggattacaggcatttatcaccacacctggctaaattttgtatttttagtagagacagggtttcaccatgttggccaggctggtcatgaactcttgacctcagaagatatgcctgcctcagccccgcaaagtgctgggattgcagacgtgtgccactgcacccggccaagtcttccttttctatgttgtgtgaatattccccactggtttgcataattgagtatgatggaagttaaacagtacaaaattatgttacttgaaagaatataagcctttacaaagagaatttgagaatttagatattttcaaatcatgtctgatttttctcttcataaaagagtgctttgtgttttagagggaattcagatttactggtaacctttgagttgtcaaaattttagtttcagcagttcaatttgaggggaggggcattttagagctctagaaagaggtaccttagaaatcctttagtttgtttttatgatttgttttttgagacaaagtctctgtcacccacgctggagtgtgtgggcatgatcttggctcactgtaatctctgcctcctgggctcaggcaattctcctgcctcagccacccgagtagctgggataataggcgcgtaccaccacacctgactaatttttgtatatttggtagagatggggttatgttggccaggccggtcttgaactccagacctcaagtaatctgcccgccttggcctcccaaagtgctgggatgacaggcatgagccactgtgcctggcaggttggtcttgaactcatggtctcaagcagtcctcctacctcggcttcccaaagtgcaaggattactggcatgagccaccttgcctgtcccaaaatcctttaatctcctataaaagagtagaatatttttgccaagtagcaataaagtagcagtaagtgaaaatgcagaatgatccagtaagcaatgaggtatcataactacagaaagctaatacagtgggctctctctactgtgggtcctgcattcacagtttcagctagctgaggattgaagatactcccaaaaaacccaataaaaaaaaaaaacaacacaccagtgtatgagagaatgttcgtaggttatgtgcaaacactatgctatttaagagagttgagcattcatggattttggtatgggttcctggaatcagtcccccgtatgtgctgagggaccactgcagaatttagctagtggtgtcatccattttttaacattatgaaaaagaatcattaaactgacatcgtaggttacctaattcttgccgtcaaaatgtaccaattatggtaggtgaccactataacttatttatagatgttttccagaaactttacagtaaagatacatcattagaggaagatggtttataatccattagtaacagtgatttcgagtgccagtagacactaggaaatgtttccatttgtacaattgccttgtttaataaatacgttaaattataaaattgcattgctgtaggttgcttagaatatagtcttattaatatagtttttaaatataatggagaaacttctatagataagcattctttttgattggcgtaggaattaacccttgtcctaaaactttctacatttctttctgggtttctctgttgtgatttgaatccttttctgggggcataattattttgtactatctaattaataggagactttgcattttgttgtcttttaaaagatacttttggcagggtgtggttgctcacacctgtagtcccagcactttggtaggctgaggtgcaaggattgattgaaaccagcctgggaaacatagaccccatctgtaccaaaaagtaacagattagccaggcagcgtgcacctgtggtcccaggaggtcaaggctgcaatgacctgtgatcatgccactgcactccagcctgggcaacagagaccctgtctcaaaaaaccaaaaagggggaaaaaaaaaatttccaatggtaggtattggtatacagccagtaggatatattggtcataccatcatttgctttttttgactttttagtaagtttttttgaaacggagtctccctctgttgcccaggctggggtgcagtggtgtgatctcaactcactgcaacctctgccttctgggttcaagtgattcttctgtttcagccccctgagtagctgggattacag

SEQ ID NO: 121736 - DNA, 1927 bp, Homo sapiens
aggttatgtaacgttgcagtttcataaagtttttaaaagtcgttttggctgttacttttttctgaaggacccatgctatcccatgaaatatggcacgtaaatgtcaaataataataggagattttttttccctgtagctcccaagtttctagacttggtatgggaagtgtaatttcttctgaggttggcacaatgcccagaatggcagtatgtacctaggagtggggtttatagggaatttattgggtgagagatccagatttgaaagatgctcaaccaaattaggtacaatcattttttaagatggtattaacatagtaatacatcctgtcttgaaagttgctgatggattggtcttaactttttgttgtccattaagcacactattcagtaattaagtggagactagaaagtaatttgaacaggaccctggacttctgataataatttaggagtataacaagtacacatttaaggggaaattttaaaacagacatcacaaacctgtttttataagggaacatgccaagataattggaaagatttgagcaagatggatgttaactgctaaatatatgggtgtggtctagtgaattaaatgtattaatgacgtttgaacttttcaaggcactcttggaaagaacaggctacacacttgatgtgaccactggacagaggaagtatggaggaccacctccagattccgtttattcaggtcagcagccttctgttggcactgaggtaaagcaactaaaaacttgtaccttttgtagtaaaagcacaggtatctggtttcctaaagcaattctccatggtttttacttaatatttaatttacagatatttgtgggaaagatcccaagagatctatttgaggatgaacttgttccattatttgagaaagctggacctatatgggatcttcgtctaatgatggatccactcactggtctcaatagaggttatgcgtttgtcactttttgtacaaaagaagcagctcaggaggctgttaaactggtaagttgtccttttttccccttcagttttcacgttcactgtctttaatatcaagtttttttcttagtgtgcctaagagtttaccaaacattttttgaagtactgatttaggcaggttttttttttcccacatcactgtgcaagcattgtagtgttattctttgcatgtatagttgataggattcagcatctaaaaggcggcatggtagaattcctagcaattggttcttataaacatctggcttagtgacgtttttgtgtgtttgtttaaatttataggaatgtgaaaagattaagaaaagtaactgtggtaagagctctcatacttcctggccatacctgagccatctctttttcttaaataattcacaaaagacattgtgatacatttctagttgatgaaacaaaagattttatggtgagtggcaatgtttgatttaaaaataccagatgttaggtaaggacctggtaatctttccaacttttttaaaaaggaaatttttcttttttcttttcttttttttttgagaccaagtttctctctcttgcccaggctgaagtggcatgatttcggctcactgcaacctccacccctcaggttcaagtgattctcctgcctcagcctcccgagtagctaggattataggcgcctgccaccacgctcaggctaatttttatatttttagtagagatggggtttcgccatgttggccaggctggtctcgaactcctgacctccggtgatccactcgcttcggcctcccaaagtcctgggattttagacgtgagccaccacgcctggctagaaagaaattttaatattttaaattatagtttatgtaagtcctttaaactagttttattaagttctgtgacagaagtggtttctgcattttatagttgaagagtt

SEQ ID NO: 121737 - DNA, 1059 bp, Homo sapiens
ttaaatctgttctattggtagtcctagtataaagaaacacacccatgatacctctagaatattttttgaaaagctgcaaagccagcttattgacagttgaaatactgatggagaatgtacatttggcaactggcttttttttttaggagtctcaaaccccaatgaatttagaatgttaaccctgctgccctccacttccatcagtatggattattagactatttctcaaagcagctttgacaataagattgtttagtgtgggtatgtagatgagaaactgaggctaggaggaggaggctttttttttggtttaaaatcatggtgaatggcttcaaattcagcttggttttgatatttatattggtgagttttctaatttatagacaatgtggtgattgtattactttttaacctggtgtgctttgtagtgtgccagtgctcttgagccaagcgtatggtttaagaaaatcagttaagggtataggccttgagcattgttgtagtggtgtggaaacagggaaagcctagaatatggaaaaggttggtatatggagttagctgtttaagacaaccatgaattggaggctttcacagatctagctgtgagtgaattgagtttgatctgtaaatctagtttttccataaaagtggagtatagttgtctccattgtaattcagttgtaatcaagtttgcattggtgagctagaactaaagtttttaaacttttagtttgtgacttttagctttcagttttttttgcaagggggtggcttaattttttgtttgtttgtttgtttgtttttgggagacagagtcttactctgtcacccaggctggagtgcagtggcgtgatcttggctcactgcaacctccacctcgcgggttcgagcaattctcctgcctcagcctcccgagtagctgggactaccggtgggtgccaccaggcccagctgatttttgtatttttagcagaggtgaggtttcaccatgttgaccgggatggtctcaatctcttgacctcgtgacccacccaccttggcctcccaaagtcctgagat

SEQ ID NO: 121738 - DNA, 2208 bp, Homo sapiens
cgctgctgggttgccgggcaggcgtcgcagtcactgcacggaagggtaaggggtggggacctgcacagcgcgccacgggtcacgtctcggccgggcgggcggccgggggtcgtcggcgcccggggagcgccaggggcggagagccatgtgtcacggcggagacggcggcgctggggggcggggagagcctgtggcctggcgccgccggtgcctcggtgttcaggggagagattgtgctgctgcagctttctgggggctccgaccgcggcttcgggttgatgttgggaaccagtgatggtcgtcttggtttgggattcgttgggttgccgttgaaggaagttgtaggacattggaaggcgcagagcacgtgtttctaatgggctcctggcggccgcagtggtgagactgccgctctgggtgcggagtcaggggcgggctttggggtgcggggttaaagggtggagaaattgggtggtgggaaggtggcttgtatgagcgctttgttcttcgctggctgttgttaccgatctataagcggcaggcgggaaaagcgcgcactttgggggtttatctttgagagagaggagcccagttttgctttctccacacacacctcattttccgaacgggcacagctgcatgtggcacgctggctcgtacccgtgctgattgggctctatttgtaatatggtttttcctagggagtgttagcaggtgagtcaggggtggtgctgaggaagaatatggtgaatcggtccttctgtgccctgtgctccaaatctggcttgtcaggcgatagtgactgtaaggcttttttaaagggaggtataggctagctggtgtagtaaatggtagagaaagtaaagatggggctctcatattgtcttgtattctttttgaagatcctagtttaattttgcttattgcgtttgaacagatctctggaaacatggctacagaacatgttaatggaaatggtactgaagagcccatggatactacttctgcagttatccattcagaaaattttcagacattgcttgatgctggtttaccacagaaagttgctgaaaaactagatgaaatttacgttgcaggtaagaactaacacttgcaaaattacattatgaaatttttctattggatttctggctttgagctaaaatagcaactttttgtggtttccaataagtgtgggtactggagttttgcttgttgtgatagttggttaatttaagtttgaagtagaggttaagatgtatagagggagggaagaagagaaggttaggagctaaaggctggcttgcatgctggcctgatggataagtatatgatagtagcaacagctgctaaatgttgggaacaggccatgtgacttttttgagtatttttatagtaggattcttcttaaataacttggtaactgtagacttgttttcttgtctttctggtgcggctgttaactttttctggtggtatttgaaattgagtagaggttcagttgtcatgcttggtactttgttggttgattctaggattcgtaagtctgtatactgtaaaaataccgtagtgttcagagttatcagactttggagataaaagatgtaaaagaagttagctgattattgtaagtgtggttggtagggcatatttagttcaggattcagttcagagtggctgaagtgtgtgttttttttttttcaggtatagatgaggggagtagaagaattgtaaaggcacacatgtacctgtattgccaacatagtcttctctaaaaaatcttttctaaaaatattaaaagctgataacttttatttttttcagggctagttgcacatagtgatttagatgaaagagctattgaagctttaaaagaattcaatgaagacggtgcattggcagttcttcaacagtttaaagacagtgatctctctcatgttcaggtaatgttaatgtcaatgtgaaaattaaaaaatttgagtagttttgatactatctgctgaattttattagactcagatatggttattgttaaatattaatggaacatttttttgcagaacaaaagtgcctttttatgtggagtcatgaagacttacaggcagagagaaaaacaagggaccaaagtagcagattctagtaaaggaccagatgaggcaaaaattaaggtatgtctttctatactccctttagttttaaagtcatttt

SEQ ID NO: 121739 - DNA, 1073 bp, Homo sapiens
ttggtttgtagtcagtgtcacagaagtgcagtttaatgtattatgtgtacatatacaaggtctgattggtctaatcaatgatgaaacctatcccgaagctgataacctgaagaaaaataagtacggattcggcttctgagattaagaccagtaattcagaggtggagtaaattttgttgccgtgattttataacagttgtgttataaaatcctgggttttttttttttctgccaacagtgagggtcgctgtctgcccattgatagaggccagattgtcttggaagttccaaagttgcaacgatttctgtaagtggagtttttctgtttgcttagagatcagtgaatattgtgtccttggtcttatctgtgatgatcttatcccgaacctgaacttctgttgaaaaaaaaaaacttttacggatctggcttctgagatggaccgttataaggacaatatttttttttaatacttttaatgcttttacatatgttgtaatgtttgtagtcttgtaagaatctcgtgtttttccttttctagggctagtgccacgaggtttacttgactgttgtgtgaaaagctgataagaaaaccatccagaaaaaagctcttcgttttacaaacatgaaaataaaacatgtaattttggattatgttcctttttgttattacttttaaataggtcctgaaataacatggggagcattaaatggaaaatccactaaccagccttgtaatcaaattactgtgagtgaatgtttcgggtttgtgcagggtacaatgtaagggtttttggatcagtgtaagagtggagagacaggaattagaagtaattgttactaagcaaatcatggaatatttagttttgatgtaactataattttgaaagcctggatgcttaagttgagaaatgggggaatgagatacagaaaataaggagcacaatagaataataatagcagtttattaagtatggtcatgagggaaggttactgataaaacaatctggtaaagacattcaggcttgctaaaatctaggaagaggtcatttggcaggatgggttacataatgct

SEQ ID NO: 121740 - DNA, 1432 bp, Homo sapiens
gggggcccactacagcccagcgccagccagccagccagcccagcttctcgaatcggtcctaagctgaggccgccctgcgctgcaaaacttgtgtccactctcggacccaatctgtcctggacggacttggctcgtggcaggcgaaagcgtcgtttccaactgcagctgtttgaattctggcgccacacccgcgccacgtagggccaagtcggccgccagactcgtaagagacgcttcgcagtgcgcctgcgggcgcgcgccgggaaatggccgggcgcgcggccggcctgcggcgcgctccacaacgcggaacgggcctcagaagagccaccgcgcgcgctcccgctaattcgcgaccacacccctgtctacttccatgtccaataggtgcgagagggcgggacggcctcgttctgactccgggaggctatataaggagctactggctgcgcacttcggtcttttacgtcggccttcgcgagcgtctgggcgggtggtaggtgagtgggtattgcgggctagtatccgagcaaaagatggtggcgcaggccgagttaagagctttaatcctgtgaagacatcttagtgaagagtttagagtgctgagagttgaaagcttgcacgtgggaaacgtgcggccggactgccacatgtactgaggttgagtcgtgacggccacaggctccgagttttggcgtgaggaaccgctgatcggccacgggcgccgaacttgctggcctccggcatgtgcctgagcggcggcggaaaaaccaccttaattggggcggagggttagttttaacagcaaagggcctttactaaaatggcgaaggccttccgtcggcgttgttttaaaatgggaagcctcgaccctgtattgaaactgagctgttcgaaggcggcgttgtgtgcaattcggattaatgaaggggaagggttttgtgtggaaaaacgccttggagtgtgacatttctgcgagaatgcttaaataccgatttcccgcaggaacaatggcgctgtcttcagtggcacagtggagcagctctgaagatgcaaaggtaagagcttagttaagcttagtttccaaactaaaggagtaaacctgttgatttacaggaataggaactgttgcatcgtttgaaatttacttttttttgttagatacacgaaaaaacttccagaacatctgggagaatatttaatggaaaatcgcttggttaaaacctgacacttttaacaggtatgtgttgttttagtactttatgattgagcatagcatttaatccacacctagactaaatcaaattttttttgtcagtgaacagcgttctgagtgtggacgagtagccagtgaagataatgaatgtcgaatgtgactgactagcagcttcattttgaagtaggttgtatggcttaaaagttctgtagtatt

SEQ ID NO: 121741 - DNA, 1082 bp, Homo sapiens
agcagaggaagagagagaaggtaaaacccgcccatggaccgcaagcgtgagagccaaggcaggactatgaactgtcaaaattgtctctgacttctcaccaggccggagaggagggatctagtgcgtgaggtaccagatctcgtctcacttgactctcctcctcttcagcaccaagaacgcctgtcccctggaaacacattctctagggggtggaggcaacaaaggaaaagaacaattgggtcagagcagaatgaggttcaatcctcagtctggagaacggagcaaattcatgaaaagcatagtttaaaagaagtcagaatatgaacagaccagatgacttttaaaccacgaaaacatttctagaataagtgataactaactactctgtttcaccgtgatttagactctactacactctacagaaatcaccaacaatgacaacaggctatatatgaaagctattgaaaagaaagtaggtcaaggaaaaaaaaaacaccaataaggactccattaaaaatcataacggaggagaggaaattgatgctaaaataaaacaatattgtcgagaattattataaatatctacagcatttttttttcctaatgctacaaatagaggtagcattctgaaccacattttacttacaagctgaaaagaattaatacttggcacttgaacaaaagagtagaagaggtgctacaaaaatccaagagcttaaccctaaagttcttaataaaactaatattttttttaccgttagagcattagacaaaagacctatctctcttgcaactgaatagtctacagaaatttagaaacaatgatattgatgaggcacccagtcttttcatttactctgagtgaagtatatttttttagtacaaggatctaaaataaaaatacttcccattgtgggcagcgtcctcttcaaaagatttctagtaattaatggaaagtgttctacatactatgttgtccagaataaatgttttataacgcatcagtgatggtgatgtttttaaagcggcattatataaggtgaccaggcacagttaaaccccttatgaaaaacagtatcagt

SEQ ID NO: 121742 - DNA, 1629 bp, Homo sapiens
gtgtccttttggggcggtttttccagagtccgtttctcatttgctttcgcccttcgaggagtatgatttccactatcctttctgtcccgatcaccccctcacccctgtttcttggagtccttcctatttggcttcctgatgaagtgggagaagactgaggttcatgtggatctgtgctttgggtagtttcaaatcttttctttgcttgcccaagggcactgctcaccagtgactgcattctaaccagaatttggaatgttaataacactgtttgctagtgatgaaaatcatttcatccatggtgaaaatcggagagtttgggactacatttgcacttcattacgagccttacacttaggtttaaaatttcaaggtagtgttgctggctctggtgaagactttgatttgattgtcttgaggaggaaaaagaagacacaatttacacaggtcatatttagagttaacttgtgagtgtatcattacagagaattcgttttggaaaaatactgatcttaacgtagaacaatggttgaccattttagctgagtagattacattttcacttattttttagcttccaaatattgaaatattttctttattatgtcggggatacgtgatcacatacaaaagaatctccgttgctgtatgcactttattgtcacaaattatttgatggctgttcataatcttaaaaacaaaaactgtgagatcaagtggtgacgtctaggaggatgtgcaatgtgaaagctccctacttaggtaaataggtctggtgagtacctgtggcaaaattaaagtctcattcctttgaattttaatatttaaaaattgttgaaatttctcagtttctctactttgcagtacccactcattcttaattggtctttaaagatttattttagagataaaaaaatttctctaagatacccataataggaagtatttcatttgtaagtcgaatcagtttttatataataatcagtgaaaactattaaagtctagctttgctgaaagacattttcccctaatagtgtccactgatagttttaaggctaattactgtaaattctttttttgtcagcagtatttgtaagcaggattaataattctgggaaaatagaatctcatgcaagctggactcccccccgcttttttgtgagtgtgtgacgttgtaaagttatcacttaaagatttttatttatttatttatttttgagatatggagtcttgctctgtcacccgggctggagtgcagtggtgcgatctcagctcactgcagcctccatctcctgggttcaagcgattttcctgcctcagcttcccaagtaactgggactacaggcgtgcgccaccaagcccagctaatttttgtgtttttagtagagatgaggtttggggtttcactgtatgtcggccaggctggtctcgaactgctggtctcgaactgctgacctcaagtgatccacccacctctgtttcccaaagtgctgggattacaggtgtgagcaccgcgtcccgccagacttgagttttttaatgagtgaaacagcattttaaaaatcagaatgaaagtaatttcctatatcagtttcattaagtgattagtcttgccacataaattgttat

SEQ ID NO: 121743 - DNA, 2184 bp, Homo sapiens
ttacaggggtggaggtggctcacacctgtaatcccagcagtttgggaggccgagttgggcggatcgcttgagcctgagcagcatggcgtggccccttctctacaaaaaatacaaaaaacaaaacaaatcaaaaaaattagccaggcgctgtggcgagtgcctgtagtcccagctacttacgaggctgaggtgggaggatcatttgaacccgggaggcagaggttgcagtgagcagagatggtgcactgtgcacactccagcccgggtgacagagaaagatcctgtctcaaaaaaataaaaaataaaaataaaattgtatcttagcaattatcacctagcattttgatacgaagttgagtgaagcaatggttaacaattaaagaatttattggcgcaatctaaatatagtaccagggatactaggagctagaaattatgtcttagtttctaaccttgagattattatttaactttttctgtttaagcttttcctgtaaaactgggatagtcacacgcttcaagaaggcaaagatgaataaacgtttgtcaaagttaatgggcttcagaattaatattctgtcagtgttgatgctcagtgcttgtgtaacccttagttttgcatttactttaaaaaatgaattagtttacattctatgtaatttttatgagcaaaagttcagtttctggagaatgtggtgaaacccacagaaacaggagttgcttatgatccgtagtttatagatttttatttttgagtgaggtagaagattaatagattttttgaattctgagtagcagaatagaaacgaaaggcattaaatgtttttcttattaacagtgttgttttgctcattctggaaataagccacctgccccccctttgcttatttaaatgagaatttgcttaaagcttaagtgggaggagggaagagtaagtagaggatgggcatagtagagcgcccgtcataaattttaaatttttttatatattttattttatttttgagagatggggtcttgctacattgcccaggtatgatcatagcacactacaacctcaaactcttaggctcaagtgatcctcctgtctcagctttcttttctttctttttttttttttttttttttaaaaaagatgtagtttaactctgtcacccaggctggtgtgcaatggcgcaatctgggctcaccacaacctccgcctcttgggttcaagcaattctcctgcctcagcctcctgagtagctgggattacaggcatgtgccaccatgcccggctaattttgtatttttactagagacagggtttctccttgttggtcaggctggttccgcccctcttggcctcccaaagtgctgggattacaggcgtgagccaccacgcccggccctgtctcagccttctaagtagctgagacctcaggcatacaccaccatgcccagctcttaaatttccttgtatcttttcaaagttagctttaatatgggcaatataaccaactcattttcttaaaattgacttagaataagtatatagaataaccagaagtaatttcttgcatttacttgttttaggattattactgtatttattatacaaaaattggttataattggaaccttttagactagttaattgtattagactgggccagtagtcactcattcaacatttctattgaacatctactgtatacaggctaggcaaggatgatcatggtccctggcttcaaagagtttatagtctctggaggaaggtagacagataatcgtagtaaactatgatttatatattttatcactgaggtgagtacagtaaagagggaggttatttgggagttttaaaagaaacattccaacagaggagttgttctaaagagattttaaaataatagttcgttggaaaaattggccattgtaatagttgatttgttggagtatgatatttgctgacagcactatatactggactggccgactggttgattgtaactgttattgaccattgatcagtagtgatctggtggctgacagttgttttgaagggttgaattacagtcgtgtgtgtatgtgtatacatacgtacatgtgtttgtatatatatgtgtgtgtgtgtgtgtgtgtgtatatatatgcaaggacctaggtttagatgttacagaggatataagatacaggagactc

SEQ ID NO: 121744 - DNA, 1013 bp, Homo sapiens
tagaaatatgtgggatcaggtttttggatgttgctatgactagggatgtggtactggcatttagtgcccatgagcttcaatgctaagttttctgaagtgatcaggaccgtcccaacaaatgaaagcgtaattcctctaagtacccttttcagaaacattgaacagaaagaaaaatagtatatctagaagatttttttttttagtccttctactcttttcatattgagatagttaagctccagaaatatactttatttggaacaggtccaggtaaatgatattcaacaatatttaagtataatttatactgaccatgagaggtcaagaaactttctactttcttagcagaaattacaagcaattgcataaacagttagtaaaacaacttttgctaggttaaagagggtagcaaattcagcataattatcctgattaaagaaaagatttgacattttgatataataaattctgtacttttaagaaagcatttatatgcaaggacctaggtttagatgttataggagataaaagatacgggcaactagtgggatataaattagtaagataatatttaaatatcacttcaaaatgacagctgaaaagatgtcaaaaggcagtgtattaactaacaaattgttttgctttatttttatttttttgagacagggtctccactctgtcacccaggtgggagtgcagtgacacagtcacggctcactgcatccttgaccaactgggcttaagcgatcctcttgcctcagcctgagtagctgggaccacaggtgcacatcaacatgcctaactttaaaattttttgtggagacaagatctccctacattgcccaggttggtctcaaactcctgtgctcaagcagtcctcccaccttggtctcccaaagtgctgggactataggcgtgagccactgcacccagcctggttttgcttttttgttgtttgttttgttttgttttaaattgaaaatgtactaattgaaatggttttttaaaattca

SEQ ID NO: 121745 - DNA, 1645 bp, Homo sapiens
gatttcccagaaaaagactcagctagggacctggaagttcaggcagtgagttggaaaaaaggggcttgctgtctatagggagtatgtaaagttgacttattgccctgaaaagtaagatacttttccttgactgtgtccaaacacctctttttaaacttctttactgaggaagagtggcagtacctcgcttgggttttctaggtgtggagagtgaggaggaaatcagggaggcttaactcctaaaatagacttttcaaccagttatctcatttttagccccactttcacccccccctccccattttcagaggcatctagtgctcccagttcctgagccctttggtgattatgcagagttagtgggttttgtttgtttgtttgttcttgttgttgtttttacctaaagcctatttaggagtcacttttcttggagtgtcagtcttacatatgctttccagcttttaagattttatttctttttgttccattcccatgttcctattcttatggatttatgccactttaaaaaaaattactgtagtttcagtgaggtttggggagaggagagtaaggtgcaaagtgaatgtgtccagtctaccatttctacacaaaaccttaaaatacattttaataacttagaagttttaaagagtatttcacattcatcaaaggctcctcagcgggtttagaaggtcaaaactgtaagacattatttgccacctttcagtcgtgtacagtggagttttccaaagtttacatgatgtgtggtattgcagcaaattaagtgcataaactgataggagaaacctgctcttttctcttgtcaggcattgaagagatttgaaaaatgtaaaacaatgcctctcttttcacttttttcagaaaatgcatttttattaaaaatatcttatttatggtaatgtgatgggtttattgttattttaaacttgtttataagtaagtaaaagtctcagtttttgttttgaatatggtgaatgtcagtagttgtaactcacataaacaactctttgggatcctcagtaatttttaagagagtaaagagtcatgagatcaaaatgtttgagaacttctgttctagagaaccctagatgtaaattggaagtggaacatgaatgtaataatataaccataaccaacactccactagtcttatctttacataggacaataatgtaatttaatccccatgtttattaaatgtaacacccccgcggttttatttctcttttattttccctcgtggtaatccttagggcaactaaaggaagctatcagaagttaatctatactctttctccctaaagcatgtatgttctagactctgcttatttaaataatgagaaataaacttaagagccaaattgttaaagtgtgcatttttgttctcaaggggttaaaaattggctcttaaagaaaaaaatttttttttaaattgtttgttacatgtaaacagatacatagtttaatttgtggtatcaaaatatcattgaggatgatgaacaattaggaaaaaaagtcaaaagtctccttaagaggggacaataatgaaaaacaccgcaagaaacagtgtgttagagatcctttaacctcttacctatttcttctatcctaggcttgccccaga

SEQ ID NO: 121746 - DNA, 1032 bp, Homo sapiens
tgttaggggttctcacaaccccctcctcagggtcagtaatttgctagaataactcacagaactcaggaaaatgctatacttactattacaaggtattataaaggatacaaatgaacagccagatgaagaagtacctagggtgagatctgaaagggttccaagcaccagagcctgtctctgtggagttgggatgtgccaccttcccagcacatggatgtgttttccaactcagaagctcttagactactgttgtttaggaggtcttgtggagtacatagccatgattgatcagatcattggccattggtgattgggttcaatctctgcccctttacctcctgcaagactggggggtggggctacaagttccatctctctaatcatggcatggtctttgtagtgaccagtccctgtcttaaagctatctagaagctcctcagcctaatgttatctcattaacatgaaaaagacacttacgtagatttcaagggttttaggagctttgtgctaagaacctaggacaaagaccagttattttttattataccatacttgtatgcctgccagtggcacaaactgaattcaaagactggtcatgaatcttaacatcccttttgattgaatggttgcatcattgaattccaaattttcttgtataatctttcctagttcatgttggttcaaccaggaactaatcccaggttttaattgctctaatcaaaatcaccatgcaagagaatgttttcatttctagcagtccatagttctctgtcattgtcctctgaatcatctagctggtcaaaagattggagagtataaccatttcagatccataagaaatataagttcttctttatttgagggctgtttagaagaaagttaagaattcttctgtgtaggggtcaaaagaaaacttcccttcatcctctgaaggttcactgaaaatcacctgacaaacagcagattaataggagaaatggcatacagatttattaatgaaagggaggtggggaaatgtgggtgattttagag

SEQ ID NO: 121747 - DNA, 1116 bp, Homo sapiens
tgaaaaaggacacgtctttgctgaccatacatgatttattttgttgttcaatattgaattttctgctgcttctacgagaaatagaaaacagatattatttcaaattcttcactgcatgcctggtcaactgttacttgctcagatgtctttttaaaataacttttaaaacttactagggaatagaggagataactcttgccctatttaaaactagccttgatgaaattatgctgttgctggatgaattaatactaatcttttctcctacagagagctgccaaaaatatgactatgactttatttcatttaatattttaatcaatataaactactttttgtttttataaataaaaatctgtatttttcaaaatttttcaggaaaaaacagctgatgagtcaatgtatattttgatttacattttgaatactttttattattccttccaaaacagacactcctagaatatgcagagaaatggaaaacttcagaagatcctttacctttattggaggtatacacagtggctatccaaagttatgttaaagcccgaccttatcttacctctgaatgtgaaaatgtagccttggttctggaacgcttggcattgtgagtagacctttgagtaaataaactagatttagctttaaaaatacatagacacacacacacacacacacacacacacacacacacacacacacacacaacattaaatctcaagtcttatagtttaattttaaatagattagttatggggagtctgcttatgatactagaattactggttttataatttcctttgaattttaataattattcctctccttaccaactttttgttttttagaagctgtgttgaacttttactgtgtctgcctgttgagttatcagataaacagtgggaacaatttcagacactggtgcaggtgagaatctttatctttagatttaatacaggtatatcttatgtcagttttccttactcttaaaaaaattattcagttaaactttaagacatctcaataatgacagacattaattactgatcttattgacactagtatcttacatagagtagatctcaacaaatgtttgctaaatgtatatatacattt

SEQ ID NO: 121748 - DNA, 2898 bp, Homo sapiens
acaatgaataaatgaaaaaatcatgcatttagttattttctttttgtaattcccttttattggaatatgcataagttgtcacttagttcgttatgcaaatctttttattaatggtagatttgggggaaaacttttttaaacacagaggatataaaatgtgtaaggtcttttatgcgtatggatattctgattgcttccttgaggaataactttactcctggcttagattttggggaagaaaaaatacagacttacttctgtaaatacattatatttatttaagatttgtaaatgatgtatttcttatccttgaaattcatctttaaatattagaaggaattgagtactttgtaatgtgatgtgaaatttttaagatgaaagtcttttcagaagtttagtgttatatttaaagcctgataagcttgcttttaaaaatctgttgtaattctttggatgtttatttaatatttataggtagctcatgaaaagctgatggagaatggcagctgtgaattgcattttttagctactctagctcaagagactggggtgtggaaaaacccggtactgtgcactattctttcccaggaaccattggataaggataaaggtaaattttcgagagacagagaaaaaaaagaataattagactagaaaaaataagtgttaaagttgttttgatataatttatctcaagatattccaaagaaggaccatttaattaaatatcttctgaggtgtgcttgaggccctgcgcctttattttattttggggaagatgaatttatacgattatagaatcatagattaacagataaactagaattttttcccaacatctttttaacagaggaattccttctgtaacttctgacaggtggcaatccagtttatatttgataatttatttgatagttgggagaaacagaaatagggtgctgaaatgcttttcctcaaaataaaataagaagtcagtactagaactctttaagtcttttgtctctaagattaaaatgctttctcagtttattgctcagtcttattgtatcccctgcgtttttcttttatgagctcagcctggtatcctattgaaagtagatggctaaattacttatatgtataacacttaatgttttttagagtttaaaatttatatagaccctgaagaaaagtacagttgtattctagatacttttcttgagattatttaggaaaatgtgcccaaatatcaccctaacctttcccaaggtatttaactaaagaagtaaatttttttaaaaaattgtaatatatctaatggaaaagcatgtatttaccactgtaagcttcttccgtcatttattgctgcttttcttgttgatcagtggcaaattctaggaagttttgctatgtgatagcaagttatgaaggccatgagaagggagtgttaagtctattgcttgtgagctcttctggtactttgatgtttacccaaagccttcccagccaatcttcaaacttctctttagattggttattcctactggatttctgtcttcaccattttctccatgctttcttgatcgttctagcagtgtacttgtttcttagttttcacaagaggtttatttttagtatcccctaccttcatggatatccaaaaattagctacagtgttctcgagaccttggaaggagatcctttcattacttaataatagtaatttatttatttacttatttattgagacagagtcttgccctgtggcccaggctagagtgcggtggtgcgatcatggctcaccgcagcctcacttccagactcaagtgatcctttcagcctcctgagtagctgggactgcagacacatgccaccacactcagctagtttttgtatttttattttttgtagagacagggtctccctgtgttacccaggctggtctcgaactcctgggctcaagccatcctcccacctcagcctttcatagtgttaggattacaggcatgactgaccacacccagcctaacaataaatttaaaagttgagaatcttagatttttttttttgccttgccatattaactttattcccaatagattaataccagtatgctttagttctagcaccaaattatactttctgatcttctcagcttttagaaatattagatgtgatatattagtaataatatcaaattacaagttcctcacagtttggaaagtgcttttatatgcatggttttatttaaccatcatagtgaatgctttgaaaaagataggatccttattgtccctgtttttcagatgagaaaatagaggttcagaaagatgagtatttttttcataccacattaccagtgatgagaggcagagccaggaattaaaatcagacctcagcctctccctattaatgccctgttgcatctagcctaataaaatagagttgcacctactctaaataaaggagtaactccttttcccattgtcagtttctgaacagcattttgccaaattcacatattatgctaaagcaggaaaaaggaacctttatcctagcagagatttcaactttatttgaaaagataatgtgcttgatttctttacttgtttgaatgtgcctaacattgtatctgttaaccaatgtctctgcccatctctgtgctgctttatttcttgaccttcatcttgtcatagccactggaataattaggactatgcagccaggggagttttctgcaaagtagatggattgtaggtagccaaactaatacaatacagctcatgaaacaaccagagagatgttacatgatggagagatttgcacccataatctagcctgcagcaagtttgaagagaataataagagcccagaaaatgagtatacctctataggttatactcattcgtttgtttatag

SEQ ID NO: 121749 - DNA, 1051 bp, Homo sapiens
gaaccactagaaggttttaaacagggaagacaatcaagtgtgtgctttaaagtaataccagaagcaccctggattctagtgaagtgatggaggtggtaagagtagatggagacgactagtagattgctacgaagtagtctgattagtgatttgggctgggttgggttgggttgggggagcaatatggaagtggagatgaagaagagttaatggaattgagtatttaggcattggaagtgacacaactaggtgatagattgatgtctgggtgaaaaggaggtaggagagagcatttttaaggcagactcctaggtttctgccttgagcacaactgaatagatggaaatgtggagatgacacgtaatgtggtgtagagatattgtatgctgagtttgagatgcttttgaaacagctagtcaaagatgctgcaaaggaaatcatgcaaatctgggcatgagaataggaacccagtaaatgagttgaccccactttagggggaatctaggacctagtgtaacctgtggtacatagtacacaattaattcttgtgtaattatttatcacagaaaatcaactcatattttgtatttaattatctttaatgtaggaattagtggtttccttttaatattatgaaagtgacatggcccggcgtgggggctcacacctgtaatcccagcactttgggaggctgaggtgggcggatcacgaggtcaggatatcaagaccatcctggcgaacacggtgaaaccccatctctactaaaagtacaaaaaaattagccgggcgtggtggcgggcgcctgtagtcccagctacttgggaggctgaggcaggagaatggcatgaacccgggaggcagagcttgcagtgagccgagattgcgccactgcactccaacctgggtgacagagagagactccgtcttaaaaaaaaaaaaaaagaaagtgacataggaagaaggctcttttacatttttaatcaaattggctaaatatcatttatttatattgccatgtgaagtagtgttatctatgtcacatagctttctt

SEQ ID NO: 121750 - DNA, 1711 bp, Homo sapiens
gaaatttgatacgtctaagctactcaaagataagtctgagaagcatgaaaacagtctttgttgcaatattgtaacattataaggaaaaacatcttggattgcagagaaatagaaagatgcagagaagtgggaaaaaaaagtagtgaagaagtagagggagagaagtgagctttcaataggactgaattgagtgtaaaccacttttgatccatttgaatcatgaacttcagaatatataattatcttcctttaaaggctgatgctacttcacaggtttttactgctgtaaggtgccattccaatgagaagtagacccagtagtcaaatagaaaaaaaaaaattctttttcttacctcacactgtataaagctagaagtcagaagactcattctactcctcgctatgtcattaactggctttatgtccctaggaagtcacttgccttctctgagcctcagtttactcatctgccaaatgatggaacagacaaaatgatctataaatttccttctactcaaatattctgtgtatttttgaaatccattttgccctaagtgtggcagtggtttcccatcattaagagacaaacaaaagcctatggctttgaaatttgcaatattaatattcttctacattgatttaatgcagaaattacacaatttgtcgttctaacttaaatgctgctatttgagaatgcagggcctatttgagattgggaccatcagttttgtgaaatacttcccacctttaagttatttcttcaccatgatcttttagagtgtgttgattgtgacttttttgtgagaatatttgcaataattcccagactttgtatctctagagtttcctttggagaaaattgttgaattaggaaactaaagctcttgatagccagaataactttattataactttgttttttagtcttatatttaaaatcttttgctttggcagtgaactaaactgtaactgcattgtaattgtcctaataggataatgcaatattaaaaaagaaaagtaatgccctttatctcataaagacatgtagtcagaggcaccagaaacatatgctttatttatctgtgcttaccctttatgccttttagtgtaatgtaaagaatagagggtagcaggtgaaaaggtctagacttcaagaaaaggattagatttgagatcttgtgttctatagcttatatgtttatggttttaataccaacgagccatgatcatagcattttatagaagaatcttttctatagtggagtacagttagatctaaaaatgaaagtactagagggaaacaaaggatattacaagaagtaaagaacatctctcattttctgtattctaacctgcaaattacttaccagatgtatctttcagtctgttaacaagcagagaagatactgtgttttattcatggagcattttaaatgttattactaaaagccttcccaaggtttcaggctagccattgtcaaataaatttttaaacatgatttctattctggtaaagaacacttaggaaaaacttaaacttgttaaaacttaaattctccttcataaatacaaaaaataaaaatattaattcttatttgtagatgaccaaacaagcactaggggatagtcagaggtttgaacaaagtagaaatgttttatgcataagtgactgttttgagtttattcattgatgttttaaaaataacgacat

SEQ ID NO: 121751 - DNA, 1027 bp, Homo sapiens
ttactcatcgtggaaggttgtaatgccctagcattacagattttagggatgctaactgctggtgttgaagaataactgctgtaggaaaaaaaattagtgtaattttaataacattgactattagcatttaacacagaactattttcatcatcaacaagtttattcagctcattctaaatggtcccttatataagggccaaaagtacttaacttttaaaagttagcaatataatctcttcttgcttataaggtcaagtcttttgtgatagccttactagcaataatagaaaattgaaaaaaagcattttagttcccgtgtttaaaaatatttcttataagtgttggtattgcaaatgaattattaccaaatgttaataatctattatgtcttgttttttaaagtgaatgaatttttagcttttgagggtcccatcttgttggatatgagaattaaacatctaatcaaaacaaatcagttaagtcaagcaactgctctagcaaagctgtgttctgaccatccagagattggcataaaaggtagttttaagcaaacttaccttgtctgtctttgtacatcatcaccaaatggaaagttaatcgaagaggtgagtatgttttctttcattagtaattattttttaagttgagaaattaatttttaattagaatgtctttgatttccttttctcttagatagcgaagagatcattgtcaatcttacatttttggtatgttcttgagtggtggcaacttgattctaagtagcttttagaattatatgtaaactgattgcacctagtttctgttttaaataatatacatcttttaaatgctttggctaaattgtgggaaagatagtggtggcttaacagtttagtaaaatatctatatttgtcagcttttggccttaacttcaatcttgtctgacttcaagatacttgcacatcttttaaactggctaatttaagtaactttatagaatttttgtgacttatctctggaaatactttgtcatataaattctata

SEQ ID NO: 121752 - DNA, 2746 bp, Homo sapiens
ccctgcccttaaggttcatctgacctcccttccccttccacagatttgtattaagtgaatgattttttctgtataagcattgggggggattgggggaggtgggatttaaaggtgaataaggggtaggcccttcactaaagaagcgtatctcctgttaggaaactgactatctaagcatagagttgttgggttagctttgaagttgaagactgtgaatctgtgtctcaagtaaaaatctagtaaaaaaaaaaaaatctgtatttctagctctctgaataatccagtcttgcaatactgagcctaagttccttcttggtttaattatccagagttgagtaacaacagtccagcctactctgggagatgatcaggaaaattctgtgaagaccctgggtacttccagtgtcatatggaactatttccctcccccccacttctcatgttaagcaggtagaattaagacttttcatgttcataagcagggttcactaaggtttatatactccatcccaggaaaaaaactagatcatatagtgcagaacaggacagatagatgttaagtctacacttacatagcactacacatatatagtaacattactttgttaaaagtcccttgttacaaagtaacaacattactttgttaaaagtccttttttgcttagagatgattgctctttaatgtttctgttataaacacattagaaacttattcattgttccatatgaggtgagttaagatttattgtccccaacccagagacattgccccctttagaagaggtgtgcaccatgtgctctctcacttgcccaccctactctttgtccacttcattaatgtacgttacttgcctgtttcttacaagtatttgaggtttggttttgtttacgtgttccttaaaggacagtgggaacagactttgttagaaggagtcagcaatggcctggattggtggtgatctttctgaggaaatctttgtccaagtgaggcaagggattgactgtttcccaggaccctttcggtgtgatagaaatagcagctagttgataccccataggttgttttttttttttttttaaaaaagaaaagaaatagcagctagccttggtagatggcagaggaatggggctgggagagattaagtgtttatctggcctttctggaaggaatgaactttggtctggattcttggtatagtagtaaaaaattaagttagcagtgtctagtttagatccaatatttctatttgttttatcattaaaatatagaagtttaaaaactaaaactttctatcttgtatctctgtagctgtctcatttccctaattaatactccactaggtaattattattaagattaaaatttgatatataatctttctgacattcttctatgcacatacatgcatttttaatacttaaaatcgcatacacactccctggttgccggtcccttttccctctattattgtggacatgtttccatatcatttcatatagatcaaccttattctttctcatggctacataattccatagtatgcatttgtaatatctttaaccagattggtagacacttacttatattgttgccttttacatacatccgtgtatccttgtggggagtatactggtagggtaaatttctggaagtgaaattgctggatcaaagaatcaacacattttaaattgataggttcaaactatcctccagaaaagattatggcaatttatgtttccaaaaacagtgtgaaatatcttcttagagattattagtcttaaatatttgctagcccaagagttaattttgattaactcttgattttatattttcttagttatgacaggtttaacatttattttctatatggaaagcaatattattttgataagcaaatcaattttttaaactgtttgtttgtttgtttttttggagacagagtaagcttgctctgttgcccaggctggagtgcagtggtgtgatctcagctcatggtacctctgcctccggggttcaattaattttgcctcagcctcccaagtagctgggactacaggtgcacgccgccatgcctggctaattttttgtattttagttgagacagggtttcactgtgttgctcaggctggtctcaagctcctgagctcagacaatcctcctgtcttggcctcccaaagtgctaggattacacacgtgagccaccgcacccaactgaaactgtttttgaaatgtgattacagccaatactttttaaaagtatacttcgtaaattcatataaaatattgatagtgttctatattttttgaatagttggcataaagagccattttaaaacatacaaattattatttacatctttgaaataattgttatgctttacaaagggactttattcagcataatgtgtctttagcaaacagatcattctaattggttttaaatattttattaagagttctaaattttctggtatttaaatttttgctcatttgtcagagcaatagagaatagtccctatataggtaatatactggtaatctctgaattttgcttctttggatttttaaatcttgttcattggtggctatgtttcacttttcatgattttaattagtaatttactactttgtatatgacttccttattcctgcattctatttaatgtcatattttttcaagacagccatctagtggcaaataagagaaatgaaggatcccaagtacaccatgaaaattgtttcatt

SEQ ID NO: 121753 - DNA, 1136 bp, Homo sapiens
catcagagggagaccgtggaaagagagggagagggagacccgtggcggtgggtgggggagggggagggggttttattttttatttgattctgttttttaattttttattttttcttcagacagagttttgctcttgttgcccagcctggagtgcagtggcaccatctcagctcgctgcaacctccacctcccaggttcaagcaattctcctgcctcagcttccaagtagctgggattacaggcacctgctaccatgcctggctaattttgtatttttagtagagacagggtttcactatgttggtcaggctggtctcgaactcctgacctcacgtgatccaccccattggcttcccaaagtgctggaatttcaggcgtgagccaccgggcccagcctaagagtggcttaggttttagaagaacaacaaaaatgataagattaaaaataaatgagactttcaagaaatacggatttttattaaacccgaacaagtaaaaatctgtatttagcagcatatgaatatatggccttagtattcctgtgcaggtggaattctggaaagatcacagactatgaagctaaacttaggttgacatcttgactttgccactaagtgcataactttgagcaaagaacttaacgcttaggccttctttctttaaaagaagtattagcattggctgagcaccgtggctcatgcctgtaatcccagcactttgggaggccgaggcaggtggatcacgaggtcaggagatcgagaccatcctggttaacacagtgaaaccccatctctactaaaaatacaaaacattagctgggcgtggtggcacgcacctgtagtctcagctactcaggaggctaaggcaggagagtcgcttgaacctgggaggcggaggttgcagtgagctgagatggcaccactgtgccccagcctgagcaacagagcaagactccgtctcataaataaataaataaataaatatataaaataaagtggtggcatctaccaggcagcattgcatgagtgtcacagggtaattgtttaacgtaattttgaataaaatatattgtgatgaagtggaaagagcttggattttttttttttttttttttttgagaccgagtgctgctgtgt

SEQ ID NO: 121754 - DNA, 1949 bp, Homo sapiens
cttaggatgggcgtgttgggatgtagccccatcataagtcgcagaccatctgtatataaaatgttagtgataatacctacctagtgggaaagttacgattaataatatatataaaatgtctgacagtgtgtttaacatattgtagatatttttaaatctttactttataaatatatatccttcggtctttttttatttgcttaaatcaagttgcttataaagatttgttgaaaaagaggcagagagaggagtagtgggaacaacactgtaccaggtagcataagactagatttcagtcttaactcttccactaacttcataattcctgtgggtaatcatttatgttgaacacacgatttttttttcttgtcttagtgttttctaagaaggcccaatttaatgtgtaaaatagaacctgtgaacctattgccccacagcgtttatccttattatcaaagattgacctcaggattacccgcattctccatttacatgcttgttgaatcctaaacacattacattttacacatgcacattttgcttactcaatattttatgaaagagagaaaatcaactaggagaggcatagtctctgtggtacgtgagtgctaatggtctgttttgtcttcagttctttttgccatctgtcagttgtaccatattggaattaatctttctattctgtggaacactggtaatttgtgattgtatgctgtttgtcagatcccttgtcttatagcagatgcttgtagcaatcacaggtaaagtctgttcgttttatatagtacatcattgtaatgaggtaataaattttaatttttttaaaaagaaatcatagatgtaagtgcatcattaaatgaagcaagttgccttcatctaggttatacgtacacatgcatgactgttggcaagctttgagatggagtaaatttatatgaaaagaaaaatagtggagatttatagaaaattgaggtgagcttattttaaaagtggtacagttacataaaatgcttcatactatatttttccctcatgaatagatacgtagtttattagtctatacccagtgtacctctctgtgtgtctctgttgattctaatgcttgtttaaatcagtggataaaaggggaaaaaataaaagtactgcatttttttttcatgatcagatctgatttaatgggtagagattgcttatagttatcatcagttagttacatataaatgcttgtaaattcttaaatagttggttctccggtgtttcttaattttctcagaattactatataaatttctactggctataaagaaaggtttttttttttttttttaactgcagccagtctttgtcccagtaatgacaaattataactgacttgatagtgtatgaattaatggcattttattcataaaaactatctaaatatttaatgaaaactaaaggtatattgctctatattctaatataaaaccattttgtggcatatttctattggctttttctttagatttcagaagttgattgcaaagatgcactggaaatgatctgtaacttagaatctgagggtgatgaaaaaagcgctcttgttttatgtactgcgtttttgtcacgtcagctccaacaaggagatatgtactgcgcttggtgagttgatctttttttttttaaagaaatatttgttaaataagaatgcaaaataggctgtgagaattcatataacttaggaacataatttaaaatctttttaagacaaaaggcttatatttagatattacatgctgtgcaaacttattatcgagtagttgttacaactcaaaactttgtgtattaaaggccacacaattccttagcatgcataccaggaattatctttggtcaggaaatttttaagtgttagaaagtgaaagaaagacttgttttgtctaatgccaccataacatttttttagatat

SEQ ID NO: 121755 - DNA, 1653 bp, Homo sapiens
gttggtttttacaaaggcatcaaaagctgagtttcatatgctaagcaaaagcagtccattataagctcttgaagggcaacatagaagtttatgtttaagaaacactgttgaagataagcagttgtgagttgattgatgactcagtagtgagggcagagttgggcaaagaagtagtagtacagagttcagacagaaaatcacctggaaagccagtaaatcaactgggaaattactgtggcacagattggtttcttctgggttttttgtcatcattggttcttatattcatctaataataataaccttattgtcaattttaaatttgttagaagataaaagagaaatgctgtttaaaaatcatgtcattgattttttttatatatatattatatatacacatgcacacacatatatacgtacacacacatatcttgagctttcttattacataaagttcacatgtggctcaaagtcatcatctgtaaaacttgtttaaatgttaaatgctggccgggcacagtggctcatgcctgtaatcccagcactgtgggtggccgaggtgggcggatcacctgaggtcaggagtttgagaccagcctggccaacatggtgaaaccccatctctactaaaaatacaaaaattaaccaggcatggcagtgcgcgcctgtaatcccagctactcaggaggctgaggcagaagaatcgcttgaacccgggaggcaaggttgcagtgagccgagattgcgtcactgcacttcagcctgggtgacagtgagactgtctcagaaaaaaaaaaatgttagatgctttcctagtagaaggtagtgcttctctgggactgaaaaatattaattaataaaatgataaatcatattctgattttatttggtatttagaaaattgggatctgttttcttgcattttaacttaagcatgcatataggattggaatataaaaccagttttaatttcaaatgtaatgactggactgatgtccatgattattaccttactgctccaacttttcttattataactttttttttttaagggaacttactctcttttggagtaaattacaacaaagagtagaaccatctatacaagtgtaccttgagaggtgtcgtcaactttctttgttaacgaaaacagtatatcacattttcttcctgattaaagttattaattcagaggtaagaataatcagaatatttttaaggttaaaatgtgtacattatcattaataaaagactataacttttatgattttggctcccttttcagtgatttttaaattttttcagttagtcctttgaacattttcttgttagtcctttaagatatttgatacagaaaaacttaaaaatgcagttgagaaccagggacttgttcttagccagaagaaaagtaatatgtaatacttaaattatatcattcttctgttttggttctaggggttatactactttgataatttggctatagaaatttaaaaagtaggctgggcgtggtggctcatgcctgtaatcccagcactttgggaggccaaggcaggcagatcacaaggtcaggagttcgagaccaacctggccaatatagtgaaaccctgtctctactaaaaatacaaaaattagccaggtgtggtggcgtgc

SEQ ID NO: 121756 - DNA, 3097 bp, Homo sapiens
ttttgtttcagttagattgcttatgcaaacaggaagtaagagttacaataaggatgacatttattgatcatttactatgtgccagacattatactaaactataacacatatttaatctcctttaatacagcagtttaatgaagtttaagtgctgttttgacctctgttttataagtgggatgggaaaggtcagaaaagtcaaataacttccaagtttgcctagccattaaataattccataccaaagtcttagcttctaatacttaaacattttctgcccttctatgcagttcattttacatacacacataccagactaagctgcagtgctttagaaggggaatcctttcataagttgctattgcaagatttgagtaaaacaaatctcaatcttaactaaattctgaaataaattagtgttgattagtgtagattaaattaacatttcctatttgctttttcacagactgaaggggctggacttgctacctgtatagaactgtgtgtaaaggctcttcgcttggagtctacagaaaatactgaagtgaaaatatctatttgcaagaccatttcatgtttgttgcctgatgatctggaagttaaacgtgcttgtcaactgagtgaatttcttattgagcctacagtagatgcgtattatgctgtggaaatgttgtataatcagccagaccagaaatatgatgaagagaatcttccaataccaaattctttacgctgtgagctgttacttgtattgaaaactcaatggccctttgatccagaattctgggattggaaaaccttgaaacgacaatgtcttgcattaatgggagaagaagcatccattgtgtcttcaatagatgaactaaatgacagtgaagtatatgaaaaagtggtagactaccaagaagagagtaaagaaacttctatgaatgggctttctggtggagttggtgctaattctggccttcttaaagacattggtgatgaaaagcagaagaagagagagataaaacagttaagagagaggggatttatatctgctcggtttaggaattggcaagcctacatgcagtattgtgtgttgtgtgacaaagaattccttggtcacagaatagtacgacatgctcagaaacattacaaagatggaatttatagttgccccatatgtgcaaagaactttaattctaaagaaacttttgtccctcatgtcacactgcatgttaaacaatctagtaaagagagactagcagctatgaaaccattaagaagattgggaaggcctccaaagatcacaactaccaatgaaaatcagaagactaatactgtggctaaacaggagcagcgacctataaaaaagaatagtctctattcaacagattttatagtgtttaatgacaatgatggttcagatgatgagaatgatgacaaagataaatcctatgagccagaagtgattccagtccagaaaccagtacctgttaatgaatttaattgccctgtaactttttgtaaaaagggctttaagtactttaaaaatttaattgctcatgtgaaggggcataaagataatgaagacgccaagcgctttcttgaaatgcagagcaaaaaagttatttgccagtactgtaggcggcattttgtgagtgttactcatctcaatgatcacttacagatgcactgtggcagtaaaccatatatctgtatacagatgaaatgtaaagctggttttaatagttacgccgagcttttaacccaccgaaaggagcatcaagtctttagagcaaaatgtatgtttcctaaatgtggaagaattttttcggaagcttatttactatatgatcatgaagcacaacattataatacgtacacttgtaagttcacaggttgtggtaaagtttatcgttctcagggtgagctggaaaagcatctggatgatcacagtactcctcctgaaaaagtgctgcctcctgaagcccaacttaattcatctggagattccattcagccttctgaagtgaatcagaacacagcagagaatattgagaaagaaagatctatgcttccttcagaaaataacattgaaaacagcttactagcagatagaagtgatgcttgggataaaagcaaagcagaatcagctgtgaccaaacaagaccagatttctgcctctgagctcaggcaagctaatggaccattgtcaaatggtttggaaaaccctgctactactcctctacttcaatccagtgaagtagctgtgtccattaaggtgtctctcaatcaggggattgaggataactttggaaagcaagaaaactcaactgtggaaggcagtggtgaagcactggtcacagacttacatacgccagttgaagatacttgtaatgatttgtgtcatccaggtttccaggagagaaaagaacaagattgctttaatgatgcccatgttactcagaattctttagtaaattcagaaactctcaaaataggtgaccttaccccacaaaacttagaaagacaagtgaacaacttgatgaccttttctgtgcaaaatcaggcagcatttcaaaacaatttaccaacttccaaatttgaatgtggagataatgttaaaacatcatccaatctttataatttacctcttaagacattagaaagtattgcatttgttccaccgcagtccgacctaagtaattcattaggaactccatcagtgcctccaaaagctccagttcagaaattcagctgccaggtcgagggatgtactcgaacctataattcttcacagagtattgggaaacacatgaagacagcacaccctgaccaatatgctgcatttaaaatgcagcgcaaaagtaaaaaaggtcagaaagctaacaacttaaatacaccaaataatggaaagtttgtttattttttgccatcaccggtgaacagctcaaatccattttttacatcacagaccaaagccaatgggaatcctgcttgttcggcccagttgcagcatgtctcgccacccatttttccagctcatttagcaagtgtgtcaactccattgttgtcctcaatggaaagtgtcataaatccaaatataacttct

SEQ ID NO: 121757 - DNA, 6445 bp, Homo sapiens
actaattcctcctttctaaaggggggtaatggtgaaaatgcagtttttccttcacaagtgaatgttgcaaataacttcagtagcaccaatgcccaacagtctgcacctgaaaaagttaaaaaagaccgtgggcggggcccaaatgggaaggaaagaaaacctaagcacaacaaaagggctaaatggcctgcaattatcagagatgggaaatttatctgtagcaggtgttacagggcttttactaatcccagatcactgggtgggcacttatccaagcgatcttactgtaaaccactggatggagccgaaattgctcaagaacttctacagagtaatggacagccttctcttcttgccagcatgattctctccacaaatgcagtaaatttgcagcagccacaacaatctaccttcaatccagaagcatgttttaaagatccatcatttctacagcttcttgctgaaaatcgctcgccagcatttttaccaaatacatttcctcgatctggtgtgactaactttaataccagtgtcagtcaagaaggtagtgaaattattaaacaggctttggaaactgctggcattcccagtacatttgagggtgccgaaatgctttctcatgtttcaacaggttgtgtctctgatgcatcacaagtaaatgcaacggtgatgccaaatccaactgtaccacccctgttgcacactgtatgccatccaaacaccttgctgaccaaccagaataggacgtcaaactccaaaacttcctccattgaggaatgtagcagcttgcctgtttttccaacgaatgacttactactgaagactgttgaaaatggtttgtgctctagttcatttcctaattctggtgggccatcacaaaattttaccagtaacagttctcgtgtttctgttataagtggtcctcagaacacaagatccagtcatttaaataaaaagggaaacagtgcttctaagagaagaaagaaagttgctcctccactaattgcacctaacgcttcccaaaacttggtaacaagtgacttaacaacaatgggactcatagcaaagagtgttgaaatcccaactactaaccttcattcaaatgtaattccaacttgtgaacctcagagtttggtggaaaatctaacacagaaattaaataatgttaacaatcagttatttatgactgatgtaaaagagaatttcaaaaccagtcttgagtcccatacagtgttagcccctttaacattaaaaactgaaaatggtgattcccaaatgatggctttgaattcatgcacaacttcaataaattctgatttgcagatttctgaagacaatgttatacaaaactttgaaaagactcttgaaattattaaaactgctatgaattctcaaatacttgaggtaaaaagtggatctcagggtgctggtgaaacttcacaaaatgctcaaataaattataacattcagcttccttcagtaaacactgtgcaaaataacaaattacccgattcttctccgttttcctcctttataagtgtcatgccaacaaaaagtaacattcctcagtctgaagtatcacataaggaggatcaaatacaggaaattttagaaggcttacagaaattaaaattagaaaatgacctatccactccagcatcccaatgtgtactgataaatacatcagtgacactgactcccacgcctgttaaatcaactgcagatatcacagttattcagccagtttctgaaatgataaacattcaatttaatgacaaagttaataaaccctttgtgtgtcaaaaccaaggctgtaactacagtgctatgacaaaggatgcactatttaagcactatggtaaaattcatcaatacactccagaaatgattcttgaaattaagaagaatcaattgaaatttgctccctttaaatgtgtagtacctacatgtacaaaaacatttacaagaaattctaacctccgggcacactgtcagttggtgcatcattttacaactgaagaaatggtaaagttaaaaattaaaaggccttatggaagaaaatctcagagtgaaaatgtgccggcctcacgaagtacacaagtgaaaaaacagctagctatgacagaggaaaataaaaaggaatctcagcctgctttagaattgagagcagagacccaaaatacccacagtaatgtagcagtgatcccagaaaaacaacttgtagaaaaaaaaagtcctgacaaaacagaaagttctttacaagtgattacagttacttcagaacaatgtaatacaaatgcactcacaaacacacaaaccaaaggacggaagattaggaggcataaaaaagaaaaggaggagaaaaaacgaaagaagccagtttcccaatcccttgagtttccaacaagatacagtccttacagaccttatcgatgtgttcaccagggatgctttgctgcctttacgatacagcaaaacttgattctccattaccaggctgtacacaaatcagatctacctgcattttcagcagaggtcgaagaggaaagtgaagctggtaaagaaagtgaagaaactgaaactaaacaaactttgaaagaatttcgatgtcaggtaagtgactgttctcgaattttccaagcaattactggcctaatacaacactacatgaaacttcatgaaatgactcctgaagaaattgaaagtatgactgcttcagtggatgttgggaagtttccatgtgaccagttagagtgtaaatcttcatttactacatatttgaactatgttgttcatctagaggcagaccacgggattggactaagggcaagtaaaacagaagaagatggtgtatacaaatgtgattgtgaaggctgtgaccgtatatatgcaacccggtcgaatctcctccgacacatttttaataagcataatgacaaacataaggctcatttgattcgtccaagaagattaacaccaggccaggaaaatatgtcaagcaaggcaaaccaagaaaaatcaaagtctaaacatcgggggaccaagcacagcagatgtggaaaggaaggaataaaaatgcccaagaccaaacgaaagaaaaaaaataatttagaaaacaagaatgcaaagattgtgcagattgaagaaaataagccttattctctgaaacgtgggaagcatgtatattctataaaggctagaaatgatgccctgtctgagtgtacaagcagatttgtaacccagtatccatgtatgataaagggatgtacttcagttgttacaagtgaaagcaatataattagacattataagtgccataaattatctaaggcatttacatcacaacaccgaaatcttcttattgtattcaaacggtgttgcaactcacaagtaaaggaaacgtctgagcaagaaggtgctaagaatgatgtgaaagattctgacacgtgtgtatcagagagcaatgataattcaagaacaacagctacagtttcacaaaaggaagttgaaaaaaatgaaaaagatgaaatggatgaactaacagaattgtttattacaaaattaataaatgaagatagcacaagtgtagagacccaagctaatacttcttcaaatgtaagtaatgattttcaggaagataacctctgccagtcagaaagacaaaaagcaagtaatttgaagagagttaataaggaaaaaaatgtctcacaaaataaaaaaaggaaagttgaaaaagctgaaccagcatcagcagctgagttaagtagcgtgcgtaaagaagaagaaactgctgttgccattcaaaccattgaggagcatcctgcatcttttgactggagctcttttaagccaatgggatttgaagtatcatttctgaagtttcttgaggagtctgcagtgaagcagaagaaaaatactgacaaagaccatccgaatactggaaacaaaaaaggatcccattcaaattcaagaaaaaatattgataagactgctgtgactagtggaaatcatgtatgtccttgtaaagaaagcgaaacgtttgtacagtttgccaatccatcacagcttcagtgcagtgataatgtaaaaattgttttagacaagaatcttaaagattgcactgagcttgtcttaaagcaacttcaggaaatgaaacctaccgtcagtctgaaaaaacttgaagtacattcaaatgatccagatatgtctgttatgaaagatatcagtataggtaaagccacaggcagaggtcagtactgataattaatgtagtataaatacatcatttaccattttattttaaataggaagccatcaagcatgctagaattgtgaaactttcattatatttttttgttgttgacatgaattaacctggccaaaaacaaaaaagaaaaaaaaaacatgacatttgtcatgtaaaacttttttttatccctatgggacttgaggaacagaatcagtacttcagttattgtaaatagtgagctaaacctcaaatttctatcacccagttgcccttttcatgaactaaacaattatctgtgtgattggtatgtttcaccaggtcactgctcatgtataacagtactctttatttgtagataccttttttgtatatatttattattgtaaatcatgtgctgccaccagcagtctgtaagtctaaactattaaatgacacatttatatttggaattttaatttttaactaagcgatcaagttttttaaattgttcttttattgttttaaattaagaactttttgaactaaaaccagaaactctgccatagttcattgatttttacatgaaacatttatttacaagatgatatcaagattacttttcacaaaataggcacattatatcaacactttgctctgctttgtaaatttgccatccaggattttggggtggtattcatgtgaaattaaagcagattctctagcagtttcctatagctacagtttttttttttcattgcttctaattggatatagttactatgagtccatgaaatacaatggaaatgtgaataaagaatttactacattgaagattttaaacatttggtattaaaaaaaaatcctttgtgaatgtgatagaaaactagtagtgtggagcagtgtaaatatttgaggtggtgatttgtgaagtagcccagtattgccttaaataaaatcacatttcatttcttgttttatacatgtgatcttataaagattttttgttttgttttgttttccattttctgagatttatagattggtgtatagctttaaactgtataaagttttgtggaaagatttttttaaacatttttataaatcttaaaattgatatcatcaaagtgagcccatcttgtgtttataaaatacaagagtccttaacatttataattacatagataaaacactttctataaggaagttggatgttttgattttactgtttatagatgttagattgtacagatttgtctgtatttctcaccatatctaatgatacttttttcattagattggtcttcaagaacagtattagttataattattttggttattcagtatatagttagctcttacagtttagctttattcaccatatttatactgtggattcacagcgagaggtagaggttattccaggagagttgatgaccttcatttaaagtccaactaaaatcagtagtagaaacataagaaaacatctttgcaatatttacttttgtttctgtttgccgtaaatagtaacattgtttttttttattttgtgtttgttataaaacagttgcattcacaatattattggcctgagatattgatgatattgtgatggtatgaaaatgtgtacattccctgtgcaacatcagatttgcaggaaaaatgaagcacttactgaaatcgctggtactctgaataaataagcatggtcaaggagtgaactattttcttttggaaatttctttttaatttttattattaaagtattttatttttagggccttttgggttttattgaatagttcatttcacctgtttaagacttactaccaataagcataaaacctgacacgttaaaatccctgccctttggtgagcccactgttatttattaaaataaaagttattttatgggtgattaatacatgggttttctttttcctaaattaacaataatttaaataactgagtaattttaatattaaatttttgttaacaactgaatgtttccatacagttttcttagaaattgacctagctcttaaaggtgggcacttggcaaaactgccctatatagcacagtagcaagtaggtttatttctgatcattgtaactatgagccactgttaagtgaaaatgccaatgtattggggcttttcttttgctcattagcttaagaaaatttataactagacatttctaattgttttacatgtcatg

SEQ ID NO: 121758 - DNA, 1051 bp, Homo sapiens
agaagttttaaagaatgccaaatactgtttattttctagtttaattgaatgagctaaggaagtgaaagcaggtagttgttacttaggtaggtaggtaagtcgtggatggaacctggtccaagaacacaggttgggagtattaacattacaaagtaggaaggatacctcttagactaagtctgttaagtagaaatgttgagctccttgtcaggaaggaaagaaacaacattaccactcaacagcaagccttaggaaagtagaaaatgaagttttgaatggtgaaaatttgaaacaaaagataggaggaagagctgagtaggggatatgaaaggattaccaatcagctaataaatgctgtttctcacattcaatgcccaggtgatttaggaaagcataatattttagtagcaccctctgcatgattccatggtatacctgatagtgttcctcagttggatgaaagaaggaggtggttgtgtagtcctggtagaagtaatatgttgatgagttgagtctggatagggaaggaaacagccaagaggacacatgaaaagggagtggtcaaggaactggaggtcttaatggtgacaaagagggtatagtgggaataaggctaaaaatgaggtatggaagactgggacattgaaatttatgattttaggagtagtacagttcacagtgtctggaaatggccatacaattagattcctgaattcgatgtagattaactttggtccattttattggatggactgtacgcagaagatgcccttagtagaaaccagtgtgagaaatgctgaagtcctaaatttgctttagcagggccaggcctggtggatcatccctgtaattccagtgacttgggaggctgaggtgggacaatcgcttgagcccaggggttcaaggctgcagtggattatgatcccagggtaggtggcagaatgagaccctgtctcaaataaaaaataattgataaggagtgtacctacaggctgtgtggtacacgtaaggagtttgggaaagcagcttcttgagagtattgtcttgggag

SEQ ID NO: 121759 - DNA, 1011 bp, Homo sapiens
gcactcgggaaaatatttatattgaagaacctgtttccttgtaagatccaaccatactgtatctaaagataatctgtttgaaactcctgttttatttccctatgaaaactatctttgaattgtgattaggctcccaaagcagtgaacaaaatcttacttagcatataatgtagttaaagtagcaggctggagtcacctggtgtccttctggttcttaacctggagttgtcaaagtatggctctggaaagcctaaaatatttgtttctggccctttgcagaaaaatttgctgatccctgtttaaccttgagcctaaagatttgaatggaggtgaaggggaactgggggacaataggtgggaggtgggtgaggaaagtagaaatagtttgatccttgggtgatggcagtacccgagcaggtctgggaataaggaagtatgagggagacttggtacccactgcttatggttttaccaaaggtcttggacaggctctggtgcctgagagatggctgctgctcagatatacttgcaggcaattcttaaattaagtgtttatatgtttcctgcatttctagttttatagaggtgtgttcttaatattcttttcctgtgttatgaattattgttttgtataatgcaatgaaatgagtggctagttgtaagttcttattgtgaaaaagttttatattaagccccactcatttctcaattattattttctttctgctgcctttaaatctagaatatacattgctgcagttggtttcatgctttgcatccacaagtttgtaatcataaaaatatttaaaatatgtgctggggccaggcgtggtggctaatgcctgtaatcccagcagtttgggaggccgaggtgggtggatcacctgaggtcaggagttcgagaccagcctggccaacatggtgaaacctcttccctactaaaaatacaaaaattagctgggtgtagtggcgggtgcctgtaatcccagctgctcaggaggctaaggcagg

SEQ ID NO: 121760 - DNA, 1027 bp, Homo sapiens
taatggccgggcacggtggctcacacctgtaatcccagaactttgggaggccgaggcgggtggtggatcacgaggtctggagatcaagaccatcatggccaacatagtgaaacctcatctctactaaaaatacaaaaaattagctgggtgtggtggcatgtgcctatagtcccagctacgcgggaggctgaggcaggagaatcgcttgaacctgggcggcggagattgcagtgagctgagatcacgtcactgcactccagcctagacgaaagagcgagactccatctcaaaaaaaaaaaaaaaattgataatatgataaagagttaataaaaactctttttaccataaaagattctgtgcttttcattatcattaactccacttacctggtacactgctgcatccagattgctaagagctaggaaagccatgttgttctgaacagcatacactaacgatggcacacttaacttcaacagttccttggggctccccaagacattttctcttaaagatgctttgaatctacccagactaccagtttctctttgaaaacaaaagggggagatgagagggtggtaaggaagaaaattaaagagtattattttaataagacttcttcaaacacaggacaagcatactatgcttgctgtaatttagcaaactaataatttctaactagttttagattaaaagaaacataccaataatgtatcctctttaaaaaattatagttctgtttgggaaaatatgacaacaactagatttaccactatctctagtcaaagctctgagagattctgagtatattgaataatgagattaggaaaactgttgatattacctataaaaaaattcatcccctgctactttaactatttcatcaagttcaccctgattactttttaattgatcagtttgcatatccatttttatttttatatttatttttgagatggagtcttgttgtgtcgccccggctggagtgcagtggcgctatctcagctcactgcaacctccacctccc

SEQ ID NO: 121761 - DNA, 1036 bp, Homo sapiens
aaattggggagtcttaagaggcagcactgtatcctgtaggtgatgaggaataaataagttaaattgttatcattttcaggattgatgctataagctcttaaattagagtgataatagaaattaaaattaagtagtatgctgacttggcctgttcaaaagttcatgctagagtgcttattggtattaggaaacagtgggcacatattatattaagcatatactatggctgtgatttgagggacacatttttcacttaagccaagtgccctggttaatttctggaatggtctttttgtttagttgtcttattctgtagaatagctgtgtctgatgtggaatatacttttagtaagactgtaacaggtttttgtatttatttgtttggactcttggatgaactctgtttattagtcactaaaaataactttaacaattaatattgcaggtggaacaaaatccattattagggtttggcgctatagctattgctgtattgtgctcaggatttgcaggtaaatcatgaaagcattgttttattcttttgtcatatttttcgaaaacatcaaactttagacaccagtctagtttatcttgctttctcagttttattcccattaaacttgatcttcttgcttatatttagttttatgtcagctgtttttccagtaaatgtatagcattgttcaactaagttcagactcagtccctattcatacttgcagttaactacttctgttatccttgaccatctcagtccggccaaaaacccaaaagtaaatgaaaaaagacttctgaaaatggaggaaattagtcttcagaaagccctttccttttttctggaactgccactatcaagtcagatcctgctgctttaggttgttaatgttaccagctaagtatctttttttcccctataacctcaagttctttctctgctttaacaggttaggagctatggagtaggatcatgaggtgggtcgagagtaccttagaaaacataatacataaagctaataaccaaacagggaggaaagac

SEQ ID NO: 121762 - DNA, 1070 bp, Homo sapiens
ttctgggagaagcatttatccagtgctcagttaccgtaaacacagagagatattaaaccaccctccatttcctcaattgtgtattaagagagtgaactaataaaatgttggacataatcatttaactgttcaaaatattgcaaaaaatcaaatagcatattttttaggtaactcaatttttgttcccaatttgttggtttctagaacacaatgctatcagtaagtatattcctgaatttaaattttcccctcgtataaaacatcttatttacaagcagtattttacttctgtattcagcctgctttcctagtcaaaaatagtcctgacttgaaataggtacaaataaataataaagatgtatagctataactaatatattctactaaaagctttaagcagaatatattaaaaactaaatctctgctggaactatttctaaaactttttttatgttacacttaatattcatactttcttatcttgatgcattggaggagtgcttgtccctacacatacaacgccagacttccgtggattgttgatgttagtgattttgtgttgtctttcctccctgtttggttattagctttatgtattatgttttctaaggtactctcgacccacctcatgatcctactccatagctcctaacctgttaaagcagagaaagaacttgaggttataggggaaaaaaagatacttagctggtaacattaacaacctaaagcagcaggatctgacttgatagtggcagttccagaaaaaaggaaagggctttctgaagactaatttcctccattttcagaagtcttttttcatttacttttgggtttttggccggactgagatggtcaaggataacagaagtagttaactgcaagtatgaatagggactgagtctgaacttagttgaacaatgctatacatttactggaaaaacagctgacataaaactaaatataagcaagaagatcaagtttaatgggaataaaactgagaaagcaagataaactagactggtgtctaaagtttgatgttttcgaaaaatatgacaaaagaataaaacaat

SEQ ID NO: 121763 - DNA, 1055 bp, Homo sapiens
gcctcccaggtccaagcaattctccttcctcagcctctcgagtagccgggaggagcatgcgccaccgtgcccagccaattttgtatttttagtagagacaggatttctccacgttggtcaggctggtccccaacctcaggttatcacccgcctcagcctcccaaagtgctgggattacagacatgagccaccatgcccggcaccttttttcattttaatcttaaaaatcaggatgcaagaaaccaaatcataacttgtcctaacttgacaaataaatatatttatatgacatcaagctttattttagttcactcctaactaaaaaagaccagctttgccttcaaaaaaggagaaggtaggataaaaacttgtatctaaacagttaactgaaagattgctaagacatgctagttgaccatcagtaagaacattaaacaaaagcattttctactgttcctatatatttcttatgagcaatggtataaggattttgttgaacataaagatagatcagaattacagctaaaagttcacccaaatcaggtagaaaaacatctaagggaaagcctataagtacctgatactgaaatggtaagtggttggtaagtagtgtcaaacactactctaagcacttcacctgaaaacaccactaggcaataggtgatattattcccattttacagatgaagaaagtgtcacccagggaatataacttccccaaggctgcacagttaagaaatggtacaggcaagatttgccacagactatacatggttttctaaaatttctacaacactatttccatttatatacaggagtcaattttaaaatgaaatgtaaatataagccaggtctcttttacttaatatatttaacagatattcttcatacattggtttatattataataattgatcagtaaagaaaattattacactataaaagcaccctgaaatgttaagtcaatatcattgcttaaataatttagaagccaaattaatgctgggtgtgagagttgggaaaattatattaggactaacaaagcagtggtactg

SEQ ID NO: 121764 - DNA, 2239 bp, Homo sapiens
gactcctgtatataaatggaaatagtgttgtagaaattttagaaaaccatgtatagtctgtggcaaatcttgcctgtaccatttcttaactgtgcagccttggggaagttatattccctgggtgacactttcttcatctgtaaaatgggaataatatcacctattgcctagtggtgttttcaggtgaagtgcttagagtagtgtttgacactacttaccaaccacttaccatttcagtatcaggtacttataggctttcccttagatgtttttctacctgatttgggtgaacttttagctgtaattctgatctatctttatgttcaacaaaatccttataccattgctcataagaaatatataggaacagtagaaaatgcttttgtttaatgttcttactgatggtcaactagcatgtcttagcaatctttcagttaactgtttagatacaagtttttatcctaccttctccttttttgaaggcaaagctggtcttttttagttaggagtgaactaaaataaagcttgatgtcatataaatatatttatttgtcaagttaggacaagttatgatttggtttcttgcatcctgatttttaagattaaaatgaaaaaaggtgccgggcatggtggctcatgtctgtaatcccagcactttgggaggctgaggcgggtgataacctgaggttggggaccagcctgaccaacgtggagaaatcctgtctctactaaaaatacaaaattggctgggcacggtggcgcatgctcctcccggctactcgagaggctgaggaaggagaattgcttggacctgggaggcagaggttgcggtgagccgagattgcgccattgcactccagcctgggcaacaaaagcgaaactccgtctcaaaaaaaaaaaagatgaaaaaagggttaagactagtaggaaatgtagttttattcagtaaattatcgcctcatctccgattaagaaattatcaatggtttgaatgattggtcacctgtcttttactctaaactttcacaggttcctggttgtcacggaaaagccaatcctaccacattttcttttgtacttatatatatttatacttacatttaaaaaaaattatatattttatagggaaattagttatgttctttgtcagagtggtcagatagtgtcagttaggcatactcatgttctaaaaagtctgtaatcagtgatcaacaaaacactgccttgattttacccgccctgcctccccctctccttttttttggctgtaatggaagacctttctaaaccttgccatcataaaaatatgatctgatagtgtaaacccacaattaagagttttcaaaattttaaactgatcattaggcattttaaagacacacatacagataaagctatttttttttttcttttcagcactcacctttgccctgggtactcttcttgtatgtgtttccatatatctctatggattacccagacaagacactacatccatccaacaaggagaaacagcttcaaaggagagagttattggtgtgtgattttagcctcacgtgagactccttttaagactaaaccatttgcattaaactagagccttaagtcaatctcagaaggtagcataaacaaataaaaattaactgtatggcatgatcagtgcggttatgtggaaacaacaacaaacaaacgaagctatctgagtgaactgctaatacagaaacttaatgtagacctgtttggggtctactattgttttagaatgaaggaattgtattattgtgtgtatatataatttgtaaataaaaagtatggagatgatacggtgttaaaaaaaatcatggtaaggctacaatactcaagtaacaaggtttgggacaatgtctaagggttaaagtgccaaagccatttctgtactaactgttctcttgttccggtaccggggagaaggatgacccctccttattctccaattcatgtacagtattttgtcctagcagcataaagacctagctcttttcttacaagaggcagaaacaagacaggctagttcataaacaaactgtgtaacttctcaaaatgaatctatttcataactcggacaatttctgggtggtgactgagtacccctttagtgagtacccctttagtgctatatttgtgccattcattatctggttcatatttcttttctgttagatgatacacatttcttcaaaaaaatttctaatgtcacttt

SEQ ID NO: 121765 - DNA, 1937 bp, Homo sapiens
agttacaggataataatatggcattttgaaaaataacagaagaaatgccagtttagtcttaaataggtattcttaccctggggatctgtggatttagttggaaagaaaaaattatactttgttttccctgacctctctcggaaattgagtattttcctccattactatatcacaaattaatttttggctatttggttatttcagagtaattcttttctttgtaaccctgtgtattttattttatgaatttagaaacattttgagaaggggtctatatgcttcaccaggggcccatggcaaaaaagaaaaagttacactctgtaatgtacccaacttggaaaattttaaatgagaattctcagaatgtgctttttttgctttctttccgtgttagagataacaatgacctgttatgtacttcatttaatgtactattgtacttttaggtttatgtacaagttaataaagaagcagcagatgataaaagtgtagcaaaagcagcacaggagttcttccaacgattggaactgggcgatgtgcaagcactttcactgtggcaaaaatttcgggacttgagcattgaagagtacattcgggtttacaaggtattggttgaccctcccttctgctttcccatgatgcagtgcagctctcggctgttacctgcatagtaaagttgcgtgttaagcttgtgttttaaaaatagatttgtaggtgaatttaaaattaagactcaaattttttttttgggctgaaagaactgcaaaataatcctgaagcagtgtcaggtgatattctcatacttcatttttatctgacttttctgttctagcattccttcactttttcatatttattttttgttctttcacttccttaggctggtatgtgatggttaataaactgattcatttaataaacatttggtgggtaggggataatacacaacagcgaatagaagaggaaaacccttgttctcgcagaccttatattctagcctagagacagcacaaactaaacaaattaaagataaagcaagaaacaactatgtttttattaagtggttctagatgctagctggggagatcaggtatggagtcttcaggtggaacgacagttttgtaaagaagcccgtgtgactggagtaagtaagcaagatgaacgacaggagaaggttgaagagctagtagcatatggggcatgattctaggatttctctagggctgtccagtgctttttgtggtaatgggaatcttctgtatctgtggccgtctccttaagtagccaccaaccacatgtggcttgaagggtgaatagtgtgacagaagagctaaattctcaattttgcttaattccagtttaacagtatagattgtcacttgggcctagtgattactgtattgcacagcacagtaccattgtgaggacttgactggtatagtggaaactattaggaggtttgagaagaggagtgatttttttttttttttaaacaaaaataatgaggtcctcgccatcttgcccaggctgggcttgaactcctgggcgcaagtgatcctcctgcctcagcctcccaaagtgctgggattatgggcatgagccaccacactcagcccttgatttaatttttattgtgttcatgtgtgtgacaggtggtagagcatccttaattttgccttagggtaagaataggagattcaattaacatttctttgtctttttgtttctgaactcttttagcgtctgggagtatattttgatgaatattcaggagaatcattttatcgtgaaaaatctcaagaggtcttaaagttgctggagagtaaaggactcctactgaaaacaatgtatgatcaggttactattcttcagtaaaattatttgttctttgaaattgttattgatgtatcctttgagtaaggacaacagaatgcaat

SEQ ID NO: 121766 - DNA, 1054 bp, Homo sapiens
cactggcaaaagttcattagataccctgtgtccaaggtttttattgagagttggtcatgtaggtaccctctgcttagaatgtcctaaatcccaaactcccagaaggaaagcagaagttcagcctaagctgtactgtttgcatccacagtgtaggcacaatgaccacttttatcagttaagttggtggagacattcccaaaaatctaagttaatagatgccagccagtggccaaccttgcaagcaggatgttttaaatataacagtatcagacctgctagttaactcttttctagggggaaaaaaaaaggtaattttaactttatttagcagtatttatttatttaagtctgtcattccagtaattaacatagatcatctatgaaaggtgaaacgtttttaccttgagagatgtttaatgccctgtcccatttgttggtagtatctagtgggtataagccaatgtgtcctccagcaataaaatcattttttcctatccaaatactgctgtccggatgttttgataataacattgtaagggtttagaagccttattttttcatagtttattcaccaatttttattgctttcatgagactttaatagctttctggaaataatatagtaaagttatcattgatgtttcaacctgcaggtgagttacaatttgtaaatatttgtccatatgtataacttcagtactacttgaactataatattaatattttaatgtcatttattaacattatattttggagactgaaaaatgattgaaactacattgggaacacagattcctagagctggaagagtaagcctgagcccttaataaaccatcaactccaccctagttcttggctgagtatggaactaaaccagctaagacaggtgatgcaaaataaaactccagaagaggtgctcaacacagtttttaggatcttaagtttagagtataattatactaactatccaaaagcagtcctttttaccaagatcacctattgtattggtctttacacagtaagctatttagagaacagttttaaaatctttgat

SEQ ID NO: 121767 - DNA, 1050 bp, Homo sapiens
agggtttatttgcaaaaaactaaatccattcttagtaaaggcagaagaggatttattgtagaatattgaatggtttacaaagttgttggagggctgcagaagctttggattaagctgacataaataactcccaaaactgcactatggaaccttgtcatcaagggagctcctgcctcttctgcaatcccttgcactgctctagaaccatgctgccactgccatggtcaagaaaatgccactactcctgccatgccatctagaattcatacaggcataagaggcagccccatatactttcaatttctttggtggccatcatggaatactaggacctctgttcatggtgtcacaaaaaaacacagcccccaccactgtgcttgtcataaaaaaatagaagtagctcaccttccaaatcttacagacactgtatctgattgcccaaacctagaagactactggaactctaaccacaggagactctgggaattgtactttttacattttcagcctcggcagtagatgagggcacccaagaaggaaagcagaatagatgttgagtgtgaaaccagcatcagcagtatgggaaagtgaaggccttagattattacatgctgttagggagcaggcatgcagagggtagatgttagtgattaaaaggagatagaatgagctatttagaaaacacaaaaagggaaaatacaacagtgaggcttcggttcttagggcacagacaaatatatttcttgttaattactgggattttttttttttctcttcttgaaattgactagaatagcagttactctaacatgtcctcaaatcctattaataatgtaggtgaaagttctgttactgtgaaaatgtgagattctttggaataactgccctacaagtaatttcttactccctttccataacacatgaaaacacaatgatgaatgttttagtaaaaaacattgagttggtaaatttagtgaaaagaattttctacttatgtttgataatagagaagtacatggttcttatgtcaaaaaatggataacaagaatg

SEQ ID NO: 121768 - DNA, 1051 bp, Homo sapiens
gggaacactaagaactaatactttcattgtacagccgacagattgacaaccctaggaaattatcagagatgttgcatttgtcttcctaaagctgaagaacagtcttgatggactgtttttctacttagaaagatagaacttgctaagagccttttgtcttattaagtatttatgtctgtggaagatttttaaaaattgatatgggaagtattatctcatgtttactaactcattattgcagtttaatagcttttaaacttagttatgattagctcctggacaatcagagaaagagcgggttttatgcatgtgtaccgtctgccactcacttgtcttcttaaagaaggcagaccctctaagagcaaactcatgaatttgtaataaggaccaattactgattaagcttctactcctatggagtagacacatattatgaatgactctaaaactgccagtacaccacaattatgatttttaaagttgagtttaaatatttgttgcatcacaaagagtagagggattcctacagtcatcttcacactagagaggaactacactaaggccatctcctaaggaaatttgcctgctttatctccacttgaataagaaaccactgcaaaccttagtgtagggattgttaaacctaagcccataggcaacatccagtttgccgcttgtttttgcaaataaagttttgttggaacacagccatgcacatttgtttacatcatctacattggctgctttcatattgcaatggcagttgaacacagtagagctgagttgaatagttgcgacagatcagatggcccaaaagcctattaaaatatttactctctggctcttcaagaaaaaaaaatgccagcttctgattagtgttttaaaacaacatccattttggtacttatgacaccatggattaggaaatggggagagaggggtatttcaggccagtggttcttctacttgcctgaggtcacttatgtaactgcggtcatctagagactagtggggctacaaatcaaaaatggctctttacttctctagccag

SEQ ID NO: 121769 - DNA, 1087 bp, Homo sapiens
taaattgttagtgtaattccctcagaaaaggcagataatgttggacaaggttattaacatacatccacagagtcagtgtctgggaactcaaaagaattggaacaatgaaagtcactatcatagaaaaagatgcttatttaaagggtgactatgataaaggagcattggtagcttagtaaatatttatttgatcagaaaatcactcccagatatttaccaggaatagaattattcaaaatacagtatttagttccttttccccatttcttgtaagttcttaaaaataaagactagttgctctttagtgacagcagatatctcttcaagttccataggtttttcatgagatggcttcgaacatctaataggttaaaaagtgaaggcatatgcatagaagacagactatctaaattacatcttatctgttggtgcaggtgctttagcgtagaccctgacagaatgtcatgttctgtggctctcatgaaagctaggtgagataaaaagtgttcatcgtatgtcagagtaggtagaatatgggtagagtgatttttcttacttgttacaaggtgaatttgaggggagggaaagagaatgaggaagagagagactgaatacagaatagcatgttagttgggaaaaaaagaaaatgtgtttacttaaatagaagtatggaactaaagagattgcctgagaactgggacccgatatagggaccatgaaagatgacttacttgtgtctttgtaagccaaaaatagcattagaactacctatctcattaggcctattatataacatacctactttgtgtgatttgttcttttcagctaagatgtgatacagtggtgagtgaaatcagtactggtcaaaggactgtaaatttcaaaataaacagagagctcttaacaaaggtaagaataagttaatatccagccattgtgctttcattctgtctgcttcagccacagtggtcttcctccagtttttaaattctttatgcctcctctggcctcaaaacctttgcacatactgatccataacttggagagtaccaccccaagttaacacctactcatcctttaaatcttg

SEQ ID NO: 121770 - DNA, 1125 bp, Homo sapiens
ttgaatctggcttccttcacttggaatgcatttggagctcattcgtgttaagtgtattaatagtttattcttacaagtggtattccattgaatggaacaaatatgtgaacaatcttacactgttttgttctttttgatttttagctttccagagtgttgaatcttccaccagaaaacttgatcacatcaatatctgcagttccaatttcccaaaaagagttaagtataatacacttgtaacaatctataaaatgttgctgactttgttgatacaccaaaaaagcaaaaaagaattgttactcttcagtttgtggaatagtccttgaaattaactgtaagatatgattcattatactcagcctattactcctgttgacttaaataataaaattaaaatctgtattttaaatactctgatatggcagattgtgtattcttatgttcattattttagttatgctagtaactataattgtggcaaagtctttgggaatgaggttcaaattcaattctgtaacaataaataaaataactaaaattgtggttagaatctcagggtttttgaagggatattaaagattgtacagccatctggtgcttgaatactgttgtaccatatttatctactaggtttttaatgttgtttttgtttattgagtttccttttgagtactcccagtgatagaaaactgttggttaggactacacacaactaatagttgctttctcagttacagagaggtatctctttgtgagtttggtcatcctaaatgattcttgtttacgatttgggtagaaaacttcaatacttggatagattattgtctgtcaattaataatgacaagaaattagctacatagtagtcatttaagtcctaagctttgaaaagaagttaagatataattaccagtaccattctgtccttgtattttattcacttaactttgtcaggactttaagagtagaatgaatattcttctcagaatagaacaaagaagtaagtggaaaagaaagagaaaggctacatttggccttctagtaaaagcacctttaaaatggcccactgcggctttttatattgactttctgtaagagaggcagccactaccaagaggatctcatga

SEQ ID NO: 121771 - DNA, 1829 bp, Homo sapiens
aaagtgctgggattacaggcgtgagtcaccatgcctggccacacatttctttaatgttgcagattgctcaacttactagaaataggtcagagaaaattaaagacttgttcccccattatcattagggacacatagcatgcagtgacatctaatatcatcaccaatgtaattataactaatacagttgttaatatttcttggatgtttacagtgtgccagactgttttgtttttcaagacaagatctcactctgtcacccaggctggagtgcagtggcacaatcatagtccactgcaaacttgagctcctgggctccgggaatcctcctgccttagcctcagctaggactacaggctcatgtcaccttgcttgctaatttatttattttttttttaaggtgagatctcactttgttgtccaggctggtctcaaatcctgagctcaagcagtccacctgccttggcctcccaaagcgctgggattatagacccagactgtttcaatcattttatatgtgttaatttgattaatcccctcagcaaactacaaggaatgtattatcgccattgaaatatataaggatacttagacatataactttctcaatgttataatgttagtaaatgatagagctaggatttgaacccaacctgtctgattccagagctcatgatttaaccatagcttaatactgcctctcattatataaggccaagtttctatttagaactttttgtattgaatttaagctacaacttattaggattggtttatagtttttagtactagtaaacctgatgtgtataattgtatgatttgaattttgctttagaagtttgctaggcttttttttttttttcattatgtggctctaagaccaacgggtagtgttataatacgaaaatctttgaggaattgaccctgattataaggcagatggagcaggaatgagggaaacatacccagactttaacatttgccttcactggcttcagttgttgaaacagattgactgaagaagtaggaagatgctctgcattttgcccaccatctgtcccctgactgaagacacttgggcacgtaattaagactggtaactctccctctcctcagtattctgtggatgactgcatatccagcaaaacaactggataggaactggagagagagagactggcagcagcactggcactgtaggagatacccacactgaagtatagcactgtgaataggagccgaggcaggtagaaacctggcaacagtgagagcttatattcttcagtgtagtttttaaatttacctacctgatctgtaacagactgagagaagtcatggtaacagtttaaagtatcctactgctgtgtttcccagtttctaagaggtttttcatgtgtattttgatgcggcattattctgcacataaaaattgtgtcttgatttgccactttcatgttatgctatgattttacctattaatgtaaagtgactatttttgttctttttaaagctaccttgttgttctgctttgtctcttttttttattatttatttatttatttatttatttattttgaggcaaggttttgctctgtcgcccaggctggagtgtagtggcacaatttcagctcactgcaacctctgcctcccaggttcaggtgattctcctgcctcagcctcctgagtacctgggactacaggtgtatgccaccacgcccggctaatttttgtatttttagcagagatggggtttcaccatgttggccagggtggtctccaagtcctgagctaatgaaccgcccaccttggcctcccaaagcgctgggattaca

SEQ ID NO: 121772 - DNA, 1052 bp, Homo sapiens
tcttaaatatgccataaatatggtaaaaataaaagattataaaaaatgaaatacagaggatattgaatgttacctgtccccaaatatatgtttttgatgaatgtaaaaaaaattaaggccaggcaaggtggctcacacttgtaatcccagtactttgggaggccaaggtgggcagatcacttgaggtcaggagtttgagaccagcctggccaacatggtgaaaccccatctctactaaaaatacaaaattgagcgggcgtggtggcacgtgcctgtagtcacagccactcgggaggctgaggcaggagagaatcacttgaacctgggaggcggagatcgcactgagccaacatcatgccactgcactccagcctgggtgacagagtgagactccatatcaaaaaaaaaaaaaatttcacttctgtcacttactgtgtaactttgcacgtaagatctataacttatactattatatgaaaaaagaaactgacttatttctttctgtttttagaggactattttaacaaagggaaaaatgagcctgaggacagtaagcttcgattcgaaacttatcagttgatatggcagcagatgaaatctgaaaatgaggtgaatactttttttaataattttctgtaacaccctaagtctcatttttgttgcatctcatcttcctttccaccagtttacaagagtattgatgaaatataggaagtattggtcaagcatagcctgtatatccttaaaaaaacaaccataatccagcctgggcaacttggtgaaaccctgtctctacaaaagctacaaaaactagctgggcatggtggtgtgcacttgtaattccagctactcaggaggctaagttgggaggataacttgagcctgggaggtggaggttgcagtgagccgagatagtaccacggcactccagcctgggcagcagagagagatcttgtctcaaaaacaaaaacaaaaaaaactcatatttcttgtgagtggaacagatgtttatgatagctgttaaggcaaggagctttcaaatggtgacgctc

SEQ ID NO: 121773 - DNA, 1992 bp, Homo sapiens
accagcctggccaacgtggtgaaaccctgtctctattaaaactacaaaaattagccggtgtggtggcacatgcctgtaattccagctactcaggaggctgaggcaggagaatcacctgaacttgggaggtgaaggatgcagtgagctgagattgagctgctgcactccagcctggatgacagagcgagattctgtctcaaaaaaaaaaaaaagaagctttcaagtgcacatcccagtaatttgtttgaaagaggaattgtgcaaaatatctttcctgacaaatatagtttatgcctttggatagctattgttaatggatatcatttatatagtatatttccttggtttctgttattaatcattttttaaatgtttttacttgtttgcttgatatgttaaatagcttttgtcattaaattattattaataaaaatggtgatgtaatattgatgtattatctcataggtgtgaatgtcacagatcatgatttgacattcggaagtctaacagaggcccttcagaataatgtcacaccatatgtagtctcattgcaagctaaagattgtccaggtaaaaatataaatgccataataaccttgatgagatgttacagacttctttcatccttttctctctttttcaggctttctttatccctttttttggtggaaagaacacagtgctatgttttaggcagggtgaggtttgggggctctcagagtaattgtgactattacagaactctgccttcttttgctgtctttgttcttgacccatttctgccctatcagcttaactgccggtagcagtccaggcattttgtgagatgcattctttaacccagtgaaacgtttaataagtagaaagacttaggacagaaagctgagaattggggaatgaggagctcttgtcagctcaaaagagagtagaccacatgggctcatgtttcagccataaatcatcttattgtcccactttgaaaagccaccatggtgaaaaatagtccactgacagaggtaatcctgagcatgtgaacccatgaaatcataaagagtgttcacactaatatattaaaaagctttttttttttttcttttgagacagggtctcactctgttgcctaggctgtactacagtagcatgatcatagctcagtgcagcttgaactcctggcctcaagcagttctcccacttcagcttccccagtacctaggactacaggtgcatgccattacgctcagctacatcagctacattgtggggttttgttgttgttgttgtttgtagagattgggtcttgctgtgttgtccagactggtcttgaactcctgggctcaaacaatcctcctgccttggcttcccaaagtgctgggattacatcttgagtcaccatgcctggccctaatgtggtaaaatttgtttggattagattgataaaagagatttatgtgcttatattgctttcatattcataaactgattgaaattaagtaaaagcccttaaaggcatctttaaaaatggctatatgaaagatttataatcagtaaaataattcatatgacacttgatttttcttagggaacttgaaaactgtttattttcctatgtaatttaaatacatattcctaaaatttatagtttgcatatctacacatttgcttctgtgacctttttattatagataatatacataaatggctgggagcagtgtttgatgcttgtaatcccagcactttgggaggctgaggcaggcagatcatgaggtgaggagttcgagaccagcctggccaacatggcaaaaccccgtctctactaaaaaatacaaaaattagctgggtatggtggcacgcgcctgtaatcccagctactggggaggcttgaggcaggagaattgcttgaacccgggaggcagaggttgtattgagccgagatcctgccactgtactccagcctgggcaacagagcgagactccatctcaaaaaaaaaaaat

SEQ ID NO: 121774 - DNA, 1038 bp, Homo sapiens
tccaatcaacatttttgctgaaatcatcgtaagtgaagtttcattttgctttatatagggactaaactacgtctaatacttaccataatacctgatttgctccacaattttagactttccagataaaatgctacttttggtttatgtcagatatctttttaaaaattgagattggaccagatgatacctagtatccatttcaggcttgaaatttcacagtggcagagtagcaagcactactattcattatatttttttcattaaaaatactagttctcactataaagcaaagcagaatataactttctaccaacagaaaaatcaattttgtagaaaatttcctcttccatgtttttttctgtcatttccttagcagaaaatataaatatttcatatgagttatagatttttactgaacctttttcttcttggttattattcccatgtcagacacagcaagattctagtaacctgagtttctatttatcgtgtggtagaaaaaaaataaacagtgttattgtgaaatttaaagagagatatgtcaacatgtggcattataacattgtttgagtggtaaggcttacctttaactctttctttctgcaatggcttaaaagaagacggacccaaaaatgctaagcaaaaaaaggactacttctagccaatggcagtctcctcctgttgtcgttatcttgaaggatatggaaagctttgccacaaaagtactacaagacttcataattatcagcaggtagatggtgtattacctggcttttatgaaaaactccctttttaagaaaatactacttttaacttgaaaagtataatcttcattttaataccaactggataaaaatcaaagtattcaaattctttataattgaatattcaaagacttcctatcagattttccatttgctttttgagccaagaatgagaatcaaaggcacatttagccagttttaaattgacatggtaagatagtattaaatatggtttttctcaccaagattgactgtctcttactcacccattaaa

SEQ ID NO: 121775 - DNA, 1119 bp, Homo sapiens
cacgcacatgtagtcccagctactcgggaggctgaggcaggagaatcgcttgaacccaggaggtggaggttgcagtgagccgagattgcaccactgcactccagtctgggtgacagagcaggactccatctgaaaaaaaaaaaagaaaaaagatggtataatcttcaggaaaactttctggacctctctgttcttatttataaaatgagaggatttattaagagattgatttcaaagctagactgtctggaaagtaattatttctctgtttaatagaagaaagtgaaagacttagaaaattttagtgtttgcaatgataatccttaacagtgtcttataaagtaagcattaaaataaagtttgtcttatgttgaaatatgatgtattgaaatatatttgctaaataaatttcacttttgtgtctgtctttcaaaactagtcaacatctccatgaatttccactaatactcatttttggaatagccacatctcctattatcatccaccgattgcttcctcatgcagtatcatctctattgtgcatagaactgttccaatctttgtcttgtaaggagcacctgactacggtactcgataaggtaaaaagaataagttttaccagtgaaataggatgaaaagaaaactgccaataatagattgttaagataactgttaacaataagcctctacaactctctgagtactatattgaacatattccttcacatactttaatatttttacttaataatttttgtagtgttttatagttttacagtgattttgtatattacctcttcaggtaaaatataagctttatgaaaagagtgatcatatctctctatgtacttaatctctttatatctttactcaatagaaaattataggtttataatgtaaatttttacagaatttgtagactttgtagtaacaatgtattttgactcttacattttgatttttctaatttttatttttttgagaaggagtctagctctgtcatccaggctggagtgcagtgacgaaatcttggctcactgcaacctctgcctcccaggttcaagtgattctcctgccgcagcatctcaagtagctgggacttcatgaggtgtgccgcca

SEQ ID NO: 121776 - DNA, 1977 bp, Homo sapiens
acctcccaccaggtccctcccacagcacttgggaattcaagatgggatttgggtggggacacagccaaaccatatcattgaccttccccaaattgcttctggactcacctcctttaagatgtgctttatgctgcttatttaaggtaaactaaaaacaacctgcccactagccacttacacatgggttttagtgtttttctttttttccataaaggtgatttatagacactttaaggaaaatgttttcaagctgctatttttaaatttgcttggctaggccggaaagggtggcaagcacctataatcccttttacttggtaggctgaggtgggagaatcacttgagcccagaagttcaaggctacagtgagctatgatgccaccactgcactccagcctgggcaaaagagcaagaactttcctctacaaaaagaaaacaaaaaacttggttatagccaagttcaattggccttttacaactatgcttctgtttaagaagccttgtgtgacttttcatttccagatgtaaaacatcactatagacaattgaaaattagccaaataatacaaattcagctattctatacttttgaaatagacatctgtgaaatagacatttgtgtttctcattcaacaatacataatatattactcttcattaatttgaatcagtagtaatgaaaaaaatctcatctggtaataagaattgccaaagcctgcagcttcttcagtggtttctggtgaggaaaaaaaaaaggatgatatagttaataggtggtatttttttttaattaggaatttgatggaagatggtatagatctttggttctgaagatacagtataagtagcttctttttgttactcttgtataaattaacttaaaatttttgttgacatttgagcttaaaaaactagctattattgcagctttcatagttaactgtgtcataatatcattctttgcctcattattaatacttagtatttatgaagagtgaagactaacaaggagtgtgtccccctcccttttaatctctttcagctacttcttacaactcagtttccctttaaaataaatgaaaaagtattacaggttctgaccaacatctttttgtatcatgatttctcagttcaaaactttataaaaggacttcaggtaagaacacagtaatgggtttgaaaattctcaagctgattctaaataatttgcacattatttcaggctgtctagtgtgataggcattttaaatggcaaaatctagaataagtaaattccagttattttattctaggttctacaattcctttgttaccttgcagcaaactgtagagaatgcactcattaggatatcaataatgggaaaagacttctattccagcaattcttaaccattttgggggtaggggcaagcagacttttttggtttgtttccgagactctcatgagagcttatggactttttctaccaaggaaatgctatatataaggggtcagcaaacttctgtaaagggccagatattaaacatttttagcttttttttttttcgagatggagtttcactttgttgcccaggctggagtgcagtggcatgatctcagctcactgcaaccttcgcctcccgggttcaagcaattctgcctcagcctcccatgtagctgggattacaggtgcgtgccaccacgcctggctaatttttgtatatttagtagaaacagggcttcaccatgttggccaggctggtctcgaactcctgacctcaggtgatccacccaccttggttcccagagtgctgggattacaggcctgagccactacgcccagcccatttttagctttgcatgctacatgtggtcactgctgttgctgtttctgtttcttcttctttaataatcctttaaagatataaaaaaggtttttagtttctggaccatgcatgtgtgtgtgtgtgtgtgtctctgtaatttgtattctgata

SEQ ID NO: 121777 - DNA, 1043 bp, Homo sapiens
acatccgacgtctaccatcttttaggaggtaaaaagagaagtacatgtttaacacatactatactagaatttggtactaaataagagatctcagatccagttatttctgaagtagggaaagaaatagtaacctattctgtttttaattgtgggatttcccttgttggatttgaaaatttggcaaaaagaaaagtatttttacaaagggacataatttgcaagttctccagagttactttttagaaataacatttcctattcctggggtttatggccttttttaatgtttatatctatagactatgaagtccagctgatttaaggagtttaaaattaccattaaaccataaatgtcatactgaatttatttttgtgaagaaatgaaaaaaatgtggctaccaatctaggtagttctttttcccaatatgctatttaaatatgttgaatgtttaattttctctttttatgtatggaatggtgaaaattctaggtacgtggaaaagcaagcttcagaaaagcaagttgcgctcttgaccaatgagagatatttgaaggtaggaatgtgaatgtgtttcagtttcattctctttttcctttcataaagaagaatatgcatgtaacatttattgagttaataaaacatatttgtgcatcttaatatttatacagtgaagtactgggtcttgatagtcacctaggaatgtgagttttaaagatgacataaaaccttagctctaaaagttgaggctttttttaatcaagaaaaaatattaaacaccaagtttctcttgtggcctattttgaaagcacctttagatctatagagatctgctatgtgaatctttttccacctagcagttttggaatctgccagcaatttcgttgtaatgttctttttaaaggctgtgataaataaaagcatttagaagccaggcagcttaggcgtctgctgctaagtgggtattgatttgatttgaagaaatatcattatatattgataatataaagctaggaaagaagtaatgagcttagaaaattatcag

SEQ ID NO: 121778 - DNA, 1131 bp, Homo sapiens
cttctttgtcttaaaaatcttttggctttaggaaactgcttttgcaaaaatcttcccatatctctccatagctacaatgtgaggcacctgatgagtgctcagtcatggaagatgaaagagaatgtttgcctgactagagtggcctgagcagccagagtgaggaagtcatcagcaggcactaagggattttctttcaggttatgtgtgggcattgctcttgccactgcagcatgaactcaaccactcttcagaacacaaaaacttttaagggctggatgttggtatcattaagatcattgagttcagctatataaccagaaactaaagtctaggagaagacggcagcttgtttgagatcacacagctagctagtggtagcactcagaccagagcccatctctcttaaccactagttcattgtttttctgtcgctaattcacgatataaatacgccctaatagtgatcactggatcagcaaggggccaaccttaagtacataaatagggtaaaaggcttagaaaaatagaaggtaaatactgtgtaaatttcagtcttttacaaaatgggacttatggagattgctgtaaaaataaactgcacatataattttttcttctttttttgctgggcaccattaacgaggtaatctagatacatttttaattagagttcatataatatgagctagtaaacaaattctgtgatatgctagagctaaataaaggaatgcagcttttgaaatgggaaggtcgaagattaagatgattagtagcctaaagaataaagaattttacaaattaaagcacaaccactgtcttgaagaaatgtctgttatttcctgattttcaaaagtgactcattattaataataaactgaaactaaaactccccacgttggatgagtagaaatatttggctatatgctatctgtgttccttaacatttattacatattacagtttgggtttaaaattacagttgggaagagttaagtaggacagagtgtcatatcagattttttttgagacaggatcttgctgtgttgtccaggcttaagtgcagttgtgcagtcatagctcacagttccctcagacctcctgggctcaagtaatcctcctgcctccacctcc

SEQ ID NO: 121779 - DNA, 1042 bp, Homo sapiens
gattgtcgaaatgaagaaccttctttgtactgtgataccaaattatgataaatgtagagtaaaatttcaatctaagtaaaataaaacacatggaatctattctgttagtatggcaaaaaggcaagatttttttctttatcctgttaagtccttttcttaaatgacttaatggactgaatagtgagcactctgccatgtaatttagtagtaaagtgaactgcccttttcttctttccctaaaaatttgcttgtatattataaagcaaaacacctttgaggcgagattcttgccagaccttaaaaataaaaagaataaacaaaacccattttgatctttctctgtacatcctgtcttatggaaagggcatcaggtgcttctatagaacttaccaacagagctccctctgaggggttttctgtctgaggatcaccagaaaagctatgttcttttatctatagtccttattggaaatgaaggagttaagaagaagtaagaagcaaaccaaatttgaagtactcagagaaaatgttgtgaacttcattgactgtctagtgaggtaagtctaaatttagctcttaagagctaaaaatcatgctgtttttccaaataacactggtgtcatagctgtctatagccaatccagaacatttttctcctaggttaggctttatgcttttcaggtctctccatctagcttagagttgtaatttttaggccaggcgtggtggctcacgcctgtaatcccagcactttgggaggccaaggctggtggatcacgaggtcaggagatcgagaccatcctggctaacaaggtgaaaccctgtctctactgaaagtacaaaaaattagctgggtgtggtggtgggcacctgtagtcccagctactcgggaggctgaggcaggagaatggcatgaacccaggaggcggagcttgcagtgagccaagatcgtgccactgcactccagcctgggcaacggtgcaagactccgtctcaaaaaaaaaaaaaagaattgtaatttttattctttttccatcattat

SEQ ID NO: 121780 - DNA, 1278 bp, Homo sapiens
tgaacctgggaggcagaggttgcagtgagccgagattgcaccactgcactccagtctgggtgacaagagtgaaactccgtctcaaaaaaaaccaaaacaaaacaaaaaaaccccacaacttttgaggtgtcatttccatgaaagatatcaactaaaaattttctgtgatccaagaagaatttcctgaactcttaattccaggcctgtgtttaatattgccaaaggttaaatgtttgctgtgctagaaaatgtagatatctgttttctcatttactttaagaaatgctatcttaaagatttctaagcagaaatgtagtatatatacatttgttcctaaaggtttaactcagaactgaaatatacagcttcttataaagagtctagaggtagttttaaaaactattatatggaagagatgcagttctgagtgaaactgtattagagctgatatttgggtttgtttcattcgtttgtttttggttgttaattttgcttttagtaaatggttcagtcctctacagagagaggattgacaaaaatgttatagtgaaaattgaagtccaacagagcttaaaggaaaaaatatatatattatatataaagaaaataaacctgtgcttatctaaacatggatgcctgactggctgtttcagagaataccttctgcctcctgagacacagcctctccatgaggtggtgtacttcagtgctgcccatgcccttcgtgagcatttaaatgctgctccgcgaattgccctccatactgcactcaacaatccttactattatctcaaggtaagatgaacatttagttttctgatagtttagctcagactctgggcgtcattgtcataaaaatatactaaatttgcagttatgttttaatgagcagagagtcggcaattcagggttgcacgtctcatatatttttaaaaattctttagactgtagaaaaaaatttctaaccccataaagatagcaattagtagtcaactgttgctgccagtttttgaccatgtgtaatctttgcccttcacatgctaaagtcagatcataggcacaaagacttgagagtataatgttaccactcttgtgaaaataaaagaaatgtttcctgtaaacataacagcagacagggattaaacaatatggcctaataaattactgaaagaccgaaatggttgtttctagtgggaaagagaaatactttgggacttcatcttggattttaaaacaaagaaaggtctattctgagagcatctgcagagctgagtgtag

SEQ ID NO: 121781 - DNA, 1369 bp, Homo sapiens
atggttttcagtgatggtgaaaaccactgaataatttcatacttaaccaaaaaatcagttaattttaatatataaaccataaattaaaacttacaaaatctgtcttcttcttggctggtgggtcacagaagagaactggtatgatttcagttgtctttgggtgggatatattataatatacccctgatattataatatcagagcagggtgtgtatgtaagactttgtgtttctcagtaaaagccatggatttcaaataggttgaagaaacactgatggtttctatagggcttaaggtctgcagtgttgacaacgtagtcttttctttaaaagaaatttatacccctggtaagtggtattagtatttactaatacagtatagtaattgttagaattcagctaattataagtgttggaagtaccattttattaagtattcctaaagatttccataaactttttacattaagtgcattcaggtctgagaaattagtaatttatggattgaaatgaaaaatatgcttatcttctaatcctgggaatattcttctagtgactaagaactagaggggttatgaccaagacataaacctaaacaagaactagctaactattgaatagactcactcactaaataagggaaaccaagattccatttactggtttactcagtttaggttgggggcttcattaatgtctgattttattcctaataatttataaaagttagtcatcttagtttactgttaattgttagaatgaagcactgaaaagcgaagaaggctgcattccgaatatcgccccagacatctgcatagcatacaaactgcacctagagtgtagcaggctcatcaacctcgtggactggtcagaggtaggttgtagggaaaagaacaagctagatatttttctaaccatccatgatgactttctcagaatagttttatacttttagtgctttggaatttatcttgtgtttaatgccttgtcttttatttggaaagcataaatcatttcaaactttaaaagttccttaggaagtggtagttcaacagtccccactcccaatcccctgccctctgatcctgaattccttaaccaagccaattctgtgttcatgctaggtcaaaataagtatgtgatctaacccaatagttagcattaagcaaaaactaaacaatttaggtcagttctgttatttcacaaaataaagtatattattaactagcatttctcttcttgcttaaaagaaaaaaaattgaagtaactacacaacagatttagcaatcaggaagtataaggaatacttggcaaggcaataaacaactgttgttattctttaaaataaacaactattctttctgtcttca

SEQ ID NO: 121782 - DNA, 1256 bp, Homo sapiens
actttgggaggccaaggcgggcggatcacaaggtcaggagttcgagaccagcctggccaacatggtgaaaccccgtctctactaaaaatacaaaaattagctgggcttggtggcaggcacctgtaatcccagctacttgggaggctgaggcaggagaattgcttgaacccaggaggcggacgttgcagtcagccaagatcgcactactgcactccagcttgggcgatagacgagactccgtctcaaaaacaaacaaacaaacaaaaaaaacaaaaaccaaaaaaagagaattcaataatggcagtttcatttttggtaaattttaaaatataatcttgatataaatttgataccaaaagttttaggtttggtctcattttggattaaattcaaaataaagattcagaaatttcagttattctagcaccatatggttaatattaacaagtaatacggttgtttggagtacgcctttataaatatctagtgtagacctggagaaattataaacttatattttatgtgtagttggacattgtagaaatggttttaaaaggatactggataatttcattcatttcttctgaggttgcagaatttgcatccattttttcagcagctgtcacaactgttgcaaaagccttttgaatagacaagacagaagaaaataaaaatgtctacagttgccaaacatcttttactatacttcttttaatggctgttgatagctggcacatattcttcattatatcaaatttaagattgtcaaaactacactgatgatcactttaaaccacttatatattaaaagataaagtaatggttcctgaataatcttgtttcagagaactaagagtatgcagagaaaagaaacgaagctagtcaaaggtaaaagaacaagaaagccctgtttcctctactaatcttactccaggaaaatatctatttttcttggaagcagccaattatggatattttttaatggtgacaagacatctgtaaggcctttaatagagttaagatctttgtaatactattctgaagacagaaagaatagttgtttattttaaagaataacaacagttgtttattgccttgccaagtattccttatacttcctgattgctaaatctgttgtgtagttacttcaattttttttcttttaagcaagaagagaaatgctagttaataatatactttattttgtgaaataacagaactgacctaaattgtttagtttttgcttaatgctaact

SEQ ID NO: 121783 - DNA, 1089 bp, Homo sapiens
gtagaggccttactggctccatgacaggtcatcccgaagtagaatatttactgcctaaataaagccaaacagtttgggacttttttttttgacacggagtctcactctgtcacccaggctggagtgcagtggccgatctcagttcactgcaacctccgcctcccgggttcgagcaattcccctgcctcaggctcccgagtagctgggactacaggcatgtgccaccacacctggctaattttttgtatttcttaggagagatggggtttcaccttgttggccaggatggtctcgatctcctgcccttgtgatccacccgccttggcctctcaaagtgctgggattacaggtgtgagccaccacgcctggccttttttttttttctttaaagttgtaagactacaggaaatggagaggcagagacagttttggaacctatgtagtcaccaggagaaacaacctgtaagatattcatgttacttactgcctactacactaaagtgaggaatgccaatgcagggaattgggagaggaggaatgaggattgctaaagcaactgcaaataatttatactcctggataacggaatttattacatttacatactctaagttcaagaatgatttactcacaatttagtaatgactttggaaagtacagtaaaatgtgtgagcagttttagttacattattatttgttggagtctaaagtactccacaggtgttttgatacatgcctgtttggggttagcaatgtacttttctggttaaacatcaatgggggttacacatttatcttctcaacaaaacaggctcctctaatatatgtaaatatgactggtcacctttttctcttaagctaaatgtgatagttctggctttgcttatttgctttctagcagcctccccatgttagtcttgccacatggtcagtcttctgtttggtaggttttataaatcctaaaagttctagttcagaaacagctctaataaaccgagcactggaggctttaattaaggaaactggccgtgctgtatttttgacaaaaagggattaaaatctcaatgttaaaatactagttggtaaaat

SEQ ID NO: 121784 - DNA, 1134 bp, Homo sapiens
attcctcactttagtgtagtaggcagtaagtaacatgaatatcttacaggttgtttctcctggtgactacataggttccaaaactgtctctgcctctccatttcctgtagtcttacaactttaaagaaaaaaaaaaaaggccaggcgtggtggctcacacctgtaatcccagcactttgagaggccaaggcgggtggatcacaagggcaggagatcgagaccatcctggccaacaaggtgaaaccccatctctcctaagaaatacaaaaaattagccaggtgtggtggcacatgcctgtagtcccagctactcgggagcctgaggcaggggaattgctcgaacccgggaggcggaggttgcagtgaactgagatcggccactgcactccagcctgggtgacagagtgagactccgtgtcaaaaaaaaaagtcccaaactgtttggctttatttaggcagtaaatattctacttcgggatgacctgtcatggagccagtaaggcctctacaaatcacatcccaaacaaatacaactcagatgagcaaagtaaggcccagatgaaatgacatctcgatctcttctatggcagaaactcagcaagacataatgaaacaaagatagctaaagttcattatttaatgctctactcccaagagaattatgggactttaaggctactcactaacatacaaaattaccatgcagatatggggggaaagtccatgtccagaaaaaacttggtttgcaaaccttagaactatgtcattgcaggattatgtgtgtgtgcccgtgtgtgtgctcacaggctttgaagagttttatgagtatccattatccaaaatgcttggaaacagaagtgttttggattttagattttgaaatatttgcattatacttaacaagttcagttcagcatccaaaacccaaaatgctccagtgagcatttcctttgagcatgtcagtacgcaaaaagtttcagattttggagcacttaagatttaggatttgggatattcagcctgcataatcaaacctccttcattcaggaatgtaaaaggaggtattaatatgagcttagaataaagaacaccttagacctctggcagcgtggtgggctgagatgacattaatgg

SEQ ID NO: 121785 - DNA, 1002 bp, Homo sapiens
agatgactattaacacaattctgtagatacttattacaagcaatttcagggatttggggaattcagaatccctaggtagctaaaataatctattgaaatcatgtgtggttggttatttggactaatcaactaccggacccatctaaagtcagagtagcccataagctaggacttttgcataagtgataatgcagaaatttggctgtggagcaaaaaaaaaaaattttttttttttttttttttttttgagacagagtctcactctgtcacccagactggagtgcagtggcatgatctcagctcactgcaacctctgcctcctgagttcaagcgattctcgtgcttcagcctcccaagtagctgggactacaggctatcctgctaaccagtggttcttagctgggaactgttttgtccctcagggacatttggcaatgtctgcaaacactttggttatcacaattgtgggagggggtttaactggcctctagtggtagaggccagagatgtggctaaatatcctataatgcacagcaatagccaccacgacaaagaatgatctggcccaaactgccagtagtgctgaagttgagaatctctgttctagaccattaaaagggggtagaattggccaggcgcagtggctcacgcctgtaatcacagcactttgggaggctgaggcaggcagatcatgaggtcaagagatcgagaccatcctggccaacatggtgaaaccccgtctctactaaaaatacaaaaattagctgggcgtggtggtgcatgccggtagtcccagctactcgggaggctgaggcaggagaatcacttgaacccgggaggcggaggttacagtgagccgagatggcagcactgcactccagcctggtgacagagcaagactccatctcaaaaaaaaaaagtaggggggaagggcatagaatcatgcaccttattgctaccctgtgctataccaatgtttctcaaccactaattggcatataa

SEQ ID NO: 121786 - DNA, 1809 bp, Homo sapiens
gttcacgccattctcctgcctcagcctcccgagtagttgggactacaggcggcctgccaccatgcccagctaatttttttgtatttttagtagagatggggtttcaccgtgttagccaggatggtctcgatcttctgaccttgtgatccgcccgcctcggcctcccagagtgcttggattacaggcgtgagccaccgcacccggtcccagcctttttgttaggaaataaataaatctcacctagcctttatgtcaggtcatgtgattggactaaaacctaggtttcctgactaataagttgcatgctgtttttatttgatacactattagtactactgaggttatgtaagtgattttgtcaacttagaattgttttactgtatattttgtgttttcagtttatctggctctaataaggcattttacaaatgtaattgacaagtacctttatttatagaacaatatgatgcgtttgtgaagtttacgcatgatcaaataatgcgacgatatggagaacagcctgctagctgtaagtatttcacctttgaagttataaactgaaaataagactgtcttttaaggagaagacattataattattttcatactcaaaaagagaattcaacaaaattactgagaatgtatggaggaaataggcagcataactttgcaagtcttttggttacttaaatacctaggggcaaaattgggaatcaagatctagtattcgtttggattttgacctgtattttgcactaattttctttttctcaccctttagatgtttcatgaatcacgtatcctgcatttgtgggctgccttgttccttgttgagttgttgcaagaggtcccaattatgacatgcagcaatgccaataccccttctgtgaatacaggttatttcaagctttcgtcagtggcaaccactcttaggcagcagcaactggttttggaaatttccctgatgtcagtaccacctggatgtggacctttgctacctgtattaataccagtggcctcattttgctgtatcattacaatttggcttcttatattaatgtttgaaaaggattaaagctggtattctagaacatgcccttcactggttgtgtaaataaaactgtagaatgacacttcagatgaagttagtgtgattttaattgtgcactacaaccgagctgtaaccagttactaattttagaatgtaatcccaggacaatattaagcaaatagcctgcagtgcttcctgtgaaatagtgaaggaggagggcatttctgtattccaggacttcttggggtttcagaatgggtttgtatgattttttttttttttgtagttttatttattctatcagtctttttaacaaatgtttattgctgcatttttttttttccagtgtatcattgttttactgcccttgtagtactggaatttagttggaagaataaaacatttacttctattttgcttgtttcttaatgtacagatggggttagtatttgaataaagttggtgttttaaaacgtaagcattttccaggaatcagtgaagttaattttctaagatttgagtgctgtttcaaaacactgagttctgattctaaatgccttcttctgctgggcgcggtggctcatgcctgtaatcccagcactttgggaggccgaggcgggaggatcacgaggtcaggagatcgagactatcctggctaacacagtgaaaccccatctctactaaaaaaaaaaaaatatatatatatatatataaattccttcttctgtaacttactgcctgatagaatgttacaggta

SEQ ID NO: 121787 - DNA, 1332 bp, Homo sapiens
taaatctgtggctaaacattctatttatgttaccatacataataaattttatttacttaaattatcaaattttactgaattttttgataactaaaacaggactccagtttgatactccaatgacttacacagtgacagccaattagatattttaaatgtctacattgatggtaacgttatgaaaaatataaagtcaaaaaatccacaaccaaattgaggtaaactactaacatcagtttttagtacagggtacctactaatattactgctgatctacacggctagccaatactcttttcctcaggttaccaaggcgggcatgagctataagaaggttaattttctttcctgaactgaaattttctcattctcagagaatataccgcaccagtgtatagaaagtgaaattaaagtacacgtggaaaatgcatttcacacaactgagttcctcagaaactctaataaacacacctcatacctgcaagttttgtgttcaatatttcttcatattcttctcgaactttctcttcacgttctttcaacaaacgttcacagatcatcccaacctgccgtagagtaaataagggctgttctttttttaatggtgaggatgctgcagatgaagtccctatgtacaatgaggacaaaaaatagcacctggtttagagccatgatataaagcagtttctaaatgaagaggttttatttggatctcttcaatcttgatataaaagcattttaaaatcagattttaagcacagcatttcacaagtcttaaaacaaccaaaataataattccatcagctggtgacgctggaaaaacacggcaagatgtaattaagataaaaaagactaaaggtgagtagaaaaaactttaagacataagaaaggttgggcgtggtgctcaccgcctgtaatcaggccgaggtgggcggatcacctgaggtcaggagtttgaaaccagcctggccaacatggtgaaaccctgcctctactaaaaatacataaaaaaattagccaggcatggtggcgggcacctgtaatcccagctactcgggaggctgaggcaggagaatcacttgaacccgggaggcggaggtttcagtgagccgagatcacgccattgcactccagcctgggcaaagagagtgaaactccatctcaaaaaaataaaaacaaaaaattaaaaattaaatttaaaaaagacataaaacttaaacattacaatgatgggtcccattacaaaacatcttatctcctttctggaaaataccataccatgaagtattttagtgactaaattactttcctacactaggaatgaagaacacc

SEQ ID NO: 121788 - DNA, 1686 bp, Homo sapiens
gcctcctgtgttcaagcgattctcctgcctcagcctcctaagtagctgggattacaggcatgtgccaccacgcctggctaattttgtatttttagtagagactaagtttctccatgttggtcaggctggtcttgaacttctgacctcaggtgatccgcctgcctcggcctcccaaagtgctggtaatacaggcgtgagccaccatgcccggcgtattttctttttcaataaaggaaaacccctttctaaaggtgtgaaatgatggtagaataattaccagttcattgtgtgtaggctcttaagatattaatggtatggctttgaagactaagtgtctttttacaggcataatgatttgttattctgggactaaataaaattaaatttagacctgaggtgttcttcattcctagtgtaggaaagtaatttagtcactaaaatacttcatggtatggtattttccagaaaggagataagatgttttgtaatgggacccatcattgtaatgtttaagttttatgtcttttttaaatttaatttttaattttttgtttttatttttttgagatggagtttcactctctttgcccaggctggagtgcaatggcgtgatctcggctcactgaaacctccgcctcccgggttcaagtgattctcctgcctcagcctcccgagtagctgggattacaggtgcccgccaccatgcctggctaatttttttatgtatttttagtagaggcagggtttcaccatgttggccaggctggtttcaaactcctgacctcaggtgatccgcccacctcggcctgattacaggcggtgagcaccacgcccaacctttcttatgtcttaaagttttttctactcacctttagtcttttttatcttaattacatcttgccgtgtttttccagcgtcaccagctgatggaattattattttggttgttttaagacttgtgaaatgctgtgcttaaaatctgattttaaaatgcttttatatcaagattgaagagatccaaataaaacctcttcatttagaaactgctttatatcatggctctaaaccaggtgctattttttgtcctcattgtacatagggacttcatctgcagcatcctcaccattaaaaaaagaacagcccttatttactctacggcaggttgggatgatctgtgaacgtttgttgaaagaacgtgaagagaaagttcgagaagaatatgaagaaatattgaacacaaaacttgcaggtatgaggtgtgtttattagagtttctgaggaactcagttgtgtgaaatgcattttccacgtgtactttaatttcactttctatacactggtgcggtatattctctgagaatgagaaaatttcagttcaggaaagaaaattaaccttcttatagctcatgcccgccttggtaacctgaggaaaagagtattggctagccgtgtagatcagcagtaatattagtaggtaccctgtactaaaaactgatgttagtagtttacctcaatttggttgtggattttttgactttatatttttcataacgttaccatcaatgtagacatttaaaatatctaattggctgtcactgtgtaagtcattggagtatcaaactggagtcctgttttagttatcaaaaaattcagtaaaatttgataatttaagtaaataaaatttat

SEQ ID NO: 121789 - DNA, 1095 bp, Homo sapiens
ggaaggggagtggaaacccctaggcagggattttctggaggggccagatggtaattattttgagttagaaatctttctgaaatgaatcatagtggcctaaaggatgtgccagatataattttactcatttgtgtgattgtggttcaagataattgcactgtggtatagtggttcttatttattgaggacctgtcatgtaccaatcactttacatggtctccccctcaccctaccctccagccccaagattcagaatgctgtagtattcttaggttttattgagcttaaaataattggccatggccatttaatgtatgatgactttttaagttcccatctactttgtcattttgttgacctattatcacttcagactgttgtgtgcttgaatatacataatctcccaagccccttcttatttatgggcttggaaaaggcataaaggcagtaaaggcagttggaaaagcctgttagtgtaatagttctatgtgatgaataaatgagctttaagtttggaactcttaagaatctgagtaaaataggtgttttggttcacagactccttgaccattattttgactgaaaaactttatttttgctagtcagtgctcagcaagaatattgttgaacagctgaattccagttggtgtgtatgtgctaagtgaatgtccccatttatgctgaaatgagttcctaccaaaatgtcagttttctggatattatttgaaaggagtattttgggtagattggtctactaaataatgttggaaagccaacctcttttttaatgtgaaagtttttatcttgccaaattttaacttttttattttagaacaaattctgtacaacataaaacaagagtataaacgaatgcagaagagaagacatttagaaacgagtttccaacagacagatccgtgttgtacttctgatgcacagccacatgcatttctcctcagtggaccagcttcaccaggtaataacatttcttgtcatttacaaagtttattatttagagtgggaaaagtctaatccaagttgtctttagtcatttaagctactgtatctcctctgagttttaaaaaaacatttata

SEQ ID NO: 121790 - DNA, 1276 bp, Homo sapiens
gacttcttttttctttaatgaactgtaaattgtgttggcaagacaatgtcagatattacatgtaccttggataaaatattaacttgctggtatgataagagatggccagatctaagtagcttaagactaagtaggcaagtacttgactgatatatggaaggcctttatctacctggtatgaaagcaactcaggttagccaagtatctagatcgagcttagcaatgtagttgtagaatattgaatctgaggaaatttcttgagttatcagcttcaagactgtttatatccctgaactgaaataaattgagcttgaggccattgcagttagctgtttgctacttgtgcagttgagatcttggccaagttaaattggacccttcactgcataacattgttgatcacatgttaccagtattagagcatttgagggcacagtgtggcttagatgacatagttgcatcatattagatgtaaaaagcaatgcaggcaatagtattaaaaattcttcagctctttagctgacaatatcaagtgttggcaaggatgtggaacagctggagctgtaatacttttatggtaggaatgcaaaatgacaaaatcactctggaaaatggtttagcaattttattttgtaagaacaaaataaacccttcatttgccatatgattaggcagcccattcccactcctaggtatttatccaagagaaatgaaaacatgtccaccaaagactggtacttgaatattcgtaatagtcccaaattggaaacagcctaaatgtccattaacaggagaaaggctagctgtgtgtgtatatatacatacatatgatggaatactcaccaataaaaaggaatttctgattcatgcaacatacatgaatctcaaaagcattttgctgagtgaaagtagttcagacataaaagtctacactctttatgattctatttatgtgaaattctagagaaggcaaaactatgtagtaatagcagatgagtgttggtggactgtatgggggagtggtgatattggtagtgaattaactgcagagaagcccaagagaagtttttggagtgataaaaagttatttatcatagttacgttagttccaaaactgtatgtatgtacttgtcagaactcaaatggattgtacatttaaattggtgaattttgtcatttgtaaattataccttaaaattgttagtgatgtccctaagtatctgatggtatggagttttacaaagataaaatttttaaaagttttaccgtttcttaa

SEQ ID NO: 121791 - DNA, 1382 bp, Homo sapiens
gggtctttgttttgtttttgttttctgagacagtcttgctctgtcccaggctggagtgcagcagcacaatctcggctcactgcaatctgcctcctgggctcaaatgatccccctgcctcagcctctcaagtacctggagatacaggcatgtgccaccatgcccagctaatttttgtatttttttgtagagatggggtttcaccatgttgcccaggctggtttcaaactcctggggctcaagcaatctgcccgcttcagcctcccaaagtgctgggattacagatttgagccactgtgcccggcaggttttttctgctaagtgttttgatagatctagaaagacagtgatagaaagctttcgttttgaaagattgagaataaaagcttcagtggaagtgcccagttgtgagtatctttcctatttgaaaagagatttttctctttataaaagaagaatgtgaagtaatagcatgggttaagtttgggcctcttgaatagttggttcatgaaactagataatggtattaggagtgggagtaggtattttcaagtacctatcactgaattagttaaccagcaatttgtagtctctgtagtccttgtgttaaccctatgcctagcactgttgattcaaagaacgttctctatatatgtgaaactacagggaatttcttgcctttgagagcaccgcctgcttttaaaaaggtatgagagaaaatatttatttaagcctatacaaaactatcaggcatcttaagtcttgacatttcccaaggttcttagagttgctatggttggaaaaaaatgtaatttcagttttaccctgtaattctgtaccaaattttctttttagactgttctatgacattgtcataatgtgtaacatttttgacaaaaaatgtgactccaacgagtcgtaataaatactgcaattagtttaagactttgaataatacttttctgaggaactttaagtatatttctctcttcatttttctggataatgatgagaacatggattacatgaattacaatattttaagtagccccatgtataagaatttttctattatcaggtatttgctcattggaagaaacattttaaagggtttcacaggatttttagaagaaaatactttttaataagaagttgtgatttatttccaaagaaattgaattatttgttatagcaagtttctcacatgagatgatattgtatctatattaagcagggaatccctgcaggtaatttaaaattctagtggatgttagtttttcagctttgatatttattttgggcctattaatcagaattttacagtataatagattttgtaatatttttggtgatgaggattttacagtataacaatttttgtaat

SEQ ID NO: 121792 - DNA, 2022 bp, Homo sapiens
cccggcgtccccgaagcgcaggcgatgtgcgccattgtcggcgcccacctcggccgctgcctccccgttgtcggcggccgcggccaccgccgcctccttctccgctgcggccgcctcgccgcagaagtatctccgaatggagccatcccccttcggcgacgtctcctcccgcctcaccacaggtgggacccggccccgcggccgccggggtagtggagagaactgggaacaggggtcctggggtgtgggatgcggcccctggggtgggggtgccggactgtgtggttcttgttcttagcaaagtagtagggcagccacgtttttcactaggtcctcgtagcccgaggacctaataagacacaatagaaatgggctgatgtcaaggggatagtgtttggaggtgggtaggggctttgccttgcccgtattgggtagaacagggacatctttttctttgggccgaatgattggaattgtttccgtagtcgctggagccccagcggaaatgatcagagaggacgatattattcgtaaatttaggcgaaagggtcacatttcaccccaatctggatgtgtgcttgccgtaatcgattggttgcagctattaactctgggactgggtggtttgaggcgaggctacagcccctccttcagttcagacacggctgattttagtatagtgggggtggggggtgggggatggatgtcactagggcgagatctaggcctgtcattaatcacccacaagaacgccactttggctgagtcaagacctgtttccctagcagggtcaacaacaaagaaaatgctcttcccgagtactgtaatatgatcacactataagtctagaccttgagaaatgttgaacttttaataagcatattgcattgaaaattggggctgaggagttgcttttatttggaaatgttttatttttgcccaacaaagtatgctgggggaaaacaacctagccttgagaataatgaagaaatcaacccaagattccaagggacttcagacttttgcttttcatcttgaaacatttcctgagagagactggggaatgtcttttggctgctttgtagggcatgtgtatgcccagttttttctgtactttgaaatccttgtgtgcccctggcacaatcctaggataggcttttgtggactagaagtgtaaatgtttcctttgtgtgtagcatgcaaagatttctgtgtgagcctttagtaataatatcaccctttagacaaagcctttccatagcttgatttaaatgtctcgttatcagtagcttaaaaaaccgaagtatatacctctgtatttggtgacttccatttgaaactgactttagtgtttttttttttttgtcacatttaaaaatattttctaaatccatggagtgaccctcgaatatgcaagctaccatttttgctattaaatatttggtctaatttaaggacatactgttttagagttgtagtgagtttttacggaaattcttagataaatttatttaatgaccttactaaactgtgttttaattagattgaaaaggcatttgttgattaattgttaggctttactttgggaaaaaaaaaaggaaacagccaatgtcaagaatgagctactggtggttgacatttttggaatttgtcttttagtgaaatggtatcattggaaattgaaatggattctgtacttaactaataaagccatttcaaaataaggtcattaaggagctaaccagcaatacatttcagtcgagggagtgaattaatacagtgctaggtttgggaattaaagtactatatctcaatgtcaaaataatcttgggcatgtatgtgaacaattggggactataccatgttcctcccctttaaagcacacttattcagaattgtgatcctttgtaaacgacttttcattggcatatctgtagcgttggttaatacagttggctccacattatctcaagtttaaattaattggactgttgtagtaaaacgactggaattattggaatt

SEQ ID NO: 121793 - DNA, 1056 bp, Homo sapiens
tgagaacaatggacaagcagtggatacgtgtcaatgtgtgcactttttttctatattattgcccatgatataactttagaaataaaccttaatatttcttcaaatatctctatttaattttgacactgaaataaccgtaaaggtttatttttctgttacctcaacaagaagaatttgaagacttcaaaatattgagcagaattcattcatacttaaaaatttattagccctgcattttcataggaagacacattatcttctggactatagctgttctaatggattataatcagaatggaagagagaaagcatattgactttttttgagcgacatctctgactttctttagtctttagctattactggatctcttaagacagcatgtgttaatcttaatgtatatcgttatcactgtgcagttgctgtttacttgaatagtattgtgttcctatattccaggtttaagtagatttcatgcctgggtggccaaacaacagtcttcattttttttaattgaaaagaagtagtgtctggatcagtaaaattatactgtgtgtgagtgtgaatataaatgtgtgtatgtgtgtttctgtcctgtaactgttacagtaatgtcataaagtgagaaaactgtgaccaagtataaacttttaccacttgctgcactcttgcacatggattcagtttctaaaattgagttcttcctgtaatcttgttgataaaaatactgactccaaccattcaaaaatttcaccccatccctccttaagagattggatcaagtattactaaattgacctttaggtattacacaagaccagtgcttagcaaaaaataatgacaggcatccaaggaagggatgtatttgtagtgttattgccaggaaaggagagtactttggtttctgagcaccgaatattgagcaatatgtcagtcactaaaaggaagacagttctacagaaaaacaatggtaacatttttcaatagcgtgtgtagatagtatgcactatatacatcacgttaaagtaggactatcacacccagcccatgtggct

SEQ ID NO: 121794 - DNA, 1002 bp, Homo sapiens
ttataaaagccactccatctagtggttgaattttcacgtgacttctcttgagaagttttggaaacacgctcgcaagtggagaaacccatttgggaaacatcaatgcacaataatgtgcatttaggggaagaaaaaaagtccattataatagtaatttcatatattgtctttaaaggtctatcaacagcatataattaagattcattcaaggttgtgcatgtcacaaaagactcttgatacgtcattgctaagtggctgaactttgcagttcataatatgtactcaggctgaacaaggattggaataaaaagtaaatacctgatctgtgcccataacttccacttgccatcaatataatttctatgtgatactgaaataagacatcctggggtaaataattgatggattcaatataattttcccatttggacactttttcagatggttgtttgtatgagaccaagattcaggtttaatgccctcatgatcagctggctttatgccagaaaaaactgtccatggttaaaagctgttctgttacgttggatcttccatgttgctgatgcataccaacatttacttagtaaacaggtattgaatacctactctgtgccaggcactgtgccaggcagaggacctataagatagttcccagctctcaaggtgttcatggtctgaagggtttagacacaataaagacaactacaggatggctcagcaatgcccatcacctctcctgggagaaaatctcaaagcatgtagagaaagagaattcacacagcccagtactatctgatgattaaatatattccctttatatgtttttataacctattctactctttcaactaggaaaaggaagacagaagggtgggctgtattcgaggtggaggggtggaggggagaaccatttcccttgctttcttgacctgacccatgtcccttacatgggtgtgaagcatggatatattttgggggtcatctatcacagaaaaatgttac

SEQ ID NO: 121795 - DNA, 1072 bp, Homo sapiens
cttcttaaaggttaaatctacttccccttctcatttagtccttttcatatgtctccataatctttcacagtggttcttaaacgtcagaatgtgctagagcctcctaaaggccttgctaagaatggagatgcaccccaaccctagagtttttgtttccatagatctgatctggatcctgagaatttgtgtttttcgtaagttcccagatgctgctgatgcttctggttgggagaccaccctttgagagccaatgacctatagactaaccctgcatgcacttacaaaccattgtgtaacttctcagactggtctttcagatgtatattataattttcagcccgttggtacctgtcttatttactaattcaatatgttcacatcactttttctgaacacttttcagttcctggaatctcttaattcttaattgtatcacacaaacgctaagaagggctcgatccggaatgaatacaatagaacagcctcatggtttcaatggcataaaaattctgcacttgcatccaatttgcatacatacttcttaatcacaactacatttccagagcatattttgcattgctactgaaacctcgttcttccagttctgtttgtatgtaattatttacatcttgaaagcatatttttctgtttatgtcttgcattgttagcacacactgaaaatttcctaaacatttcgactaaagtaggtgatacataagtacctagttcttaaaataatgtctgaaggaaaccccggatttacgcaataataaaaacttatttaaaattattttagtgagagaatgataggaaggaaattgaattatttagaaagtcactgtgtcctcaatttgtatgaatatttgaagcaagattcatttctcttgttaaatattccattttagtccctacaataatagagattaattttctgttctttttcatcacagagttaggaccagtagtgattattgcatatttggaaattggaaagctgaatgttttacaaaatagaatgagttggttattaatattgattgtgggttcctgagaccacccctcttacttttaa

SEQ ID NO: 121796 - DNA, 1012 bp, Homo sapiens
caatggggctgcacggggctcttcctgaccattctacggggcgaagaagctgagttttcaccacctagcagccatgagtgggagccaggtctcagccttgcctgacacatagaaggcacttggcgatatgtagagcactgaataaatgagtgggtgggtgggtgggtgtgggatcagtcctcttcccaggctgatgcttgctcttgcgggctatgccaaatcactgtgcctcttcagaagcaggccatccctgggtaggaacactctgaggcatggccagcaagaaataagaccagagaaagcatggtcaaataagcacagataaataaataaataaaaaatttaaaaaccttagctctttgttttctttgttgtggagagccctgccataaaaatgacactgggcttattctctccagtatctacatgttttagaaaatcccctttctgaagtcttttctgtctgatgttggctatttctctgagatttatgtcataaaggcagacaaacaacaagggtctgtctgtgcctcatggtggagagtgtgtctgtgtgcacaggcaggccccgggtggactggttatcaacctgccggggatgcagccctgactaagctggcattttgattgcagccgccgagagagaactcaccatttgttgactagagattgagattttccagtcctcaactaggacaaaccaagatgctcttgtagcatgctgagcttcactgacaagttccatgccccagttttccctcttatgaaagaaggtcaggtaccaattcaccatgtagagctgttttgaagaaaaattaaataaaaagacatggcaggtaactccaatctcccaggccccgcttgaggtctgcctcattcctctcattcttttaccctatgtgaccccattttttatgctactgatctatcaaagcagctgagatcccataagaagaataatcccaccttctgagctaccatccaaagaagttcatggagtgcacagtgttag

SEQ ID NO: 121797 - DNA, 1045 bp, Homo sapiens
aaataaaatcctccctctccttccttcctgcctgcctgcctgcctgcctgcctttcctccctccctccctctccttccttccttctttcctcccttcttttgttcctcacttcccttccttccttccctccctccttaccttctttctgattcacggcaggatgagagtgtctccaaatgcaaggtaatgctaccttttactttgtagcacttgtggcttgatctttggactccaggggtacttaggaagatgaaatcaattccactgaaatctcctttcttcctcaggcttcttacctgctcactaagacaagttcttttgtaagagggaggttttaaaagtctgttaaaggacattaccaagaaggcagacctatgaatttacagccttttgggatcctcctaacactgtgcactccatgaacttctttggatggtagctcagaaggtgggattattcttcttatgggatctcagctgctttgatagatcagtagcataaaaaatggggtcacatagggtaaaagaatgagaggaatgaggcagacctcaagcggggcctgggagattggagttacctgccatgtctttttatttaatttttcttcaaaacagctctacatggtgaattggtacctgaccttctttcataagagggaaaactggggcatggaacttgtcagtgaagctcagcatgctacaagagcatcttggtttgtcctagttgaggactggaaaatctcaatctctagtcaacaaatggtgagttctctctcggcggctgcaatcaaaatgccagcttagtcagggctgcatccccggcaggttgataaccagtccacccggggcctgcctgtgcacacagacacactctccaccatgaggcacagacagacccttgttgtttgtctgcctttatgacataaatctcagagaaatagccaacatcagacagaaaagacttcagaaaggggattttctaaaacatgtagatactggagagaataagcccagtgtcatttttatggcagggctctccacaaca

SEQ ID NO: 121798 - DNA, 1103 bp, Homo sapiens
ctggggactgcctaataatgaaatgaaggtctcagggctcaccagcaaaccacaaagcagctaatttggtatttcttgcagaaaaagaactggaagctgcacagtgtttgtttaggaaagaacttagccaagttagttgattagggtgtttcaggaaggacagtttatactccaataatcgtcagaatacaaaatagagatgtgaagtgaattctatcgaggaacagccttttccagaaacccacgttggggctggtgggagtgttacacacaaaagaaaattgtatcttcctctcctcaagactccaggcaaaaaatccacataactgctgaagaatggcgccttcctatacacacacagaggtgaaagaataggggacactagtcttctgtgtggtctcaggcaggccctgaacataattagaagcccactggagtaatgaaagaaggtaaagcactgtaaaccgggtgctgggcttgcaaccagaaagggaaggtccatgccactaggtaggagaaagttcacagggaaaaaagagctcctgacctcttctgataattctcagatgaaggtggagactggcctagcatgtctctagccatccggaggccaaaacaggagagcaagatcttctggtgggtggatgctgaagaagaaagaagcagcagaagaaggaagcagaagaggaggaagaggaagaagaagaaaaggagaagaggaagaggaagcagaagaggaagaagaagaaaaggagaagaggaagaggaagcagaagaggaagaagaaagaggaggaggaggaagggagataaagaagaggaagaagaagaagacaaaagaggaggaggaggagatggtggtggcccttaagagggaaacattgcttttgagccttctgccagcttagatattgtgagattgaaggtggtgacctcaagtgttgtgactcatgtgtttatggatcattgagctgtagctgctgggaatgggccgcagggttgcagaaataatgatgccctcagctcaaggccatgaggcagccagatctccttgttggtggcctcgggccatgaacagtcgcatccttgccccagcgtgctgct

SEQ ID NO: 121799 - DNA, 1129 bp, Homo sapiens
ggttacataccatgtgacttaatttacataacatttaaaacatgacaaaattatagtaatatagagcagatctgtgtctggcgagaggactgtaaaaggtggcacaggggatttcacactggtgatggcattcttctctatcctgattataatggtgtttgcataagtaggtctgtgtgctaaattagtgagatctaaataagatctgtagtttgggtattggtattataccagtatcattttcctggtcttgataatgtgctatagttatttatgtaagatgttataattcatggagtttgggtgaagagtacatgggaactctctactatttttacaacttcttggaagtccaatgtaatttcaaaataaaaagtgaaaaacaaagcaaaacaaaaaactgaacaggagcaatttctgatggttactctgcatatagacctgcagtatccctgcctctcttactttgaaccatcacatgtacccatttcctctaagaacaccttgagagcagtgcaagcaaaccctgttgtgcccaaaacacctgtgtgagagaagctgagcctctcttttccaggtgctgaagaatctttaacccttcttcattcacctgctcctctcatttacttcactgaaagccagtgttatggaactttgtggctaattttgacctatcagcccatgtttactaagcatagacaatatgtgtggaaaaaaatgtaatttgtttattattttggtatccatacctgtataagtgtccatagatgtcagggctatccttaggagggttgaaggtccaggacaaactcctagggtcagaatcgagggcaaatctgtacccccttcattaccctaaaaactctcccctcagggctcccacagatgctattacactgtggtgtatttgcttgcttttttctatgtgtcccttctcactgggataaagatcctgtcttctaggaaattttcatcaaattctggagctgccatttgctgggtaagcctcagtttcctcatctttgagtggtgataaagtaatcccagcactttggggggcgaaggtgtgtggattacttgaggtcaggagttcaagaccagcctggtcaacatggtgaaacccagtctc

SEQ ID NO: 121800 - DNA, 1056 bp, Homo sapiens
ttctcccagagtccatctctgacgtaccttgatttcatcctgattaaaagtatcttttctgttcttgccctttgcactgacaatgagtgcttctgacagaaccttctcagcaggaaagatcttttaaaaagtgccctggtctccttgctgtgataccctctgagggaggtgtgaggggaagagtgtttttaatcatgtcttatttttctagtggtttcactgaacttgccagtatcttaaactagaaggctccgtctccctacctactcattctcacctaatttctgaggtatccaaagagaagagaaatcttttggtaactgctgaggcttttcagttagttttaaaaacaaatttcagtccatgatcccttagtatgaatttgtgcttctagccttgcctttgaagtgggaaaggcaagtgaaagatattcttgttgctactactgaatgctattttccaggatctaaaggaataagaaactttatagtttctgtagttctgctttccttctgaaagccatcaggggaacactgtgtagttttgacctggagtataaacagtgtgctctgataaagataacacctacagagactgattgaacaccaccacaaccaaagctcttctataaaaaagattcttgaaaatgtgacatgtggataaaaactgtacaccaggagatatcacatacaatggggatgatgcagaaggtgggaggagatttaggcatcgatggatggggtgactggggcaggggaggtgtggacggtgactgtggggcagagtttgatggaggggtttgtccagagctgtgtgaaggagagtagtgggaagcagagctgtaatcactccatcttagaactaccaaaccagccaaccaactgcccttggtcccttgatatccctctagctgctgacccatttctctcttcctgtttcctacaacattctctgaaggagttgattgcacttggtcactccccatccttccctcctaggctctcttgagcccactgcccacaggcattcaactccatggaaactcttcttgtccct

SEQ ID NO: 121801 - DNA, 1051 bp, Homo sapiens
tcagtgctgcaatacatcgtggacttaaacatcttatttatctgataaactcagccttaccttgtggaatctgaagattgaaatatccaaaggtttaaacaagatggaaatcaatgaaaaagaggccttgtttatatatgggtagcttcacatttaatttataaagttaacaatctggaaactgtgagcccataaaacagtattttttagaagttgtgttacaactgtagcaaattttccttttaaaaaatccaggcaatggcattaaacattcttgctatcatttaccatggatttcctacatttctgagatccctgtattcaaaaacaaatgacagggttgttaagttgtactatattaaacaacttggtctggtttatatcattttaacaagttttttggaaatgtaaaagaaaaaagtaaagctccatttttgtgaattgcattgtttctaaaggaagtattttgagtattttcatctgtttgtattgtttcgactatgatatcagatatccagtgtgtccattctggcagtggttttgagttacttcatggaacttggacatacaccaccaggtcctttatgtgttgttctcctgggagacttctttttttaaatgccagggctacttctgctttacctcagtggtatcagcacattgtaaattacgttaaaacacacaactcactgtgatctatgggagtgatatcaaatacaaacgatgttgtgttccttctctcgaacaaaacagcaaagggaatgccagctaacttctttgattagaaggtaatgtcatggaatagaatgctgtcaccagaaaatgctctcccactgctagataaatgcagaggcaaagtgtagacatctgtaggaactaaatatcaaggaaatcaagacatttattttcaaagcgagaattctatctacattctattctgcggatgttatttctgttatacatctgaattttaaaatgtttactgatagataatggatttaaagggcggctaattgattgtctgccattgttgataaactgttctaattgg

SEQ ID NO: 121802 - DNA, 1042 bp, Homo sapiens
gtacattgcctgaatttgatcctagtattcactattgatatgtaactttttcatttaactagtacacggcatttcttagattttaacataggaatttagatggttagacctttctgaaagttgatgaaacctaggcagtatactcaatttctgaaagccgtagagacacagacaatattgaaggtattggtccccatggtaacatatttgcatttggcccagcatggctggtttctgcctagcttcttttaattgctatatattgacagccattttcacaattatttataaaatgtcggataagtgagcatgtgtacaagggagtgcacaccataccttaagcttgattagatacttcagatgacaaagagctctctgcatgaagagttactgaggtatttttatcatttcctaatgtgcctgtcacatagtagaagcaaaaagcctttcaagttatttaaatattttcctcaattctctttcaaaacaggtgacaaaagagctgaaacagtatgacaacaaaattatagaatgcaaatttgagaacaacagctgggtcttcatgagacagagaacagacaaaagttttcctaatgcctacaacactgccatgggtgagtatgacaacttaccagtgcttattatatttaaaacaaaaattaaggtgttagacccaaagtgtgctgcctttgttgttttgcttaatggggcatagtcatttggacttcatccttgtttgatgggaaagatacgtcaagtctgtattctgtttggctccagttggcttgtaggttctactctctaaactggtgatcttgtgcccatgcacccaaaagagaagtttaaagggcaggatactgggctgtatacaagttgaatttattgaacaacaacaacaacagaaaccatgataatttcagatctattcaaaactataaaaaccattgtttgccagatggtaaaagacaaaattatcaggggaaaatgtaatttccagctcttaaaatagctttataaacaatggagaacaaagtaaacgaaa

SEQ ID NO: 121803 - DNA, 1104 bp, Homo sapiens
caacctgagagttttcagtggccaaaactagaacaatttgagcaatgaaataagtgacgagtattttattataaaccaaataataaaataaatatccatgagtccataccaatacagataagcaattaaatgaataaataggggagaagggacaaatctttcttatggaagaactctagataatagatgtagaaggaatggaggatacagaaaaatcccattagaacaccgcaggaataattgctcaggcaagagttacagatgaatgccaaaattaataagtgaaacttttctttgagctgctaatttaaaatcttgagaagtactagatccgttttcatctgatagtttcttaaccccagattatttatagattcaaatagtataaaagtgtggtatgcaatcagatggatacaggcaacaaatttttttcaacataaaatatatggtgtgttgctctgtttttttcagaaacagtaaaacctcatcagttcaatgtaatttggggtacagatgtgaaatcttgttttataaatattttattctttttactttcaaggtctcattaactcaaactaggataacagttgattagaagacctgatggggtcctgttttagtaaataataatatgtaattggctgaggatgattattgtcatagtaacaaattagatctaaaattaaactcctctcccttataccggtcattcttttgatccgaccattattggaaactgtttttagtttgtatacatgtgggagatattatttttattagttaaatatattttaccacctaaccaaatgagtaacttgtagtgcatctatcttgggactataactggtgtgatcaatgaagaatgatgtattgttcttaaatacggaaatacgtttaggttagtagtggcaggtacgtgcattttctggaaagctctgtttaccagatttttagtggccaaggagatacacagatagttaatagtactgcttaattgttacagtcagattgagtaacataatttatagcaattctgaaactgagaacacaagaatgataagctatatgataaagaccacagttgctagtcagcaaaagtgcaga

SEQ ID NO: 121804 - DNA, 1050 bp, Homo sapiens
gagcacatattatgtgcctaagacatattataccttctagtgtttatagcagtcttactaagtaaatattgcttttattttcatgtgagaaaatggaaactcagagaggttaaataacttgcccatggtcataaattcagcaaatgatggaattgagattagaactcaggtttttctgcctttccaaccccaccctttttgttcttatgacactgttcttgtataaatattgctgacttacatttgagaatgtcaggtatttcacgggagccagcacatgcaagagtgcattttaaagaagaacctctatagaaatgtcagactgtatatacttacttcagttatccaacatcatcatttaatgaagtattttccctgtagctttttaaagcaagcatttatgtaaaattttccctttgatatgttagaagtatccctaccttcttaaagtgttctgtaatttatataacatttatttggggtatcatattaggctcttgctgtgtgctttaataaggcagtggcctcaggatttgttaaatgtccttaagtcagttactgccttgaaaagtggtccatgattagtatatttttgtagttagtgatttgctgtcagctgtcatttctcaaggtcaaattctggcagttccttgcatcctattatatacatccataagctttgacctgtgagcctaaaggtatctctacaccctcctggagaaagatatagtactttgattcactgacattacattcctattttctctctctctctctctctctcaaatgacaaggtagctaattcttctgtgtgttccttaaggcactattaacactctagtagtgccagtgtttgtatgtttaaaagacctacagacttactttttatttcttttaaatacatatacttctcctgtgatcgtaaatatttgaatgtgatgctactgtatactggctgtgtatgtgtgaatacagccaagatgacaaaaagcagctgcagttatgctcagaaagagtgttgtttcatttacagtggtttcttttcttcaa

SEQ ID NO: 121805 - DNA, 1046 bp, Homo sapiens
gcacaatcacaactcactgcagcttactgcagcgttggcctctcaggctcaggtgatcctctcacctgagtctcccaggtagctggaactacaggtgcatgctacatgcctggctaattttttgtggagatggggtttcaccatgttgtccaggctggtctcaaactcctggactcaaatgatccacccatctcagcctccgaaagtgccgggattacaggtgtgagccaccatgcctggccaccacaatatcaacatttttaaatgaaaaatcttatcttagttaccatagcattagcacctctttaaataactccattaatttaacctaaatctaaacgttctctaaagttcatcattaggatcttgaattatggaacctcttgacttttctagttccttaaataatgacaagtattcaagtacatttttgtcttccatttttaatatccctgtaacatgaggggaattggcaagattctcttcataaacccccctcgctatcccattcaccgaattcatcagtatagccaggaatcctaataggtttcagcaggaacatttctgacagctcaatatttttctgtccaatgatttggaaaatcctgtttctctttattagagctgaagtaactaaaaagagagaagcttatctgatatatttcagtaaggagagaattttttgtgtgcatggtgtgagttacatggtgtctcaaaagcacagtctcagagttatgtgtatcagagtggtagttgccctaccacttacctgatttattaacataacattttctttatctgcacatttcctaacaagctcggtgacaaaagtcaatcttttgtcaatcctttatgcctggataatcaatcctgtagaaaaaagttcatgattttagggtgtccttttcttttgatgttgttgtgggaaaggtttctttcattcactgttaaaagattcttatccttattaattgttgaagttctttcataattcctatggctccaccaaattacatgcatattaattagaatgtaagttaatggga

SEQ ID NO: 121806 - DNA, 1050 bp, Homo sapiens
atcactaacagaatttaaaagagatggttacgataatcttgtgttctaattttctatgattatatcagtatggcatgccgagaactttttgattgttttgagtttgcagttgttgtttagttttttgttttgactctagataccacacagtgttccattctcagattcatgcaatggaatttatagtcatcctagagatcattagaattctattatgttaaaaggccattaacttttaatgttgagactctgagaagtgacgttgcatagttcctctgggcaaggaatatgggcagtttttttcttcttctttatgtgtaatcgtgttcagactggagttgtatccatttattcacaatgtccattatgaaaagatttgtgataaaagaaagatgagatatatctacatttaggtcagttaaacacaagaatatttaattatgtccttcctataccctgtaccactaccagttccttacatactccacaagcacagttataatgatagtatttcttcattctcaatgtttcattgcatttaagagagatgggcatattagaactgtgggaataagaaggaagggataatgcagagaccataaccattaccatttttttatattagacctctatttggtttgatttttattttcatgtttattgttttataagaaataagtacatcttttaatatgactccatattgcgtgcaaaataaaatatatgccatttgaaattcttcatggttaatttgaaacttcgagttctcatctccaactaaattatttcttactctgtccatacttgtgccctctttatctcaaatctttttctcaggacattgtgtaagtttctccctttgtgtacccactctttgagtgaggctaatcccaaatcccatctattcaaacttttccagatcccttcatagcaaatacctttattccgctactttccaatggtgagtttctctgttataccccttattggagggtaccttttgttaaggttataggtatttgtcaggttttcctgttagattttggtacg

SEQ ID NO: 121807 - DNA, 1033 bp, Homo sapiens
tagagacagggtttcaccgtgttagccaggatggtcttgatctcctgacctcgtgatccacccaccgcggcctcccaaagtgctgggattacaggggcaaaattcatattttaataaaagggatgcatatctaatgtttactaatgaattattcaagttaaaattaatagtcactatagtaaagaccaatttaacttatattctgtaagtgagactgaggtgattctttgtattttgattatagttcatgtttctgtcagcattttgtagagagttctatgaagctgaactcatccttgaaatttagaattgccataattctttttaatgtggaatataacagtcagtctttctgggatctgtaatttcaaaaacaacaacatttttctttttgattgatcatagctattattggaacagctggtaacatgtgacatagtactataatttagactgaaaaaaattgatttgtgaattatatccactcagcttaaatttctctgtttctagtctccagagcatcttttgtacttctttttctgcagaaacggcttcctaacataatgttcttacattttcccaggggaagaggaaaactccatagtcaattttcttacttgtctgaagtataaaaaaagaaactctttacacaaaaatagagggaaaaacaaagtaagattcagaatttcccaacacaggaaataaaagatttattccatttaaccttttaacaaatgcactttacacattttgtgtgtgtgtgtgtgtgtgtgtgtgtgtgtgtacttcaggatttctgttcatcctgcagtcaatgtcaaggagatgagaatttatgaatatgatgattcagatgatttcagatttgagactaattcccacataaatcattctcccctctcatcttttgtaggtaaaagtaagccatagaatagtttgtaggatcattagataacaagttaggtagggaactattttgtatttaatgatttccctgttaaaattcacttttcaactatttacttaagtattc

SEQ ID NO: 121808 - DNA, 1081 bp, Homo sapiens
gtagtatagtttgaagttggataatgtaaagccttcatctttgttcttttgcctaggattgctttagctattcaggttcttttttggttccatatgaagtttagaatagtttttttctaattctgtgaaaaatgatggtagtttgataggaatagcattgaatctgtagattattttgggcagtatggccattttaatgatattgattctttcaacctgtgagcatggaatgttttctatttgtttgtgtcatctgtgatttcttttagtcatgttttatagatctccttgtaaagacctgtcacctccttagttagatgtattcataggtttttttgtgtgtgttttttgtggctatcgtaaatgagattttgttcttgatttggctctcatctcgagcattgttggtgtatagaaatgctactgattttaataccttgatttgtatcctgaaacttcactgaagcccaaacttattaaaacaatgtctctacagcatgagaattagaaacaaagagccagagaaagtgaagtttgattaccagttgtacttacaatctgtgtgcctttagataaattggtcatttccattagcttccatatctattaaatgaatataatcatgggacctaattcatggcattctttaaaaagattaaatgacaatcctaaattcataatactaaaagaatattcaaattaaattaatagcagagagaaaagcaatgtaatataaaattatacttaacacagagccttgcatattgaaattctcaataaataattttttgttgttgcatttgtaattatcagtactaatttacagaaacatatgcttactaatatatgctatatatataaatatacacacgcatatataggataaagtacacacatacacatacatgctcagggctgccatttagaccatcttatttgtaatctaactactcaggaaacttaattagttatcagaagttggctttgtgaaaatgtgatcaaagaaaaagagttagatgatcctggaggatagttcatccaggctttagtagagcttggaaaattaggccttccacattac

SEQ ID NO: 121809 - DNA, 1069 bp, Homo sapiens
catgagaacaatttttgtgtttttggactcaaggaatattggcaaattcagtttttgcttggcttcttaactgaagtctctttattgttgggatctcttatggtattctactcatttctctttccttctctactctccattcttcctactgccccaaataattcacatataatcacattagactcctgacacagaagtgttagtcttagagaggctcttttacatatcaaccccattttgagtatcacctgctagaaagtgaaaggaggctctgagtttttgagttccataataataacaaccaaacttcagaaaatgaagtggaaaatttcagtttgaccacagcaataaattcactttatctgtgctgaccatagtcagaacatttgcaaagtgatgtttcttgactcttataccacagatgacttcagatgtgttagtaccagctaaggatgtaataccacagcatttaaaaattttgcatgaatacctctggtttctttttcttgaactaaattaaggaagaattttaggaagctgttaagcttcttcattacatatttctatttatgcttcatctgtcatctcatttataggaatccttccttaaatttccctaagaccaggtaatctttatcttgttcagatcatgtcagaactttagctgtcagttttggttttgcataccaaaatattttagggaaaagtaatctacatataagtttgcttcatattctttcactaaaaaatctgtattacatttctcaagtatgttttagactgacattataccactggttagtttttctacaaggagatatgtgtcattttttgtttgtgttgctttttcttatctaccgagcaaccattgatcacctgccatgtgtcacacactatgcttagaggcttgggattatgatataaaatgtcttatgatgacacttgacagcttttgataagagactcttaaaatatgaaatttttatcagtggtttcaatgttgagtcatagtgcatctaaaggaattccataaaaccagcaatttagtgttagggttgagaagtcttta

SEQ ID NO: 121810 - DNA, 1012 bp, Homo sapiens
caacctcccaggctccagcagtcctcctgcctttgggctcctgagtagctgggactacaggcacatgccaccacacatggctaatttttaaatttttgtagagatagggtctcactgtgttgcctaggctgttctcaactcctaggctcaagcagtcctcctgcctcaacctcccaaagtgctaggtgtgagccactgtgcctggccttagattatgttggtaaggagtaagtttattattttttcataaccattatttcttcttatgtcttcctaaacaggaatgtttccattatggtgtaatttgcaaaaatatataattaccttaattttagggggaaataaaagataacattacagcagctttcactgatttgtttttttaaaagttaatttgaaatattaattctatttatatttatttttacaagaagctttttctccaaagagtatataaagacattttttgcttttagaatcttgataatatctgtaggatcatcagaaacgtttagattatgaaatctttttttattttttaaaatttttgtgggtacatagtaggtgtttatatttatgaggtacatgagatgttttgatacaggcatgcaatatgaaataagtacatcatggagaatggggtgtccatcccctcaagcattcctttggtttacagataatccagttacattctttaagttattttaaaatgtacaattaagtttagatggtgaaatcttgaaatgtggagaattcccacttctaaaaacatatttgtcttcctaagtttgtattgtatatatattcaaaaagagtatttttcatgacattgctttagtctactacaagaacaattgtttatagtaaaaatattactaagccttggtaaaatgaagcagttatattgtagtctggtggcttatatttgatataattgtaggtggaattttttaaattagcaatttgttatagtttgctctattaagatttagcctaaagtatttatgaaatt

SEQ ID NO: 121811 - DNA, 1528 bp, Homo sapiens
tagttggttttatttaactcagtctgtagcctcttatttttaacacaagaatttagtccattcaacatttgtatgctaaagtatgtcgctttattccttctactttgtttattaattttacctcttttttgtttgcttgagatggagtctcactctgtcacccaggctggcatgcagtggcatgatcttggctcactgcaacctccgccgccctggttcaagtgattctcctgcctcagtctcccgagtagctgggattacaggcgcgcaccgtcacgcctggctgatttttgtatttttagtagagatggggtttcaccgtgttggccaggctggtcttgaactcctgatcttgtgttccccctgcctcggcctcctaaagtgctgggattacagacatgagccaccaagcccggcctaattttacctctttaactttcctttttaaaaaattgtttctgtgtgataattggtattagttgcattttcctctttgttaacctgaactgtctattaacttttcattatattattggttacctttcctttccttatattcataatcagatatatttctctgttattacttgaaaataaagtaccaactctcccccaccaagatgttctttttttttttttttttttttttttgagacggagtctcactctgttggccaggctggagtgcagtggtgtaatcttggctcactgcaccctctgcctcccaggttcaagcagttctctgcctcagcctcctaagtagctgagattacaggcgcccgccaccatgcctggctaatttttgcatttttagtagagatggggtttcaccatcttgttcaggctcgtcttgagctcctgacctcgtgatgcacctgccttggcctcccaaagtcctgggattacaggtgtgatccactatgcccagcctcaagatgttcttttcatcctcccctcatcatatagaaattttagaatagtttctaataccttacctttcttcttactttagaagtctttggcatgcttttattctcaccacccattcccccctagcttttattggaaaattttactggaacattttccccaacccaatccctacaggtattactgaaaaaacttagtagtttttttttgtcgttgttgtttgtttgttttatgaatttctcttacagacatgaatgtcacttttatttcaagaatttttttgtttggatcttgttttgtttggatctaaattgtttggatctaaatttaaattgggttcaatttaaatttaatggcatttatatactgcaagatttgtcacctaccactttttccttttcttcattttctctttcttgttcacattcatttgttctttggagtaattttctcagatgggaatatatagatttttaatctgaattttttgcctaactgctaacgtcttcctttttccagacaggcaaatcatgtcttacctggatatagaattcttggggtgcagttcttttctccttctaattgccttttggctcct

SEQ ID NO: 121812 - DNA, 1256 bp, Homo sapiens
agcagatcactgttgccagaatgctgacggagggaattgactgcaaatggtagcaagaaattttttcacatccttgaaatgttcaatatcatgattttggtcatggttacgtaactgtatatatttgtcaagatttgttggttaattttattcattataaattatccctccataaagctgaacaagaaaaaaaagcatttttaaaaatgaagcttcttttaagtcataggaaggttggatagaatcactggttttattctttttctggactttcacaaacaagggtctacatgtctttggtaggaaaagaagaaaggtcatcaataagaaggtagatatctagcctgacttgttggttgaagattaaaattatgtttagaaaagaagtaattttgcttaataaaaagttacattaggtttaatacattgaatgtttaatttttaacttcttagtaacgattgtcatcattttaattggctttagaaatacaaacctggtcgatgtgatgatattttgaaatggaagcctcccagtctgaattctgtggattttcgtctaaaaataacaagaatgggaggagaagggtaagtatgcacttttgtactttttgcatgaaataatactgtttgtgtaaggcttcaccttttacagggtatttcatatatactttacaatactttaaagaaagaaactaaaatactttattttacaagatattttacatatatacttatacaacaatttcgttttcagagattactcctttgacctgtgtcagctaacatatagcagtttcctttaaagtttactgatctttgttttaaaatcattttcattaatataattatattaataacaacaatataaaaggtaataataatattaaaaaacgaattttggctgggcgtggtggctcatgcctgtaatcctagcactttgggaggccaagataggcagattgcttgagcacaggagtttgagagtagcctgggcaacatgacgaaacccccctctaccaaaaatagaaaaattagttgggcttgttggcacatacctgtggtcccagctactcgggaggctgaggtgggaggattgtttgagcctgggaggcagaggtagcagtgagctgagactgcaccctgctgcactccagcctgggtgacagagtgagaccacttcccccgccgcacacctccccccaaagaaaagaactttgttaaattgtaaagtgaaaattttactaaattttgagatt

SEQ ID NO: 121813 - DNA, 1025 bp, Homo sapiens
tgttcattgtttcttttgctgtgcagaaggtttttagtttgatatagtcccacttgtctatttttgcttctgttgcctgtgcttttggtgttatatccagaaaatagttgccaagaccagtgtcaagaagtttttctttgtttacttctaggagttttacagtttccacttttgtgtttaaatgtttaatccatttgagttgatttttgtgtatggtgtgcacctttttgtctttccattcaccccgtacaatgtggtagttagtatatattttggaatctggaataaaatacttgggttcaaatatcttttctaccaatttctttatgactctgttttgtgatccatgagaaaagggtactatgttagattgaactacctcatggagctattttgagaataaagtgatttaagaacactcaaaccagtaactggtgaaaagtgaaaaactcagtcgatgttagcccttagaagttattgctgccttaattattctgtgtaaagggcatagtaggggataaaactagagaggatgaataaggctaggtaagtgggcacggggaggtggtctttggttgttaggttgagaagcttgtattattttcagtaaaccatctaaccagatggattcaggatcagttgtatttgatagggcctgttgataatagggataacagttaggttgatcacaatagcctgggtgaaaaagtaatagagataattggtggaatatggaattggtagagatcgcatcaaagatgattcgagagttttgaacctttctggttaggagcattatgttaatcagaaatggaaatcagaatggagatgaactagttttttgtttaagaatataaatgattcagttttagatttaaaactttaggctgcctttagggtactaatgaataagccagtgcctggcatacttttatttgggagaaagttaggacaaaagatgaagatttgggagtaattttcattgtaagtgtatttggagtcttagaggagtggatgctgtataa

SEQ ID NO: 121814 - DNA, 1113 bp, Homo sapiens
ctatgttttattagactcctatctatatggttttcagttctgtgattacacttccattttgaattgctaatttttggccattcgtcacttaaaaatgaatattttaacgtgatgatttggtattttaatatgcaggtattcaatcttttacatgatagctattagattgtttaatttacaaagttggtagtaaaatgaaatcttatttgtttactagcttttataagttgattttagtgtagatttatgtagcatattacagttttacatgtggaaataacattaatttttaaccttttgaaaaatcagctttgattttacttttatcatctggagaaactatgtttctagacaagaattgtatgccattaatctatcactatgaaataaaaacagaatagtggattgtataattgaagtaagaataaaaatcttgaaaatatttttgttttatatttagaaaaatggcttttcttgttgtacccactaactctactatggttagtaaaacataattgtttctattgagtctagagttatttactttcaagtagtagagatataattgttttttaatgttttcatcactattttgattttcctataaggtggttcagcttgattttatgtatctggtattcatcagtttgcatagaaatttagagtcagctttgattttaatattgcattcttttgaaatattaatatttttattaaatctttactactgccaggtatattgaatgttatggatagattgtaaaatgaaaattggaattagcctaatgccttgtcttgaagtacatgacaaattagaatggttttcctctgtagcaaggatgttaccatggtgagagcttctgtttccatgacatttgcttgcatattttgataggtcttcatttgaagaagggctctgttttctggcaggctgcaaaagtgtcattctatcttttctcaaaatgtgttacttttattgaaaaatataattttccaaggaattgtaatagcaaagtgccaagaaagaaaatataccttattttatttttttttccttgttcatcttttagagcacagcaaaatattcttagcttgctttgtgtaaggaagaaa

SEQ ID NO: 121815 - DNA, 1905 bp, Homo sapiens
attaaaaacattctctaagggttcttggaaaacacaatgtatttatggattataatctccatgtttgagctggtttgtggttacaaattcttgcccccaagcaagtttgtttgtagctttggactataatcttcatgtttgagctagtttgtagttacaaattcttgtccccaagtatttctttgcttctcctgtttttgtgtgtgtttattttttattccttttatctattactttccagagtttctactttcactttgtttttgcttctatgtctttcttccttttgtgctggcttaggaatacatttaaaaatatgttttcagtgctttattcattattttggttgttgtagttaggactattgtttagaatatctagcctgccaaggaatggaaatttgtgtgtgtgtgtgtgtgtgtgtgtgtgtgtgtgtgtctgtgtgtgtgtattcaaatcttacgatgtattaacttagattcctttagacctatccctttctcttattttgtatttcagttcttataacttatatattaagaagtttttataaagcttagcaagaagtttaaatacttttaaagtgattattatatttttaaagaatacatgtgtatttattttatagctacttgaaggaaattttgccaaagaagtgagccatgaaatggatggacttatttttcagcctactggagtaagttcatttgtctgtgtgtgtgtgttcgtttgtgtgtttgtgtgtgtgtgtacacagatatacatatacatacacatacacatgtatgcctcaaacttatttacttgggattgattactgctgtgattgccacttttccttaaaacaaattgctcattatgaaagattttatttatatctaaatacatgtaatactaaaatgagcacccatctgtttttcactcagcttaagaaataagcatttttggtcgttacatttcaaagaaaccagtcttttaatataattagttattaaaaaataattttctaccaatagcattacataaatgtttatttccttttgtaacttggtatacttttatgtattaatctctctaaaacttcattttgctgtagtttactgtagagtaaaattcatactttgtcactacttgagaaagaataaaacttttgaatattttttccatgttaaatttttgaaatgcactgaagaacttttaccaacttaatggtcgaatcatatatttgaagtaagttgtattttactctatagcaggttttctcattctcaaccactgatgtgttgggccagataattctttgctgtgggagctgtcttgtgcatggtaggatgtttagcagcatctgtggtctctactcactagatgccaggagtatagatgccaggagcatgctccctattcccatttgtgacaaccaaaaatatagtctgacattgcccagtttcctcagagaacataattggccctacttgataacccatgttctgtaggacggtgtttttcaaaatgtggcctgtagaggaggattagcaccacccaggaagtttcacagatgcagctcagccccacacctattgagtagaaactctggggatggagtttagcggtttgtgttttgacaagttctccaagtgattctaatgcatgttcaagtatgagagctacttactctataggaaagagtttatttcatgtgcaaccacctcatcatatgctgctttttttcttcaccaactcttcttttagtaattagagtataagctagttgagaatttatatatggagacatcagactgggtgcctggggtcaaagaaagggaactaataatttgaacacagtgtattaaatactgtacaggttgagtatctctaattcaaagactgatatgctataaaatttat

SEQ ID NO: 121816 - DNA, 1782 bp, Homo sapiens
ccagaactgaaaggtggaggtagtttattcttttttaagtattccattggtatattttccatactataatgaattgatattgccaattcgtatttctaataacattggagattgagtttcttcttcactgtagtcttaagctgtcattttgcttattatttttaaaaggctcctttctatgctttgtaactttgcagtttctattttatttctcatgtttctaatgtcaagccttttgcattatgtttctctgcttatgcatttataacaacttggttttcggttacatcatgattcatagacataaaacatcaactcagagtcaatcatatggtaacctttgtcagttcctccaatctttggtccatgctacatgccctctgtaggatatttcagatggtattcaaagataagattatgttcataagtaagcaaatttaagttttataggaaaaaccttatgaaaagtatcatgctttattaaaaattgatatataatgtctactgttttacttttcatccaattatcttcgaattttgtctggagggaaaattatcaagaaaattgtaattctgaaaaggattgtatcctagtttagggtgattgaccagatattccactttaaatttctccaagatttttcaattaaccatttctaaattaagattcttttatttgttagaagtgttttaaaaacatctagggtaatttaagtagaaccacgtttctgaagaaagattgacaaggagaaattgtaattatgtcatcacatttaaatgtttttactgtcaaattgaaattaaggtattatttaggcacattggccaaggcttatgttgttattgggtcctcatatcccattagcatgtcctaatgctggcttggtttctagcattggaaggcagtcaggaaatatctatctcatgaacactgcatgcaattgtatttttattgggatgttaatcaaccagtgaattatctatgaaaaacttagcttagtacttcttacattaggataccagtgcaactcatgaataagttttactttatatatagaaaaggagaaaaagaaacagtaggttattttttgaatgtaatatcagacacaaaagaatatcaaagtgagtttaaaattatatctgttatttaaattattaaataaaacctgacttttcaagtcgtgctattttaagcacattgagactctctttttgactttttgctaactcctttttttcatggagactgtgcctgacagactcttctctcaaaggctgcccatcatcgttgctgaatacacttcccaatgtttggtttgacttacaaccttggcctctcaatttctttgaaattttcatctcagcgacttaattttgaaatttggaaattcattcctacctattactcagtatgctaaatttggacatactgctttgatacaacttccatctttaaaggcagctgggacatttcatcagcttcaccatccagtgagctatggctgttccgtcttcagtgaagtccggtcttagccttaggaggggagaagttgtttttattgtgtacactatctcagcccaactggctattttttatatctgagattatgaaattctttacagttctccttactttcttaaagtggaagttgaggtcgttgatttgtaacctttttcttaattttttttattataaaaatgggtaaaaaatttttttttgcttttgttaggcgatatctaattctgttgcccaggttggagtgcagtggtgcaatcaggact

SEQ ID NO: 121817 - DNA, 1035 bp, Homo sapiens
atcacttgaggccaggagttcgcgaccaacatagtgaaaccccatctctactaaaaaaaagaaagaaaaaacaaacaaattagctgggcatggtggcacacacctgtaattccagctactctggaggctgaggcacaagaattgcttgaacctgggaggcggaggttgcagtgagccaaggttgtgccactgtactccatccagcctgggcaacagaggaagactctgtctccaaaaaaaaaaaaaaaattattatttgtgatactttaatctacatgataaagagactccagtgaacattagtctacagatgtttaaggtctatggaaaaccagtatgttatttctcatgaccctgttcttgatattatactgtaaatattagctttttaatgtttcatttacaggtacatgatgttgattgatggcacaaatgaagtttttatgattgatagagacaattcagtatttcatgtttcaaatctggaatttccatttcgtaaagatcttcgtatgcatttatcaaatactctcttggatggcgtaagtcatatttatgtatactataaaattaaacattgccatttttcttttccttgtaagtaaatgtgtatttctgttggttaagaaatttcgaatgaaatctaacttttttttttttttttttgagacggagtctcgctctgtcgcccaggctggagtgcagtggcgggatctcggttcactgcaacctttgcctcctgggttcaagtgattctcctgccttagcctccccagtagctgggattacaggcatgtgccaccacgcccggctaatttttggatttttagtagagaaggtgtttcacatgttggtcaggctggtcttgaactcctgacctcgtgatccacccgcctcagcctcccagagtgctgggattacaggcatgagccactgcgcccagccaaatctaacttttattaggatgttaaatttcatttatttcttatgtatacttatattgaattaaggtcctcttaaagagagatctgccaa

SEQ ID NO: 121818 - DNA, 1025 bp, Homo sapiens
ttatttaatgtattctggttttaaacttgcttttttcccactaaatatattgtaaatctctttccatattaatgaatatttttatcattgtttaaaaaatgcttgactagtatgcttttacatgaatatgcaatatttattttacctatttgctgaatgatggacatttgagtttttatcctttcactgttataaaatattatgatgaactttgttgtacatacagctttgcttaacaaatattgagtgccttcctttagtgtgtattcaggtagactgtgcaagatacttaagctgtgagaaggaacaaaatagataggatttctgccttcatagagtataagataaattcctgaattgatgatcagagttgggtctaaattggtgataactttaaattaccaggagtttaacgaccattttactctcagactactgggaggaatgtgaattaggactctaaggtggtattagttaccattgttttctgtcagttttccttctctttaattatgtacttcctaattttattaatgtatatttggttgttttacttaattatatatctcacatctcagcaactgctctgaaagattatttccagttttggtagaaaacctgcatttacagtaaagtagtctatacatctggcttttctgtaatccatatacctttggtttatatactttagcattttctatctgggaaacgtatactgaattaaattttgccttttaatgggaatgaatgaatataatacaaatacctattgataattctgaatattaaatttgcagttgagataatttcctaattaataagaaattatattgcatcatagttatatactaaggcagtatctgacagtttgtgaggtagttgcttctttttaaagaatctggctgctttcagggactttggagtgatgtggaaatatttccacattccttacatgaaatagctccttactttttgttagtatcgcataacaaaagaacatatgatttggaatgactggagttcaa

SEQ ID NO: 121819 - DNA, 1021 bp, Homo sapiens
tttcagatctcaatctgtactttttgcatgacagtgagctttaaaatttttcctaacttgatctaattttatgtttgataccagtaaatggagaaattacaactctcttaaaacatttggtgcacttagatacggttttgttatttagatttttcctttgtgcatgaagcaatattaaataaaatcaagcatcatcatgttgtacatcttctacatgtgtttttaattctctttcttaaaaataccttaattgtgttattagcacatttctaaatttaaaataatgggtgatctttatagtaaaatatttatggtaaagtataatgcctgtgttaaaagtaaatttatttcaagtttcttgtagattattaaaatccctttcagtaaaatttttttctgaaaatgttcattgttctatagaaataacatgagagtatgaaaaagatggtgcttgctttaaaggaaattcctaatttctgacaagttttaaatggctgctgttttgactacacactcagagctgccaaatacaatattttgatatgtggtcaatttcaatggcagtaaagttttaaaaggaaaaagagtttgtgtgtatttaagaaaagaaaattgaagatgtggttcatgccctaaaataggtcaaaatctaatgaacaatatgaagtataattgcatataaatgacatgacatagactctaataatgtgggagttcttaggaggatgatgagtgaaggatgagtaacaggggtgaggggagcaatgtgaagaaagtcatgaggtagaaacagcctgagctggaccgacctgattaataattgatataaatccacaatctttgtaagctcttacagttaaggcagttaggtgcttatgagaaaattgttacactggtggctgcataaaccctttgtttatattttgaagcatgtcagagttttaatgattgctaagccataagcttctgatttaaactttgactatgatgtcaactcccactccttgaattgttcttagga

SEQ ID NO: 121820 - DNA, 1010 bp, Homo sapiens
tagatggcagcagaggaccaggtttaattcagactgcttttgtgaagcagtagaattctaatggtatccagtgcattggacatctattttataatacaacccagaatattagctggggattattaagaatttagtaaggattagtgggatcatatatacagcattactgaaagcatagccattttgacaatgttggtatgttcttttgtgcattgcatctgaattattatatttgcaaatgaccttaaagtgccattttggaccttttttggtaaaaacaatgtagccgtattaaagtccctagaagtgttttttctgtatcaggaaactgagacattcttaagttgaaatctcagaagggaagaatgatatgaagattctcttttatcccatttggatttttttttttttttttgctcttaattgtgttgggagcaaaggagtctaatagaaaaacatgatgttggaatgtagctcttttatttataggcagtgaaatttatgttcataggatagaaaagttatttgacttgtatgtggtatatgaggaacagtaatttttatatatgtgccctaatgatatattttggggaaaaaattctataaccatatgttttaaaatcatatataggatttttattttctggaggaactacatttggtttttgcatgtttgatggtaatttgcttctcaaaaggcagtaacatgtgaactaggtaaagaaatcagaaaatgagcaattctgacagtgcttttaaattgtgaagtctgatttgaagattatataggtggcccatcttagtatagtatcactctggctttcagcccagatttaatgttgctgctatttttgctggcaggtgagcttccttggactcattttattttagtaacatttttgaatttagaaatttaatttttaaaatacttttgcatgggcagaaaactaaattttgtctccctatgaattatctagaatggcatttaggtcttttacatcttatgtcag

SEQ ID NO: 121821 - DNA, 1059 bp, Homo sapiens
tgcttatattcctgttctttccttagtttgggagttaatttattttatcaagtgcctgcttagttttagtgtcttgaataagactttgataagtgatacttttattatcaattgttcaggggcaaagtacatacagaatctccctcaatgtaaatgaatgaactgtagtattgccatttagtctacttatttgggaacaaattaagttactagtaaatttgccctttcatttttttttttttttaggttaaaatgggcttgttggtggacctgacaaatacttcaaggttctatgaccgaaatgacatagaaaaagaaggaatcaaatatataaaacttcagtgtaaagggtaagttatatattaagattctttaatattgaaacctttcatcacaatttgtaatctcttttttcaaaaaaactttttctatattactagacatggtgagtgccctaccactgagaatactgagacctttattcgtctgtgtgagcggtttaatgaaagaaatccacctgaacttataggtatgtttggctttactttgccactgttgaatattttattttgcagttaggtttctgttttcttgtttgcaaataagttgatatgaaagttttttctgttttaaataatgaccaagtagtgtttattaaaatgagagattgacttgtgaattatgtaataaatgtattttcataatttttacatttttctagataaagccctgatttcctctcttcaggtgtcctgttgggaaagtctatcctaaacactacatatttattttttatacttctacattttataattttacattttatactatattattctgaaacttcattcttttttattcaggatttctgagagcaatgtatggtgatgtaattgtagttcatttttgcttctatatagtattccattatacaaatacaccacagtttatactcttgttgatgcacaattccttcatcagatttttattgattgctactctatctataccaggcaccagctcgtggaacacatcagtgaacaaaatagaaaaaaacat

SEQ ID NO: 121822 - DNA, 1012 bp, Homo sapiens
caaagtcttgtcagaataacgttttatggacttaagttcaatgacttaatcttcgtaataatgaaatgaaaaagttcccgttatttagtgaagaatgttgcattgaattagagatttgcggtttatctgtgcccttgggaaaaaatttgcccaccttgtttctttaaattatcgtctcaatgtctcccttttaaaattccacgacttttgaaatatccgtgattacctaaaagcttttgtgcttgtttcctggcctgttttctagaacaggtactaactagggagctctggcagtgaaccttattgacgtggaaagttgtggtcctctttcgtgtcgtgtcttgcttactaccgcgttacaagtgttggtagtgcagtgatctagtggattaccttacgcttttccatcctttcaagacttcctataaggcccacttaagttgggaaagattaaggtgagtgaagcagcgttcttgaagcagttactaaaccagaaaggaggtacacagcaaagattgtttctggcactcgtatttggaagagagctcattagtcttccttacagttgtagaaaggtggacttgggttatttcagactttttttagtttgacattttagaactggttcacgttgcatactggtaactagcagtggtgattaactgcatttttagtggcgaacaagagtgaacttaaaagtcaagggaaatttaagttttttgttgttttttttttcttgagacagagtctgcctctatcgcactccaggctggaatgcagtggcacgatcgatctctgctcactgcatcctccccttcccaggctgaagggatcccgcctcagccagcctcccgaggcgcgtgttaccacgccgggctgatttttatatttgtagtagacatggggtttcgctatgttgcccaggctggtctcgaactccttgagcttgagcgatctgcttgccttgacctcccaaagtgctgggattacaggcgtgagccaccatgcccaa

SEQ ID NO: 121823 - DNA, 1654 bp, Homo sapiens
ctatatccatgttgtacccagtgtttagctcccaaattcacttgtaagtgagaacttgcgatatttggttttctgtttctgcattaattcgtctagggtaatggcccccagctacatacgtgttgtcacaaagaacataattttgttcttttctatggctgtgggcaaacttaaacacaacaaaactagatatgtgatatgaggttcataactgatttttatctagaaactatatttacttttgtgttcttgtctttgtaggttttaaaatcaaagatgggaaaatcggagaaaattgcccttccccatggccagcttgttcatggtatacacttgtatgagcaaccaaagataaacagacagaaaagcaaatataacttgccactaaccaagatcacctctgcaaaaagaaatgaaaacaacttttggcaggattctgtttcatctgacagaattcagaagcaggaaaaaaagccttttaaaaataccgagaacattaaaaattcgcatttgaagaaatcagcatttctaactgaagtgagccaaaaggaaaattatgctggggcaaagtttagtgatccaccttctcctagtgttcttccaaagcctcctagtcactggatgggaagcactgttgaaaattccaaccaaaacagggagctgatggcagtacacttaaaaacgctcctcaaagttcaaacttagatttcagatttcagtatgtgtgtaaaacataatttttcccatatccctggactcttgagaaaattggtacagaaatggaaatttgccttgttgcaacatacaattgcaaaagatgagtttaaaaaattacatacaaacagcttgtattatattttatattttgtaaatactgtataccatgtattatgtgtatattgttcatacttgagaggtatattatagttttgttatgaaagtatgtattttgccctgcccacattgcaggtgttttgtatatatacaatggataaattttaagtgtgtgctaaggcacatggaagaccgattttatttgcacaaggtactgagatttttttcaagaaacagctgtcaaatctcaaggtgaagatctaaatgtgaacagtttactaatgcactactgaagtttaaatctgtggcacaatcaatgtaagcatggggtttgtttctctaaattgatttgtaatctgaaattactgaacaactcctattcccatttttgctaaactcaatttctggttttggtatatatccattccagcttaatgcctctaattttaatgccaacaaaattggttgtaatcaaattttaaaataataataatttggcccccccttttaaaatagtcttgactctttgtgtgtgactgtttctcatgtttgaatgtgtgactaggagatgattttgtgtggttggatttttttgacttctactttactggctgagtgtgagccgccatgcctggccataatctacattttcttaccaggagcagcattgaggtttttgagcatagtacttgactactctagaggctgagacgggagcatctcttgagcctgagaagtggagattgcaattgagctaggatcaggccactgcactccagcctgggtaacagacgctgtctcaaaaaaaaggccaagagaa

SEQ ID NO: 121824 - DNA, 1320 bp, Homo sapiens
tgtaatccagggccaccagccaagagacaaccacactgatcatggtgggtcagctgtactgattgtcatcctgactttggcattggcagctcttatattccgacgaatatatctggcaaacgaatacatatttgactttgagttataatatggttttgtgacttatgagctgtgactcaactgcttcattaaacattctgcattgggtataatctaagaattgtttacaaaaagattattttgtatttacccttcattcctttttttgatccttgtaagtttagtataaatatatctagacattcagactgtgtctagcagttacgtcctgcttaaagggactagaagtcaaagttccttgtctcactatttgatctgctttgcagggaaataacttgttttttctcatgtttcatcttctttttatgtaaatttgtaatactttcctatattgccctttgaaatttttggataaaagatgatgttttaagttccaatgagtattactagttactcaataccacttattgagtactctgtttctacgtatgtagaatgtatagggatagaagagttgaaaagggaaagcaaaactcctcaagtagcttccttaaaatgtcattcataggagatgtactggaattgctcattctgtgactttatttgtgtcctaaacattcttcagtgaaaataattttatttcagtcaaacatttatgaggaaatgagatcacatctttgtcactggatgctacttgaagagggagtactttgtaaccactttgatatgctgttatcaccaccccctgccctctgctgccataatcacacaaatttaaaaagaaagaaaacagtcttccatagatttttaaggaagaaagggcccaagccaggagatcgcttggttttcttccagaagttaaatggggggatctgaagatttgaatgtttggtctgctttgaaatgtatgtcttttgggatgtattatatgcctagctttataatcagtataaattttaattattccaggaatatgcataatattgaaatatttcatgtcctattttaatagaaaacctcagggcccaagtaacagtgatagaagttagaaaaacctttacttagaattgtccacctagtcagagcccaagaaagaattttcagtggaaaaatcaatatataacttagtgctagctagcgccacagactctagtagataatattatcatcataatggctggtgaaaccatataatcacagaaaaacattgccttcagcatgttcagttcgcagcactgagggcactcttgagggtgttgt

SEQ ID NO: 121825 - DNA, 1050 bp, Homo sapiens
tcagggggccattgacatgtgcagcaggtggtgggagtataagagactggtgcaaaagtacccactgcctccaccagaagtctaagagttacctatccatgccattggtgtcaactgcaccttcccactaatccactcaaggtttcatgtccaactcaggcccttctcgtaagctatagatacacagaacttatggtgactcaacatcttcatttcccatagagtgaaaaaaatctctgtaagtataaagacaaaactcatcagttttcttctcctcccctaaacttgcagtttaccctagtatttcatatctcagggatagacagcactcaggcacctatgggagtcattttttatttcttggtcgcttccttgctccatccctgccctgaaacacacaactcaatacacacacagaaacacatatatctaatcagtcactgttgtcaccagatcaatcaaaacaaaaactgattacccccaaattgaaaaattttcagtagctttctgatagctgtcaataaagttcaaagtaaactgcttagcttggcctacagggctgctcatgattgaccctgcccttcctcaccagcctcactgtccaccactcttatgctcttcctcattttctttttttttgaggcagggtctcccagcctggagtgcagtggtgccatcacagctcactacagcctcaacctcctgggctgaagtgattcttccacctctgcctcccgagtagcagggaccacaggtgtgtgccaccacacccagctaatttgtgtattttttgtagagacgagggtttcaccatgttgcccaggctggtctcaaacgcctgagctcaagtgttccctccaccttggcttcccaaagtggtgagattacaggtgagagccactgcaccaggcctgcgtttttacctatccattttgcctgaatgactctctagctggagtagcttttctcacttaggtgctttggttcctgttggaacctctgcttagaatgccttcctttaaatccatctgaaattcctatagttcttca

SEQ ID NO: 121826 - DNA, 1043 bp, Homo sapiens
attacttcaagagcaaatgattctttgggggaaaggcaaaaataattctatgacatagggcccaagttcatggtagtaagtgtactctttgattaatcacacgctaatatagattactgcctctaactttgtaagtgtggcaatgacttcttaattaaagaaagatgcaggagttatgtctaagcgttcagtttttcaaatctgtgttattggaaatgtcttcaagtcattttgcattgtatttttgatatgagaggcagcttattgcgatgtgtatggccatgtttcattctcaaatttaattctataaatacaaatcctaaatacatggctacagcaactgcactggaacatttttgcttggttttagggattgagaacttgccttgcaggtttccttcctcaaaaggagcagggcagtcctttccctgttgagtcaattagaatttttacatagaggtgagactgtgaattattttggttattttcagtgatgtagattagtgtgaatgaccagggtggaatgtttttgaaggaatataaagcaaaaactggttgacattcacaaactgttcttttgtgaacatattttggacccttaaatatgactaaaatcacagcaatattgttacatacgggttatatgccaactctgtttgaaatatactctggaaaaacagctgaattgtcttggttattaaagtatggtatgtattcaacttgtacagactggatgtaatttgtaatcaggtatagtccatgttttactttaagcagtacatcacttaataaccattgttaagccattgctttcaagaatgttaactgccaatttaaaagcatgtgtcctaggttcatgctttggtaaagctctcatttcaagtgtattcatagctaagctttctgggagcagaattgtctctttggtgaaaaggaagtacagcctttcctgtttctgaggttgcttaccatacatgtatgtcactgtttcattggccctgttacatccatttggtaaaatttatttgtcctgattaaccagc

SEQ ID NO: 121827 - DNA, 1114 bp, Homo sapiens
tgccccctactggcttgtcctggccatgggtcccatgaaaagatggagattatttctacgtgacatttataaatatttttgttctcttctccagggctaattgactataattttcattgcttccggaaggccattcatgaagtttttgaggtgagaatgaaagtagtaaaatctcgaaaggttcagaatcggctgcagaagaaaaagagagccacccctaatgggacccctagagtgctgctgtaggtgaggtttcaggaatgtcttttgaaatcagaccttatccatgaggctgctgcgccatgttgcactaaaggaagaggaagaaggagattgggacacataccattgatttgttgttaaaaaaaaaaaattcctgcaaccctcttgatcttctcttttataaataaagtaagcactttgaagcaaaaacttgtatattaacagtgatgtgaaatccattgtcatttcattacacaaatgtaaacttttatggtctgtagtcaaaaaaatcccgtgtgagaactgccaggaattgtacatattttgcactttttcatgtttctcattgaactgaactttgataaaacgacttttctaagctttttttctgtacttggtgtcaaggacatgcatactgtagtccatatctatatggcaatcagaaattaatcaaaaagtgatgcattggtaatgactttttgtaaatttggaaatctttgctaccaattgttgagaaaaatcatttttcagtggagctggaacagattggagctacaagctccaggagcaataagaactgtcccctatttataatgggtgtaaacagttttgtagaataatgctagcaccagacttacctaaaaatttctatagcagtggctgtgcttccctgctcaacggtttttatgaagctgtttacctcaacacacatctctataatcactttatacagagaggttatttctttttgttgcattagtattcttttgaaactttgggaccagatttccaaaatggtgccgaacactggagagaagtaagaatgtcactgaattgtagggtttctggaggcttttctgtacctaccacccagggctaaagtaacatcaga

SEQ ID NO: 121828 - DNA, 1003 bp, Homo sapiens
catatcttcagcctttcttagtctttcatcagaccacgcttttgacagcctggctattctaggtgagaaaacaagaagcccttggccacggaggtggggagagctaacctcatccttcaactggcttcttcaggtgcctggagagtgtcccagctgctgcagacagccactcattgtcagtaggaaatgactgttgaggactgtgtatgtttttgtgcctgtgtgtttctgagctcttttgctgaaaggcactgcaagtgtaaacaacttatgattatcactttttgtggcttaaagccggtctcttgtcactggcttacagtttctagttctttctcaatggtcacatgttttggtttctgtccccatttagtctcaaagaagatggagcaggaaccccctatgacaaggaatccacagccatcataaagcttaataatacaaccgtgctttatttaaaagaggtgacaaagttcctggctctcgtttgctttgtcagagaggaaagctttgaaagaaaaggtaactttttggtgtgatttaaaagaagcattaaaagaagcatcagactgctactgcatgtattgtttgttgaatgtgggtggacaacagcatagccctcgaaacttccagatgccagtcacaggccctcttggcttggagttcagagcggggcgggctcctgcccccagtgtcagcttctgggccagtgaactggcctgccctctagtggtgcatctgcgattgcagcgaggtggaagtggaaccccatgatcctcccaggggccttggcatctctgctagggggaagctagttggggcactgttgccaggctgtgaatgaagtctcttaccagggagcagactcccagcctatactgagggtggaggtctccactttgctccacacctctagaaggtcttaggtaaccgtgtgatcttttgttcttcccatgtaaaggaggggacaacaggtggtttgacttctgttcagcctcaaaat

SEQ ID NO: 121829 - DNA, 1162 bp, Homo sapiens
cccggcgcgagggggtccccccggggcgcctccctcttcgcctggcatcagttgcctccctggaatatggaacttcgggcgagggaggtggagaactttcttctggggctcgtccctcgttctcctgctcgcttgcagtttgaaggaagggcggtgggggcgggggtccgagtaccccgcggtctgcggcgcgtaggagggtaggtccctggcctgcggccgcctccgaatgaccccgtccctccccgccctggacgacagcactagggtgcagtcgcaggagaggggccgatacccctcaggagccccatcggcgaagcctcagcaagtggcatctcccggggtccagagagtcggcgtgctgtctggtttgggtccagacatcagctcacccaagcttatcttgggcttttaagtgtgttgcttccggtagatctcggggactggaggggaagtgcagcattatttgtgacccaagagggacttgaatgtctcaaagctggtcaagaatgtttcccccgcgaggtagcatgagatgggtcacgtggtagtaaagagccacttcgggcccgtgagatggagttctgactccaccacttgttaggtgtgtgactttggaaaacccacttctttaaaccttagtttttagaactctaaactgcaggtattgtacataacctcgtagtattgtgttcatgcagtgaagtgatgggaatgaaatgcttggcattgtactcttgtgtgttagacaccttttgcgaacctgttggatgttgaattcattcatgcttaggttctgttaggccagtgtaagtggaaagaacttgggcaatgaagacaaacacacctgggtccaaggtggtcccatccatggtatactgattgggggtttctcatccccaaaacaccaatagcagccttggcggggtttttgttgttgttgttttgagacagagtttcgctctgttgcccaggctgtaagctttgacctccttagctcaaccgatcttcccacctcagcctgggaccaccacacctggctaattttgaatttttttattttactagagacagagtctcactgtgttgcctaagctggtctcgaactcctcctgtctcagcctcccaaagtgttgggattacaggtgtgagccactgtact

SEQ ID NO: 121830 - DNA, 1032 bp, Homo sapiens
tgtgatcatggttctgcagcctcaacctctcaggttcaagcaatcctcccacttcagcctcccatctcagccacctgagtagctgggactacaggcgcatgccactacacctggctaatttttgtattttttgtagagattttgccatgttgctgaggctggcaccctttaaataatttgagcccttatggcaatttgtcttttggttcctaaaaattgtttcgtagctctagataaagttcttgtctcaaccagcattgaagccttgcctacctgataggagagcttggaaccaagaggggaatgcccaatggcattaatcattagcttctgagcagagcagtaagcttgtcgtataaatcaaatcactcactgtgtgagcttatctacagagacctctgcagcttcgcttccgaatagaaatgatagaaaaagttggcactggggctttagtgaatgtgaatggtttatatcggagctcagtttgcctgttgatgctaagagaaaacaaattaaagttaaaatgagcactgtggccctgcattagccatcttttttaaaaatcaaggtaaaagttaataaaagaaagagctttgatgagaggaaggacctaagtccaggcactttaagaacaaatacttgtttgtttataattttctgaatctccagaaggtactatcctgagttacagaatatctattgaacggcttgcttactgaagcctttgttttcctccatttgctgttcaaaaacttaggagagagtggcagatcagtaatgaataacagcaaaatcccctggcacctgttggatttttatacaaaacagaaaaagttaaaacttgaaggaacaatgaaagaacctcacatctccagtactcaatatgattgaagttaggttgctactgtttagaagcactgttttaaaactgaggttttgatgccttaaaacatttttcatctttgttaccttgctgaaataaaatctaaaagttgcattgggtataagccaggatatattgtactttgaaat

SEQ ID NO: 121831 - DNA, 1934 bp, Homo sapiens
ctaaaattcagccgggtgccatggctaacgcctgtaatcctagcactttgggaggccaaggtaggtggattgcttgagcccaggaattcaagagcaacctgggcaacatggtgaaaccccatctctacaaaaaatacaaaaagttagtagggcatggtggcgtgtgcctgtggtctcagctgctcggaaggctgaaatgggaggactgcttgagcctgggaggtggaggttgcagtgagctgagatcacgccactgcactgcagcctgggtgacagagtgagaccctatctcaaaaataaaatgaaataaaattcaaagtacatcctcttttcaggagctcatccttgtcaggaaggtagaaatacctttgtggactgcattctctaaagtttgcaaaataaacagccatcttctattattaaaatggtagctctgtatcatttctttctcccctccaaaatgtgtgacaggtctaatttctctctagataccataatttccttccattttattactaaatcctggagaaaagcccattttgaagaaaacagagcttacagctttaaaaactgattgttattttgatataccaaaacccagttttgcctttatgctcagtgcatttctgtcattgtacgtcctaaactaactaatttatattcttcccttggtacttaaagaatcaaaaaccctaacactgtacttgtaattgactggttgtgttaaaagtgaccatgtttttgtgcatctaaaaatagaacataaaatattgtatctgattttgctccaggacttctgtggtttcttattataaccccctctgctaccctttgaaattcctttaatgtcagggacatttactttaagagtaagataatacatcttaagagacttttaggctgggcatagtggctcacacctctaatcccagcactttgggaagccaaggcaggaggaatacatgaggccaggagttcaaaaccagcctgggaaacagcaagaccccatctcagcaccactaacaaaattagccaggtgtggtattcccagctacttgggaagctgaggcaggaggattacctgagcccaggagttgagtctgcagtgagctatgattgcatcactgcactccaacctggtccacagagtgaggccctgtctgaaaacaaaacagaagacttttagtatatgctatgaatttactagctaagtaaatcggatggagttaatatcccagttacgtaaagttgttcttcttacagtgttaatgaaagatgggtacaagagaaaacattttccccaaatttaagcaagtagaagctatgtaactcctgatggattttgtatgaaaaaacaacatcagaagctattcgatatttaagtgaggggggaaatgttataatactaaatctagaagggaaaccaaagtattgattgtaacctactcagatgtcataaatctacagcagagctgcctgagccccacagagtaaatgacattcattaaggctgaatgtattgttgcactaggatcagggaggcaaactgttttactattgtctgcaaagcctgaaccctccacttgagaaataatttaaataaataaatttttttgaagccagtgactctcttttggcctgacaattttttttttctttctgattagcagtaagtaatgtgctaaatccccagaccccgcacccaaacctggctgaattacctcacttggaaatggacaataaagatgccctttacgagaagtctgtttcatgaaagactggcaggttttaaagagaggagtgtaaacctggcggccaggaaggcctgggttctgatttcatgtcagacagcagcctttgtgccctctgccaagtaactttctgtggcttttcttttcttttttcttagaaaggtgaccgctggactgatggtt

SEQ ID NO: 121832 - DNA, 1003 bp, Homo sapiens
gccacatgggaagaagaattgtcttgggccacacataaaatatgctaacactaatgatagttgatgagctaaaaaaaaaaaaaaaaaaaaaaaaaagtccgtgcataattttcatggtatctgtcaccacagataagcaaaaaactcccctcattcaaagggttggacacctgcggatagcccttttctagctaaccttttgtatttccctggcccgtaatctgtatttagaatttttagtagtattttgacaaatatagatgctttcctaaggcatatcattttgtaaaaattgtattgcaaacctttttctcttgattttcccttccttagcttctcccttcctttcctcccgccccttacctcctcacctctcatttatgggtctgtttatttttcaccttaagaataatgattgttgcctgggacttgtcttataaattcagttctttctaatgaggcactaaagctgtctcctggcttttgggttttcctgagaactgttaattacctttgcactttcctatacccagctcaaaagtaaattgcagagggaagagaggaggatgcacctgtttataaaaatgtggtagttgagcaaaatgcttaatggaaaatattaacagcataacctcatataatcaactcaatcttgtctagagtatgtttactgcagttgtagctgtcaaatgtttcatgttatatatagacccctaccgtgatgcctttcatatcactcttatttgttgccactgttttcattcacaaccttagctcagatctctgccacattagctttttcattgggcttttcctgcctccatgtcaaatcctttcaatttgtaagtccaacaagcagctgctgggttttaatatgtccagaggactgttaggagtgggtcactgcacacccctcccaaaattcctcctgagtacaaagttcttacctacttccagcctttttaccataagccccagcttaattttctaaccttgtcagttg

SEQ ID NO: 121833 - DNA, 1028 bp, Homo sapiens
aggataattttatttttggcattgtgttttctgtagtcctcctctctctctctgtctctctctctctctctaacctattttgagacagagtctcgtgctgttgcccaggctggagtgcagtggtgcaatcttggctcactgcaacctctgtcaagcgcttctcgtgcctcagtgtcctgagtatctgggattacaggtgtgcccaccaccatgccctgctaatttttgtatttttagtagagatgaggttttaccatgttggccaggctggtctcaaactcctgacctcaggtgatccgcctgcctcagcctcccaaggtgctggagttacagatgtgagccaccgcggccggccaagaatgaatattttgaagtgttttttcttttttcctctgaaacttcagtgtcctatattcaatatgtgaattgtgaaatacgtgatgcgcttaccacagggtagaggatatatgtctttgtcatgctgtgggcttattttttttataagtcctttactaactggccagcgattatttaaaatataaattgagatttcatattcagaatgaggagtactggattgagtaagaggaaaatcttgatcttaaaaaatcttgaagtaaaaggttttgtttggtaaagttttcccacataggactcacttccttaactgcttacagagatggtgcttttaaagaaaacattttcttaataaaatacaaatgttttcagatctctctgtctttggtacagatgccttttgcaatatgagttcagtacacagtgtgcatccttaagccttgaatattcagatacatttttgctcttttaaaagtaattacagtaatagaattatgtttacattccagaatacccataatgagattggaaaaaaaagttcaagcagtcagtcttctatccagaagccataaattctgttattgagtgtgaaatctattcttaatttttaaatgtcttttgctctaatgaacttaattagtggagtttggtacagtggaaagaatactaaa

SEQ ID NO: 121834 - DNA, 1053 bp, Homo sapiens
ttattttcatgacccacaaatgggccatgacctcccgtttgaaaatccaattccagaggtggtttcttaggactgtgggttgactgataacgtgtctcatgcgtcgcacattgccttcctcttggtaccgggtccaaggcaggctgtacatgtccagggcattgctcctgaaggggtctcagtgccacagggctgggcaggaaatcaaggcagagctctttgtgttggctgcctggggacttgaagagctttgcttttgagaactttggtccttccctgaaccggctgctgcagctgacagctctgcctgagtgggaaagtttaaacgaggacaataattcagtttgagtgcccctgaatcatgtctttgtctctgctcttgacagaacagaaggaagtttttcattattaaggatgccagctgcccacagattgatatatctgtagccagggctggctcactctcaagtaggtacagatctggctccccagttggtatattttgaagaagtccagaaaatattttccttaaatgtctccactcagtctcctatgcctaaaatttcatgattagaagtttggtcttttgcatcttctaagtttttggtcttctagaattccagatcaacataaaaacatcattggaaaagagactaccttaggattgtatcaggtaatatataatggggatttggacagtgctgagagcaaggcatgcccatttcgttggagctggggatacaggagcgaggacctgtggactagagaatggtgagcaggaggaaatggagtggaggaggccgcagggcaggcttggcctggtgaagcctgtgtctaacggtaattggaaagctccatgaactgtggagccctttaaatttattaatgagaattttatgaagaccttgtgacttggggtggacttcagcaaggcttagtgatgaaggaaccaacactcaacaagagtgaccagaactcttaggccacttgctactcagggattctgtgtcctgggttgtccactgtgttttgtttaacaaatttattcccatg

SEQ ID NO: 121835 - DNA, 1010 bp, Homo sapiens
aactcacctctgcggtttagaaaacaagagcagggaaggcttctggggagaagtgccatctccgcttggcctgtgtagtgggtcaaatggtggccccccaaaagataagtccatgtcctaagccctggagcctgtgaatattcccttattttaaaaaaaggttttgcagatgtgattaagatgaggcagtcatcctggatcgtttgggtgagccctaaatctaacaacaagtgttcttttaagaggcagagggagacttgacatagaacaggacaaggccatgtgacgagtgagactgaaataatgaggccacaagtcaaggaatgttgttgcagtcatcagaagctggaagggttctccccaagagcttccagagggaacacagctccgccgacaacttcattttggactcctggcctccaaaactgtgagggaacacatttctgttgtaccaagccaccacatttgtggtaatctgttatgacaatcctagaaaatgaacatggtctggattttcataggccgaaattacagaagggatggtgttgggattcaggacacgtgaccccaaaatatttcaagttgaagaaacttgagaaaactgcagatataggagggttgctcttacttcccccacaacccctgcccttttcccctgaagccgtccatacaatctaggaagaattgtctgaactttccctgaagcaggtcttgagatgcttatgtaagaagtcctctcctttgtagggacatggttgaagctggaaaccatcattctcagcaaactattgcaagaacaaaaagccaaacaccgcatgttctcactcataggtgggaattgaacaatgagaacacttggacacaggaaggggaatatcacacaccagggcctgtcatggggtggggggaggcgggagggaaagcattaagagatatacctaatgtaaatgatgagttaatgggtgcagcacaccaacatggcacatgtatacatatgtaacaaacctgca

SEQ ID NO: 121836 - DNA, 1043 bp, Homo sapiens
aattctccctgaagatgaagggtcacagagaagaatctgcacaaacaggtcgtgctgtgtttcctccagtctattaccattagatcctatcgcctttgtccaatcatacttcatcgctctccacttcttcatcatacccagcataaaaaaatacatgtttccctattgctttgggtctttatttccttatgaagactcccacgtcacctaaaacttacattgaataaatgtgcatgcttttctctggttaatctttcttttgttatggggcctcagccatgaacctagcatgggtaaggaaagatgcttttcctccctataagggcatttctggagagagcgccggggctgggagacagagccctgtttgggaagagagaagggagcagcctggcctgagcgcggattttgtgaaaggcatgacaggagatactgctggaaagcatgtagctgacctggtgcctttgtgatggtttgagtaattccttgtttgtagaggatcatttggtagttcattgtgctgcctcttaggtaatggctcttaacaccgggtgacccagcaaaaaacacagggtgaggtttgtttgttacccaggtggctgtacttgtgtgtgtttgcagggagagtaatgctccctgatatgtaaatgctccttgattttgcctgctgaagacaaccacgcacaccccactagagggttgccttagccactttctgcattttgttcttgaacctgcacttctcactgctttttcctaaacagatatatttttgtggcattttatgtccttgaaatgatcaattaatgtatactcattcctgtgaggtgtagtaaacatctttaagccaggtgaagaggttcgtaacatgaaaccagtccatgcctctttcagagattcacaacaggccctccccattctagaagaactggaccatttggtaccttttttttctttagtgagctagaatttaagaatgagtacattttgggacctaattaaattttatatctaccagttgagaaatagccggtgaaagtctt

SEQ ID NO: 121837 - DNA, 1068 bp, Homo sapiens
aagacttaacgattaattgttttcccttatggaagcctaaggcttgtttctacgtatttccagggttttgttctttaaggaacacatgcttatgaaaaaacacaaatactttcagcaaaaagtcttctgtgtctcccttcctcaagttgagcttggagtcagtggagctctgatctgcatttgcatttgagagggatgccttcttggcaaatacagcatgccagatatgtcagtattgggttgcttggaactccttaagcttacttaaacattctttagaaacacattcctttgaagagctcagcagagctcccagccacgagaatgctaggcttattcacagcgtggcttttactctctgtaactaatccacagcacatctctctggaaggaagcaaaatttagcaagttgcctgttgattgtgtaccatacagtatttttgcattaaagaaaactacttatttcagatacctggggaggggctttatggataacatccatgtggagatgcttgaaaatactgtttgttacaccaaagtgaatgggtgttttgtgcttgtgtgatgcagtaactatgattcttatttcatttatttctcatttagaaggtgtcgtggtgctaagtctctgatacaaggagttatcttaaaaaaaaaaaggcagtgacttgaactgagtggtaggaataataatatgtcccatctcatcacctccccacaggatttatgtgttcttttaatgggtctggtttgtggatcgtttcaccttcattggtttccagctgaaagtgctggtgggcagctgctgcagatgattaacactttcacctagcctcccatattcttattgttaacattaaattacacttgccttaaatctctttttattcagtttcttcattggttgttagatgtttgtaacttttttcccccaaggtccaccatgtttcttcatagcaaccatggtaattattaggatagtaggcatatctggggtttacactgcctgtttatttgaaaaatattttttcagtttcaggtatatagttatttcaaataatgtaacat

SEQ ID NO: 121838 - DNA, 1033 bp, Homo sapiens
agccactgagatttgaggcttgtttgttactacagcataatttagcctatcttgagtcacataataatctctgatgtgcctaacgttttaaggggcacattagcaaataggttggccacttaaaagtctttccaaatagttttttttttttttagcctcattgggaagcattcatgttattctttatatacagaaagcacctggtactgtggcaatagcatagagcagagcttgagatggaaagttctgttttttggtccttattatttttgctaattcaacagctttattgatatctagttcacataccataaaatttacttaaagtgtataattctgtgggttttggtatattcatagagttgtgcaacaatcatctcaattaattttagaagactttcatcacctccagaagaaacctgtacttattagcagtgactcctatttccccccaatctccccggccctagtctacaagtgatacaatttctgtctctgtatttgccttttctggacattttatataaatacaatcatataaaatgtaagttctgtgaaggatcttggctttgctctatgctgtaactctgtacccctcacagtacctgtacatagtaggtgctcagtgtatatctgttgggtaagtgagtggttactgaaggtcggagtggagagccggatggtgatggctggtgttgcttagcattgccctggacagggaataaagggagcggtagaatcacctgctgacaacatctcctcttcatccagagacttctgtgtcagggcttattataaggatgtgatcataggcccagtgaaagcagctacccttgacatggggtaagtcatctataaaacaccgcattgcaaggctgaggtcatgaaggggtacgagtgggcccaccacagcccgattcctcttcctccgtagactcttcccaaatacacacttttctcaggacctcactggattccttctcctctcaggttcctggcttcccttccctggctacctggccagggctatggc

SEQ ID NO: 121839 - DNA, 1004 bp, Homo sapiens
agaggcgatctggctgaggctggggaatgtgcaggactgtcctcgcccagggctttgggagatcccccaggaaaagggttgtcaggactggaatgtccacccaggagaaggtctgtggattttccctacaaaggactccccaaagactgggttccaggcccctgagattagggaagaggcaagcccaagagagaaagctccatcatctaccacagcaaatgcagattttctctatgaagagaagaccaagccttttgctatgagatcagtagggaaagggcacagggttaacctgggactattcacagaagagtcttaagctttgtaatttctcaggttattttggatcctgcctcctgaagactgctgaatctcagctaatttttgttgtagaaataatttgcctatgataataatgagactatcctgagagagatgtttattttaagactgtttaaaactctcaggaataaatatccctggggctgattctgggcattaaaaacacaattcaaggtgagtttcatttctcttcctgcggccttcacattaggaacctctttttacaaagatgtggcagaattttgattttaaataattcataatgatactgttgacaattttgtatgtttgtcatgtgacataattattggttaaggaatgtagtggaccaaacttgctcatggctaatctgtggctgaaacttaaaatatggacaatatccaatttggaagaaagccttagctcggaaataatcagatataaccaggattagggagatgctgactgaagataagctgacttcagacagggtattcttgcgaagcatgtcctccacctaactggagcattaccttccttaggggtcagagtccaccaggttagagtgcttcttcctgccatggactgcacatgcacatggctaatcatcatgtatgatgacatgagtataggagaggaccctcagggcctccctgatggccagctgtacctgaagtcctcct

SEQ ID NO: 121840 - DNA, 1035 bp, Homo sapiens
ctgcccccaccactcagtgtttccctccctgaaggcacctgtcttacctgcttcttacattgttcctgagatatttacgtacatacactcaagtagatgtatctctgtgtgtttccccattttatacaaattgtgggatactatactctccttcattttaattggcttaaccaatcccctattgatggatatttagattatgttaatctcctgcccttacaaagcatgctgcagtgactctgtttggaggtcttattgcacagtacgattatgtttgtgggataaatttctctaagtggtacttctgagtcagagcatgcatgcccttgcaattttgacagctagagctaaattgctctgcagagaggttgtgccagtctatactccaccagcagtgtgtgaggagcccaatgggactgacctttaaacacacagtgccagtggtacactgggctccctctgctgcctctcctggcccttcaccatctgagctcatcttacctttctagccttctctccaggagctctctgctaaggtgcatttggcctctggcctcggttcctcttcacttcagcatgggttttgcagaattttctctgggaatcccagctgcctgggaatcaaagggaaaagtgggggagtgactgatgggaggggaatagaagagggggatctccacacctctcctccccttccccatcctccattccgaaatggaaaatggaattccttcccaagatgcctgggtcttttgttctgaccccaagtattccagtgtgttgtcacatccagagcaagggcaggagcccatgcagggctgctgcagtgcttcgttctgctccgggttagcacatccacacactgtgtggagcaggtgtcttttcactgaaacaaacagggcattgagggtatacggttacatggcaagtcaaacaaaatctgcttgtgttctacaatagctagaagcatcactctgtgggaagaaaatctcaactgggaaagcttaggcttttgtagtttatcatcaaaaatct

SEQ ID NO: 121841 - DNA, 1026 bp, Homo sapiens
ttgttctaagccaataatttagggtatgtgggtgaataggtagcagctctgcctagtctgcttttagctcatcttttcagtgaatttattgagcaatgtgtaagaattataaactatgatgaagtgaaatttattccaagtatgcaagactgggtcaacatcagtgtaatctaccatatcaacaagtgccttagctcaggctgctataacaaaataccacgtattcggtggcttaaacaacagacatttatttttcacagttttgtaggatgggaagtcttaagatcacggtgcctacagattcagttcctggtgagtgctctcttcctagtttgtagatggctggcttctctctgtgtggcagagagaggggtctctagtctctcttcctcttataggggcactaatcttatcagggccctaccctcatttcctcatccaatcctaattaccttccaaagggccccatctccaaataccatcacgttgaaagttagtgcttcaacatatcaatttcagggagacacaaacatttagtccataacaagctaaacaagaaaaatcatctgatcatattaataggtacagaaaaagaatttgacaaaaccaaacatgcatttggggaaagaactctcagaaaaccagaaattgaggaaaactttctcaacatgataaaaagcatctaaaaaaaaccaagagctaacatcatatttgatggtgagagactgaatgtttttctgctgtgataaggaacaagacagggtgtctgctcgttcactatagtgctggaagttctagccaccacagtaaggcaagaagaatgcaagcaatttaatccccaaagaagtcctagacatggatggtggtggtgcttgtgcaacattatgaatatacttaatgccactgaattatacacttaaaaattgttaaaatggtagattttatgtatatgcatatttgaccacaaatttataaatcacaaaaaatgggcccaagaataagcagaaaacttagtctaattagcat

SEQ ID NO: 121842 - DNA, 1827 bp, Homo sapiens
ctgtagtcctagctacatgggaggctgaggcaggagaatcgcttgaacccgggaggtggaggttgcagtgagccaggatggtgccactgccctccagtctggcgacagagcgagacttcatctcaaaaaacaaacaaaaaaggaattctcttatcaattaaacccaattgttaggaataactgattcctaacaatatacatttcaaatcacctctccatatcatttatgattattattattttacagggccatcctaatacttccatccttgtgtgatgggactgttggcccccagtgcaggaattaccctctgcccccattacattttatctttttaaaattagcctattccaatctgagattgttttggatcctgatttgtgtcagccaaggaatttattcccttgccgtttcttgtcaactattgtctgattaagatatgatgtgtcactcatgtaagtagactagtagataaaatatatttgcaacaaggaaagaaaactctgaaagcttcttaaattataaattgtttttaaatgtaaagttttattttctttgatcgatggtactttttcaatttttttctcgaatgtgttccatttttttcttgaatgtcttcataactttgtcttcattgaatcataagcctgagaaggactttgaacttttctgacccaaatttacaccattccaggctgttgaagctctcagggaacaccatctatgataagaggacccttggggcacttagaaaagttggtggagtcttccactttttaaaatctaaacgaggagccaggtggccagaattccaccttgcagttcttgcagttctgccagaaataagattggaggtattgagaattcatttcatctcttcagccaaatgaaactctcaaagactcttcccattctgaatatcatgtttgtaaaatatgcgccactcttattttagtaatgttacaactttcttgcctcctactacctctctcttaatgcgacagataatataggcagactgactcaaaaaaggcttgactcaaaaaagactgcatgaccctgatccaatgtatttctcatggtctcttgaagaaaagaagctttatgaaatgattacactaatttaacctaaattcttcccattacaccatttctccttgtctgggtcacagcatgcagctgccctccttgttacagtccccagtagagatggttaaattgttttattgtttgagccaatgagtctcaattcctttatacaacctttccctactcccttccttcagattttctgcccttttattcctttggcttctgccccaggtctccttttgactctggtcataagaatatcattgagaccaggcacggtggctcacgcctctaattccagcattttgggaggccaaggcaggtggatcacctgaggtcaggagttcgagaccagcatggccaacatggtgaaaccctgtctctactaaaaatataaaattagctgggtgtggtggtgcacgcctgtagtcccagctgaggcaggagaatcgcttgaacccaggaggcagaggctgcagtgagctgagattgcgccactgcactccagcctgggtgagacagagcgagactctgtctcaaaaaaaaaaaaaaaaaaaaaaaaggtgttccaggaatggctaagcaccacacctttccttctcacttttcaggtgcattctgttgggacgggtcttgtccaggtctgctctgttagacctgtcattcctgggacaggtactgttggtctgaaaggcctgccctttagtaagtagggtccaagatactgaagcagg

SEQ ID NO: 121843 - DNA, 1031 bp, Homo sapiens
gggatttttgcctgtgtcctgtctcagcataaagagacacacacatgcacattagtgagtatgggcaagacttgccggaaatgtgtgtcaatgaccaaatttaccattggagaaaaaatggggattaaaaacttaatttttttctcatcttaatttctcttggtcagtgaatatgacatggaaaatgatctattcaagttggggagttgggggaagacacagatctcatggaatctaagaaaaaggaggcctccagaaagagtttactctgccaccatgctattattgagacatggccatcaaccaactcagctctgagtctattcattcaggttatctagagatggactctgattggctcctctggcatcaagtggccaatcctgagtgagtcagcagtggctggggtggagtcacgtagtacagtgggctgccctactgggtctttggagaaggtggttctctaagaaaggaccatataaattgtcctccaacagctattaggaaaaggtcttttgataatacagttgaaaactatttttagaaatggttgcaacactaattcatgtagtagaactctaagaaataagaacttttatggggaacacagaatgttggagtgtttgcacttataacctcttccaaattcacctttaataactgtagttatagagtgtgattcaaatttcacatcttcagatatgctacagtgtggtttactaaagtgcttctagttttctttgggtctgtgtataatgtcataaaacttggcaaacacacagtaagaaggacagtacttgcaaagaaataactatgactgttttatgcatgggcagaaggccatccagtgtctttcataaatctctggttatatctggaacttgctgggtcatcaaagatgttattttcaaaaaatgttgatttagctttaagccattgatttctaccttaggtcataatacttttttattttcctgcactatggtcatcataacattctcaactatatcatatccttagatgacaggaac

SEQ ID NO: 121844 - DNA, 1072 bp, Homo sapiens
tgggaagagagtctgtgacagggacagtcctgttactggggtattgtttctgctcagacttctaataagtagcggtttttcctgatgctaaaagttatccgtgttaaatataaaaagctggaaaatattaaaaagtataaaaagttaaaagagaaaaatcctttcatggatttttaaagggagactttttaattttaagaaagcaattttgagttttaactaggattttttattgtaataaaatatacatagcattaaatttactgtctgaacatatttacgtatacggttcagtggcattaagtacactcacattgttgtgcaaccatcaccaccatctatctttagaactttgtttcagattacatgtttttaatgtgcattgtttgttacagatctggggagtttagtaagtagaatcagtatttcgttaaggttgtttataggtagcagtgcatccttcttttaaaaaatctgttttatcttatgatggcctctgtcctcttttgggccaagcaccagggacgccccagaatgttttctttgcccctctggtgctctgccaggaaacttcacaaaactctgaccagccacatcatagaatccaagaaggcaatggagggaccctgggatcatccagggtgacacacctgaggtccagcagggtgacaggcttctagcaagccatgcacagcccaggcctcctgaccccttgtctcgtgctcattgctttccaccagaacatttccacactgcccacccatcctccctttcaaggctggaccacaggctcagcttgatttacctcaacttagcttcctgaggacctgtcagagataaagggtgctcttagagacttcagaactctcctgttacagtcttgacctgcttacctctgggagtgtttcatccttcactcaactgcaattaggaagagtcaagttccctttggcgcctaaaggagaacaacggccggcaatcccaggaatccgatcatagagaagagggctcagagtgcagcataaatcagtgaggatgttgtcatgaactctctgaagaggcttcttagaaa

SEQ ID NO: 121845 - DNA, 1045 bp, Homo sapiens
ttccttctgtagggcagtgtctcagcaggagacacccccagcagtgaacaggctgtggccagaaaagaagaagccagagaagagttcctgtcagcctccccagaacccagagcaaaggatgacaggaggagaaagtcaaggcccaaggtcaggagacacagaaagcagcccagaggggtggctgggaggcagggtggcgagggtcctggcagagcgtcatgcccatcagctaaaaagccactcacttggctggctggtttggagccagagcacagaaattaaatctggctaacatcagacataaggtgaatgtgctgatatatttcttttgacatgtgtggcttggagtaggacaccatgaggtgaaacaaagtggggctctttgcccaaatggggtgacatgggcgccaccgactggtgtcagtcttgcagaggtcaaagcgttcaggggtgttgtctcttcctctcttacaggtgtcagcattttctgaccccaccccaccagccgaccaacagcctggacaccagaagaacctgcatgctcataatcaccctaaaaagaggaacaggcatcggtgttcatccccacccccaccccatgagttcagggcgtatcagctctacacattgtaccggggcaaggatgggaaagtgatgcaggtacctgcaaagcagtgtcaggagaagggaacataggccttcagcaagggtttttgtttaacggcattcctgggggctgataggcactttaggcattgacttagttgagcacaagctttgaaggtaagccagatggcctccccacctgcacggtgcagatccactcctgctgctaaggccaaggcagacagggtgtgtagctgcagagcttgctgcacaatcctcaggtgactaggtatcttgaggccccagggtatataaaagcaccttgaggagagggaccatatcttaccctctgaattttagtgtctgctacacccaaaatttggcctataagatgttccaaagttatgacaaggatgagcctatctcttccatcatctct

SEQ ID NO: 121846 - DNA, 1750 bp, Homo sapiens
gggattcccttcaacctgttcaatctgaaatatggcctggatcactcagtcatactgagaactcccagcattcatagtattctgtcaagtaccattgtaggcacttgtaagtattttctctattaatctttgcaataagccagtgaggtagggatcattattcccactttacactgaaggaactgaaacacatagaggttataggtaatgagtgggagagccaagattcagaatgaccatcctctgtgggtcatcatttccctctatgcaaagtcagtgcaggtattgcagccttgataatgggtactgaccactttgaaatggagattaggtgttgccacacttaacttatgtctcagtagctcctcacagcaagaagcatcaatcatcttagtgaaatatgcctatagggcagttctgttccagggaagcattgtctctgtgggtcacattaaggccttgataggaaggtaaagatttagtgtgaatgattccaagtggatgatggggagacaccactgtagggaaagcagattttcctgtctatcccttttcctttttttcagtgtccatcctcctggaaggggcactcagaaagacatctacctccttcttagtagagttctgaaaattctcttttacttagtaataaaaggtaggttcatatgcaggaataagacacaggagatgtaaaagttagcaaaagagatcacagaagagctagctaaggatgctggtttaatcgctgcctccccatttcaaaatgtcttttgttgacaggattctatcttggacattaaagtaccgatatttaaaggacctggagagatgcctgaaatccgatcctacatggaagagttcccattcccatactatatcattcttcgagatgtaaacgcacttcctgagacactcagcgatgccctcagacagtggtttgagttggtgacagcctctgaccacccatagaacagaaagaagagtccaaagtgagacttaactgtggtcagaaggtcacattgcttacccaggtgctcccttttggacaactacaaaaaattttattgtaatatttttattttacaacgtgatcttacagcctacagaatgctctctggctcccggctttgcctgggctgaggtttttataccaaacctggaagcagcagcaggtgcctgaactcgtaactagagaagagttatccttcttccctgccttggaagccctggcctgggaggaggtcataccccaccgttggagcccagctgcctgttttcttttgcaggggatctgggcacctgtgccttgaggagatgctgccaggagcatgggactctgacagtcctttgtataaaggactaaagggagctgcccttttgaccctgttctaagctctgccttgccaagcccatagtgtgtgcccaaaagctgtcaagtggccaagacagctcgtttctggagagtatgagggtgtgttttcttattgtgaaaggaactaccttctcttagagggtaggaagaatgtggtgtgtgtgtgttctcataaagcaactggacattataggtgcccaggtcatctataaaaacgatccttgggctgtgtaaaaatgaagtggcttttcagtatcctctttcacacttgctgcttcgggagactatgcaatgatgggaaggtgattgcccctttatttcattcagtgccatggtccctgttgttgtagtaatttatttgtttagttcatttttttt

SEQ ID NO: 121847 - DNA, 1983 bp, Homo sapiens
acgcctggccctcaaggtcactttttattcgatgtctacagcagaccattcctatcagtgtaatggattctaggtttcaacatttgtggtaccaggccaccaaagcctttgggtttgttgtgactatagtagccttactgatgttattcctctacttgccaaacaaaaaaatgttttctttgggaatcttgatgcaaaaaatagttgagaggctctggtttagaggatattctgattcctaaaatcattaactttctaattcacagcttgcatttgaatctttggctgtgattggaaatgctctaaccctcctggaagtgggtcagattgcagtgtgtaggtaaggttgctttgtaattcctttatgaaaacttttcacaacctgtttggttattttgatcacacagccaaaaaataactcctgttgtatttggttttcctcccccaagttttggagaatctgtaaagctgttacacccatttcatgagcagttcagtgattactctgggtcccagattctacgtctctgcaaattccaacaaaagaaaaccaagattgctcaggtaagaggatgaaataaaatgtcttctgcacagttatttttaaactggtgtaggttggagggagaacatttttatttttgagacaggaccttgttctgtcacccaggctagagtacaatggcgccatcatagctcactatagcttcgaactcccgggctcaagcagtcctcctgcctcagcctccctagtagctaggactacaggcgcatgctaccatgtctggctaatttttattttttgtagggacagggtctcactttgttgcccaggctggtctaaaattcctgggttcaagtgatcctcccttcttggcctcccgaagtgttgggattaccaccatgctgggctgagaaccaccctccaccgcatacagtattaggacagggatagtcccaaacctcagcctgtgtaccactggaatagaagcttccttagcatccattataaaacaaggtgtgacttctttttctcagttcctcaaggatcacttgactttgcatcattggttttctagctccctacttttttttccgagtagtttggaacattctgcaaaaacaaacccatctcccatacccttatcagctgggccaagacctatttttctccctcattaagcttagagaagaaatgatatgaagtaaagccagtgacttacttaagagaacaaaagttcaaaacagcatgggatcatatttctcctgggtcctgctctgattcagtttgctttttctaggctgccctggacattttgtattttcttgccttctcttttgctcagttgttttctgttcttgaaagaagacagctgtttggtttatttgagggagtattgatttcttatgccccagggaagcacttcttttcctttggggtatcttccagaactctagtgggttatatgttagagaaacgtctcacctgtgcttgagaatgcctgtatcatctaggcatggtggctcacacttgtaatcccagcactttgggaggttgaggtgtgaggaccgcttgaggccaggtgttcaaaaccagccttgtcaacatagtgagacctcatttctacaaaagacaaaaataattatccaggtgtggtggcacatacctgtagtgctagttacttggcggcaggctgaggcagagcccaggaatcgaggctgcagtgagatgagatcgtgccactacactccagcctgggtgacacagtgagaccctctctcaaaaaataataattaaaaaacagaatgtctgtatccaaggatcctccttttttaactacatacggccagaagggacagttagttgatggtctgtaaacctgaggtggttatctgataatcacttcaatgtcagaaatactatcagtctctttgacaatgagaagagcattcacatagttttctaattgtctattcctggtt

SEQ ID NO: 121848 - DNA, 1817 bp, Homo sapiens
ttcttttttttttttttttttttgagacggaatctcgctctgtcacccaggctggagtgctgtggcgcgatcttgacccactgcaacctccgcctcctgggttcaagcgattctcctgcctcagcctcctgagtagctgggattacaggtgcctgcccccatgcccagctaattttctgtattttttttttttttgtagagacagggtttcaccatgtcggccaggctggtctcgaactcctggtctcaagtgatccacccgcctcggcctcccaaagtgctgggattaccaggcattagccaccaccctcagctggaaggagagacatttttaatcaagtaaattacatggtagcttgctgggagaagatttaaagtgcttctgttgagaaagttcatgcaggtcattttctaccactttgcttaaagcctgcatcttgctagaagacttggttggctctgacattctgagggtaacttacattttgttgttgtcacaggagaaggttgcagctgagatgtggcagagttacctgatcttaacagcgcctctttcacaacggttatgtgaagagcttcgtctcatattagagcctacccaggcagccaagctgaagtaagtcttcccctctggaaggcctcacagtgccctgagaagacggcagcttcattgattctgttgaacgcggcacctaaccatttatagtgccagcttctaggctgccgcttgtgccgtacaggcaccagtatgctgttccttaccctgttttcctattattgtctctgcacaaaagtttctgggtgtctgtattgatcaccttgttacatgttgagctattcacttgctataggtgttactcacctagatcttttcaaagatgtccaaaatcattcctatttagtgcattttttcctaatttttaaaaatgtgtctggaaggacctaattattattgccacatacgtgtccagtttttctggctagaggtcaagaagatccttagtcgtcaattgacagaaacacttcattgtgccaggttcctagttacttgctattggttttaaggtattattgtgatttttgtccttaataaaaattctcaggaattaaaagttgttaactaatttttgcccccatttgaataaatagaggagactatcgaactgggaaacgactaaacatacggaaagtcattccatacattgctagtcaatttcggaaagacaagatttggcttcgaaggaccaagcccagtaaacgccagtatcagatttgtttggctatcgatgactcttctagtatggtagacaatcataccaagcaggtaaggaagagaaatgcagtggcagtttgataggaaattaacatcaagctatgttccatgggccaccaaaatgctttaaatatgatatggctaatgctttaaatatgatatggctaaaacattttgaaatacctgttaggcctgttttgagaatgtgataaccatctttgataagacctaagatttaaagagttcaaaagggcaattttaggatgtctcagatgtgttagtttcttactgttgtaggtcttttacattgttttgtttcttgaccttgctgtttgttcttaactgtctagttgcagaataagtaaatctgatagtgcttgttttgcagaaaatgcaacagtgtactcttaaaaaaaaaatcaaagttttcagatattactgcatagtcttagatagtttaggtaggtatctaggatacatttcttttatatctgaaattatccagagttattgttctatcagtgctaatattaagtttaggagc

SEQ ID NO: 121849 - DNA, 1930 bp, Homo sapiens
ggagcgttagaactgttagaacggttgactatcctatgtgacaagccaggctttgcctctcacctcacaagttgaagcaaattattgatcttttctttgcctgtttcctcttctgtaaaatggaattgtggcttttagtttttatttctgtcaaagttttacatgcatatagtttcaagaatcatacagttttacaaggcttcttaggacaacccaaaatttcccctatttccctttccaagaacatctgccttcaacatcaggtgaggaggaggggagtttagagagtaagggttggcaatgagtgtctcagagagaaagaacctctgaaatcaacatgtggaaatgtgttggagagtgaatgaatgaagtttgattaattttcaggattaacaggcaatagcaaaggcttggtcagtcatcaggctaatattataagtaaaattatgtccttaaatgaaaataggctttgatgagatggaagtggagatccaaactgttaaaacagaggaagaccaagaccccagaacagacaaagcccataaggagacagaaaatgagaaaccagaaagaagccgagagtctaccattcatacagctcatcaattcctcatggacacgatcttccaggtagtaaaactcacaaattactgcattaatatagtgttaataaattaacaaaataaaattttaaactggttttaaatctttgtctttagaactttatggaacatctggttgttgaggggtttcatgttcttattcaaaatttttaggaatactattggtatgataggtgttcttcaagcacgtgatactgttccagcaattaatcacagggtcacagtgccctgacctgtctgtgatggtgggtctggtccttggcctctgggactcacatcccacttttctaaccatccttgtgtaaggaatcttcaggacaattaggtttgtgatggttaagtaaaaaatctttggcttagtgcctgtatttatgaagagctatttaattaagttcttgagctaagagtttgacttatttgattaatcagataacattttcattattgatgacttaagggtgtttgggttttgttttgctacagtggctttataaatgtttaaagttttctttatccatattgtctctctaagagggaagcagaatgcttgtctggcatcttctcattgtgccactgtatttgctgaattaagttttgaatctcaggagcatttgactatgtactttgagttcatactgtagggcggaagacacccagtgatactaagttggtgattccaacctgggccacctcttatctatggctttttctttttagccctttttaaaagatgtcaatgagctaagacaggagctggagagacagctggaaatgtggcagccacgtgaatctggaaacccagaggaggtaagtcactgctcactgtttttttcataaaatatctcgactttttttttgtttgttcaacatatagcaaacttaataggttcttagcaattaccttaacaaaaaggaccaggcatatggagaatataattacaatcctaaagcctacagatctgtccatcagtttctggctgctttgctgttagatctatagcttaattaaaacagaaattggtgtgcttaattcctttaatttctgttgctggctctgtaatggatgttaatagttgtgacagtggttgaaaaaccgggcaagagtctatgctgtgccatcctaagaagaggccagctagatcactgctggctgacttaacgtggtagtgtggattaaccagcagtcttatttttaatgactttgcatctgaaatttactgtattatatacacatttcacttttatatctattgtcataatcactcccaccacatatatgtattcagtgctctgccatagttggcaga

SEQ ID NO: 121850 - DNA, 1827 bp, Homo sapiens
cagtaaagttaaatgacaacctcaagtgtacatagctggttgatgatgaagcctggtttctaattgaggtctgtcctgtctttggagtgagacataatattcctgcaaagaactaagcagccttacaaaggcccctgagaggttaacataaggtctgtacctagacactcctgtttctgcctgtaggccaggccttagttacggtgagttccagggcaggcaggtaggcaggagtgattatatgactgagaataaaggacagcagtgagagaagttgtattcaatgcagcacagtaaccagggacttgtaatagcttctttcacctcattcttttgtggcttggatttcctaggaacacggaagtggagctgcagatgcaaaccaggcagaaggccatgaatcgaatttcattgcccagttggcctcccagaagcacaccaggaaaaacacacaggtttctatcactcctcagctaaacttaggtgaaggcagcatgtagaaaaagatgttccaaacgtagtgctttaaaaaaaaaaaaaaaaagctatactcctggtttttttgttgttgttgcatcagatatgatagcagccttggtgagcagaccacgaccatggggtttacccagtgggatcccgtcacggcttcttccctgcctgtgtctctccccgacccctgattccggccatgaagtcttaagagccaagtgctgtgtgcggctgcccagcacaaaccgtctcactcttttcattgtccataggcttttgcttttttaagagtaagtttttttttaagtagggtataatttatgcacgtgatgcaaaattagtgtaaaaaaccaatcccctaaaagcctacatcctattcctgtccccaagggaccctcctcagagcaaattggtgttaccaattccttctttcagagatattttctgcatatatgacatatatggatgtgtgaaagtgtgtttctttgccttcattttagatataaaagtatatcatagagattgttctatgtaagtatatagagtcccggttctttttaatagctgtattgaattccattcttgtatggctacacctgatttacttatcctgtcccctatagatggatattatgtttactttgagtccttttgtcatgacaggcaaggctctgatgaatttccttgtatttctcagagttttaagaggaaacctgggcaggctgacaatgaacgttccatgggtgatcacaatgagcgtgtgcacaagaggctgaggactgtggatacggacagccatgccgagcaggggccagctcagcagccccaggcccaggtggaggatgcagatgcattcgagcacattaaacaaggcagtgacgcatacgatgcacagacctatggtacggtcctgggaaagctgctgcctttgcccactgagctctctatgagagcttgtgctatgtgacctataataatgatacgtatttgtggggtacagtgtgaggttttgatacatgtatacaatgtttaatgatcaagtcaagtcagctgtgcctggcagctgattgtatacacttatatcaggggagagaggaaatggctttgtaaacataagaaatgtgcagaaatacagtttgtttttggtacaaaggtatctgtaaccaagtgaagatggttaagatttcttggtttagtataaactctttaaatatccttaaatataatagttaaaaataagttgttcacatccaaaccccgatatcagggtttcttagtactggacatttctttcttcttagtcacctctggataggtccctgcactgacaggtgctat

SEQ ID NO: 121851 - DNA, 1686 bp, Homo sapiens
agaatatatgttgctgtgttccagtaaaaactttacttgtttttggagacagggtcttgccctctcacccagactggagtactggggcatgatcatagttcactgtagccttgacctcctgggctcaagtgatcctcctgcctcggcctgctgagtagccgagaccataggtgtatgccgccttgcatggctaattttttattttttgtaaaagatggggtctcactatgatgcatgcccaggctggtcttgaactcaagtgatccttctgtctcagcctcccaaagtgttgggatgataggcatgtgccacagtgcccagccagtagaactttcttcatagaaacatgtagaggccagatttggcctgtgggtcacaatttgccactcgctggtttagagaattgtaataagacaaaacttgcataagtagctcccagcttaagaaatcatgtacgtttcaaaaattctgcactcctcctttttgttgtatctatacagaagagaatcctttggagataaaagaaaaaccagaagaagcaggtcatgaagctgaggaaagaggagagaccgagaccgaccagaacgaaagtcagagtccacaggagcctgaggaaggccccagtgaagatgacaaggcagaaggggaagaggaaatggacacaggagctgatgaccaagatggagatgctgctcagcatcctgaagaacactctgaggagcagcagcagtctgtggaggaaaaagacaaggaagccgatgaagaaggtggagagaatggccctgctgaccaaggtttccagccccaggtatcatgagatgtctggctttttatgttaaaaataatgaggaagaggagaagtcaccttattcccattagaatcccttttaggatactcctccatcaacatgtggcacttccgaggagttctaggtttctgttttaagacccttagtgaggagtggggaagcctgcttgttgcaaggtctcccaccttatgctgttcccccagagcatttaatgctgtgtttgatttctctgccgaaggaggaagaagaacgggaggactctgatacagaggagcaggtgccagaggctttggagaggaaggagcatgcctcctgtgggcagactggtgtggagaacatgcagaacacacaggccatggagctggctggggccgcacctgagaaggagcaggggaaagaggtgatcagtggtttcactgcagccgccagctgcctcttagtagggtctcttctccctgtccgacatcacattctgtgtagcattagttggtttatgtttggttattttgttgtttgttttgttgttgacatctaacagaccacatctcattctttaagcaacgcgtgactgaacagttattttttaaagacagggatacattctgaaaaatgcctcattcagcaatttcgtcattgtgcgaacaccatagcgtgtacttacacaaacctcaatggtagagccaattgcccttaggctgcaaacctgtacagtatgttactgtactgaatactgcaggcagttgtaacacaatgtaagtatttgtgaatctaaacatggaaaagatatagtaaaaacgtgttattatcttacaggaccaccagtgcacatgcagtctttccttgactgaaacgttgttgtgtggtacatgactgctac

SEQ ID NO: 121852 - DNA, 3043 bp, Homo sapiens
ttgaccttagtggcagttggcctaaggcacataggatatgaccttttgcaaagtataccctgtgcaaagacaaatgaagacaattctgattgagacctgattttaggtgttggaaaaaatcatagcagtatattgaagatggggaggacccatggaaaccacctagtccaaccccatcatttcagacataaaactcaggttgctgagtcccataatggccattcccccagcaccaaaaccagacatcctcataggtatttccttactctttttaccatctgttcacacattatagacttccttgtacctctactttgcaaaacacagtaagactatgtcagtagatctaaaggcatctgcccgtagggtgtgttctgtagaaaaaggcaataaatctcaggtggggcccttgctagggaagcgggtccacacctctcttaaatacacaggactgggtcagtttggagatctgcctaagctcagtgccttccctttcagaagaggatgatgagaaatcagatagtgagggcggagacctggataaacacatgggcgatctcaatggtgaggaagctgacaaactagatgagaggctttggggtgatgatgatgaggaggaagatgaggaggaagaagacaataaaactgaagaaacaggaccaggaatggatgaggtaattcaaagatttctcccctcccaaacaagctgagaggaggtaatctgcccacaacctaccattctctgtcatttacttctcttctttttctgtatttgttttgttctcttttttctattcctctttttcttttttctatcctatcttattgattacattcagagctaagagtagcttgacctgagtcatcccatgtgttatgaaggaggatgaacaagaccctgtgcagatgttctaagctgattctcctataggccactgattttttccagctcccagcttgggagaactccagggctgagtgtaacactgcaacagcccagggtgaagcaatgaattatcaaactcaccccaccattcacacacttaataatattgctgctgtcatggagacctgcactgttttctctaggtcacggatggcactttatcagccatccatgggataggtccaataggcagaaattatgcatgtctaaaagtcaacccatgcagaagcagtttcttggattgagtgtgatgattgttttttcttcctctgacatttaggaagattctgaacttgttgctaaagatgacaacttggatagtggcaattcaaacaaagataaaagccagcaagataagaaggaagaaaaggaagaagcagaagctgatgatggtggacaaggtgaagacaaaattaatgaacaaatagatgaggtaatgaagatttgaaactgatccgctctcttgactcaaggccagagctcttgagctgtatagttctcaaggtgtctcaagatattttttcccctgttcgtcgactgctctcccattacctcataaaagaatatgcaacagaggctcttaacaggacataaaatatataactgttggttcctgacagggtagtccacatgttgtctgggctcatgctatagatcagaagctaaaacctgtgatcccttgtttatttcttcttgtaagtttcttcgagattaagtaacatagcaccatttgtccttggataacctgcacagaaagtgaaatctgagattccaacatgaaaggtctaaaaataaaatactaatgtgtgcagataattttagggaatagatattgtgttctctcacagtgtaaatacttagagctgattttatgggaattctactttttaaaaaaatatttgtatttttattttatccctgttgtctccattgtcccaaagagggactatgatgaaaatgaggtggacccttaccatggcaatcaggaaaaggtgccagaacccgaggctttggaccttccagatgacttgaacctcgacagtgaagacaagaatggtggtgaggacaccgacaatgaagaaggagaaggtgcgtctttcagaaacaaagagaccggttagaactcacattagtgaacagtaattgatttctcttttgaaagctagctcagtgtcatggccaggtgataaatcacgtttggtaggctcaatcccagtctgagaaaatggtttgcctttcctttgtagtatttctcatgtgattatccctacagctcatcaaccagcaggtatttctcaaactactgtcatgtcctattctcgcttttggcactgctatgccctggtggtgcttcacacacagcactgtctcttcacagccattactgtgtatcccatctcatgggatggtgtaaacgctgtgcagtctgggtataccaagctgtcgtggagtccagttatagcttttttagggaaatgatggtttcagttattgattgtcatgtgtagtgaggaatgagactaaataatcccaagagaaatcgcatggcatatgacagtatttcgtgcctttgttgtccatttttcaaccctagtgaatcctttagggagtgttatctggtattagttgaaagcattgtgttggaggtgcccctgtaacagagggccccattcctgctgctgcttaatcagacagaaagatgtgagctggcctcgctgataaatgagtcagttacatagttataaaatctattttaaaaaatgtatatgtatatttttataatgctgtattagaacaaaaatagcaagttacaaaggaataaataagaggtgccatttatgtaaaaattaattttggaatctagttgcaaacaaagtcaattaccaagaaagcataaaattaagaaaattaaaatccactgagaatgtaatatgctgtctgcttttaaatagccagactcgttttgtaactaaggaacaattatttaaaattgtttgctaattaaataatagataatgggaaaaaaaaacccagtaggctggttgcagaggcttgtgtctgtaatcccaacactttggaaagccaaggtgggagaat

SEQ ID NO: 121853 - DNA, 1535 bp, Homo sapiens
aaactccctcctatgtggtcgtattctttgtctatttctgaatgtctctcatttaaataatgtagttcaatgggaaaattaagcaagtaagccaaactgtattttcctatcaacattctgagaatatatgtcctaaaagtgggtttggcttgttaaaaatttttctaagtgtccaaattgtattcatatcttttctgagtagttcaagggaacttgagagtaggttagacagtgctaagataatagatctaggctgtaattaaagctcttgatccgcaggaagctgtttctgtgtaaccaagtcataattagtgtttactggtttgggatcttaattccttgctaattagcagcttatttttttgtgcattcccatcctcagatatatcttcatagtatatattttctcttacaaaattaaactttctgattgagagtcactactactttttctttttacttctgctcagcaggctagtattcttctcaggttattttcctgtataaaatagtttttttcaacatttcacagttattactatgtctgactgtgttctctccagagcctgttctgcccttactcaaggactttttccaaaatactgtccttctagtatacttcatttaggtttttgtcttggcaaagtgacaaatgaccacatgccagaggcttctacaaagtcaagtcatatgttaaatctgatgtcaagctgtgaaactgcataactattagcaccaaagaggagaagaatgtcagaagtctcctgtacttccagcggatttaagataatgagctagaaaaagaattcagtatgtgtttaaattgttttcctgtggcaagaatgaaatctccttttaaaattgcttttgtgcctaattgttcacttcctttttcttttttctaagggattttgcttgcccaaagaatttatggaagattcagctggagagggagcaactgagttccatgactatgagggaggtggaattggagaaggcgagggcatgaaggatgtgagtgaccagatcggaaatgaagaacaggtacgttttcacataggtatacagttgacagaagatcactctctttcttttcaacatgtaagttacacataaaaatggtttttactaggttaataatttttaatctgtgatctacagagccctagatatattggtgcttcggcagtgggtgtaaataaaaagcctaaaatccacaggaaggaacctggcaactccatcattggttttggctataattatggaggaaatgatttttactttttttttttaaatgggcagatatttactgatgattttctagagtatttttgatagtatttttaagcataaaaggcctggctatcttaagtgataattgcattaaacaataatgccaaaatttgctgttaataggttttactgttgtatatctttaaggcatagagtgttttaaaaaatctgtatccttttttggttggaatcaagcaaccttctgaactattcagatgctgtgaactaagattgttacattg

SEQ ID NO: 121854 - DNA, 1046 bp, Homo sapiens
cagcttgacacagtggctcatcaataaatgagtatttttaatgatttccagaggcactaaagcaaatgattggtgtcttttgtttgtatgtttgttttgcaccatgttacctgctaggaaatcaaatgttggacgaaggatttgtggaagatttttcagagcaaatggaaattgccatccgagccatcctctgtgccatccagaacttagaagaaagaaagaatgaaaaagcagaggagaacactgaccaagcaagcccacaagaagattatggtatgtctgaaatcaggcagaaattagtttcatgcctgatttaatttttgtatttgatgatttatttctgtggctaaatagttaaggatggatgttagaaacagataactgcatggatagagataaaaggatttgttttctgttattcatcatgttgttattttctctgaatgaatgaggcagcaggctttgagagactgcaatcaggacatctaacaaaactcttagaggatgacttctgggccgatgtgagcactttgcacgtgcagaaaataatttctgccatctccgagctgttggagaggctgaaatcgtacggtgaggatggcacagcagcaaagcacctggtaactaactgttctttacaaacttcttcctcttcagaatgcactgagcaaaggcagagtgggctttacttccctccacgtagataagtgccagagcaggcctcagtgccaaaatcactaagaacttggtctctttatttatacgtgcaaagtcattgacaagctttgaagagcttagggcttgctagctaattgttagatgcataggtgcagaaatgctaaccattcagaatatccattatattaggattctttcatatcttattcacatactcccaagtatctgatgttactgatagacgatgttatcaactgaggcttagcagccatcctgtgtaaccaccattcccactacaataagcgaacagagtaagcagttgtagtctttacagtaagtccagagaagcaacttactttgcaggacat

SEQ ID NO: 121855 - DNA, 1045 bp, Homo sapiens
ctgagcctttcttgaagtctgtaaaatggagctacaaataggtgcttctgaagttgtgcacatgaaaagagaatttacgatgtactagctacaagtggaaactcaatacatattatattaatctgaaatttccttcaagtgattataaatttctagtataatgcactgcacatagttggtgctcagtaagtgcatttgcttgattgattataaaacccctaaatacaaaagaatgactgctgctgttcgggttgttattgtcaagagatttgaaatcctgtgtgttatttttctatttccatgcaccttgaccagtttggttaaaacacttaatgagattttaccaaatgctagggactatgttaagtacccagggtataaagatgaatgatacttggcctttgttctccagaaggtccctggtgttgggtaacaaacacattaccagacccctgggattttcttattgtctcccctccccgccttgttttcccttacaggtgaagtgatttcctctgtgagtgagctgcagagcttaaaggtggaaccctctgcagagaaggagaagcagcggtcagaagccaagcacattctcatgcaaaaacagcgagctttgtcagacctctttaaacaccttgcaaaaattggtaaggttctcacttgaaacccaatgaaatgtagtcaccaacttttagggagagaaatgacatgactgattttgggggaaattccatagacagttgagatggtggacaacagaaggtacaggcaaggtttccagatgtctaagagttccactcacatgcaggaaaatcctatgaccagccatccatgattcccaaatatttcccgctttgtatgaggtttctcggaatctatatttttatttatttatttaattaattttatttttttgagactgagtctcgctctgttgcccaggctggttagtgcagcggtgtgatctcagctcactgcaacctccgcctcttgttgcccaggctggagtgcaatggcgtgattttggctcactgcaacctctgcc

SEQ ID NO: 121856 - DNA, 1023 bp, Homo sapiens
ctgttcataattcagaactggagtctccttgtggctatcatagcaagcattgctggatgtaggggcatgggggtccttcagttataatgatctcatatggagcagtaatatggttttctaaatatccacagtatgtctcttttaattttagtgatgctacatttgttctctatttgctgaactagggatgtgtttttgtgtgcaacagttaaatttagttcccttgcagggacactgcctgtcattcttggcagtgaggctaacctgtcttttgtctcacaggccacaattccagagtggtgtcagggcgctgctccttccggcttggaaggggagcttctgcgtcgcttgccaaagctcaggaaacgcatgaggaagatgtgcctgacgttcatgaaggagagccccctgcctcgccttgtggagggccttgatcagttcacaggtgggtgccagcatccaagtcaagggtggatctttctgttttccccagtggcgcaggagggctgagaatgtggcaactgtgtccttttttgataccttgtgtagtgttgaacagttgattgaataagcaagtgggcttaaaaacccacagagctcagaaacaggagcctactgagaacacacaatcataattttcacattgtcgtcctctcatgtaacttggcactgtgccatcttttatgagagccttgtctatactagttcctgttggttggtgttaccagtaaaggggcacagaggtggatttcccagtgtctaagctgtccccactgtcaaaaagttgtctcacttgaggaggattcatccccatcctcttgctttcttcacttcagagaggcacagcagtttcatttctcaggctgtctttgctcagggaaggtgagagcgaagatctcatagtgtaacacagcaatagctgggaagggaacccagaatttaatagaatgtttgggcccctggcagcctctgactacctccttcaccccatctaccccccaactgcagtgagtgtgctgtcag

SEQ ID NO: 121857 - DNA, 2636 bp, Homo sapiens
aagatgagtatagattgtacatgaatgagcatttgaggtgaactgcttaatatgccatcttttaaaaaaagctcagtttctgctgattttacaataagtttcacagaaggaatttgacattgtgattttagaagaacctaggagtacatcatcttcaagaacaaaagtgcaaaaaaacatctgttacaagcagaagtgaaaaataggggagtgttgacagcctgcatctctgggaaatgctaaactcagacaggatccctaaataatgcacctgtgaaactcactgtaatctcatggcatagagagtaatgaggaagggtcatcactgaaatatgaaggccacagctggcaccagtagcacatgcagcaagtgtggtatttttgtttccttttcatttcttccagattcactttgcagtgttctatggaatttgtaccattattacaagcaattctttgaccgggtccaggccaaaattgtggaacttcgttcccccctagaaaaagaacttaaagtaagatgaacagctgtcatgatcactcttgggaggacaaaatcagcaaattctctttcgttaaccctgttatccatttaacactgaggcagggacctaggggaatagaggtgagcattgccaccgctagggaggatggcaatatgtacatcggtggcattggcttcttttgtcacctgcagagtgtgtgagcgattggtggagtggccagtcagagcctcctcagaggactgccacagaaatctgtttgtgttcccctggtcttgcccaggcctgtctcccacctcagagctatgccatgttgtgttggtccacacactactgaattaccatgggggaaggagggaccgctctttttgatattctcagtggttgtggaaccaaccatggtacaagggacatgactaacttggtggttcctaagctggagtatatgtcaggtgacttaatgactgtagcagcactctttttttttttttttttttaaatcactttgagaccaaaacatttgttgtttttgtttttgttttttgagacccagtctcaactctgttgcctaggctggagtgcagtggcacgatctcagctcactgcagcctttgcctcccgggttcaagcaattctcctgcctcagcctcccgagtagctgggactacaggtgcaagccaccaagcccggctattttttctatttttagtagagacggggtttcaccatgttggccaggatggtctcaatctccttaccttgtgattccgcccaccttggcctcccaaagtgctgggattacaggtgtgagccaccgcgcctagcccatggtttcttttttagacttgttttacttgttcactgacacacagtcctgtgtttgggatagagtgagctctggtctttgctgaacagaaatctagaaagaaacagaatgacactagctttataaagccatttcttgaacatcatttatcttacaggaatttgttaagatttccaagtggaatgatgtcagcttctggtccattaagcaatctgtagaaaagacacacaggtaatccatcttttaaaactggagacaaccaaaatagaatagaattttgtgtggtagggagcaaaacgacatagttaccataacctaacttaatattaagtgtgttaaacttctcaaaaaataacaccttgattgttttgatgttgctttcaacaccacccccttcttctccaagcaaagtctacctgcagtaaggattagtgtgccttgagacaaagcaggctatgtctcaagtcttctgccacccactagctgtatactttgagcaaagcaatcccattctttctggctttagtttctcttctagaaaaggaggataacagtacctgccatactttttctcttaaaaataaaacaactattaatatttaaggagagcattgtatataaaaggtacagggtattagattatgtatggatgcatgataatgtattttttatatgtcttcacttgctaatccagtttttttcttcttatctctgtcattacctggggacaggacactctttaaattcatgaagaaatttgaagcagtcctgagtgaaccctgccggtcatccctggtggagagtgacaaggaagaacagcctgactttttgcccaggccaacagatggagctgcaagtgaactgtcttccattcagaatctgaacagggcactgagggagaccctgttagcccaaccagcagctgggcaggtacttggttgtgggacagtgctggcttattcccaagccagtcaagtgggatctgtgttttatgtgcaaggcatgcctcagtactagacaagaaaatgcctttgaaatcttgttctttggacatatatagcatgtatttgcctgacttccctgcagaataaggcaaaaaatcttggggtttttttttttgcttttttttgagacagattctcgtgctattgcccaggcatgattatggctcactgcagtctcaacctcctggactcaaatgatccttccacgtcaacctcctgagtgctgggaccacaggcacatgccaccatgcctggctatttttttttttttttttttttttgtagagatgaggtctcactttg

SEQ ID NO: 121858 - DNA, 1019 bp, Homo sapiens
gctctatgtgcagctgctacttttatttatttatttatatttgttttttatttttttttgagacagagtcctgctctgttgcccaggctggagtacagtggtacgatctcagctccctgcaatctccgcctcccaggctcaagtgactctcctacttcagccttctcagtagctgggattaccggtgcccaacaccatgcctgtctaatttttgtatttttagtagacacgaggtttcaccatgttggcaaggctggttttgaactcctgacctcaaatgatctgcccgccttggcctcccagagtgctgggattacaggcgtgagccaccacaccggcctgttacttttaaatcagcttagaatttagccatggtccttgcttgagagcttcacattgtgatgtctacctcttggccatccgtagtatcccaaatagattgcgtgcatgttaggaatagggagtcatggtcgaaggaacatatatatttttctctttgaatttttaaagatgacaaacagatgaccttgatgttgctggtcagcacattacaagcatttattgaaggatcctcgctgggagagttccatgtgcgacttcagatgttactggttttccattgtcatgtcttgctgatgccacaggttgaaggaaagggtgaggatttttttttcctttcctttgacattgcacgactaaaatgagttaggctttgaattctctgcatgagacaggtgccttgttgcacgctaggttttaaacaagacacatttagttatgtttaatgcgattcacattagatatagagaagaacattcaaagtgaggtgcagatggttataagtttagtactgactagtgagctctggcagaggtaaattgccagatgaagatctcaggacctaccatgttgaggcagcacatctctctgtctagacattgtaaatgtcctgctaagctgctccttgatccaggccattattagtttctttcatccagtgagagcactgccagccatca

SEQ ID NO: 121859 - DNA, 1735 bp, Homo sapiens
aggctgtcagtcacttgctacaggactggccagaacacccagcgcttgaacaggtagggcagctgttgaggaaggagtgctcacagtactgagtctgcaatgaggatgcagcctcaccattatccctgggggcacccacttgcacatatatacatataaacaaaggcttaaagaactgcagttcaatgagatgttacttactaactgcaggatgaacacaccagttttgtatttctcttgtgtaaatgattggggattctgttaattttatttgttggtcaggagttgctgaccacataataaaatgctgccatgttgctctgttttttttttcagaggtgttttaaaagtagagaactggggggaatcttctggtcaggactctcttcagtaccctgtgacttaggatcactggtattcctactgagatacccaaatctttatttctgcagctcctggttgtaatggacagaattcgtagtttcccactttccagtcccatctcaaagttcctgaatggcttagagatccttctggcaaaggcacaggtgagctaatacctctcttcctcattttagttggtggtcagttggcaaaagatacgtcttgtggcacctttgttgttagacagaaaattatagtttgggctagaaaaaggtaaacatccttggtttttctggcatggggtgagatcattgcaagtgaggctgttgcccctgtggtgagggctagctgccttgccttttatccagtgggatgcagtatctaccggtaatgagggtgcactcctcccagccttccaggtgggccttcattccaactgagtgcccacatacacggttcccctcagtgccctcatggcctctaagttagctgttgcctccccattggacagaaaagggccgcatgtctttgttctaggtcagatagcaaagagcacgaattcaggctccagtctataaacactgtgcttttttgccagcctctaaacttggctctggtggagttctgtcatgtgaacagaaagaacttgaagctgatacactgtaaattcattcctacaattggtgcaagttgtttaagggcccagtagtcttcactcaagcaaagttcaagatgttcttgaggaaggaggtgattatggcattgaataatatctgtagtaaattttatctttgtttctttaggattgggaggaaaatgcaagtcgagctttgtctttgcggaaacatcttgatttgatcagtcagatgatcattcggtggcgtaaactggagctgaagtaagtgactctccttccctctcctaaacttaggttgtaagggcttttgtcttttggtagtttaaatttctttaggatttatatagtattacagctacagaatgtgcttttcagttattaatcacagagttaaaagtagggcattaaaatgacctgaatacagtccagacaacagcatatattcttgagggaggaaactgggtggctcctccatctccatttgggaggagagaaatgtgagcatgtagcttctgcatctttggtttcagatatttcaaataggttttcctaaatgcctccttggcttcttctcgtttcagctgctggtccatgagtttggataatactatgaagcgccacaccgagaaatccaccaagcactggttctccatctatcagatgcttgagaagcacatgcaggaacaaacagaagaacaggaaggtaatgcctag

SEQ ID NO: 121860 - DNA, 1044 bp, Homo sapiens
tgaattcccttgatgccatatacattccctctgatggctttctctcttcctctttatctctctctctgtatgtatgtattttagagactgggtcttgctctatcacccaggctggagtgcagtggcgcaatcatagctcactgcagcctcaaactcctgggctcaaacaatcctcccaagtagctgtgactgcatgtgcatgctaccacaccctgccgtttttatattttttacagagacagggtctcactatgtcacccaggctgtctcaaactcctgacctcaagtgatcctccctcctcggcctcccaaagcacagggattacaggtgtgagccactgtgcccagcctgtagtcttttaaaatatattttaatacatatattagtcctatttcattttttcagtcattcttatgcttttttctttcttccttttagtctgattagaagtagattctgatttttaaaagttcaattgctctaatgctatttataggactttgcagatattttggtgcagccaacgttggaggagaacaaaggaacttcagatgggcaagaagaggaagcaggcacaaacccagctctcctctcccagaattcaatgcaggcagtaatgctgatacaccagcaattgtgtctcaactttgctcgatccctctggtatcaacagactctgccgccacatgaagcaaagcattacctcagcctgtttctgtcttgctatcagactggggcatcgcttgtgacacacttctaccccctgatgggtatggtagtttacttttgttatgcccctgggaaatgaaagcaaatgcaaatagatgctgttgctactctgtaacaatcacactcatgaatttcctgttttcgcataattccttattggagtttccttggcttaaagaactgaagctgattcaagaaaattgatttaggattctgtaataagatggattttcatcagtgtacaaatgggccaagaaaaagatggatttttattgtttggatcctttggggtgagggattaagaaaataaggac

SEQ ID NO: 121861 - DNA, 3155 bp, Homo sapiens
ggaaagtccaagacttttatataaaatggcgttgtgtgtgtatataacctatgtaccctttatatcatctctaaattacttacagtacctcatacaatataaacgctgtgtaaatagtgattatactgtattgcttaggtaataatgacaagataaaaaagtccttatgcgttcagcacagacgcaaccatccatttttccccctgaatattttcgacccacggttggttgaattgatgcggaacccgcacataacaagagggcaggctctatcccatgaatcctgtttagtaatttgctacatattatcatcttacttattcctgagactgttaaggctgggtagagagttaactttattaccactgtaaaatctcttgacagcaacagaaataaacaagtcctttgttttctggaaacattaagaatatatcataaatttattctgagacctgtataggctactaaagaaaaccacatttgtgctctatagtatgctcttgtgggtgttgttgtttcaggacaagctggtggtggagtgtttttcacaactgaaggtccttaacaaagtccttgccatcagggagcagatgtctgcccttggggagagtggatggcaggaagacattaaccgtctccaagtggttgcttctcagtggacattaaagaaaagtctcctgcaagcctggggactgatcctcagagcaaatattttggaagatgtcagcctaggtaaaatattctagcacttggctagctgacagatgctctgaaaatatcctcttgctggtagttaataagttttcccttagatttttcttttctgggtgatgtgaggggtagagtttatatacctttatataagtgtcaggcataggactaaatttcacatatatttttaattccatcagaatcatgtgggtattaatatcatttcacagatgagaatctcaaagcttaggttaaggagcttaactctgattagctcaagttaagcttgcagtcacatagcaggttgttgagaatctagaggctatactcttaaccattgtgctctcatacaacatttgtctttttgtccagatgaattgaagaattttgtgcatgctcagtgtttagaactgaaagccaaaggactctcacttggttttctggagaaaaagcatgatgaagcttcctccctgtcccatccagacttgacctccgtaatccacctcaccaggagtgttcagttgtggcctgcaatggagtacctggctatgctttggcggtacaaagtgacagctgattttatggcacaagcttgtctcagaaggtaaaccatgctttcagttgttttccttgcgggaactttttttcttgattattctgtgtatcctatacccataaacaaaccacagacttgatagggatggttaccgaagcagagggaagtgatttgccactttggaaagccaaaatttattgaaggttttttttttactagttttgactctactttaaaagtcaccgagaattttatcagtagagttgttcatttttagataaatgtactgtaagttttatgttacaccttccctaatgtagcagctttccagtagttcattgatagtccataccccaccctctccctctttatttttggaacagatgcagcaaaaatcaacaaccccagataaatgaggagataagtcacctcatctcattttgtctttatcacacacctgttacacctcaagagcttcgagatctgtggtccttgctgcatcatcagaaggtaaaaatcacaataagacataagcctcctttacattatgagttggttagattttctttgacagactggttgggaaacattttatttattctcaaaattccatattggaaacctcaggtttttttgaattgcctcttaaagggaagaattttaaatattcttttatagtaattatgagggtatattacaactcttatcacaggagtattcatttggtttccaattaaatgagatgaaaatatttgctgcttaaaatctcccaattgctcaaaaatatattgtgagagtgttttttatacttttttgtacttttcctctctaataaattgaatatgaatactggtacactcctgttaatagaatttcattagtacagctttaaataaaactgtaaacatgtcacattccttgaccaagttgactggggtggcagagaaacggaaaaatttggattaatacctttaaacttatgacagttttagatgggccttagaagaaagaagacctaataatttatggagtctttctcaggtattctcttacctaattattcctttatttctaggtgtctcctgaagaaattacatctttgtggtccgagttatttaattccatgtttatgtctttctggagcagtactgtgaccacaaatccagagtactggctaatgtggaaccctttgcctggtatgcagcagagggaggcacccaagtctgttttggactccacattgaaggtttgttggtctaaaattataaaaaatgtttgatagtggcaaaagagtttctgaatggatctatcaataaacatttattcctagcatagagtggtgactaaacaggtgattgcaacactttactttctgcagaatgttaaataagtgtactgtcagtaaaagtataccatgttaaataatttgtgaaattttgagataagtcaaaaaaggttttattgaaaaagtctattttttctaattaaaacatttttcccactataaaacatttaaacagtgcagatatatgtatatataatacagaattcattagaaatatccactctgttctatatccttctgtttacatatatttttatattaaatacatacgtaaacaagaattaagtacacatatatgtaacagaaatgtgtatgtcattccagcttatttttaaaagttattccattgtatcaatgtgcttgaatttattttaatcactttcttaccgataaagtgttgaagtttcttgcattttctccctcttcctataataagcatgccacattgactatcctagtatacatctttgtccacttgttggagcatttctatgcataagttgttagaattagaattgaatccttggtcagagtgtctacaca

SEQ ID NO: 121862 - DNA, 1107 bp, Homo sapiens
atgttctcattttatttatgttgactctcagatccagaaagctatcacactctgccccatgaaattgtggtcaatcttgctgctttttttgaactttgtgatgcactagtcctgctctgggtacagtcctcccagggaatggtgtctgatgccagtgccaatgaggtaaggaactgcatcttgttttatttttaaacaacaaaatttatctttcttggcataaagattcttagggctaagactaactttagtgttgttatatgcccaatattatttaagaaacttattcttaacagttttaaatatacctatacacatatttaaaatcttcattggggtataatttacatattataaactgcatatatttaaagtgtataagtcttgacatgtatacacctgtgaaaccattatcacagtcaagataatgaacatatccatcacccccaaaggtttcctcattccctttttgtattttcttctttcctgctcccacccacaacgaggtagccattgatctgctctcttactgtggatcagttgtattttctatacgtggaattatgcagtatatatacttttttgtttatattctttcactcagcattgtgatttggagatgcatccatgtggtttcatgtatcagtagttcattcctctttattgctgagtagtattccattgtgtggatctactacagtttttttattcgctcacctgttgttagattgtaacagttatattttaatccacttaagtcctcttagacattattgtcacatgtggattaaatggaatttttaatccagattattctagtaagtctagtaaagtagagcagccagtcttaaactttttgatctctgcctctatactcttaaaggttctcaaaaactccaacgatgttatatctgtcagtttttacatattaagaactgaatctgaaaaacataaaaaaaacccataaatttgcttaaaaatacagtagcaaagaatttcacgttaatatgaataacttattttcaataaaaaatagcaatttctaaagtaaaatttgagaaatgtggaactgttgtacattcctgcaagtctctgtatgtctggctt

SEQ ID NO: 121863 - DNA, 1050 bp, Homo sapiens
cctcaaatgttggagacataatagcacctccatacttatgtacacactcacatatgaatttacttaattttcaaagtgaatccacaagtatagtgtgtacctcagagggtgccttgcaagctaccagccccctactcctctgctccaccaactcctccatttctaccatggccactttgaagagttcacggtgcagtttgtcagatcgtgacagaccaaggcctgggagtctgcctagacccagctttctccatccatcgatctttcctttcaccttagtagttgtcactttcatctccatctctttagtccaagatttgcagaggcaggagaggaatggcaggatgaaggaccctgatgttccaagtgttccagcaaatagaggatatgattgaaaatgttattaaccgatagctatttgttacgttttttgaatctcattccaggacaatcatatatcttgaccgggaaaaacgggtttttactgaagcaaatttggtttctgttggtagcaaaaagctaagagagagtgttttgagaatgtcctttgaattccatcaaggtaagaacatttaccttttgtgttctctaattaagcatctgattgcataatgttgctaaagttgagaggcatattcagcagctgctgttgtttactggtttcttttaatctgctggcctgattttaaacatgtccccttactcaatagtaatgactaacatttactgagcacttactttgtgccaggtgcttagctaaatgctttttatgtgtccttgatctcatttactttttgtagccacctgtgatataggtccccatgttgttagtgaggaaacggagacacggagatgctcaaggtcacgtctctagcaagtaacagagccacttgaaaactaggtctgtcagctgaaaaagtacatattcataagcatttattataggagggagcatttctcccatgttttttttttgttaattgaaaagatagttgtgcttgttggaaaaaattcaaactattaaagtataaaaattgaaaaagttcatct

SEQ ID NO: 121864 - DNA, 1050 bp, Homo sapiens
ggattgtggggcagcagcagccacattctgattatagagaatttgtttttaagtttaaaaaactgcattgttttcttaatgaaaacagatagtgaggtgtatttattcattttctgccatgtacgtatttttttttttttttaagctaatggtgaccactgtgtaatttagcccatggattagtgtgatctcaggaagtgaattcattggttggaatgttgtattctagtagggattacctttatatcctgcattgggatgaactttcaggacatacagatactttgcatttggtaaagatagagtgtaaaagctattaaaccctgctattctagtattatgggatgaaactcatggtatttactggttcaacctcttccccatcatgattcaatgtgctcaaagtaaaacaatgaaaatattcaactgaaacttcccaggcaaggagtttctccaatatttctgatttttgttttgttctgtttttaaactagatgaatttgtgatccctctggatccccgatggaatatgcaggctctggacatgattagaaatttgatggactttgacccacaaacggaccagcctgaccagctctttgcccttttagaatcagctgcaaacaagtaagtgaaacctgctgctctgggcactgtttgcctcactggcttctcggattatacctttcctaagaatctgtcaaatagcttatgtgtgttgaattttgtgaacctgagaagttgtggggtgttggacatgattgcctttatcatacgataatcatattttctactgttttctgttttttgttttgcttttgagacagggtctagctctgtcactgaggctggagtgcagtggcataatcttggatcactgcaacctctgcctcctggccttaagccatcctcccacctcagcctcccaagtacctgggactacaggtacataccaccacacctggctaatttttgtacttttttgtagagacagggttttgccatgttgcccagactggtcttaaacttctaagctcaagtgatccacct

SEQ ID NO: 121865 - DNA, 1444 bp, Homo sapiens
gctaaggccccttatataaaatgggatagtattttcatataccctacacacatcctcctgtatgcattaaatcatctctggattacttataatacctaatacaatgtaaatgctatgtaaatagttgttgtagtacgttgttttaaaatttatattatttttgttgtatttttattttttgtttttttaaatttttgaatatttttgatctgtagttggttgaattccacagatgtggaaccctcagatatggagggccacctgtactttctttgtagttctttcgttttaagagaggacaaagcaacaataacaacattgcttgaattgtaaagtacagaacatggaatttgttggtggagattaagtaattgagtttacatgagcctttctacttcatgagaatttgtcaataagcccatggatgtttataatattttgtaacacatgtggtcatctgtctaaatatatgtagagaatttttataaatatttttatctgtattgtcctatatgatagccactagccagccagagagggctactaaaatgtaaatgtagattagatttaaaaaaataaaaaatccagtcctttagttgcactggccacatttcaggtcctcatatgtgactagtggttattctatgcagctgtagaacattttcatcactgcagaacgttcaattggatagcactgctttagagtctaacactggtttctccttcctccacagagtccatacaaattcatttggaagccagtgctgcatctctcaggaatttttactcacattccctctcaggtgcagtcagtaatgttttcaaaatattacaaccaaatacaacaggtatgcacttttgatttctagctctcagcactgttttggaaacttatcttttgactttatggggaaaagatctgacctgttagaggtctcaacataacggtattttttagaagactcatgatatgcagaagcaaattctccttctttttttttgaaatttcttttttttttttttaaagggacagggtcttactaagttgcccagggtcttcttgatattctggcctcaaacaatcctcttgctttggtctcccaaactgttgggactagaggcttgagccaccatgcttggcctgaaactatccatttatcctccagcttctgaaggaggctgatgatatgccatggagtaaaaagaatctaggagttggaacactaggccctggtaccaactctgccacaaactggcttggtagatttttggctcatcattcactgtctctgcctgtgtttagaaactaggggaattaagctcttatttctctgaggtgccttccacccttagctttgtgttgtctaccagtatcgttagtaggaagagtttcaaaccacgagatatttgacttaaaggaaagttacacagggtcatttaattt

SEQ ID NO: 121866 - DNA, 1703 bp, Homo sapiens
attttaaagactctattgtttatagatggcaatttttttttaataggttctccaacatcttctgtatcaactctaatccagacagccatactaattgtccagtacctgcagcgagggctgagtttagacagagccttttctgaagcatgctgggaagtatatgtctgttcccagcattcaccagcaaaccggaaggtactatgaagtattgcagaatgtttctaagttgtaataccctacattcttgagtacgaggaaattatttttaaaggtggcaacccagtgacctaagagagttgaccactgcagtttgctctaatagagatctggtatccaggtacttttctggaaaatagcttgaatgtaaatattcctttttttttttttttaaacttacatgtcatcaggaaaagtagaatttgacttgtgtttttcattgaagagtgtattaaaagttgttgtgaggtggtcgcatggactattattactttgctggtttttggggaatatcacttttatgttggtaccactgtattgtgtttttgtctcctaccagcttgtacaggctttactggagaaacatgtttcttctttgcgagcacatgaaacctggggagactccattcttggcatgggactgtggccagattctgtgccctcagctctctttgctactgaagattcacacctgtctacagtccgaagagatggacagatcttagtatattgtctcaacaggatgagcatgaaaaccagcagctggacaaggtcagtggagccttcagcttgtgtctctggtttcttggctggtttttatttttgctggaaatggtcaggacacaatatatttaactggagcattctgtggccatttattgtgtagctgtcatagttttattgttcattgtgatattgctccctattgattatttattaggtatgttttaactttcttcctctgtgggagactctccttttctctcttacctttgatccaatatttgtgaaagaggttttctcagttatttggaatgtgaaataaaaggttattctagtactgagtttgttcattcaaatgaatttcaggagtcagccttttaccttgcaagacttagagaaaattatgcagtcccccagccctgagaacctgaaattcaatgcagtcgaagtgaatacttactggatcgatgaaccagatgttttggtcatggctgttaaattgctcatagaaagagcaaccaatcaggattggatgctcagagttaaatggctttatcatttagccaagaatataccgcaggggcttggtgagtagaacagcttaatttgtccactgatgtgatttatatacacttatgctatttaagtgcctcagcagctgtgttaatctgtgactacactgttaaaattacagttgggaggtctcctaggaagaaatttgtggtctagcattactgttaaggagcaagtctgcctgtagatgtgtcacaagataaacttttgtttccatgttatccttagcatttcaggatatagtcaccttcctaacaaattcaaaaggaaagcatactgtattattttactttttagttttgaacatctgctttttgtgctgtactactgctacagaaccattctatatgggaaaggtattagttttgataaatgcatttcctctaaaagtatataagattctaatctta

SEQ ID NO: 121867 - DNA, 1970 bp, Homo sapiens
ctcttacatttctgcctcagaatctgacagcctcagtagcagaggtagacgttcagtaggacttccttatatattttatttataaactgaatcatggagaagttcacccatttattaattcacttaacaaatacttactgaggctttactatttgccaggcattgctgggctctggaaacacagcataaacaagaggggcaaggtccttgccttgcattggtgacgaaggtgggaagcagagataccagtcatgatccttttgcagtaatttaggcaacacatcacagtggcttagatgagggtggtcagatgggttggtttgctgatggacatgtgggttgagaaaaagaagaatcaaggatgacacctatgtttttggcttgagtaactgggtaaatggggttgccattcattgagaaagggaagactggtaaaggagcaggtttaatgtggggagggtctaccgggaatcagctgtttactttcagacatacatcagaggtgtaagataactagatggagatgttgatgggcattcaatatatgaatccagttgtttcaggagactacacttgcttcctgttctgctgtctgtaggtgagttagaataatgaattagtacagcctactctggggaatatctgaaggttaaatttttaaagttctcagcactaaaggtacactggatatatcatacacagttccttaggaaagtaggtttagagaaaatcttttgctatattgatgcatgctagaagtaaaagatccttggtgtgaattctgtgacaatgagccacataggatttgccctcactgactgatgctgagctacacctttggttgcactgggatttaaaatcatttttttctttgaattgctatttttctagacttttcctctcgatggatcctgttcatggagatatatcccgagctatgaggaatcgtggacttgaaatctacatttcaggggaaggggatgcaagcaccccagacaacctggatttgaaagttctgctgcacagccttggattggtggggaacagtgtatgtgacatcctcttggctttacacacagagacccggagcactgttgtaggtgaggtgcttgacttttgggcctttgcagagttttagtcttcaagaaatttatgtcattccattggactgctcatcaaagatttcgtacatttagtgtatatagaaattatcaggaaagcttgttaaaaatgtggatttccagacaccccaagagattgggttcagcagggcagggcaaggcacaggaatcagtatctgaaagacgcttcttatgtcattctgatgcaagtaagcagaggctaaccctcgagtaattccactttacgcactgaggtttatgaagtttgcccatcatttctccagggtcatcaacagcctcttgaagttggaataaagaggaaactttgagttgtttaaagcagacaggtgttactttttctaaactttcaattacacaaaaaggaacaagataataaatgaagtattgcttgttggataactactctgtgttaggtaccatgcagattgtttatttaatctttttttttttttctttttttttgagacagagtctcactctgtcgcccaggctggactgcagtggcgtgatcttggctcactgcaagctccgcctcccaggttcatgccattcttctgcctcagcctctccgagtagctgggactacaggcacctgccaccacgcccggctaattttttttttatttttagtagagacagggtttcactgtggtctcaatctcctgacctcgtgatccgcccacctaggcctcccaaagtgctgggattacaagcgtgagccaccatgcccagctgtttatttaatctttacattagttctgcaaggcatatgttttcatttttcagataagactcagagagtttgagtaatttatcagttaataataa

SEQ ID NO: 121868 - DNA, 2166 bp, Homo sapiens
tctacataaatgtttggagggataacatgttttttggaggctgactggcttagatttaaaatcggtcaccaaccatgggcaaattctataactcttgtgagtgctgttgtctatataaaatggacatggtaactattttgcatgggtataaagatcagaaataatctaccaaagtacttaatacagtgtttggtacataggaggtggttaatgaatggtcatttttctttataatcttcgtattactgttctatcctctttttaggtagtatcttcaatgatgaaagcaaacaactctttttttgtctctagatttcaatactacagtgtccatggcttcaatttaatttatggtgcattgttactggaatctcagatagtttggaatatgactgctatgttctcaatctcaaatttactttcattccaaagaattaaataaatgcagtcaatcctttttataagagaaaattcaaaaggataagggaattgtggccagtgtttttagaatagtgactcttatcactgtgcttgttttctagaaagtttgcctaagaattaggtggagtgatttgtgttttcattgcattatcttcttcctttaggtcattgctgtattcaaggatgtgtttggttcaaattccaacccatacatgggaaccagactatttcgtatcactccctatgatgttcaggtaaggagactaggataatcctctatcctttgacattttttaatggtttcttctgctcccactaccaggcacgcttatggaaatctcactggcatgtcttttcagttgggctactcagtcctttcccgtgggagctgtgttcctcacccgtcccgccatcccctgttgctcctgcaccagtcattccaacccctggagtcaatcatgaagtgtgtgcagatgagctggatggtcatcctggtcgggccagcctctgtgggcaagaccagcctggtccagcttctggcacaccttactggccacacattaaagatcatggctatgaacagtgcaatggatactactgagctgctgggtggatttgagcaggtaaccagtctgccttcatattttctggcaaagcataataaaccccgtggtctgactgagagtcttctgagttggtgatgagtacagataacagtattctctgaccctatgatgagttcatgtcctctggaaattacaggttgatcttatacgaccttggaggaggctgctagagaaggtggagggaactgtaagggcactgttaagggatagcctccttatcagtgctgatgatgcagaagtagtgctgcgagcctggagtcattttcttctgacatataagcctaagtgtcttggagaaggtggtaaagctatcacgatggagattgtcaacaaactagaagcagtgttattgcttatgcagcgactcaacaataaaatcaactcatactgcaaggcaggtatgtatatttggatctctgtatcaggaacttaccattgcttatattgtgtccatttacacgtaatagatttacaaatgttttgtattaatttagtaattattaacaatcagaacttgtgggaaagtttgacctagaaagtaaaatgaagctgaggtaaagtattcagaatagttgatcctgaaaaatcaaataggaaaaaaattggttacgttgctttatggtttattttgtgtgtaatcacctataatgataaaacagcatgtaaaacttttattattactggctatttttttactcaataatttctcaggaaattgagcatttttaaactgaagaataggagtctgaattcataggatgtgtttattcatttgtgtggagatggaggaaatatatcatcctgtatgccatccaattaacatggaaatttctctcattttgtggtgccactttcagagtggtggtgagcatgctcttagggaggattcaacctaaaggcccacaggctgggtctgtcactatgcttgtcattctttatttccaaagcctgcttgtaactgattacaaagtgttgattccttatagccgaagaaatcagacatcccacttcttggccagcaaacattttatctgtggcggtgggccactcatttactttcttcattgttgatttgatctgtcatttctcactttaagcc

SEQ ID NO: 121869 - DNA, 1981 bp, Homo sapiens
attatttttggatttctaggtcttcgttgatccccttacagtaattgacatggagttcattgccagtactttgtttccagccattgagaaaaatattgttaagaaaatggttgctttcaataaccaagtaagtacctacacgtattggtttctttttttttctggctgtatttgaaccagtattttttcaacatagagttctaccaaattatcaggatctctaactaaaaaaaattactttgaattctacaggtttctagtggaagggacactatgtagtggaggcttccagtaattcatttctgtattgtgactaccagtgttaatgcttagaggataagccaggcatttggaagtcttgagaaagaggctctgaatcaagcctgttaatttttgtttcagattacatatgcttttgtagtacattcctagtacttaatgcagtgcctagtagtaagcagggcatgtttcccaatcaggatgttttctttctagattgatcatgaagtgactgttgagaagaaatgggggcaaaaaggaggaccctgggaattcaacctccgggaccttttccgctggtgtcagttgatgctggttgaccagtcccctgggtgttatgatcctggtcagcatgtgtttttggtctatggtgaaagaatgagaaccgaagaggacaaaaaaaaggtgagtttcacgcttggtatttgtatttctttccatctgaaagttgatttcctgtgggtgagaaaggacatacactaattgcaagcctttttttttttttttttttttgagactgggtttcactcttgttgcccaggctggagtgcaatggcataatcttggcttgctgcagcttcacctcccaggttcaagtgattctcctgccttagcctcccaagtagctgggattacaggcataagccaccagttccggctaattttttgtatttagtagaaacggggtttcaccatattggtcaggcagatctctactcctgaattcagatgatccacctgtctcagcctcccaaagtgctgggattacaggcgtgagccaccacgcccggctagcaagcctgttaaagctgcttcaaaatttaaaagttaaaagaacagactaaacgttctcctaccttggggtctcacaatatagagtagcttgctttagaggacataatttgcttatctatccaaatccccatgatcacataccttaaagcagtattgccctccagtagtaaagaactaagtcttcaccatctttacaggcaccaaggtgagaagcaggaggaggcagacaggtgatactccgtagaagaggaagtttttctgttttgttttgtttttaaataaatgtcaaattacaaagcattttgtctagaaagtataatcgtataaagagagaatattctgtgtttaagtgaaaataaaaatacctgtttgtaaaactagaattcccactgtaaggaattgtaataacgtgtgcattttagtttgtggtatttaaaatcctgtctcgctgaatgctcacagtagctataggcaggaggtgctgtcatggcatcttacaggtgaagatccaaggcttaaagttatggagtgtcacaggtagcagagccagctttccagtttaggccctctccagtttgtctgctgtttccttctagtaaacttcactgtttgaaaataaatgaatagatacatagatgcatgcactagaagcagtaacctccttgttgaaatgtgaacatgtggctggcccatagcacatgtgactttcacagccctttcattctgctacccattctgtttgttcttattttttttctttttttggattgcaaaaatttattaaaattggagacattgttttaatcttcttgtgccatgagactccatcaggcggtctacaaagaccattgggaggctgaggatcacttgagcccagaagtttgaggctgtagtaagcttcaaaggc

SEQ ID NO: 121870 - DNA, 1027 bp, Homo sapiens
tttatttaaaatacaagtaaaattataagatataacaaaatttgcatattttctaaaataattataatagaagttcaaaactgtgtccgaactcaaatcaaatgaatatttctttgagcagttttcaggtcagtatctaaaactataactcccaaggttttgttttgttctttggatagggatggactgctattgatgaatcctttcagaatttgatcaaagctgcaggctgcttttgttagaaacagcatttatgtacattcattcacagaactttgcttagaaggagcagagaccccttttaggccatttgtgtgcccctggttatgaacttttgttctgggatctcccgttaacagcaaatgctttttttgtttcttgtgtttagggtctgacatacctgaagtgatgctggatttcattgactggctgacccaccaagagtttggcagaaagtgtgtggtcagtatcagagatatcctgtcctgggttaacttcatgaacaaaatgggggaggaagctgctttgaaaaggccagagatcatctccactgtgacatcttttgtccatgctgcatgcctggtgtacatagatggaataggttcaggtatgttgtctggtagctggtggggacaaggggctcgtatagaggggcataggaaaaggagcaagcccaggcctctgacccagctattttactgaatcacttctcagaacatttctaaaactcagaatggctttccttttgtttgtactctttgaaaggtgattggcacacaggatacactgcaacttctcaaagctggtagaccaggtacttaacaaacatgaagtggtgattatgagtagagtaaagactgctgaaatgtctttgcttctgaagcactggcttttttttttttttttaaattaagttctgggatacatgtgttaggaataatgcttaaaattgtaaagaaattgaacacttaaacaaagggtttttagcaaagcaattttatttttgtgcagaggggtgtttttttgg

SEQ ID NO: 121871 - DNA, 1022 bp, Homo sapiens
tatactttttaaaatcacactctcattgagctatgtaaaagaagtttcttcctcctacatcagactgcccttctctgtgggaagacaggtgtttattttctctgaagtattatttaggtacctgatgcaaagtaaaggtaaagtaaaaggaagaatctttgcctgaggggaagagttcagatttgactgggactggctggaatcctgcttccaccacttagtctgtaaggcctctggaccacgtctattaagaaagtgatgatgatactggaaggtgtcatggaatataaggagtcaagacaaagtacatcttcaattaattatatctgatagtagaaataatttttaaaagtgtgtagtatttgctggacttaacagctaacaacattctttcaagacttgttttccagctttccttacagttttaaaaattcacattgaagttttgtgtttcttatagctgtctcctgccttaagaaaccggtttacagaaatatggtgccctcaaagcacaagccgtgaagatttaattcagatcatcagtcataatcttcgtccaggattgtgtctgggcagaatagatcctaaaggtgagagtttgcaggtggtgatggtagtattgggtcatagaagggtttgtgttgggagttgagggatctcttacaggacatcagccctgtgtgtatatggtgtgttataagaagaaaggagataggtaaatgaaacaaagtagacaaggagaatattactattctgttaccttctgttaaagtgtcccatcttcatattttcatcattaccacttgacacaatggctgtagaatttcagctgcatttctttagttgtcatcaatgaacatgttattctttcactttatttaaaaatttttttggctaggtgtggtggttcacacctgtaatcccagcactttgggaggccaaggtgggcggatcacttgaggtcaggagttcgagagcagcctggccaacatggcgaaaacccatctctactaaaaatacaa

SEQ ID NO: 121872 - DNA, 1338 bp, Homo sapiens
aagttctcttctcttactttgcattgatgttttgaggttcattcctatttcagcacgtattattagtttgttcctttttgtcccgaatagtattggatataccacattttgtttatccattcaccagtcaatgatatttgagttctttctagtagttggctattatgataatgcatgcaatttatttgttttcttgtaagttattcatttttaagaccaatgccttaatagtttataagttgaaaagtttttttttcttgatcagaaatagccattattacacagaaattgggatagtgagtcattttaaaatttgtgataggaaaccattaactaaagtaaaaattcagtagaaagaagataacttttttttttcttttaaagagcattgaagattgtaaaacagaaagattgtataagcccttttcactgttcttcaatttttcttttagtgtccttgaagtagaaaagtctctggtattagctgaaaaaggcagtccagaggacaaggatagtgaaatagagctgttgactgctgggaaaaaatttcgtattctagcaaccatgaaccctgggggtgactttggaaaaaaggaggtaaaactttactgatgcacattttctttctaggttttgacctcagcttactggtactcgtaaatatagtatgtaataatggatttggaattttatgttaggtaaaaagtgggtaaaaagtgtaaaaactcaaaaatattttaaaataattattgggttagaaaaaaattctgacacaaatatctccttatttgatatctcactttgtgtatgtgcctgaaatgtcattgttacagtcactttgcctagccctttacatatgttaccctgagaaagctcacaggagctctgcaagaaagttattattgtagttttatggatgagaaaagttggatctgaaatttaagtttaacctctgtttttacagtccactttcttaaacacacctctgctttcatgggtggttttaaagtgacaaaaaagtcacaaccaggaaccctcttctggtttgtagatggagcttatttgttctcgtaagggttatgtgtgtcactttctgactgctgataaagtaaagggcagagggtagttcctatgttcagagggttgtgttcagatatatttgggaaccaacaaccttgttggtttccagctcaagaaacctttcagtggagaagtcagcactatgtgttggatcccagtctgttaaagttaggaagagagtgatgtaacaggtcagggatgatgagaagaaacagaggggttgatcttaaataagacaattaagagtgttggtaattt

SEQ ID NO: 121873 - DNA, 1702 bp, Homo sapiens
cttgaactcctgggcccaagtgatcctcctgccttggcctcccaaagtgttgggattacaggcatgagccacactgtacctggcaagaatgattttttgcttcattgcattgagggcagtttttgtctatttagttcttttaaacagtgagattcattctatacgtgtgtagagaagagataaactagtgtctcttgaaagtctgtcaagtctataaggattagatttcttttccctctcttggtggtggttttttttttttttttttttttttttttaagaaggcattccgctcttgttacccaggctggactgcaatggcgtgatctcggctcaccacaacctccgcctcccaggttcaagtgattctcctgcctcagcctcccaaagtgctagggttacaggcgtgaggcactgcgcccagctggtgattgttgatagaactaggttggagtttgtgcagtacataccttctggataagaatatgggagagtgcagtcgtgtagaggggtgccatgagcctggggttgaggttccacattggccagcactgtttactgctgcagtgagactcccacagtggttcttctcttttgctgagggggggtgtttatggatgtgtatttgaaacacatgccttgttaatcagttgcacatctctaacaggtgtgggaaaactactatctgtcaggtatttgcagccttggcaaatcagaaattatactctgtcagctgccacttacacatggagacatcagacttcctgggtggcctgcggccagtgagacaaaagccaaacgacaaggtttgtccagcagcaagtgttcctgttattttaaaaaactgcagttagctgtgcatgagttagtggtggggtttctggagctgggttctggtttggttaaatgtgcatatctgcagattttctctggtctacaagggccttcacaagcattctggtgtgcaagttctatctcctgttctcagattcttactttcctcagaatgcctacttcacccctggaaacaccagccagctgcatgtatattgtctgtggagccacctgccctttaattttccccactttttcaaattataggaagaaattgacacatcaagactctttgagtggcatgatgggcctctggttcaggccatgaaggaggacggctttttcctcttggatgagatctcattggccgatgactctgtcttggaaagactcaacaggtacgtgcctgagaggtttgccttgtgtttgatatttttgttggtgtgatttttttttttctccctgagacagtgttctcactctgtcaccccaggctgcagtgccgtgtcatgatcatagttcactgtagcctcaaacttctgggctcaggtgattgatgtgatttttatagatatttaatcttgtgcacagtaatacttctcataggtgcaccttagtaaatgcttgaaattattgatgtattaccatgtcttttggctttagcattcagtgtttcctaaatttctaggttttttttgctatcaataatcagaacaatgggatcgtggaatggtagggctaaaacatgagccaaagtcaaaactattttttaaagtgaattatatccctactctcttaatattttgaaagaactgtagtcagaatcctagacccatggctataagccatcatcagacctcagaccaat

SEQ ID NO: 121874 - DNA, 1050 bp, Homo sapiens
gaacattcctgcttatgtctttcgacacacacatgttcattggtgtttggggatactagaagtcatattgctgaggcatagggcaggtatatggttaattgtaataggctgtcctagttcttcagatttctacctcaccagccgcgtatgagagtttctattgtttcatattctccatatcccttggtgttcccggtagacacttgatgattcctctcctccttttcctcctcctcctcccaggttatatgcttctggcaggtcgagtcaggaagcaggaggaaattgatgtgattcaagaagtccttgagaaacatttcaagaaaaaattgtgtcctcaatctcttttctccaaagaaaatgttctaaaattgctgggtgagtaggccaaaatccctagaggaatatgatttgagttgtactcattagaatctaaatatttatttttccttggataggtaaattgtctactcagatatccacattggagtgtaactttggccatatcgtgtggactgagggcatgcggagactcgcgatgctagtgggaagggcattggaatttggtgaacctgtgctgctggttggagacactgggtaaagatctgtgacagtgactcatgagggttcatttcaattccataggattacttgagttatcactgaagaactcatgaaagtattaatccccccttctttcctccttcctcttttttcttttttttttttttttttaagaagagactaagagtgggtcgggggctgggggagggatagcattaggagaaatacctaatgtaaatcacgagttgaggggtgcagcaaaccaacatggcacatgtatacctatgtaataagcctgcacattctgcacatgtaccctaaaaaaaaaaaaaagaaactaagatctgttactgtttagtttcctctaccttcagactaggttctttgttaatggaaaataatggctttattattattatttttggagatggggtctcactctgttgtccaggctggagtgcagtggtgcgatacggctcactgcag

SEQ ID NO: 121875 - DNA, 2154 bp, Homo sapiens
aaaaggaaaaaaaaatgctcttttaatgatgctgttaaatgatgtcgtcattcttttaaaaaaaaaaaaccaaaataatacttggccaggtgcagtggctcatgcctgtaatcccagcactgtgggaggccaaggcggtcggatcacttgagcccagggttttgagaacagcctgggcaacacggcaagactctgtctctgcaaaaaatacaaaatttagctgggcttggtggtgcatgtctgtagtcccagctactcaagaggctgaggtgggaggatcacttgagcctgggaggtcgaggctgcagtgagctatgattgcaccaccatacttcagcctgggcaacagagtgaaaccctttgtcaaacaaaacaaaccaatactcagttctggtttctcagctttgtaattttttgttgttttaagttgcttaattggctaatcttttacagaacctatccagtgctgattcagggagagacatcagttggtaaaacaagcctgatccagtggctggctgcagctactggcaaccactgtgtgcgtattaataatcacgaacacacggatattcaggagtacattggttgttacacgtctgactcctcagggaagcttgtctttaaggaaggtagggttaagattccattccatggacataggtgtttattctttcacacacatttccttaagtaatattcttcatcctttccaattgaggcacatggacctttgctgtaacagccggcttttcttgatgcctgagctaagatagttaaggggtgatgcataaggtgctggctttctttaggttctgctaatcttgctggctgtatacaggactagggccaattttcaagaggggaattgaactgctgctttattttctaggaattcagagaatggggttagtgttagccaaaaggaagttgggaatagtcaacagaatgtggtgatttaaatgaaattagactgcaggggaaagattacacaagaaatatgaggtattttcagccttggcttcttttctgtggggaaaaaagggactattttaattgaaaattgttcctccttgatctgcagtgtcataatttgttttgaggcaagactagctacagaaagtaatttgctttgaaatttgatgataacctaggatttgttgatttgtacataatgcattttaaaactttgtactgatttatacactagttcttgctgtttgtttcttcctaggtgttcttattgatgccatgagaaaaggctattggattattttagatgaattaaatttggcccctactgatgtgttagaggcgctgaataggctgttggatgataaccgtgaattgctagtaacagaaacacaggaagttgttaaagcacaccctcggtttatgctttttgccacccaaaatcccccaggactttatggaggcagaaaggtatgtagcatttgtctccttccttcaatttgttaacacatcagatagtagatttttcgtagtaagaatgaaatgtttttacttctcctttaatattttatggtgaatgtcagagcctccatattggaaattaaaaggcaccttttactgcattcttcctgtgctttgtctaggtcctttctagagccttcaggaatcggtttgtggaattgcactttgatgagttacctagctccgagttggaaacaatcttgcacaagcggtgtagtttgccaccctcctattgcagcaagttggttaaagtcatgctggatcttcaggtacttagtttcaaatggaatgtattgattatacttggtgatcaaaatttcatggcttcttttgttagaaaaaagaatctgtctgttgatgtatttttccaagtagagatttttttttattttttattgtttttaatttttttattatttattttttgcaagacacagtctcactctactctcctggctggagtgtagtggcacaatcatagctcattgcagccttgacctcctgggctcaggtgatcctcccatctctgactactcactccttagtagctgggaccacagatgtgcaccgtcatgcccggctacattttttttttgtagagacaaggtttcgccatgttgccccggctggtctcgaactcctgggctcaagggatccacc

SEQ ID NO: 121876 - DNA, 1102 bp, Homo sapiens
gtggatggcactggccatagacctcactacagccttcggactctgtgccgggccctgcgatttgcagcctccaatccatgtggcaacattcagcgctcactctatgaggtctttctgaagtctctttgactggatatgagcttaatggatgggttcatgggaaggaaggaatagggatgcatatgccaggttgcctgtgctttccagttagtcagatcagcccataatacctcttaccagatttaccttgcccttttaaattaaatattttactttttattttaaaatttttatttttaattatacatagagacagggtgtcactgtgttcccactctggtctcgaactcctgggctcaagctgtcctcctgccttggcctcccaaagtgctgagattacaggcatgaaccaccgtgcctggcctacccttccctttatctaccaccttactatatttaaaagttgggaagcagcatcacccaagaggttaaattttgttctggaaataagtttggttgtattgcagaaggttatttagcattatgcatatttgtcttttctttctagggtttttgtttgggtttcttaacacagcttgacagggcatcacacccaatagttcagaagctcatctgtcaacacattgtccctggcaatgtcaagagtctgctgaagcaggtatgttcttttgttatttttgacttgttacacttgaaaggctgaattaccaaattttcagctgtttggttttttttttttcacataactttttaattataaaggtaatctgttgcaaaaagtttaaacattacagaaacatatgtttagatggtgaaagtttccaataagcgtgctctttggagatttaaatactgtggataatctttccagataaattgtataatgtatatattttattttcttacatatccaaattttgatatgtatatgttgatttattgaggtaaattgtaaaattgtaaaaaattgtaatatgcgtttaatgtaagtgggactgtcttataagaatattgtttttttgttttgttttgttttgtttttttttgcagatagagtcttgctctgttgcccaggctggaa

SEQ ID NO: 121877 - DNA, 1732 bp, Homo sapiens
caggctctgcctcctgggttcacgccattctcctgcctcagcctccctattagctgggactacaggcacccgccaacacacctggctaattcttgtatttttagtagagacggggtttcaccatgttagccaggatggtctccatctcctgacctcgtgatccaccggcctcggcctcccaaagtgctgggattacaggcgtgagccaccgcacccggcttttgtatctttttcttcttgtaaggactatacgtagaagacttattgcatagaagaagcaataatggtatatttttggtaatggttacattatcctttaattatgctaagtttctatatcaggttgaaagacattttatactacaagcagttaaaatgagctgacatagcttcttctgtttcatgtttttctattgtcaacatagttatattaacttcctaaaaagtgtttattatgtattgttttacaggttcacagaactttatgtagaagaattagaaagcaaagaagacttacaggttcttattgtagattatctgaaaggattgagtgtgaacaagaatacagtgcaaggaatcataaagtaggttcccttttgtatgtctttataagctctttctctgaacatgaaaatgtgctactcgtgcacacacacaaatatgtattcttttttacttctaacttgagaaaactgatggcaggattattatttagattctcttgtaaagttggaacctgatatgaactcctttaggtttttctaaggaaattacatagaaagctatgaatcattacctatgagaagatataaaccatcagataatgctctcctgattacctctatattcatagctgagggtttgaattcttggagatgtacatggcttgcgttttgaatctgtcttgaagaaggttgcttttctatttgcaatatttatactagctatgtgggatgtaaggagaaaagggttaatataattgattgtgtcaggtttggaattaatggaagcttagcctaataaataatagagtagttacgtggcttgtgctttaatttgagactgttattcctgttttttgtatgccatatggacaacatgcaatcttttgtgtcagacaacctcaattctagtattggttctatgagaaactaattgtgtcattctgggccagtaacttaattgtgtgttctccagaaagaaatacaacatgtaaaaggattgaaatagggtgatattaatgttttactgtgtgtttgtgtattttttctcttccttaatacaaatacttattgagtgccctggtgctgtggttatagctatgagtaaggcagacaaaaatcctggttcttctcattgagctttaattctagaggagtcaggtactgtaattttaggttgtgataagtgaaaacatataaagctgagtagggtgtaagaaaatgaagacttggagttctattttttttttttttttttttggatacaggagctttgctttgttgtgcaggctggtcttaaacccctggcctcaagtgatacgccagccttagcctcccaaagtgctggaattacagggttgagctacagcacctggtcctgaagtcctgtattaaatagattagtcaacaaggcatgtgtttagaatgcttcagaatggtttaccacaacacaccctaaattggaatactttttggtagccaagaatatttggacaaaagtgtaaatacgt

SEQ ID NO: 121878 - DNA, 1611 bp, Homo sapiens
tgtgaaaggcagtgtatgacaatcactaaacactctgggatttagacatttgtctaatcttggtatagcctgaccctatatttattttgagttttaatagtcacttgggtgcctttaaagacctgactacaatgtaagctatttacctgaccatccacataatgagaggatttagtttattgcatctctctgttaggctcaaagatattcccttgacctttttggacatttaaaaaattaacttggccttaactctgcctatctgctgtcagccagttaaagtataggcccatcaagtaggaaagatttgccccgcctctatttctaaccctgcttgcataactgttcttggcaagtgtgcctttatttgacacattgttaacattttattttatctttttctagggtacattagctcaggctgtaaagaaaggagagtggatcttgttggatgagattaacttggctgctccagaaatactagaatgtctgagtggtttgcttgaaggatcttctggatccctggtgttgctggatcgaggagacacaggtagcacttgaatcccttgggatttgacttggtgtcaagccctgtggccactttagagtgagattttttgttgttgttgttagaaggatgacatgggcctcccaatggaatttgttcattctttagatattaattttctgcaaagtgcattaaagtgttgggtggtatggggaatgcaaagaagaataatataatttgacaaggtgtttgagttgtggataatagacacacttataaaataacaggtgaatggttgataaaagataaataacagtgaataaacataccgcaaaagactgcagtataagattagattgaatacataggtctggaaagttatttcagtggggtttcagaaaagacaaggatggtgtgagcagccagcatcaggctggctgggcctggggttctgtggaattagataatcatacctttgttgagaatttgtaattttctcttaacagagccactggttcggcatcctgacttccgtttatttgcctgtatgaatccagcaactgatgtaggcaaaagaaatctcccaccaggaataagaaacaggtgagggtttggttcttggagactttccttttttgcaacaggttcttgctctgttgcccaggttggagtgcagtggcgtgatcttggctcactgcaagtccccggttcaagcagtcctcccacctcccacctcccacctcagaatcctgaatagccgggattatgggtgcatgccaccacacccagctatttttttattttttttctgagacagagtcttgctctgttgcccaggctggagtgcagtggtgtgattttggctcaccacaacctccacctcctgggttcaagcgattctcctgcctcagcctcctgagtagctgggactacaggtgcatgctaccatgactggctgatttctctatttttttttagtagacactgggtttcactatgttggccaggctggtcttgaactcctgaccttgtgatctgcctgcctcagcctcccaaagtgctgggattacaggtgtgagccagtgcgcccggcctcaagtttt

SEQ ID NO: 121879 - DNA, 1830 bp, Homo sapiens
tcttggcttactgcaacctctacttcctgggctcaagcctcccacctcagcctcccaagtagctgggactgcaggtgtgtgctactgcacctgactaatttttgtatttttttgtagaaacagggttttgccatgttgcccagggtgggcttgaactcctgggctcaagtgatctggccacctcagtgtcccaaagtgctggggttatagatgtgagcagccatgctaggctagtttttttcataacactgtttatctaataatagtttttaccttcattatgggcccttcaaatgcttgcgatgggggaaaatattacaatttaaaactgtaacgtagattttaaatatttcagtagtatttctgacgttaattaaatgaaatctgagacctactcctgttttctgagccatgctttctaacttctgttaacttcagaagtttgtgaatcacatttacctgtgtctgtttcagttataaaccggtggaccataagcttatttggctacccttacgggaggcatttgaggaactctttgctcagacattttccaagaaacaaaactttacgttcttggggcacattcagacctgttacagacagaaacggtggcatgatctcctgagactaatgcagcatgtacacaagtctgctgttaacaaggatggaaaagacagtgaaactggtaaggatgtgacccaggctgccatgggggagggcatggggctgggctttagttaacatattagttttggggaagagtaaagcgatacaaattggagctttctaggactttggcagaagtgactaattgtgaagtattgtgccccattattcacgtatttccacaaaaacagttgactggtaatgctgatgtgcaagtactatttagtggtcagtaaggcacatttcctcagaaaaagcttatttctaaggagctagattctatagccaagaggcttttgctggcttagtttacttctgtgtggttccttatctgtaaagcaggaataaaaataactagtccagagggttgttgtgagggataaatgaggcagttaatacatatatattcatacatgtgggctaattagtgtcatgtctggcattttgttagcattatacaagtttttagacttagtgttttgtgtaagatgcttaatttttgtgtgttttgttaattgtatttgtttgtttagaagttgtatatattacaattcaaaatgtgtgctgaattcttgtctttcttttttagggttactcataaaagagaaatgggaagcatttggtcttagactcaaccatgcccaacaacagatgaaaatgactgaaaataccttattgttcgcatttgtagaggtatttctgtttttgttatttagcttatgggaacgttgattttatgcaaaacaatgtttcaggcaggttactattttgtattgtcttaatgaaataatgattttgggggaagattttgaaaagtgtccttcatggtaattatggcaattataagatcttaatgagcaccatcattatttaaataaaaattttaaaagtacaaattgataaattataattgtatatattcatggggtacaaaagggtgttatgatttatgaatacggtatggaataactaaagctagtgaatattcatcatctcaaataccgttttttgtagtgagaacatttgaaatgtactgccttagtaattttgaaatgtacaagacattattatttatggcatggtcgccatgctatgcaatatatatctcaaagggaagaaagcttatttttttctgtctaattaaggctttgtactttcttttc

SEQ ID NO: 121880 - DNA, 1017 bp, Homo sapiens
gtgatctcagctcactgcaacctctgcctcccgggcccaagcgattcttctccctcagcctcctgagtacctgggattacaggggcccgccaccaggcccggctaatttttatatttttagtagagatggggttttgccattttggctagctaggttggtctcaaactcctgacctcaaggcattcgcctgcctcagcgtcccaaagtgctgggattacatgcatgagccacagcgcctggcctgaatgaggttttctttaaggaactcagtctactttgaaatattaagctgcctttttcataaattcaatagatcaataataacagagacattaataattgtattaattatctattaactctctgtggcagtcattatgtgccaggcactgttttgagtcctttttctgtgttaacttagctggtcttcttaaaaccatgtgagacaacagactgttatcctctatattttaaacatgagagaactgaggcaaagagagataagtcacttattcaagaaaatggcagatccaggatttgaacctaagcagtcttgagtgtctgtgttcttaaccattactctgcttcttcagttaactttggatcccatttatactgttattttcaggactagcaattttggccaggagcagtggctcatgcatgtaatctcagcactttgggaggcaaaggtgggagtattgcttgaggccaggacttcgagaccagcttgggcaacatagtgagactttatctttagaataaaaagttaaataaataaaaagattagcaatcttatttaaatgacacatatattttgttcaatttctcaccattttcactgttgtcgttctagtttatctactgtctagtccactgcgttggtctcttatctttgcttctactcctaatctttttatagtcttttttgtttaggagttacaatgatcctttaaagtacaatcagataaagtataattttttgtgtgtgtgtgtgtatggcatagtctcactct

SEQ ID NO: 121881 - DNA, 1034 bp, Homo sapiens
cactctaagttctgtctctgttgtcatgtggcccttcttccttgtgtgtgtatttcttttcttctcttcttttttttttttttttgagatggagtcttgctctgtcccccaggctggagtgcagtggtgcgatctcagctcactgcaacctccacctccagggttcaagtgattctcctgcctcagcctcccgagtagctggaactgcaggcatccaccaccacgcctgggtaatttttgtatttttagtagagatggggtttcaccatattggccaggctggtcttgagctcctgaccttgtgatctgccagcttcggcctcccaaaatgctggggttacaggcttgtgccaccatgctctgccttgtgtgtgtatttctatgtcaccaaatcttcctcttataaggacaccagtcattggatttaagacccaccctaatgcaatatgaccttatcttaatttgattaaatttcttcaaagaccctattttgaaataaggtcacattcataggatctgggtagacatgagtttggggaaagattattaacctattacaactaggtactgttgttacccacatcttacaggtgaggaaactgaggctaagacacattaagtaatttgtccaagatgagctaactagtacaggtagtcttgtcttattgatctttttaatctccagagcctagcatcgtatcagatgtgtgagtattcagtgtttgcagagcaactaaattctgtaatttttgtatgttgtaagattatctggtatagcttgaagacagttactgtgagctgttttctcatccttgttgttgaatctggaatatatggtttcccagagcaaaactaggagaagcttgcagcgtggtttttaaactctttttttctccttcccagggagaagttcactttcgctgctacacggccgtcctctgttctcatcgagcagcttgcagtgtgtgtcagcaaaggggagcctgtgttgctggtgggagagaccgggactggcaaaacctctaccatccaat

SEQ ID NO: 121882 - DNA, 1057 bp, Homo sapiens
ccccaaacctgaacaaaatctgtgttctttggagaagagaggaatggctgttgggtagacatccaggagcatctgccacagctctttttgctttggctgtagtcagatgtaccatgatttcctaacattatgttagaaatttaaagcagaggagagcatagctagagaagatttctctgatttttttttcttaccttttaggtgaggacttactgttcactttctctattggatatatcagtgtgttcactccatatataggtagggcttatttgaaaagtaccattttagggaaacatgataaatgttgtgaaaaacatagaagtttggaaaatgaaaaaagaaatttctttatgaaaagccaactcaactatctgggaagtagagaataattctttgtagagtgctaatttgagggccaaaataagcctctggatgaggaaatattccaaaagcatgtggatttttactcaggtaaaatcttacctcctacaggctgaattcttttgtcaactttataaaccagaaattgtgatcaatgagctagatttgcaagtgggtcgagtgcggcttctacggaaacaaagtgaggctgttcacctacagaggtaagtagggctctaaactaagctgccaactgtggggtttccagaaacttgacagaaggtctagctcagcctcttgtctttgtgcaaaacacatgtctgaactgtgatatctgtagtatgctatatgggaaggagcagtgttttcccaaagtatgttctgtgaaattagatatcaataggtgaaagaggtgatgaaagtcattaaagatttggcactaccaaagatgaattattgattttattcactgcagtgtatttagtgaagtatgcctcagttggaagtcaggcttatgtctaacattagtctgtaaattcctagaaggctggggttatataagattctgagatcgaggtaacattaaatacttattacatgtctgactttgtactaagtgctttacatattttctcatgtagtggttgtaataatcctgtgaattaatatatta

SEQ ID NO: 121883 - DNA, 1021 bp, Homo sapiens
tgacaaaatttcttttcatttttatttttatgttttatttatttacgttttttgagacagggtcttgttctgtcacctaggcatgatcactgctcactgcagccttaacctcccagtctcagatgatcctccctgctcagcctgctgagtacctgggactacaggcacacggcaccgtgcccatgtttgtattttttgtagagatgatgtttcaccatgttgcccaagttgatctcaaatcctgaattcaagcaattcctctgccttggtttctcagagtgttgggattacaggtgtgagctaccgtcccccagtgaacaaatttcatagagaaatacaatttttggctgaccagtttcagcagtagtttgtgtgctttcaaaaattaccatgctggctgttaaattttcttttttttccccctctgtcaggttcttcagagcagatatcctagcctattggcagtggttgatcacctgcttgacatttatatccaacttactggagagaaacatcactcttggagtgatagttctgttggatgtgaacaggcacctgaagaagtttcagaagccagaagagaaaacaaaagaccaacccttgagggaagagaattatctctaaggtactggactaaacagttttttcttttctttctttcttttttttttgtgagacagattcctgctctgttacccaggctggagtgcagtggtgcagttttggctcactccaacctccgcctcctaggttcaaagttcttaccagctagaagtaaatagtcaggttttgaaattataggttgcttcatggtgtcagatccctttttcagatttataattaatgactgggaaggctcgattagggtaatgtttttaactttaaaaaataacttttaaagaccaacttgggagtggctcctaacataattctttcactgaatgcccttttctgacacttggagtcttaaataagtcttcttggatttcgctatctatgacttctgtgccactctgtgttc

SEQ ID NO: 121884 - DNA, 1045 bp, Homo sapiens
tcttctggaaatttttaatggttttcaagtactgtagcttctggtaacaagcagtgaacttaatgttaatgctatgagccttggattatgctttctctttcctgaagttatttatgccttaaggaagaggaacctgtcattgaaataaaaacatttaccttgtagaattatttgcagtgatttgaaaatatttggttaaagcactatcactactacttaggagaagagccaaacatgggttaactgtcagcctttcatttgtcatctgccctgtaagcccaacagtgtagtatctggaaacagaagggattatgaatatttttcctatgtgagacagtgtacagcaagtaatatccagaggcacaattcaggattaaaatttggaattttgtgtgactgtgttttttattttgaaacgtagactcttgagctgtggaggaaattggtatcgaccgctaaacagtcatgctactttgctagacaaatattggaccaaaattcacctggataacctggataagagagaactgaatgaggtacgtgggtcttggaaagtatcaatgctggccaggtgcagtggctcccgcgtgaaataggaaatagtataataaaccaccagaaccctcatcaacctaaattttgcagtctgtgtgctagtattttactgtatttgcttcatctgttattttttctgggctaatatatttgaaagcaaactcccagcatacatctcttaaaatttaatggcattttcatatataaccacaataacattattatacacaataaaatgaacagtaattcctcagtatcattgaattcttagattatattcaaattttcccagttgtctacagaggatcattttactaagttgatttgaagtaatgtctttcacacttaatggacattttgatctaggcattaatgagaattgaggtaaatcactttataggttttctacattgattcagtttctagtattgtggttatcctagatcagtaagaagtatattacacttgactccgttcatgccccacttcc

SEQ ID NO: 121885 - DNA, 1094 bp, Homo sapiens
ctgcctgaagtgtatgtaccatttctgtttcaccaaacctggttaatttctgctcattcttctttaaggtttagcaaatgtcactacctctgggaagacttcactgccctgcttctaaatcattctatcctgattcagaaccccctgtatctttatatatgactttgtatactcctggggtacactgattatgctgtgtgggaatttgcatgcctgccctctcccatcagcctctaggctctaaagccttggtcctgtctgtattcttgtgtcttgcttggttgtgatccacaggaggcactcgtgaatgtcgagtgtgtaaattgtgctggagtgtaggtgattcagacgttcccacctgcatactgaccccagtttggactatgagagctgacgtttcctttaagggtgtgtctgtcattttgagagagggttgttttgttttgattatttctgtcttaatagctttactttatcagtgcggttgttgttatctgatttaggtttctgtgctgatccctctcttggagaatggagagctcttgattcctggccgaggtgactgtctgaaagtggcacctggatttcagttttttgcaaccaggaggtatgtactagtaacctttctgttttcactctggagccacttactcgtaagtctgcatgctgagccagaggtcctgtaatagagttctctgggtctacttcaagcaaggttagttggaagtgataacaggtctaaccttctcattcctgattatttttaatgaagataatttataaaataagaggtcccccccccgacttaaaaataagtaaccagtttaaaacacttcaccttatttcatgttttaaaaaataatcagaggtgaggttattgttagatagcccagggtttgagtcctgacactgctacttagtacctatgtataccttggctggttatgatggggttaataataccttcttcaaatggtggctgtaaagaataagtgaaatgacttgtactaaagacctgtcacaataaatgcccagttaatggctagccatgatggtgataatgataggtagatttcaggcaattgaaaaattaa

SEQ ID NO: 121886 - DNA, 1667 bp, Homo sapiens
caggcatatgccaccatgtccagctaatgtttttgtaatttcagtagagatggtgtttcaccacgttggccaggctggtctcgaactcctgacttcaggtgatccacctgccttggcttcacaaagtgctggtattacaggcttgagccaccacacctggccctttgctttatttttaaaaatttatttatttttctagagtcggggtctctgtgtcacccaggctggagtgcagtggtgtgatcatggcttactatccttgaactcctgggatgaaatgatactgccacctcagcacttccagtagctgagactatgggcatgggccacaatgcccatgagatctttagatgacatacctgttgttattatagttttggtactactaatttacttacagaggtttgtgtaaggttagtagaaggcttactgtggaaattaacttcggttccttgggggaagaactcttcttgacatggcttttgtcttgcctctttagggtggtaataggagttcttcacgtgaacaggagctggcccttaggtcttatgtgctggttgagtctgtctgcaaaagtcttcagaccctggctatggcggttgcttctcagaatgctgtgttgttggaaggaccaataggatgtggcaaaacttccttagttgaatatttagctgcagtgacaggtagaacaaagcctcctcagcttctcaaagtccagcttggagatcagactgacagtaaggtaataaggaaatgttaagttttggtggcttgtcatgcttgtaaatatttgcattaaaatattgcttttgctaagggaatataacaatagttattggtcttgcttataactgttggggccaacctatgtaaacctcaagtgcctacttacttacacctacctatagaagattaacagttaatcaaaggatgtagcattgccactacaggtatggtttttcagtaattactttatcttctttctgcagatgcttttggggatgtatcgctgcacagatgttcctggagagtttgtgtggcagcctggcaccctgacacaggcagccacaatgggccactggatccttctggaggatattgactatgcccccttagacgtggtatgtcatctcaggaaattcattgtcccttaatatattttcctgtcttggaaaagcattttgttaatagtgattctggtgatgatttaaacaaaaatgtatttgattagacgtactatgttgcaggtacttcatggttacttacctgatctgatttgcggtcctgaattacttgactggtttcttgtttgatagagattttctataaaattttggttgtgctgtttcctatagtagttgaatatgtgaccagtttcatagtagtattttcctcccttaattgaatatgagatcaacattttccaagaacaggtctggtttggaacatctcagccatgttacatgtacattgagaactttgagatcctgcttcttagtggtggcagctacagaggagtgggctgaggacaggtgaaggaggagatgatgtaataagagtgtgcttgcctttgtttagttaagaaaaatatgctggatttgtattttggtttgtaaaaagaccacttctgtgtgtaagaaattagccattgagacaatccatgttgc

SEQ ID NO: 121887 - DNA, 1192 bp, Homo sapiens
ccatttcaggttgaggtaagcaggaaccttcgtggaggtcttgctatagcatttcttttttttttttcttttctgggggtgacaggccagaggtgactgcaggtcttgcgatagcatttctgagtggtaaggtaattgacgagactctcctttctctcaggttattagaagaggcccagttgcaggacttggagaaggccttggttttggccaatccagaagtctccctttggcgtaagcagaaggagctgcagtacttacagggacatcttgtttcgtctgacctctcccctagggtgacagctgtttgtggtgtggtgctgcctgggcagctgccagcccctggagagctggtatgttggtatcagtagggggtgtgtccccttccccctactaaacactgagtgtgctctgtctttggctgggttctatgtaccaggtgtgagctaaatttagtttgttaaattgctgcttcatttttggaagttaaaaagaaattcatcttgggcttttcccctgatattcccactgttcttgtttttattttttgttaattttttaaattgtagagacggggtctcactatgttgtctgtgctgatctggaactcctggactcaagggatcatgccacctcagtctcccaaagtgttgggattacaggcgtgagccactgcacccagcctgtccctgtttaatatgaaattagaaactaatggttcctgtgtgatgcctttaacttgcgcggagctgttccgtatatcttcttgtttgcttgctgcaaaaactgtgtgaagttctgtagcacatgttacgatcctatgttgatgtaattcaaaggcagaattacttgctggagacccttggactgctctgtggcaaagacaggcctaggtctagagatgactcccagcagcctcttctttcagaactatctcattgtagagagtccagtatctagtgaacttcctctctcccatatgcaacaagcttctttccacgaatggcttgagaccatacttgaacaggcttgcagatcataagtctggcactagtgggagccagtctctttttccatagcagtcttcagtcagttgtcactttgtctgatggtcaggctgtagtgcaagtgcagtggcagaacctcggctcactgcaacctcccccctcccaggttcaagtgattcttctgc

SEQ ID NO: 121888 - DNA, 1027 bp, Homo sapiens
caagaagagtatctatttggttttgaatcccagttattaaactacagtatctggctcatagaactgaataaatgtttgttggaaatgagtgccttttccgttgtaaacacttacattaagtaccccccgattttgtaggtaattactttagatttttgtatcctcttagtcagaattatctcatgccattgtcctggttcctgaaattgaacaggatacaattttacgactaagtagattcagcattcattcccctatgttctcagacccttgggagttctgttttgtggtttggtcagagtagagaattgcgttctatgatattcccaccaatcaatgaaaatatagatactcctttttgaaaatagcttaagttgaaaatgcatttaatactctgataaacctattacaaagcagaaaaattaagtccaaccattgttaagttggggatgtctgtattctttgtgtttgaaggtttgccctgagatatttcaaggacacatccccagtctttcaaagacttttcctagagagttcagatgctaatccagtacgctatggacgtaggaggatgaagctccgggacctaatggaagcagccttcaagtttctgcagcaggagcagtctgtgttccgggagctctgggactggagtgtgtgtgtccctctcctcagaagccatgacaccttggttcgctggtgcgtagctgttagacttttttgcacttctagtgtggggatggtacagggcatgtgtggagttgtgtgtgtcaggagggaaaggaaaccatttaaaatttgttatttttgttcttgtggcttttggggttttacttcctttctttaatcatgtgtcattgcagaggaaaatgagatgatatgaatggagtttcacctttttcatgttccatcaagtaaatccattgtgcctgatttgtattttctgttcttaaatgtgttgtaataattgagatttccttttctagtgttcagttggctagtggattttatttattctttattatca

SEQ ID NO: 121889 - DNA, 1050 bp, Homo sapiens
gaaaaggccgggcgcggtggctcacgcctgtaatctcagcactttgggaggctgaggcgggcggatcacgaggtcaggagatcgagaccatcctggctaacatggtgaaaccccgtctctactaaaaatataaaaaattagccgggtatggtggcgggcgcctgtagtcccagctacttgggcggctcgggcaggagaatggcatgaacccgggaggtggagcttgcagtgagctgagattgcaccactgcacttgctcctgggcgacagagcgagactgtgtctcaaaaaaaaaaaaaaagtgaaagatgttttgttttgcctttctcaggtgtggacacctcaagatcgccagtgtgtcctgagtaccttagcacagttgcttttggataaggactgtactgtgctggttggtcgccagcttcgccctctccttttggatttgctggaaaggaatgccgaagccattaaagctggaggccaaatcaaccatgatctgcatgaacggctatgtgtgtcgatgagcaaactcattggtaaccatcctgatgtcctcccgtgagtagcaattttattattcgcatttctccttgaggtgatagaacctgctgtctcctgggatgtaagggagtctgagctgagaaggtaaaacggaaatacagaaaggagagagataaatagtattgttttataaaaagagtcacagcagaatccatttatccagctcagttcagtgagcatttactaggtttctcttaaatcttggccatcagaacagacctggaaagatggccaggatatgtccccagtgctctcaaggattgtatcatgtggcaagacatgcatatacagcggagtaaatgaggtttaactgaggctcttacagcatccacctctaatgggaaagattccttgcttgttagagcagctgaaggagtggattagaagagctatagtatcccttccaaattctataaatctatctgaattagtatactaagagctgtgttagagctggattttaatgtgacttttaaagagatagtaaaa

SEQ ID NO: 121890 - DNA, 1009 bp, Homo sapiens
gctgagccaccttaaaaatattttttcctggccgggtgcagtggctgagctcagacaatctacctgcctcggcctcccaaagtgctgggattataggtgtgagtaaccacacccggccaataaaaatgttttttcttggctgggcgcggtggctcacgcctgtaatcccagcactttagggggccaaggtgggcgaatcacgaggtcaggagtttgagaccagcctggccaacatagtgaaaccccgtctctactaaaaatacaaaaattagccgggtgtggtggcgcatgcctgtaatcccagctactcgggaggctgaggcaggagaattgcttgaacccggaaggcggaggttgcatgaaccgagatcagggcactgcactccagccagggcaatagagcgagactccatctcagaaaaaaaaaaaaagttttttcttgtatttgttaagtaatcagtattcttcagctttcctcatacttgcttgtatcccagctacctaaataaaacccatttaagcttcacagaatgttaagagaagtgagaaaatacaaaggtgtagccaggaggaatgcagtcctttcccttttccagtgggtcccagtctcccaagaagaaaggcaggatttcctaagaatgttatgggagtaatcacaggtttaagaagtaaatcctggctggttgcggtggctcacacctataatcccagcactttgggaggctgaggtgggcagatcacgaggtcaagatattgagaccatcctggccaatatggtgaaaccccatctctactaaaaatacaaaaattagctgggcgtggtggcacactcctgtagtcccagctacttgggaggctgtggcaggagaattggttgaactgaacccgagagggacgcggaggtcacagtgagccgacatcgtaccactgcactccagcctggcgacagagtgagaccctatcttaaaaaaaaaaaataaaaagaagtaaatcctttaacattcattgt

SEQ ID NO: 121891 - DNA, 1166 bp, Homo sapiens
tcaccatgttgcccaggctggtctcgaactgctaacctcaagtgatctgccctcctcggcctcccaaaatgctgggataaagacatgcgccaccgcgcccggccgagaatcagcttttctctcacatctgatctttccgtgtgttaaggcagaagcaaggcacggtgggctgagactcacacgccccctctttcctccccggcctaacgcactcttctttctgtcccaccacgtgctgtgttcgcgagtccccatcactcctgcatccaaaccgactagatttttgtttccatttccctcccggaaaaggcgggacagcgaagactggcgtttccgccgctgaggggctgaggccgggagggcgcagcgtagccgtcccgagctgatgacgtcaaacgccgtgtgctcacccacgtgtggtgcccctctcccggtgtaggcgctggagctgaggacgcctttcctgcgggcgtagttgctggctgctcgggcactgggacctcggcggcttggggacgctggccgcgaagtagggagcgcaggtggccgctcggggtgagggccctgggtcatggagcacttcttgctggaggtggcagccgcgccgctgcggttaatcgcagccaagaacgagaagagccgcagtgagttgggcaggttcttggccaagcaggtaagacgtgaagggagagggaaagcgccggaacgactgggtcgccccactagtaagcttcctgcgctcccccgccgatactcgccgctttaagtggggagtggtgcagcctcaggtcaagctggccccctcctgtgggctggcgcaggtcgtggaggtttccgagcgtgtttgaggcgattggaaggagtcttttgtttttatctgggggagccttccagtacccttcccatcgcctctcacccctatgcaagcgctttggctgcttgtggcagaggtggccttcccaaaggaatgtggtttgtttttctgaaattgaggttgcgtttctgccgttttgacaagtgtacgtatcacctaagtgtgcgtagtgcagccactcctgttagtttggggaaccatcgacaaatactgattgcattcctgctgtgcgtaaggaacggtgtggcgctgtgagaaagtggatagataaattcgttacgatctctgccat

SEQ ID NO: 121892 - DNA, 1049 bp, Homo sapiens
tccggagtagctgggattataggcacatgccaccacgcccagccaatttttgtatttttagtagagatggggtttcaccatgttggccaggcttgtctcaaactcctgaactcaggtgatccaccagcctcggcctcccaaagtgctgggattacaggcatgagccaccacgcccggccttttttttttttcttttctttttgagatggagtcttgccctgtcgcccaggctggagtgcaatggcgcgatctcggctcgctgcaacctccgcttcccaggttcaagcgattctcctgcctcagcctcccgagtgtgggattacaggtgcgcaccaccacgcccagctaatttttttgtatttttagtagagacggggtttcaccatgttggtcaggctggtcttgaactcctgacctcgtgatccacctgctttggcctcccaaagtgctgggattacagacatgagccaccacccccagctgctgttagacatctttatctggatgtcctacagataactcaacatgacttcactggttgtccattgcagttaaagcatgactgtcctccaaagctagaaacatgagaatcatctttaacaaattgggtatttctttaattcaacagatattcttttattacttgccattctgctaggcctgctgagagctggggatacagtgagagctggggaacagaacagggatggtcctaatctttatggagaaccattgggtggtccattgggtgagatggacatttctccaggaatcccacaaaaatggaatcatgaacttcaagaagaggtcatgtagggaaaggacacaatggggtaagagtatataacagagggcctgacttagtgggaagagagggtggacaggggagactcaaaatggcttaagcaaaatatcaaagaagagctaagtgaaagtagaatattgaggaaagaatattccctgcagaagccctgtgttgtttttttttttttcgatttataaatagtttatcctgttcacattatgcagaatttcagtgtcgttaatcc

SEQ ID NO: 121893 - DNA, 1059 bp, Homo sapiens
atcgtgtcaagaagtgttcgccaatgtgagcctaatttaattgaaccttgggattttggaaaccttgagatagtgaataatggagctagaatggtaggtgtcagtctatgtcaggataaggaagtttttttttttttttaatggagtctagctgtgtggcacaacctcggctcactgcaacctccccttcctgggttcaagcaattctcctgcctcagcctccagcagttgggactacagacatgcaccaccatgcccagctaatttttttgtatttttaatagaggtagggtttcaccatgttggccacgatggtctcgatctcttgacctcgtaatccacctgccttggcctcccaaagtgctgggattataggcatgagccactgcacccagtcaggataaggaatttgtactttatagaaattgggaagtaacggaaagtttttgagcaggattgcggtagaactaacccagtagttgtgcgtagcatgtatttggagtggggaaataattaggtagctatagtggggtcctgaaacaaatcgaaatggcaagaatgggaataaatgggagaaatatttcagaggtagcatcagtaaatcagtagtctgttagggaatgttagtgctactccaagaaattagagaaatgaggaggtgagcagatatggatggaaagatgatctcttgttttggacttggtgagtttgtacctacaggaatgtgtttattaatgttagcatttgtttgtttgtctgttttgagacaaggtctcattctgtcactcaggctggagtgcagtgacttgatctttgctcacagcaatctctgcttcctggttgtgcttaagcaatcctcccacctcagcctcctaagtatggttgggactataggagtgtgtcaccacgcctggctaatttttgtattttttgtagagatgggatttcgccatgttgcctgggctggtctcgaactcctggcctgaagtgatccacccacctcggcctccccacaaagtgctgggcccacaaagtgctgggattacaggtgtgaaccac

SEQ ID NO: 121894 - DNA, 1054 bp, Homo sapiens
cacaaatctgcttttaataatgttagagagaaaggccaggcatgggggcttacacctgtaattccagcactttgagaggctgaggtgggtggattgcttaaggccaggagttcaagaccagcctggccaacgtggcagacaggcaaaacccggtttccactaaaattacaaaaattagccaggcatggtagtgcactcctgtaatcgcagctatggtacactcctgtaatcccagctactcgggaggctgaggcacaagaatcacttgaacccaggaggcagaggttgcagtgagcagagatcaagccactgcactccagcctgggcgacagagtgagactttgtctccaaaaacaaagaatgatagagtgaactttttcaatgtgtccaaattcgaaaattgctttttgttttgaagctaggtttattctctgaattgtgaggtttattttaacagtggaaattttaaaatatttaataccgtaggtggtgactctcaaaaggaaataggatcatggcagcagatgatgacaatggtgatggaacaagtttatttgatgtcttttctggtaagagctacatttaattgtctttctaatttcctttttttttttttatgagacagggtctcccccagttgcccagggtggagtgcagtggcgccattaatagctcactatgacttcagacttgggagctcaagggatcctctcgcctcagcctcctgagtagctaggactacaggcacatgccaccacggccatctaatcattttattttttgtagagagaaggtttcactgtgtggtctaggctggtctctaattcctggactcaagcgaccctccctttttgcctcccaaagtgttgggattacaggtgtgagccactatgccttgcctaactttactttttaaattacaaaatcatttacctattctcattggaaacacagtcattatcagccttttccctctatacataaatgaattaataaaataaaatgcctgggacatgggaatgcttaataagtgtgaacttactgtatgctttca

SEQ ID NO: 121895 - DNA, 1048 bp, Homo sapiens
agactctctctttgtaaacacacacacacacacacacacacacacgtctagatgcacacccattttttttcctgacccatttgagagtaagttgtatacattatggccccttacccctaagtatttcagtatgtatttcataaggaaaagttggttctcttatataaccacagtgtaatttcagtttcattagatttaacactgataaaatacttttgtatttgatttgctatttttattccagcgaatgatgttctttattattgtagttggatttaggtcattttaatatttgacttcaatttttctcatcagttatttttttctgattttctttcaaatattatttgagtatatatttatttacttattttaaatttttaaattttttttctccctttagcactagtgctaactgctagtaatgtttgagtgtatttttgaaatgcatttcatttatgtatgagctttttcactatacctgtttgtattatttttagtatttgtttgaggaagtgtatacatctttaacattttgtagtctgtttactagtattgtacctttttacaatatcttgcatgtatggttgcatctatctgcttctttgcctttcatgttagaaccccacaataaaatgctatagtgtttactgggccgggcgtggtgtctcacacctgtaatcccagcactttgggagaccgaggcgggtggattgcctgagcacaggagttcgagaccaacctgtgcaacacggtgaaaccccgtctctaccaaaatacaaaaaattagccaggtgtggcggtgtgtgcctgtagtctcagctgcttgggaggctgaggcaggagaattgcttggacctgggaggcggaaggcagaggttgcagtgagccgagatcgcaccactgcactccatcctgggcgacagagcgagactctgtctcacaaaaaccaaaaaaaaaacccaaaaaaaacaaaaaaacaaaaacaaaacaaaacaaaaaaaatgctatagtgtttactgtaacagttctatggatcttaaattaa

SEQ ID NO: 121896 - DNA, 1050 bp, Homo sapiens
aggctgaggcagaagaatcgcttgaacccaggaggcggaggttgcagtgagccaagatagcgccactgcgctccagcctgggtgacagagggagactcctaaaaaaaaaaggtgtgacaaatattttcactttgtgaggccaaggcgggtggatttcttgaggtcaggagttcgagaccagcctggccaacatggtgaaacaccatctcaccatctctactaaaaatacaaaaattagtggggcgtggtggcgtgcacctgtaatcccagctactcgggaggctgacgcatgagaatggcttgaacctgggagggtgaggctacagtgagccaagatttgcaccactgccactgcactctagcatgggtgacagaacgagactcaaaaaaacaaaagaaaaaagtgtaacaagtatttttatggaaggttttttttgtttgtttgtttttagacagcgcttccaaatcctgtgtaccatcaagaaattgtttggacttatatgaagagatcctgactgaagaaggaactgcaaaggaggcaacatataatgatgtatgggttgccacaattattaaggacagttatttactgttttgtagcttctgaagagcagtcagctgcttagttttgaacagatattttgtttaggaacttagctcttagactaacaaatatttaagtcagtttttgtcttcagacctgttttttaaaggaatgttttctgaatacttgtctaaatttagttataattttgcttgacccaatttaagcatctgaatataaaacctcaacaggcaaacagtgttacaacattttttctttcatgatatgtacaaagttaaattatatgttgcataaaatgtcctcagacttctatttctttctactatatttgaattttaaggtttggatgttgaatgtgaaactaaacaaaatagattatttgtaggcttaactttaaaactggttatctttctggtagaagtagacctcatctgccttcttagtgaattgatttgcaaaatttaaaatatttagaaatgccagtt

SEQ ID NO: 121897 - DNA, 2687 bp, Homo sapiens
ttaatcatgaattactcatgtgaatgaagtttggaatattgctaaatataatttaacttttttttttatttcataatagattgtctgagtttccacattttcgaaataatcataaaactgcaaggacatttgatacagttaaaacaaaagatcttaaatctagatctccacatttggatgattgttcaaagactgatcacagagctaaaagtgatgtttctaaagatgtacatcatagcacttcactgccaaatctggaaaaggaaggaaaaccacattctgataaaaggagtacttcacatttacctacatctgttgagaaacactgcactaatggtgtttggtcacgttctcattatcaggttggcgagggtagctcaaatgaggatagtagaagaggaagaaaagatattagacatagccagtttaacagaggaactgaaagagtacgaaaagacttaagtactggctgtggtgatggtgaaccaaggatattggaggctagtcaaaggctacaaggacatcctgagaaatatggtaaaggtgaaccaaagactgaaagcaaaagttcgaagtttaaaagtaactcagattctgactataaaggtgaacgcattaactcttcttgggagaaagagacccctggagaaaggtcacacagtcgagtagactctcaaagtgacaaaaaactagaaagacaaagtgaaagatcacaaaatataaataggaaagaagttaaatcacaagacaaagaagaaagaaaagttgatcaaaaacctaaatcagtagtaaaggaccaagatcactggagaagatctgaacgagcatcacttcctcattccaagaatgaaataacattttctcataattcaagtaaataccatctagaagagagaagaggatgggaagattgtaaaagagacaagagtgtaaacagtcatagttttcaagatggaagatgtccatcttctctttcaaacagtagaactcacaaaaacattgactctaaggaagttgatgccatgcatcagtgggaaaatacacctttaaaagcagaaagacatagaactgaagataagaggaaaagagaacaagaaagcaaagaagaaaataggcatattagaaatgaaaaaagagtacctacagaacatttgcagaagactaataaggaaactaagaaaaccactactgatttaaagaaacagaatgaaccaaagactgataagggagaagtccttgataatggtgtttctgaaggagcagataataaagagcttgcaatgaaagctgagagtggtccaaatgaaacaaaaaacaaggacctaaaattgagttttatgaaaaaattgaacttaactctttctcctgctaaaaagcaacctgtttcccaggataatcagcataaaataactgatattcccaagtccagtggtgtatgtgattcagagtcttcaatgcaagttaaaacagtggcatatgttccctccataagtgaacatatcttgggggaagcagctgtcagtgaacataccatgggggaaaccaagtcaacgttattggaaccaaaggttgctcttctagcagtgactgaacccaggatcggtatctcagaaaccaacaaggaagacgaaaatagtttgttagttaggtctgttgacaatactatgcattgtgaagagcccatttgtggtacagagacttccttcccatctcctatggaaatacaacagacagaatccttgtttccatcaacaggaatgaaacaaaccattaataatggaagggcagcagctcctgtggtaatggatgtattacaaacagatgtgtctcaaaactttggcttggaattggataccaaaagaaatgataattcagattattgtggtatttctgaaggtatggagatgaaggtggcactttcaacaacagtgagtgaaaccactgaaagcattttgcagccttcaattgaggaagctgatattttgccaataatgctttcagaagataataacccaaaatttgagccttctgttatagttacaccactggttgagagtaagtcgtgtcatctggagccttgcttacctaaagagactctagattcttcacttcagcagactgagttaatggaccacagaatggcaactggtgaaacaaactcagtatatcatgatgatgataactcggttttgagcattgaccttaatcacctgagacctattccagaagccatcagtcctctgaatagtccagtgagacctgtagcaaaagttcttagaaatgaaagcccacctcaagttccagtgtataataacagtcataaaggtaatagtttgtattatcttctataactttgcattttatgagaatgtaaaatacataagatgaattggtgctttttcttttttgataacataaaaagtagcatattactcagcccctgttatctagaagtgcacatggagggtttttttgttttttggttttttttagatgaagtctcactctgtcccccaggctggagtgcagtgtgcacaatcttggctcactgcaacctctgcctcctgagttcaagcaattctcctgcctcagcctcccaagtagctgggactacaggcgcgtgccaccactcccagctaatttttgtattttttttagtagagtcagggtttcaccatattgggcag

SEQ ID NO: 121898 - DNA, 1862 bp, Homo sapiens
ccaaggttgcaccactgcactccagcctgggcgacagagcgagactccatctcaaaaaacaaaaaaaacaaacagtgaattgcctcagtatttaattttttgttatatgtaatatttaatatggacatgtcaaataactaaactttaatatacttttatcttctataaatgtgtttaatatatttttctcttctacagatgtgtttttaccaaattcagctcattctacctctaagagtcagtctgatctcaataaggaaaatcaaaagccaatttacaaatctgacaaatgtacagaagcagacacatgtaagaattcaccattagatgaattagaagaaggagaaattagaagtgatagtgaaacatctaaaccacaagaaagttttgaaaaaaattccaaacgtagagtgtcagctgatgtgcggaagtcaaagactatcccacgacgtgggaaaagtactgtgtgtttagataaagacagtaggaaaacacatgtaagaatccatcagaccaataacaaatggaataaaagacctgataaatctagcagatcttcaaaaacagagaagaaagataaagtgatgagcacttccagcttggaaaaaatagttccaattattgctgtaccctcttctgaacaagagatcatgcacatgttacgaatgataagaaaacatgtaagaaaaaattatatgaaattcaaggcaaaattttcattaatacaatttcacagaattattgagtcagcaattttgagttttacatctttaattaaacatctcaacttacacaaaatctctaagtcagtgactaccttacagaagaatctctgtgatattatagagtctaaacttaagcaagttaaaaagaatggcatagttgatcgtttatttgaacagcaactaccagatatgaaaaaaaaattgtggaagtttgtagatgaccaacttgattatttgtttgcaaagcttaagaaaatcttagtatgtgattccaaaagctttggaagagatagtgatgaaggcaaacttgaaaaaacaagtaaacagaatgcacagtattcaaatagtcagaaaaggagtgtggacaactccaacagagaattgctgaaagaaaaattatcaaaatcagaagaccctgttcattataagtctttagtgggatgtaaaaaatctgaggaaaattatcaagaccaaaataactccagtattaacactgtaaagcatgacattaaaaaaaattttaacatctgctttgataatataaagaactctcaatccgaagagcgctccttggaagtacactgtccaagcaccccaaagtcagaaaaaaacgaaggaagcagcatagaggatgcacagacatcccagcatgcaactttgaagccagaacgaagtttcgagattcttaccgaacagcaagcatcgagccttacttttaatttagtgagtgatgcacaaatgggtgaaatatttaaaagtttgttgcaaggttctgatcttttagacagcagtgttaactgtactgaaaaaagtgagtgggagttaaagactccagagaagcagctgctagagactcttaagtgcgagtctataccagcttgtacaacagaagagctagtttcaggggtggcttctccatgtcctaaaatgattagtgatgataattggtcattattatcatctgaaaaaggtccatctctgtcttcagggctttcattgccggttcatcctgatgtgttggatgaaagttgtatgtttgaagtgtctactaacctacctttaagtaaagataatgtgtgtagtgtagaaaagagcaagccctgcgtttcttccatacttcttgaagatctagcagtc

SEQ ID NO: 121899 - DNA, 1940 bp, Homo sapiens
gcctctgaagtcagatggtcatctcagttttttaaagcctgatatgtcgtccagttcaactcctgaagaagtcattagtgctcattttagtgaagatgccttacttgaggaagaggatgcatctgagcaagatattcatttagctctggagtctgataattcaagcagtaaatcaagttgttcttcttcctggacaagccgatctgttgctccaggctttcagtaccaccctaatctacctatgcatgccgtcataatggaaaagtccaatgatcatttcattgtgaaaatacgacgtgcaacaccatctacctcttctggccttaaacagagtatgatgcctgatgaattattgacatctttgcccagacatggaaaggaagctgatgaaggaccagagaaagaatatatttcatgtcagaacacagtttttaaatctgtggaggaattggaaaactccaacaaaaatgttgatggcagcaagtcaactcatgaagaacagagctctatgatacaaacacaggttcctgatatatatgaatttcttaaagatgcttcagataagatgggtcatagtgatgaagtggctgatgaatgtttcaaattgcatcaagtatgggaaacaaaagtgcctgaaagcattgaagaattgccttcaatggaagaaatctcacactctgttggggaacatcttccaaacacatacgtagatctaacgaaagatccagtcactgaaaccaaaaacttgggggaattcatagaagtaacagttttacatattgatcagttgggatgttctggaggcaatttaaatcagagtgctcaaatattagacaattctttgcaggctgatactgtaggtgcttttattgatttgacacaagatgcttcaagtgaggctaaaagtgaaggtaatcatcctgcattagctgtggaagacttgggatgtggggtgatacaggtagatgaagataattgtaaggaagaaaaggcacaagtggcaaacaggcctttaaaatgcattgttgaggaaacctatatcgacttgaccacagaatctcccagttcatgtgaagtaaaaaaagatgagttaaaatcagagccaggatcaaattgtgataactcggagttgcctgggactttgcataattctcacaaaaagagaagaaacatttctgatctaaatcatcctcataaaaaacaaagaaaggaaacagacttaactaataaggaaaagaccaagaaacctacccaagattcttgtgagaatactgaagctcaccaaaagaaagccagtaagaagaaggcccctcctgtgactaaagatccctcatcattaaaggcaaccccagggattaaggattcatcagcagcacttgccacttctacaagtctttctgcaaaaaatgttattaaaaagaagggagaaattatcattttatggacaaggtaagaatcttgtgagacattgaaatcaccaggaaattttgcactcagaaatctaatctgtctggctgggcgcagtggctcatgcctgtaatcccaatactttgggacgctgaggcaggtggatcacttgagcccaggagtttgggaccagcttgagcaacatggcgaaattctgtctctacaaaaaaatacaaaaattagggccgggcgcagtggctcacgcctgtaatcccagcactttgggaggctgaagcgggcggatcatgaggtcaggagattgagaccatcctggctaacatggtgaaacccaatctctaccaaaaatacaaaacttagccagacgtggtggcatgcacctgcagttccagctagttgggaggctgaggcaggagaatggcatgaacccggggggcagagcttgcagtgagccgagatggcgccactgcattctagcctgggcaacagagcgagactgtcttaaaaaaaaaaaa

SEQ ID NO: 121900 - DNA, 1028 bp, Homo sapiens
tctatcttgcacaggtttattttttaaattaagacataattcccatatcataaaatccaccctactaagatgaacaattcagtggttgttgatatatccacaatgttgtacaaccatcaccactatgtaattctaaaacattttcaccaccctaaaaggaaatgctgtacctattagcagttactcctcattgcccactcccctcagccccaggcaaccagtaatctaccttctatctctgtagatgtacttgtttggggcatttgtataaatagaatcttgcaagatgtggccttctgtgtctagctcctttcactttagcataatgctttgaaggtttacccttgccattgatgtactcaccaggtatattgtcatgtattagtactttgttgcttttaattcctgagtaatattccataatgttgatccattttgttgactaataccacattttgttgttcattggttgagggccatgtgggttgtttccactttggggctattataaataatgctgctgtgagcatttgagtacaagttgtttttaagacatgttttcagttatttccataatattcctaggagtggaactgctaaatcatataactttgtatttaaccttttgaggagctactagactgtttccaaagtggctataccatttcaaattcccaccagcagtgtatcaaggatccagtttctctgcatcctcgccaacacttgttattgcccatcttttttgttagtgccctctagtgggtgtgagtagttatggtttatctcattatggtttataggtttgtttttagatgttggaaattatagaaaattacagtcattttccaaagtagtaagcctcttagtaagacagctttgtaactggaccatttctacttaattgtagattttagtaaagaagcaccacagagagtttctttgcacagtcaaaagtatggatttttggacttgctttattaacatgttttacactgagagagataaaagtgtatgagagtaagagagtg

SEQ ID NO: 121901 - DNA, 1049 bp, Homo sapiens
gtctcctatcctgaacttgtctggatttctcagttgacaactactcatataatcttgcaatggcttttccattgttgacttgcttacattgttacttagttaacttttcatcatttgtacctcttctacaaagctaaatcttagatctcttgagcacaggcctgagtcctacacatatccttccctcacaccactagcacagaagaagaaacagactggacttggtttggaatcctagctctccactgactagcactgaccatggataaactccttcacctccctgcttcatagtttccttatctacagaataagggcagtcatgcctgccttgcagggtgttacaagagcacagtgctgggcactaggagatacttggtaaatggtcattctggctcaccaaacaaagcctcacacacagaagctgagcaaaatcttgcagacttaaatatgacaaagcaggactgaaaccagaatgggagaagagctagttatgagctcttgaactttcatggtgaggacaccatttcctctgcccttgggcttaagtgacagtttacaaaccagattttttatctatgactctttcatgaccatatgacgatcatttcaagctcaggaagtttcctaagcctcagtgatctaaggagtgccattgatttgtgatgtggagactttgctcattcacctccttggtccaattcatacatttaagcatcagctcgtccctgagcggagatgctttctccagctccttgcagccatgtggcagagggtgactcccagtactgcttcctgatctacagatccccatggatgtccctggcttctttagaaattttctttacaagaggccacagtggaagatagtggtaagacttacttagacctacagcatcaaaaaaaaaaaaaatggtgataaggatgggagtatgagaaaaactgtgtgaacactctggggactgttgtggggtggggggaggggggagggatagcattaggagatatacctaatgctaaatgactagttaatgggtgcagcacaccag

SEQ ID NO: 121902 - DNA, 1017 bp, Homo sapiens
atgttcttctgcactggccaatatggtagccagtagccacgtgtgtgactaaggaactgacttttttattttatttatttattttttggacggagtttcactcttgtcacccaggctggagtgcaatggcgtgatctcggctcaccgcaacctctgcctcctgggttcaagtgattctcctgcctcagcctcccgagtagctgggactacagatgcctgccaccacacccggctaatttttgtatttttagtagagacagcgtttcaccacattggccaggctggtctcgaactcctgacctcaggtgatctgcctgcctctgcctcccagagtgctgtaattacaggcatgagccaccacgcctggctattttacttaattttaattagacaacatgtgacaaccctattggacagtgcaggactggagtacaagttccaagtgtcatgcctgccttttcacagagctgagcacatagtaggtactcaataaatatgatggaatgaataaatacaaagaagcactataaaacagaagcaaggatgatgtcctattcaaatccatatactcctttcaggagaattttggcacctgcttaaagaaggaggcagaggatggggatttcctataaacatttaggatattcccagattttaaactgaagctctcagcacctgcaggtggggtcaaatcaaggcaaagggaaccaatgaaactgggtgatgggcaaggccagggtctgtcctgtggtccctgccttcttggtctctgtttctgggtcttccaatgcctatgcttttttgaaacatgttaagggtaatcatcaaaatgaaaaacattctgcaggaatggggaaaagaaaacatttgttagaatggctgaagagatatgggggagattgtgcgtaatttggaatgaggggctcagaacccaagacccggccctgcttgccatggctctgtaaccttgattaagttacttatactctccaaaacaccgttgcctagaaaatgaga

SEQ ID NO: 121903 - DNA, 1006 bp, Homo sapiens
cggttctgtcctaaaacctgtctaaggagctattaaggaggaaaggctttgagctattttctcctgccattttagggtgtatagaatggcagggtgtgtacaatatttataacttttttgatggctcagttattatgtcaagcccaagaaaatacaagatggggcaggctgctgtccattcaaacaaaactgtgggtctgtgtgactgactacccttgctcacctgataggcctaagtagaaaaagcttatttttcagtgagggaaactcatgcctggaaaaatgctgtataaatgtgatgaaattcagactgctgtggtcaacatttatttaatttcaagcttctgcaacagtacagatggatttgtgttgaataggaatgatggtctttgaaaacttacataagaaattattgacttgatttttttaaaatactgccttctatttcatcctatcaatgctccctgtgtttcctgcaaattgttcatgatctcagcaaactggttggactaggccagcattccaaactgaagtagatcgaagtaggtgtcattcatagacttataggagacttggagaagttcaagagagctctctttgttttgctagtggtatccagagtaaatgaaaatactatcaaccttgtctttcttcctggtcaactttatgctgagggaatactaagaaccataacacgtgttgggctgttgtgctataaggggagaagcatcaaggattggaggttaaaaaataaggcatgttagagtccaggccccatccaatttggaattttttttttataataatggcataggtacctcttcagcctctgcttgaacacatgcaacaatggggagctcaccaccactgaagagagctccttcctccattttatacaaccgtgactactagcaagttcttccttatttgtggcagaaatctatcttccttaaaatttcactcatgatcccgtttacaccctctggcatgaaagagaacaaatcta

SEQ ID NO: 121904 - DNA, 1047 bp, Homo sapiens
ttttaaggggtatgcctcccaagtgatatcgcgagcatcaactcttacttagcataggtgagtgcaagatcctgcaaggggatgctaaatttctaaaggacaaagcacttgttctcaaagctgtttgtaatctagtgccacgtattgttttaaatgccatgaacaaattcaggtacaggtgatcactcggggtcaaagccattaaggtgaatgtttgatggacactattattataccaaaacaacacatgcggaaacaaagtaacatcacacacactcttttcttgtcacaagcgataagtcagaactgtgcattaaaggatcagactgtcttcacagtaacccgggcaggggtcaatctgagcctggagtgtcagccaggtgttaggtatcttctgatccaaatattcatgaaatacaatacccttcgctgacagccatgatgtctctttgtcacacatccccactggcgtagtcggtatgatttgaccttataaagctttgagatataacttccagtgagaggaaaataaaggattagaggaacaagcttaccaacaccatgaggaagcaaagggacaaatctggggtcgggggatggtggtggggtgggagggtgagggtaattctacaggacaacttcttgcaggcctgatttcttcaataagtcagtgacataaaaatggactgcgctaagttaaacaagatttaagagctttaaaaaccagatgtagttcatggtcctggagtggttactggtttacacaaaccagttataaaggactctggagtgggggaaattggagaaactcaaatatgacccaagtagttgatgaaaggtgatgatcagaaaaagtggttggaggaacgatatgcccagtatgatctcactgtggttaaaaatacaaatgtgagtgcaagtggtgtgtacatacgaagagccatgagaacgtgtgcaaagtaaaaatatcaacagggtgacctgtgaatggtagaaatgtaatggagttctttttctttgtgtgcattttctaatttcttacagtgt

SEQ ID NO: 121905 - DNA, 1011 bp, Homo sapiens
aggaggtgtaccatattcatctttgtatacctagtaccaggcttacaagggagaatgcagttagggatccacaaatattaactgattctccctctgtgccttcccttagataatttctgttttgtccttcagaattcagtttaggcattgccattgctgggaagagtctcatctgtccttgatggcatttgtctcgttagccactatattatgagctccagaggcttgtgtttgtgacccagcacttagcaaagtggctggcatgtggtagacacatactaaatgtttcttagatgcttaaatgactgaatctttccatgtttccaagtttccacacaattttgctcttttttgagtgtgttttcgttcatccatgtcaacgtatccagagctctcattggcagccagcagtcattctaaaacagagctttcactctttcagacgtggatgggacactggggaagacatgagatactgaggcttcattttggggtctttatttcctgttttgagtattacacagagatacagaggaatatctttgatcatagtggagcaggggagcagatatgaacagagtcctcatggtttttaggggagagaagcctgtaagactatgggaatgaatggaaattttaaaagtccatggaagctggcacctttaaaaatgtgccaacttttagtgcctcatgattaaaaagcaaaataagtggcagacaaaaccctgtgtacttggaaagaaatattaattttagaaagtatgcaaaaggaatttttcacagtgggatacctcttgcatcaccatccttttagtgtttttacatgggatgagagtcctgtgggcctgagaagtttttggtattggtaatatgatatttgaagtaaccaaaagaatttggtgaacccactgacttggttttgacttttgagaaatacagcttaactaccccaaattcaatgcaacttatctcggacttacggcaaagattattttatcttagttgtggaag

SEQ ID NO: 121906 - DNA, 1315 bp, Homo sapiens
tgttacaaatctaaagagctagtgagtgttagagccaaaaatttaacttacatccttcagcttcttcccaggcaagcagtaactcaatggatacacattaagacatactcataattattgctcagagtgccaaggtttcaagagttggctgccaaatgatgaggcagtagtcattcagaaagtgtgcttgttagagggaatttttaaaataattaaaattgaaactctgaagttataacaaatgagcagcagattttcaaaattaacttttttgcacattttagaaatgtttacctcaaccctcaattcccaagaaaccattatatttcttcagccttttgcccagaagttcttaggatctttcctaggaactgccacaatggcaaattaacataaagttttgtattgcattgacaccaaagacctttcctttgccctggttcctggttgaaacaagcgtgaaataccatgtctgatgacatgccatggcagcatgaaggcttaggcccaagggataccaaggcaggaggattgcttgaggccaggagttcaagaccagcctgggcaatatagtgagaccctgtctctacgaaaaacacaaaaattagctgcacatggttatgcacacctgtagttctagcaactcaggtggctgaggcaagaggattccttgagcccaggaattcaaggctgcagtgagctatgatcacaccactgcacaccagtctgtgcaacagagtgagaacctgtctctaaatatataaataaaaaaaaaatagaaagacctagacctgaaactaatctcggttattataccctcacttcatagaatatgccacagaaaagctacgactgaatttctaggtgtcacaagtcagcaatagaatggaatatgaatcaggcctcttatcatctagacaggtgctctgtttgcttcaggttttatttgaaatctttaaggagagatttaccaagagactttcaggggagcccctagattagccctttagacaccagatgatttgagacctttgagaatcaattgtctaggattgtgtttgccagccctgagatccataacttggaaaataaagtggagtgccaacccaagttctggttttggggtttgctggagagaactcaggccccagcataccccagggtttgatggtgtgactctacaggaggcactgacaaggcctttctttaccacaattatccactaacttaactcaccctcagaatataaatactcctaggaacgtcaggatgggttattataagacagccacggctttcaaaaactgcggacact

SEQ ID NO: 121907 - DNA, 1043 bp, Homo sapiens
aaaatggaaatgatattgttcacttcacagaattgcctgaggtttaaggaagatgaaggagtcctttgtggatggcagtgtgctgtccgtaggtgggtgcttgtccagaacccctgctccttgaccaacaacctctaaactcagttttgtcaccagtacaatggacataatttccttccttgcaggtggctttgaactggatgattaaataaaatgttatatataaaagcccccagcagagtaactgccacaatgatcgtgttgtcagcctcattccaccctctggagctgaggaagacaggagaggagtgtcctttctcacccacctctgccagtcaagttctccgaaggttctcttttacctgcccccagacctgacctcatgctcacattcctctcctgcttccctgtcaccttagcatggagtcttcttctctgctttttcttcttccttcctcctctgcttccatcttttcctaaaactcttttcttctttatctcctactaatttccctaatcgccttcttgtctgcattctgtaaaggattgttctaatgaatacaaagtttagaataatattctccataacttccttgttcaaaacaagatgttatgtgtagcattttggggagggagtggtgagtccttttccattttcctctgaatttgcttaaagtctttttttctacgttaacattttcccattcttgcatcccttgggcttgtagtcattaacttgccagacacacagcaactgattgtctttatgacgttgctaaagttaggagagtgtcattcacagggaacttaacccatatattaactcagacatagcaaattgctaaatacgtgcctttaaataaagagcttcagaatgccaatttgattctcttgttcacatcctctctcattgaaagggggttgctgaaacagaaaaagcaacgggaaggggaggataaatttcaactgttttactgagtcagaaattggaacactgccatccggatacaggcatctcatccatccttccatccatccactca

SEQ ID NO: 121908 - DNA, 1537 bp, Homo sapiens
taattattctattaagtacttctgtttttgcattaccataatgtctgctgtagcggaaacttttctgtagaccttgacttgtcagaagtcaaccccttaatgtgagcacttcacttacattatcattatggtgtttccaactgacaactgctgccacactgccatcgtccctgagttcccagcgcttcagtaaaagagacttttgttctggcttgttgaggggaaaaatgcaaacaacaacactagctctaccaccagagatcctataaagacatgttcaaatgaacaataaagtcatttgttcacatatgacataaggctataagaatttaaacaataagacctcttgtgaaatgtggcaaaatatgcaccacaaacattgtgaagttctctgtcttgtggaaggcagtttttacatgggcttcaaaaaaccattaacttataaactacccttttaaaaaagaaaagaaaatcacttgtctcactataacattaaagcaatttctgttctaaggaaagcttaaatgcattcatttatacaaagtgcatgcactataatttataaaaagcacagtattctatcaggaaatgcggcacctcttccctccttcacctgaaatgggaaattcctccgtttttgtcaagtcccttttttctttgagtaatattgatttcttcaaaatgaaagaaaaaaatcctttaaatcacttagattcaagacgaagttttaaggcttgataataattctctaaatacttctgacatgggtggagcatggagagggaataatcctgctctgaagggaaattttaattgaatttgctttaatgtgaaccctatccttttttgctttgaacctttaaggaaaacttgttatattttcagacctcagcaaggcagaaaaatgcagagatttccttgtccgctcatgtcagggtgtctggcagcaccttaaaattgttccgattttgatgtttgaaatgtgacctcccaggaaaagtgggaggagaggagagcatgtgttaactggccaaaggtgtttcattgagctgacttagtattaacctctaaaggttttcaagtatttgcagatggatatgtacagcatccttgcagaattctcttaattgaagaaatgtttcatctcgatctctgttgacagaaaagattgcctactgataattgctttccttaagtgtctgataatatgccaggaatgagagcattctgtgttaggtcatctttaattatgcatgtaccacctgtcagctctaaatcagtaccagattagattctcgcagagtcagtttggggaggttcagagggaaagctgaggtgatctcttttagaaacaacaaaaatagacagtagtaaacatgccttctaacctgaagctttttaaaggagcctcatcttcattgttctcgagcaagaatacgccattggtacatctgaaaaacgtttgaaacctcgcccaagcggggataacttactgcgaagatggatgactgtgagcgaggatggtagtacctcctcc

SEQ ID NO: 121909 - DNA, 1052 bp, Homo sapiens
gacataccaacttagagtctttgaaaatgcccattggtaagtcaacattgttttccctgaaagtcctgagacagaaaaaaaaaaaaaatgaaagtacaaacactaactggaaaaaatgtcacacattttagccactttgcatcccttgttaggacaaaccctggtctgggtttttttacattttgaagttgtgtggtaggtggggcagtgtgggtggcccagaaaaagtagcggttagaataagattttccatttattgccctttgtgcatggctaaaaataagagtcatacaaatcagaatatgtagtgcaagcaaaatcactctgttaattctgatgactggtttgcccacatctttgcatctgtctggtaagtggtatattgggaaataatttgtctctgtttaaatagcaaaaggcaaccaagtttttgcgttgtgtgtctacacatgatagtttatcagcacttttctcttccgaaggaagaaagatccaactcatacataaacaaattgtgttgatggaaggaagaaagaagcgtgaaacccttgaatcttttttaaaaaggaattgccttatttgaaatgcagttttacaacatccatcttcttggcttattgttagaaagttatttcttgtaaactcatagcacagcaaggaaaggatatcttaatggtgttgccctagagattggaaaactttttgtgtgtttggttggaggagggagaagggacaaggatgagcacacgcctgccctgtagtatcttctgtagacacagatgttggagggacagttaaccaagtaaaaactcccctgcatctggctgctgagtcgaatgcaaccacagtaagtgataacgtgtccgtttgtggctagaagaaacaccaaagagaggcggcgccagcattcacagggaaatttgtgccttcgcaatcccattgatggtgctgtcccattccactgactgagtggttgtggcatttccaaagaatgagaatgtctgcaagtgttctgagcctttcagtctgatgagctttgtaaaatggatgag

SEQ ID NO: 121910 - DNA, 1042 bp, Homo sapiens
atgtaaatcatttctgagcaagaaagtcacatcttcccagcctcccaaagccattttaagtgcagggttattgttttttaaaggaagaggaagatgaattatttgtgtctcagaaagctgttatcctggcgtctccttttctgccaaggcggtataataaacagctctaccccacttcccaccctggtgcctgaggcttgccctagagggaaatgcctttgaaggaaaaaccaccagcaaggccagttgtaacagaggccgggggagaggctcgcagccttgcttcacctcaaaaagggggtccacgtcttctcatgcctgcagccatcaaccccggagcggagcgggaaatccttacctggagggtggcatttacaatctcagacgcatttcacagtctctctttggagcaacttcagtgtgtatgggctggaaaagagggtaagtgtgttacttttttttatgcaacaacgtataactgtgtcaacacataagacagtctgtcaaagctttctgctggtgttgctgctgtgaattaattttgagcgtcacttgtgagcagtaaacacttttgcagtgtgaacaactcttttgtacagtaggagttgtcaacagcttgccatcccccctttaaagggaggaaggaaacagaggctgcctcctccctgtcaagttaagttggctggagtaggaggagcagaaatttgtggcactcccattttgcagttttatcttttcttttgaccactcggctgttagattttcagtgagactggaggataaatgtagtgtgtagaattaagaatctgattaagccactgggcatctggccacttcttgctgttttagaattggttctagaatgtatggtctacatcacttttgcccttaaatttgttagagataccaccataaagagcaagatgcaaaaacacaacacatctgccaaacactgactagagagagatgcttctcagtgttttacattttattgctgttatgttgaatatttaattgaactttatttacacagttaaaacat

SEQ ID NO: 121911 - DNA, 1021 bp, Homo sapiens
ttttatccacatatattttgcagatactgaaagcaagcttatgttgaatttagagaagctttaagtttttaggaggaaactgcagcttatcagcagatgtcaagagcatacatactttgaaagctcgttgaaaaaaattatgattccttttgtgcttgacacttaccaaaaaccaatgttccattcagataatcttttattgtcagttttttatgctccttagggtaaaagtcacaaatatatacacaatttgataaaattcaaaaggaacaaaataagcactattcctcctttggcctgtatccgcctctttcccatccccagttttgtacagtacaatgtcactagcttattgaattagatttactttaatcatccatttccttttctcctggttaccacaatagctatgggctctcagttagccagctacatctgatctagagaaaataggttatgtccctattttgaaaagagaattatctgcatggctcaatgctttgtgtatttaatagttagaattctggaagagatgtggacttccttcctgagcaataaaatatatgtatagtgaccatttcttaattctctagagaatgcagacaaagggatttgtgtagtctatgaggtctgcgtatataaaagttttcctttgcctttagttgccttattttacttttaggatgttttgtttcttttcttatacttccatatattttcactcttttccctttctttctgaaacacatattcagttgtcttaaaatcaaatcagctgtgcagtggatactgtatttggctttttccacatgtgttaattgttctgttggcttgttttgtttactgtttttgcagacctgatttgccatggtccgtgcctttcattctactagaccacgtagttgatttcccagtagggaaacgattctgctgtcttacccagtaattagttatctcatttcaaaagagacaagtttatctgagaggactttgtcacacgttaaatgtctgctttagaaga

SEQ ID NO: 121912 - DNA, 1130 bp, Homo sapiens
gtaagaaagtaaatgaatagaaatattgatcacaatagaacttcaactatacgatgccaaaacttgtaaaaaatcctcaggttttaaaaatagcatgaaactggaaaatgtttttttctgcccaccaattcccacaaaggcaaaaacaaacaaaatatccagcaacaactgactatcaaagggggctaaatatctgttagacttaactcactaggctggttctgaaagtcccaattggtgaaggtataaaagcccattcatttctttagtgcaaaaactgacaaacagggcaaaagtaaccagaagggaacaaagagagcagtggagacctttaaagacggcagcagtgtacaccagggtgcaaagcagcaggcactgttttaaaaggagcaccgttaatccagagactaaagctctgcagaccaagagcaaagcaccatttatagctcagttcccacaagggcatgaccatgctctattacaagcacatcagctgagggacagagagtctattattaaacaattgtagtggctacccgcaggaagtggggtgaatgtctgggttagtgtcctgacaccagtgacttcattgatccaacctgtgcaagtatcagggagggggtcagaataggaggagttattgcagaacgttattcatgagggagtttttcatcattaaggcatcatccaagactccatttttactgttgtttatgcttagacttttcttcacagtaaaaaattggggagactctccatcttcttgtaaagataaagaactctgaaaaatacataaatcactttagtggtttttctaattgtaaaaaataacagatgtttattgggaaaaagttcagaaaatcttttttttttttttaatcaccagtaacctgagagaaagcaactgttaacatcttgttatatacctgcagctccaaactgtgtgccaagatgctctggggcaccacagcaaattctgggtgcagctctagggttggcacagatactttccatcattaagggaaacatcgtacaacactctgccaactattagctggagatagttcacagtttcagcattagatcacactacattccttttgatgacatcatatctttacaaaaccgag

SEQ ID NO: 121913 - DNA, 1007 bp, Homo sapiens
tcatgttggccaggctggtctcaaacttctgacctcaagtgatcctcctgtctcggcctcccaaagtgctgggattacaggcgtgagccactgcacccagcctgggctttgtattttttgaggaaattttcttcttttttctcctctcccatcaccaagacttattctgtcttctatttctgggaagattttttttttttttaatttacccactgaggatttcatctttcaagggtattggctttgaccttcctgtgtggacattaggctgtccctttgtctcttaatatccccatcagggattgacttatgcaggacttacctacttacttctctaggttctaatttccttgtcattttcaacttttaacaattgctgttactttcttgctgcttagccatatctttaaaaatatttttagtactcagcatttttaggcattccacatgaatttgccatgcttgacaatcagaagtcctctttatttgaaagttgaaacatttcctggaagaggagcaatagtaaattagttagatccttgccattcatggatttcactacagtcaaaaaggtaactttacatcacaatagaatcatattttacctacaaaaagtagtatttggtttgtataaatattaatgttcaagattttgtctttttttctttggtcttctaaaatggagttacaaaaaggtctttaagaatcagtcactcatttactgacttttcaacaaatacttgttgagcccctacattttaggtgctggagacaagatgtatcagtgattaaagcagacaaaaattcttgctcctactgagcttacattctggttggaggagatggacagttaacaagataaataggtaaagtgtatagtatgttgaaaaggtgataagtgctgagggaaccctggggcaggtaaaggagaattgggagctgttctcattattctttttaaaataattttatcccaatagtaagcaatattatttattttttaaaga

SEQ ID NO: 121914 - DNA, 1047 bp, Homo sapiens
agatacattattaggaacatattatatcttcccagggaattaaatatttctattaatatgtgatggccctttttatctctttgcctaaaattaactgtgtatgggtttaatttagctacaccagatttctgggttattatttgcctacgcagttcttcccccagcctcctttattcaaagacacaaaaggctttagatttgtgctttgtaaatcacataattggaatttgtctttttactagctttattaaggtataattttcatatgatcaaactcacatattttaagtgtacagtttgatgaattttggcaggtgtgtatagtcatgtaaccactaccacaataaagctatagatatttccgtcacaccagaaagttcctcatgcttttttgctatcagtttccttccctcacgtctggcattaggaaactactgatctattttttatcactatgttattttgtcttttccagaaagtcatacaaatgaaatcatacagtaagtagacttttgtgtttggcttctttcacttagtataatgcctttgagattcatttatgctgttacacatatcagagtttcattcctttatattttttcagtataatttcactgtatggatataccacaggtttttcgtttgtttgttttttagctattcacaagttgatggatatttgggtcatttccagttttttcaactattgtggataaagttgctatgaacattcacatgcaagtctgtgtggacatatgttgtctattttttaattcaatcagtcattgtcttttaagtaaaatattcagttgatgtatgttgtttagcagattacactaattattgattgcactaatgcatttatattcattttgaccatattattttttgctatttgtcctgcttttcctgagccttattttttctttattgccttcatttggattttgcttttgtttttttttttaaatatagttccatggtttttcttctactaatttaacagttgtacacaccattctcttttttccacgcttaccctagaga

SEQ ID NO: 121915 - DNA, 1058 bp, Homo sapiens
agtcctaatcagaattctaccacttactaactggaaggtcctggggatgttaacctcctaaatctcagtttcctcgtttgtaaaagaggtaattataaatagttcattgagttgttgtgggaactcacgtcataacatttgaaaagcttagtatgggatctgctgtacggtaggtgctcaatagatgatagtttttttatgggtcaggtgctgtgctacccactggaaatacaaagaaaaaataagataccatccctgccctcaagtagtctgcagtgtagttgggaagacagacatacatgtgaataaaatagtgtgcattgaatgtaatgagagcagcaaggtggtccataaagcgagcagactgcagttgtttgaggaggcttcagaatgaagtgttgcacagatttttgaagatgaataatagtgttaaggcaggcaaagattcttcctttcagaaggagaaaagagtacataatgtgctaatacctggacccatgaaataatattttaatattaacatattaaattaacatattaacatggagttggaatcagtttacagtgctgtggtctaaagtctccagccagagaagccagaaggacggcagaaaggaggacaatctaagtggcttggaggctactctgggtggatatgggtcaatcctgaaaggtttttaagctgggaagtaatatggtgatatttgtgttctataaagattactctgtggctacgtgaagcatgaactggaggaggcaggagcaggagggctggtaagacataatgagggcattgcatctggtttgggcaattggactctgtcaccaaaactgatttggaagtgatgatgttgagcagttctgacgcttgtagaaaaagtggaaggaggtaagggtaggtggggatacacacacattttttggatgggcccctcttttctgcccctacatccctctcctccggtgtgtcgtttccctgatctacttcaacctgcagatctatctagcaggcacctcacttggggatttgttcccataccagcaagaagcttataaat

SEQ ID NO: 121916 - DNA, 1820 bp, Homo sapiens
tggctttgatctcacagactagatccacaccttagggatctccagaggaacaggaaaacagactaataggataaatgagaaaaatccaaggtgatttataaactgccctgtaatcaaggaacctcagagaaaggtggttgtgcttgttttttccttggacttctttaaatggctactcataactgccttcccctctgctcgctctccttgctctctgtctgcttcttggtgtaatgtcagaaacgctaatcatgtcagactgtgacactgacagccctgacattcacaacaaagagacaaggaggagagagaggaaaagagatgggggaggggggaggtgaggaaaagcagcaggagaagcatttttttattgcacataaaatccatagctgcagaatcacccacatctggacatgtcatatccaaggaaaatcaaggaaggcacaaggtgaattccaatagagattgaaactgagctggggattttcccctcttcttttagatttcattgtgtagtttatattagaattactgtgactatgatttcttctcatcaagaaaaagggcatttacatttatttttcctttttctttactacagtttttctcttcgaaacaaagcaaagttaaacacagatcttagcaggaagtgtgtgctgtcagaggttttccaatttattaccagattcccatagtttaatctgaacaatagccagttcaggaaagaagtcatgggtgagggatgttttctgaccatggcaaggctgaatgtcatgacaaagctgttcagtgtcatcctcaggcccttggcttctgcggcacctgcttaaagctgctggatgcagaaaatgctgatgttacctgttccctaacagtttggagtgggcttccaaatacctttgagacttctgtttctctcaggcactttctccatttggaataatgctggtgagtggtctgcaatctctgtcttggatcagtcatgacctgaaaatcggctgccacatctcacatgtgttttgaatccagatgctatgatctaaattgagctctgagctcaggctgaatcatcctagcttttctataaacatgagaagccagctgccagctcggcttttgaggtattttgaactataactctaagtcttaccgaagatagttatcatttcattttttcttcatgtcagaaaaaaaaaatcaaaaatggaaaatggtatccagtatttattctgtatcagttaccctgtcataaaagagggtacattttttgtccatattcaaacagaaggtattctgtacctagtgacttcttttcagattgattataaaaatattgagaactttggaaaaggctgataactcatttcacagtgttctcatctttagtacccaagtaaaattttacatacttgggctacttgatagaaatgctccacttaatttcaaaaaaaaaaaattaagtggattatgtggcgtagttgaagttccagcaactttgacattgtgacttgtttaatattcttgaggaaattctacttctattggcagaagagagtaaatttataccctatggaggatttgagagaatttaccccaaaatatcttcctgtaaattcaaattttctttgaagtgtttttaatcctaaaattttacatggattgttccctgtgatatgtgataggtccatgtttgttttcatgtaaaataatttaaaattacttgccacttaaattaattaggtcctatagtaggtaatgacagctggtataacagataagccctcaaaattgaatggtttgacacaactagtttcctttct

SEQ ID NO: 121917 - DNA, 1371 bp, Homo sapiens
ctggtactttcacacacattgtgattgttggttttggaatcttgttcatcctcattttttgaggatttaaagaggagtgcctagtattttcttaattaaaacaggctttgcttctctgcgtcccctgccccaaaccaatggactgccctgggccgtccttcatcaggagttttaattgcatgttgattgaactggtaggttcttgtcctacatcatcatgttggactaagcccacaacagccatgcagcctcagtaaagaggccctttggatactcaaagtgtgctgctgcctttttctttgtgactggtgatggctgggttcctacaacaacggccaggggattctgacctttatgaatcaggcagaggaatgcttctgtcttctttctccaagtcctcaactctgccctttttctgtcaattagtaggccttaatagatacaattaagagaattctacttagttaattggtgattggaaacatgattatttaggtacttaatctgtggtttgtccatctctagaatattaacaattgatttttgcctgattttacaaaggtatcatctcagtgggattgctatgtatgaaaggaaatttataatggaatgattgcttccaatccagtttattaatttaagtacgtaatactttagattggctttattttcccttcatttttgtgatacagaggccttataacgtatagctgtttgctggtattcttcccagcttcctattgtcctttgtcttcgtaaaataagcctagcagtattttctatattttcagagaatcttgtgcttttgaatatatgtacatcattggctttgtttttaaaaaaacttcatactgtgtgataaaattaatgtaataaaaaggtagagatgcctatttacaatttgcagaataatttgcagaaactcctcagttactgttcagaagacacatatttctagtccagtagacatctagtaaatgatgtttacttttaaatgcagagatttgatttgactaatcatagtttatatgttcttctggtttatttggttttcttttctattttttttaatggaatagttttgtaatttcttaccactctcaaactttaataaagtggcatcttgaggctagtttcagttaaatataaatataagcaattaattaagataaccaaccctaaccagagagataaagtatcatcgcgtgtcatagtgatcaaggagcacctgttaatgagaactgtaggaaaactgcaaccaatcatgaaaaaaaaagtgttgggtgaaattaacaatgtctgtgtttcttgttatttcttaaatccaacccataaacaatttgctgtgacagctctaggctgggattacgg

SEQ ID NO: 121918 - DNA, 1357 bp, Homo sapiens
accacccaccccaaaaagtcctaagcctggcctacttctgaccacccaccccaaaaagtcctaaggtattatattggttaaatattttcaagtacatacgagctttaaagcaggacagggaaattcttaggtgccagaagacattgatgccactggccttagagtgtttcagacccagctgtaggctctaggctctaggggctatggtgtctatactcacacaggaattgcttgtgaaaggggggcaagaagattttccccagtctgtttggggctttaagtctgtgtgttggggcacagaccagggggatggaaacccagggttacactgtttgaatagctctggggttcatagttacactactacctgcatggtataacttcaactgttttggcagaaactggtttgagagcattgaacgccctcaggccatagtggaggcaaacactagatccctgtggagaggcttaacaacctgggacatggtactccctcaaaaagaataagctgcactaaggagatgctgataataagtacagaatatggccagatacagtggctcatgcctgtaatcccagcaatttgggaggccaacacaggaggatcacttgagcccaggagtttgaaaccagcctatgcaacatagcaaaaccctgtctctacaaaaaattatctgggcatgggtggtgcacacctgtagtcccagctacttgggaagctgaggtgggagaatcacttgagcctgggaggttgaggcttcagtgagccaagatggcaccactccactccagcctgggcgacagagtgagaccctgtctcagaaaaaaaaaaaaaaaaaaaaaaaaaaggaacagaatctaagccccagaaaagcagaggttaacagtgaaccttcaggccaactagagttttcttctgcagattaatgaaagtttcttctcaagaggaacaaggcatataacccattctggcttgctaagcagtttcagttgtaagcactagccccaattaaggtaacatcctacttatagcttgtccccaagatcttcttgagaatattttagttccttaattagaaactttttattggagagatagctggcccccttaacgcttctttaacagtgctcccattgcagtggatcactctgaagtaacccatcaggctgtctgttatttcagtttctcaccaaatcataggaaatatgtttgcctgaattgtacagcaaccccctccccccgccccgccaagggagagggaagttgaaattatttggaggggtctgggattctttcagcataaaatcaaagaaacccaggtaaataagacatggttagtaaacatttgttctagat

SEQ ID NO: 121919 - DNA, 1073 bp, Homo sapiens
ctgaggcagcagaggagggagaacaggaaaattggaaccgtactcttagttaatggtttccagagattatttagcaggacttgaacagagggaggaaaatattgtgaaggattgctgcgaggtgtaccataattgcggtaggtaaaacaaagtcattactatggttttcttgctcaagaaggattgagcaatgacttcaaaatgccaagtaaggtattatttttccctaccacagtatttattttcctttagcttctggggcattaaaaaaaaagaccaactctcacatcatggcaaacagtattaatgttagtgaatcaattttgtttactgtttataccacaagcctttaaaacattccattaaaaaattgtctcccgctcattcatgaaattctttttttccttcaaatttgcttacatgcattagctttgtttggatagggactttttccctttttggctggagtaaaagaatgcataaaagaatagtgagtagattatctaaatgtacattcttacaacaaatgtaatgaaaatatgccgcgtggatgagagggaatatttgaaaacagaaagaaaaacagaaatggggagcatttcaaaatagtcaccctgattatctttgttatgatgcatttcttcaattctgcatttatttagaaccctattgtgcagctatttcttttagccaccctagatagaatgtaggtcaacatcaacattgttcctcatattttgttggtattttaaaagttgaaacattttgcagttttttccagagctagatattcttaggttatttagacggttttagtgaccatagaacttcacgtataaactccttctgttaatagctaccactgaattttgatagtagacactcagatcacaccttgacctggagtaaacaaggcactgatgatattgatgataacatagtccaacactgaagctgttccacttcttccaggcaactctgatggtcttactctgtgtaagttacagcttttacttcgctcaaggagagaactggtaaatttttatggttgttaattgtttacattttgggga

SEQ ID NO: 121920 - DNA, 1053 bp, Homo sapiens
tgtcttggatttatgtgagcctttggagcagcaatctcacatactatgcatggcaaatcctagtcaatgcatactttttgagagtgcaagatgttaattgtagtaagagaagagaaattcaataacaaatgtttttgaataaaggaagctgaaatttaatactaatggtgttttctctaaatgaagttaatatattattgttgtattaacttttcaggagtttgaggctgcaatgagctgtgattgcaccattgccctccagcctggatgacagagtgagaccctgcctcttaaaaaaaaaaaattctaaggacttgggctctgtgtttgattgacagtaatagaccaatagaagacattgcatttatatagacttataaaatagcattcacatttccaatcagatttacagaattctcccttatttttaaatgttctcagtggtaacagtgacgttgggactagagtcagtattgtgagtcgtttatgcacatctcttcacaactccatgttcagtgagtcatactggcagcttgaaatcagccatggtgggagagtttacaccatggaaatcaaacactacaaattggtgctcctcaccctcagagtctgtttttaaacatttagcagcataccactgcccaaaatggagttgagcagtcagggagtctcctcttgaggcaagtcatgcagtgcttccactcaaccaaacagccaacatgaacattttgaaatgtaggctgtgtggctcctgaagaaaagtccttcatagctccacatttttctgagccaaagccttgctgtgatcataaagctattcatgctgtggccaccaccgtccgtcctcctggctctcacctccagatgcctggtttcacccctttttctgtagaacatcctagacccactcctattttagggccttttctgtagggcagtggttctcaaactttacagcacatcagaatcacctggagagtctgcaaaaacagaccactgggtgcctctctagcatttctgagctagtgacaagtttcagggtaatgctggtgg

SEQ ID NO: 121921 - DNA, 1048 bp, Homo sapiens
atctccaaggctctcttaaatattgactaattaaataaaaactaaggaagtctagctaaatagcctcactttgaggaccagcccagtggacttagaatacacagtgatttgctgtatctctgaaacaagcaactagaaatcttttattattggctataatagcaagtggcatctcttattatgtttggcagctgacatttcaaattgcattttggttggttgttatacatgaaatagtaggatatgagtagactaaaaatgagaatttgcagcccagggatgacatgaaatatctaacatctaggggttgccatgacaactcatcagaaagttgctttgtaatcttttggattaggctctggcccagggtcactggattggagttggagaacgctttggtaacaggatgtgaatgttgtacctttactcaatggcatttgaatttgcagtttggtcatgttgctaaggtcaagtagaaatgacattgagggaatttttaaattcccgcagaacctagacaaggtcacatttgtcagcaaaaatactcagatggaatagtctgagacttagcaactgaaagacaggatttcctgtccttgatagataaaaagtatgcacatatccatttatatatgcctatctctaaacagttgtatgtaatgaaaatttgggaaattaaacccttttcataattgtcttctgttataaaattggaactgaacacccctaagaaaacagtttggccacaaacaaaccacagctgctttctagtgctctgtgtcctccctttcagctggaaatggcctgcagggtgtggaatttggaccagggaagggaattcggcagagagaggaaggaagcaattgggaaacagggtaccacattcctcatcccccacattggccttgaccacaaggacagcatcttccacatgataatgcacctctcaggcatgcttctcaccagggatgatcaatggaagcaacctggaaactaaagagctctgttcctaagtctgatcccagttctgccactcacactgtgatct

SEQ ID NO: 121922 - DNA, 1043 bp, Homo sapiens
atgaatgaatgaatgaacagtgaggcttcatttgacaaactacatgtgtgtttgaaaattatttcttaaatggtaaatccatttttatgagtgattttaagtatacatggaaagttgactcctttcggagggtgaagtgatttctaaaacaactgttttgtaattatttagcagttctggctttggtaggtcaacttttcttaaactggaaaaaaaaatagtattcttagtgtagattgcaaaaggaaagaggatatgttagatgatttgcccaaaatttaaacaggattcgctttttaaattcaagcctttttgctttcattcagatctggtcaccagacttactttttccttaaggcatatatgaatcatcttgttctttcattcagaaatcaaaagttcaggcctagatcagtatttaccaaaactggtggaacactacctttccactgagagtgcattacctttttttgagtctttgaaaagaatgtcagctgaacatggtctggaagtggccaaaactctgtgggtggggagaaaggaagaaataacctatctcccatttaaaaacctaccacctattaaataaacggcagtcttgttctgtggagtattcatttgggttatctattctgatgaacaaatacaaattcttggtagggttttcttgcttctggataaaatgcttagtgttgctttttgttgttcaatcttaggttttgtttcattttgtttttcagggtctcactctgtcaaccaggctagagtgcagtagcgcaatcatggttcgtggcagcctcagcagctccctgggctcaggtgattcccccacgtcagcctctcgagtagttgagactataggcacgcaccaccacaccctgctaatttttgtgtttgtagtagagatgggagtctcaccatgttgctcaggctggtctcgaactcctggactcgagtgatttgcccactttggcctcccaaagtgctggcattacaggcatgagccactgcgcctggcctgtttttatgatatgtattgaaat

SEQ ID NO: 121923 - DNA, 1036 bp, Homo sapiens
ggcaggtttcaagtcctggatactggagatgcccaagcagaggctgtgggacctcccttagacttgactggggccacaatacccactgcctggtccctggaccagcagcatcggcatcacctggagcttgttagaaatgaagtctcagggccacccacacctactgagtctgaatctgcactttctcaaggtgcccctggggtctcacataaacatcaaaatttgagaggcactgggctaaatgtctctaagatccctcatggttcttaagatttaatgattttatagaataaactgtatgttcaactgaaaattatcagttcatatggtgacattatcaatttaaaacaccttgggatgttacatgtccacagaaccatgtaagtatttgttgctaaattagttttaaatggatttgtccagtttcccccgatgtcaaagttaggttgcttatgtatttgggcacctataagaattaaaatattacataacgttgtattttcttctttctaacatacaggattagattcttgctttaaaattctccattaatgtcttcaaatttttcttttatattcattgaaaattcaaaagcagattagggttctgaatacctgttaagaatactcaaaagggatatttaaataaatatatctcattaatacattgattttatatttagcatattttttcttcttatacatagtccatattttgaccttatgggaacctttgaagtctgagtattttataatgattctccacaatacctctttatcttttagattctagatctgagatcaggcaagtaaaatagttttacctttttcccctcaaaaggccatgactaacaagctcatttactttttccttaaatattttgctaattatccttttaactgatgaagttcaagtggaatccatgattcatttaatcttttcccctttatgtaattagtcacttgttcttttgatgttcctagcaaaactaatatttaaagggctagtcataaaattccaaaataaaaagttctta

SEQ ID NO: 121924 - DNA, 1503 bp, Homo sapiens
gacttaatttgtttccctctctctagtaccccctctttgtacttgtttctcctccttttttgttttccaagtctcaattttttttttggagaacaaaacagtacttaaaaccggtaagtataaagattttttttctaacaatactttatgccaaagtaagagaattctatgcattttaaatgaaactatcaattgaaaccatgttagagaaccagaatgaccctaaagttgaagtctgaaagtgtcacttggaagactgtgtcccttcatcctcctgtagttagacatttcctcaaacacagttaatcaagagtattttcttttaaatggttttggaactatcattgtagtatcattttctttttagattataaatttaacctctcatattttaagttcaagacattttcacggactatcaaggaatcctagctcattggcctggccctatttctgtgggaaaatgtattctcagttccagacaaccagtgttcctgcagatttttaggtcccgtataaaacgagagaacatagatgaatgagaggcattgtcagacaaagcctggcacatgagatctcaattagcatacaggttttaaatttcccacattaaacagtacattttaaatttccacttatgttaagcgtgttgatattgtgggtttgaaagtaagtcccctctgaaaaacaggaactgtgcttgtctgttaccagttcttgtggtcgatatggtaactattttgatttttcagaagggaggaaaagcagttaaatctagttaaaattaaaaccagttaaaattaactggctcgtgagatttcagtgcagctgttccacacatagcaacactaagagtgagttgtttattaccatgattaattattattagttgttacttctttttgagcagtggcatagattatttatatttttggtctaaccttggaaaatagaaactgcaagcgtagagaggttcccgtttgctaatttgcatgtaccctgtttttgtttttgccaggtaggtgtgtgcatctcaagtacacgagagtaatttagcatgtcagcactttcctaccagcagtgcttgctgactcatgcagctgttgtagcactcagctggccgcactgtaaactgcccatagtaccagcaccgcccttggagagctccgggctgctgggctggttagctactgggaggctattttcagatctgtggtcactgctgagctgggtcctcttctcctgccagcagccagacacagccttctggttgcaggggagaaaattggacaaatttctacctttgtagggactgcataaagattcatagcatttctggatatgcctcaggaaaactttttttttgcttcactttatttttctgggaatatttaaggggagaggcaaaaggggctgataataaatgaaaagggaatgtgctgttatttcctactaagatcagaaagagttttcataaacctttaacttagttaggctttcttg

SEQ ID NO: 121925 - DNA, 1107 bp, Homo sapiens
ggtaatgcctgaggacctccatgggagtttgacatttgagaacactcaccaaaataatagttttgatttactgaatccgcaccatgtgccagacccagtgctgactaccttgcctgaatgtacttcattgattcctcaaagcaaccctttgaagtaggtgtcgtgcctgcccattctgcagagttggaagaactaatctcatgttggaatgaacttaatctgaatatagtgcatgttttcttgaatgtctgaaggttatttccccattccattacacagtccagtcctgaatcaatgactgggcatggtgtaggactgtgacatacagagaacatggtccctgccctcacatagaacagagaacaatataaaatgtaacatatttgtcaaaatctgcaattcagatagcagacgctgtaaatctgcctccctgtttttctcctttccctgtctggatgttgaagaagtttcagcgacatatgaccctgtcagaggtactcacagttcagaagtcaatgctggttgcaaaaattggaatttctttggaaaagaagacaagcttttggcagagctggggccacatatgggaacgcagcaccaaggccttgggaatgacggaaaatcgcttctgtattgttaatagcaatatatgacctctgctgtcctcctatctttaaattttatgtaaatatttacaaactgttcatgtccaaactgaaacctgctatgaactaaacattttgtaaactcagtaagattgcccaaaatacaactcaactttcacctttttttttttgtttgtgatgacatttaatttaaaaaaaaaagacagtagttgcttttttttttctttttttttgtcagttcagggtcttttaattttttccctttacttttttttttgttaatttcaaatgtcagtctatctaaaactgaaacttaattttactatcagcatgctactcagcttccgtaaggctggaaatgtcctgcgaatcttaccactatgtcttttccaagggccatttcatttctaaagaatgtataaattgaacctcatcctgctagtgacactacttcaaaattcaggcaggaattttgccattt

SEQ ID NO: 121926 - DNA, 1009 bp, Homo sapiens
tcaggaaaatgcactttgcagtgatggtaggaaatgtttccacctgatagagggtaataataactgcttaaaagtagattcagattacagatgagacaattaactctagccatgtgctcttcaatttgttgcaattcattttgtgatcaaagtgagtcacagagggccagatggtcaggttcatgttcagatctctcctaggccagcccttcacttctgggcccactgtctgcacagccgacaggacttagttattcattagcgcttgtgagctgtttctcagaattcctaatcgaggctcctgtgatgccaacaaaagggctcaagccaatctgtattgttgagagcagtttaattttacttggattaactttcagtgtctctggtgtggatccagtcttaacaaaaaggaaagagaccctagtggctctctatctctgctgtgcctggcccctctactctagtttttgaacctcagatttcaggggtgtgacatctagcttattgtaaatgcaggcttgattgttaatgaatgagagaatacttagataaataaatatcttcctgtgtgtccagggggtgagagccagtactagcttcatgggcataagacctgtgcagttacataggcccccttcctcttccctgctcagaaggacctcatatttggtataaggttctgctgttttcttcggaaattcttaataatttttgaacaaagggcccctcgttttcatttttcactgagccctgcaaattatgtacttacctggttctggtgaggagcagggcatagtgtggagtggcaggccgcccctactcaactcattgtagactcttgctagggaacagttggtaggactactggctttgtgttgccacatcatttgatttttccaggggaagctgaatattggatatttatgtggaatttcctgatttttaaatattggctcaaatctttaaaaaatttttggatgaaagcatatgtaagagctagtgtcggcct

SEQ ID NO: 121927 - DNA, 1030 bp, Homo sapiens
ggtcagctttgtgggggccagtggagcatcttttcttgcccttccgggaaaacgctagctaaccctgggatccccggtcccgacgtctgctctccttccccaggtgcagcacctagggctctggccccctccccacgtgccacaccagccctcaccactactctcaccctgctatgcccccaaccctcgtctttcgtggccgggaaggccaggccgagcggggcggtcagccgggccgggaggagggggctctccgggccgcgcggccgcacaaagcggggagatctgctgctgcggcggcatgaggcgcgccccctcccgcgagccagcggagcgcgcgcgcccgcccccgtcccccgccccccgccccagcccccggagcgccattcgcggagcggcttacgctagtcgccgggcgtaccgcgccccagcggccggggaggtgcgctgcccggctcccgtaaagttattgtgaatggggagcgggtgacgtcagcgccgaatgtcaacaatgtagcgattgagagtgtgggcgttccggggagagcgcaagccgcgcggcgcggagcaaacagcgccgagccgccgccgcctcagcagcagcagcagcagcagcagcggcagcagcggccgtgcacgcccgggctgcggtcgcacagcgctaacgtgagcggccgccgccctcgccaccccgcctgcccactcccgccgccgccccgctctcgctttccccccggcctcccctcgccccttcccctcccccttcccggcgcactcggggggctgggaacgagctgccatgtgatgcgcgtcccctccgcgagctttcggtgacccacgaactgcccacctcgccggctgccgggagggggctgcgagccgggaagacgcggggaagaggaggcggaaaaggacgcaaagttctccggcgaggtgagtcccgggccccgggccccgggccccgccgctgggcggggtggcggggcaagtttgcggggggagcgggcgcgcggggcgggcggggaggcgt

SEQ ID NO: 121928 - DNA, 2888 bp, Homo sapiens
aacctttagggatagttccgtgtaagggctttgatgccagcatccttggatcagtactgaactcagttccatccgtaaaatatgtaaaggtaagtggcagctgctctatttaatgaaagcagttttaccggattttgttagactaaaatttgattgtgatacattgaacaaaatggaactcatttttttttaaggagtaaagatttttaattctgtgattgtgtgtatgtgtgttgaaactgtaaagcttttatgactctaatattaatctcttaaatgaaattaaaaggcaaaagaacatgattgagcttaaatgatcatttcttcctgcagtgattcttggattgttttctcatgtatttgaaaaaaaaaaaatgaagaaaaataatggaaaatggaagtaattactccagctaaaaaaagcttggacttagatttctttttatgataccaaatgagaaataaaccaggcaaatcagaaggaagttaaagaagcaaatataaattcaacaagtgtcctaattatcctggatattggaatatttgattttccttacaatcccgttctagaatgcctgccgcctttcaacactttcaagagaatttcaacacttacagagtatttatattgttaacagtaattttgctaccaaaaccttcagaataactttaataataaaatgacactgaaataatagactatacaaactctatattttttcagttggtgttaaaataagtcacattttgataccagtacaagatgtcttttaaataaggatgtcatcagtctgatttttatagcattaatgttttatgaagaaaaagttcaaaatgaaagcattaattgctgtgattattagaattctatcatgactgtattgtagtttttgctctatttcagataagcaagatctaagaagttatcaaaactattctttaaaatgctaaagcaggtaactttttcttccattattttttcctcctaccactgagttttgtaatgaattccttgtgtatacaagcaatacaggtgaatactaaactgttatttttagcttcttcaaaagctattttagaaagcttcctggaaataaatgtcttctgtcatttaatttaaataaaaggagtgttaattgttcccaaatttgattacctagctgaaacagatattggattcagcatagtaatagtaaaataaaattggcagagaaaataactgtagactaggataaagcatgactcctccatagcattgttgcttgtatgtacatctgtcactccactgaaagggacctagtcactttaaagaggccttttatctcagcacgagatatccaagcgtgaatgctaaggcttgatgtttccattaggatttagcattcgagatttcagattttatttatagtcattgatgtgttttgctgtattataacacatttaagggaaattttattatggtttttacatgtagtcatttcataaaaatatccagataggtaaatggaagaaaatagtagattttagtcatggtaccaaatgcaagaggctgttgaacagttgcttgtttgtttacagtaagttccttgagattttcagtactgtagttgccctggacattgagtacagttcagccttactctgtttttaagtagttgtgttgtcaatttcatgcttttaagtcctgatgatccttggagatgggagaaaaagataccagggataattaaaatccacagccagtttcatcagtttcctcatccatcctgcaaataaaaatgttaacaaggagccaaacttattcgttctggttttacaatttattttgaccgttttttgggtgaaaattgcaaacagccaagcaagtggctggaatgccccagtctaagaaattcaaaaacaatcactgagtaagccctaattacattaattacattttactcttgactccaggaaaagaaagcaagcttttatctaatctagagggaagtattcgtgagcaataaaaatcacttttttgagttgaataataatcagttaagaatatttaccgcatagcaacacaacatataaagatttgttacaagttgtttacggatgtttgactatttttgctgaagtattttagagtattgaatgtcttctctcttcaagtttctttcatgttcctaatttcagctcctgtagccagagatcacaggtcttccctgtgaaactttggtttctttctataaatgtgtgtggttttcagcgctcaactcctgtcttcaaatggtagtaagttctacttctacttctgtcattcagaacattttatgtcaaatgatgtaatgcagaaattcttgtgcatatttgtaactgaaggaagctttttagatttatttttgtttttaataaaattcagattcctattctaaactggtacataaaagtggtgaatgacttgtatcagcaaatgagctgcgaagtgttctgctctagcaccgtgtttaccttacacagaacctactaaaaactgaaatgtcacttttgtacgataatcatggtttttaagaggctgggtaattggccagttaacacatcatctcttgcatttcaaaattttgtgttaaatggagctcttcacaatttcatgagtcctaatttgtgtgaagcacaacacgtcatacattgctaagtgattcttctcatcagaaagctgatttcttagagtatttctaagttaaattaggtatttcattcctttatcaacctgctggctttccaaccctaacatatgcacacattcttataaactctaccttcattttagtaaatccatccattcatttgctcattcttttaataaatatttgtttatcatatattataaactgcactgctattac

SEQ ID NO: 121929 - DNA, 3792 bp, Homo sapiens
tgaaaatgatccactggaagagaatgtgtctctgctttctccctttccctgttaaggaacattgatattagcggagttgatatagccttctataaaataaacttagcatgataaagaaaagagatggggagtttgattagatagggtcaattaagactgaatttaaaatataaaggtctcatcactgtttttgtttttaattaagagcttagaagctctaatatattgtgttctattcagtttatagccaacttaaattataggtatgagaatataattgcattctaatatctgataattgaatatcctttttttaacctttagaattcagaaatagactcttcaattaccaatagctgtaacttttaatttacatattatttactttagggaaaaaaagcatttcattcatgctttcttgctgttcgtttataattatttgtgacagaaaatcaataaaatacatgcttgaattccagataccaatggatcagataactccatcccaatggcttatcttacactggatcaccaactacaggtaaaggagtactttcttattgaaagttgacttttttcttcttagagagtttaagttgacaattgtgttgctacctgtcattgtatagtcactccttaatttatccttttagttggcctccttaaactttttagaatcaaatcaaaataattcttttggttaagttaatcaaactttaaattggcagaatcatattcttatcttttcagtcatcttaaaatcctccagtatctttctttagtactgctaagcattacattttcactctttaattttagtgcattaaaacaaaactcataagcttatttctatttaatacatttgtgatacattctcatgttcatagtgactgaaaatgtaaataatatacttcagtgccccctcatgagtatgagggctataaacatcatttagtttgagcctgtttgcagcctgaaatgtcataccagagactacaactccaacaatcatgattctctgtaacagactgttaaaacagcaagaatagatttaaatgctgagttaattctgacaaaaggacactgagattttctagggcatggtttaacacttatttttaaaagatcattgctttagtgctataaaaatatatcacagtctctgtcttgactctcatcttagctagatattgaaatttgatttaattatgttttaacattcctgattattttcagcctctagcaccgtgcccaaactccaaagaatctatggcagtgtttgaacagcattgtaaaatggcacaagaatatatgaaagttcaaacagaaattgcattgttattacagagaaagtaagttattttttatgaataaaaataaaaatacattagtattttgagtttaaaatatgataaggtgcaatgaaaacgtagtttttagaattagtcattaagtatactttcaacttgtttaagctttaagcacccttttactaaaaattttttatgcaaaactcaatccttttgactatcatattagtgctatggaaaataaactggtgctttatacttgttgttttatgttctcagagctgtttagacttattattataaagatttattgttttcttgtaaatagataaaataatttgatttattaacattcagttgtgccttatcttagaaacatttttgtagatacattttttccaggtgtatgtttagaattggattacttattaaaagactgtatttcataactgagtgtttttctgaggagttatagaaactgccttcctccctttttaaagaaacacagcctaatttccttactactgcattcacagttcttaaatatgtatgtatcttcagttttcttaagcatgacctccatgaaattttatacttaggtaactgaattgttggtggtaactaaaatgaagtgataaggaaaaaattttggcaactttatatatgtatgataataggattcccttcattaattttaatctaaataaatgaaagttgtttttttctgaatttgcgaaaagctttctgtatgtacttcaaaaaaaagagagaaaaaattgttttatcataatttattgatacagtgatttaaatggaaccaacctggtatttgaaaggtaagcctaaataggaaattaaatactacagtttggaaatcgtagaagtaattatcaaactgctggcacttttatgttgaaaaagcttgatttcttatttcacttatttaacctatacttttgccatactttaatcatttgaaagaagtattctatgctggaaaaaacaaatggtggattagggtgttggctgtgaaaactatgacagttttaatcaattttaaatactttcagaagtagtattagttagttattttgcttgaggactttttattaattattcatttatatccagtaacctcactttaggaaatgcctaaagatgcatctttttcgggaatacttaatagttcccaaataagagggacttaaataagtttatcagactataaaagaatgagggtctttcctgaaagtgcttgcaaatgtaagtgttttaaaagaagtggtactttgtcatttttctcactgctttaaaatgggaaaaagctttaaattggatagcatttattttaattagattgcaaatttgctattagcttaccactctctgctatagttaagtaggattgtgacttcagaatgtgaatcagtataaaagtagaatgtgaaggataaaaacttcatgatattttcccatagccacatagaacccttcccagccttttttcatccttcctacacaaaaagaggatagaaaatgaaattttctgaaacttttattttaccattttatctgcttcgctaattatccaagtacagttacttaataaaaggattatgttatttgtatgattacactagaagtagatgagagttccatcccagcccataattatatttgattagtgtacctaagatgcaaaatgataaaccaagaataaaaattctcattaattgagcttccatcatcagctactaaggtatgaatttttccatcatgtgtaatattatgtggtatttgtttgtaggcaagaactagttgcagaactggaccaggatgaaaaggaccagcaaaatacatctcgcctggtacaggaacataaaaagcttttagatgaaaacaaaagcctttctacttactaccagcaatgcaaaaaacaactagaggtcatcagaagtcagcagcagaaacgacaaggcacttcatgattctctgggaccgttacattttgaaatatgcaaagaaagactttttttttaaggaaaggaaaaccttataatgacgattcatgagtgttagctttttggcgtgttctgaatgccaactgcctatatttgctgcatttttttcattgtttattttccttttctcatggtggacatacaattttactgtttcattgcataacatggtagcatctgtgacttgaatgagcagcactttgcaacttcaaaacagatgcagtgaactgtggctgtatatgcatgctcattgtgtgaaggctagcctaacagaacaggaggtatcaaactagctgctatgtgcaaacagcgtccattttttcatattagaggtggaacctcaagaatgactttattcttgtatctcatctcaaaatattaataatttttttcccaaaagatggtatataccaagttaaagacagggtattataaatttagagtgattggtggtatattac

SEQ ID NO: 121930 - DNA, 1064 bp, Homo sapiens
aattaaaagtaatgatataagtataggtgtaaaagattgcattcttacaacatacaactcactttcaaacatggttttttcattaattcaggaagctttttaaacactcaatagatgtgacttcctagaagctttgaaaagatactgagaaagaaaaaagcagtccctgacatccaggaactggtttgacactgtggcctcactgttgttagtagctagccttattctcaacggctggctgtcacagctagagcatgttactgtcttattggacataatctctcagaacaccaatatcagacaagataatgctgagaccgtgataaaaggagacaaaacaagactacttcggaatgttttctaagcacagacaaaaacaaggtcactgtgccacccacaaaatacctaacattgtcctctcccagctattaagagtgactgctgcttctttaccaattacagcttggtcctcactctggactgccctccctgtggaattgcccttgctttctgacagcggccaatctggaacgaacccctccttcctttgagtttccccaaaatcactcaaccaaagcctaaatcctataatactttctttttctaaaaccctcttactgagacaccccatgctgccccatggtaagcattctccttcactgcaataaatattaaacccaactctttccactattggtgtgttcctggcagtctttggctagagggctttgacaataccaataaagcctattccgcaaggacctcatttggagagatcagacttatgcccaaatcaattagaaaactaaagtaataacagcttccatttgttgtgcactgactttgtgccagataggctcttagtatacattatcagaatgttaatcctgttatcaggatcttagtcctgtgaagttggtactttttcacctaatttgcagccaggtaaagtgaggatgagagaaactgacctaagtctcttacttccttatactgccagtaattcctataaccaggttttgaatccagacctgattgcaaagcacacaaactctatactttaa

SEQ ID NO: 121931 - DNA, 4760 bp, Homo sapiens
gcttttaatttcagtcaaggacgtttagctctattgtatattggttttttactaacagtatgataagtagtaaattggagtaagtagaatgtagagaggcccaaacattttaactgaaaaatagatgagtagttaggcttctaatacttgtatcttgttgccctccttcagaagtttcaaatgtcaggtattggcaaataaattatctaggtggggagggctttatagaatgcttaaacaactggaagcagagatgcttttcaaggacacctgagcactattttgctttctccaccaggatgaaaatatcacttttttaatagtatatttggttcaagagccggtcggtaactaatgtttgtaaacctttctttaactggaagcatgtaagttattaaatatttcctccagactactgcagcaccaatatgaagaggcaaagagagaaagaattgagtttttctagatctggcaagttctcacctagcacagatagtgtcattagcagatgtaagcctttgatagggatcctagggctaaggggtgctatactaagatgtactgtactagtttctgtgtatagccacctcactttcaataaaattctctatttgtggcatattaaatagggaagttaatctaactttataatgaatatttaggtggcctttctgccatattgtatagtctaccaagatcactttttgtaatctaaaaaattcaactctaagctaataaagctggtttattggaaagcaaataaaccacctgacggacctttccagtgaaagagccagaatttgttaaaattagtaaagaaatacgaaactttggcagcctaaattagaacatatattttaaaattacatgttcagtttaccatgaagcagtaatgtaatgctagtgtatcatgctatgcatttttttaaatcttgggtattttacacatgaagagaatggtgtcccataatgtgtaatattcaaaactcgtgaatctcaaaatttctaacatttaggttaagagaagtctccaggaaaatgtagtgttgattcttacatgaagacagtcttcaggaagttttaaagtagaaaataagagtagtgtaagtcaaggaaaactatgagcttaactgataagaaaaattacaggagtggctgtctgggacctaagccagcagtctctggaagaaacccgggataacttttaaataccagctcaggaaatcagttgtacttaaaagagcagcttttttgaagaggggctctgttttaatgacattactgtaaaaagaatggaactgacccctaagttgctttctatttgcggtgggcaggagtgcagatttagtatgcactggcaatgtgatgtattcttagaagtcattctaaaaagtggaatttgttctctattataagacatgaacgttccagaattcattacagaatgaaatactcaggatagcatatgcaggtttcagattccttgatcaggcatctgtttacatcatgctgtcctcatttctactactttttccatttacactaccatgtataatataggtatgtacatatcaaaggaccaaaaaaggtaaaatgagtgaatgtctaaattagtattcagttgcaaaaaacttcagaatcaattcaaatttactgagaacacacccagtaattttcatttgaagtaataggaggttgatttttcttacattcatatttctaaattatgacttaaaatttaatattggagcaacaagtatttgttgattgcaatcctgttttgctttgtctgaactatctgccagatggtttctgccatggttgtgctaattaaaatgcattgcctaatactgcttgctttgattcatgcagtagcttaaagatttctcattttatggcatttgttaactgtcagctcttctttaccttacttccttaaaaggttttacttcccttttctcctatccttccacctaaatttaagttcagtttttgttgttattgcaatggtgatgtaatggtttatagacacatgtgtcgggtggttcctcagattaacaaatgttgctgtgttgctaatctgaaaagagaattccagacacttttacaagcctgtctcatcaccgctaattttagaatgaatgtgttgaatgaaatgtgcctaaaattgcttattagtcacggttgtggggatcctttttgtccttgggaaacaggggtagttgaaagtattcagaaaagtaatctagtggatctaattcaataaatgcacagttttgttgttttagtttgtaatgaaaagttgaaatttttggaataaaatgaaatttgaagtaaatgtgaattcagataatgcaaagaattataaaacgtagcttaaaatggaaaaaaactgatgatgtcttacatttgcaagaggagttacaaatttgagtttttatattcactacacatattattctattaaacattcttattccattgtaaggtccttttagtttatctgcagcataataatggggtcatgtgggttaaggtgctaaattatattgctgattggttttaaaaggatgtctctacgaaagattctggaagtctaaaattttaagaatgaattctgtctactaatcgggaaactacaattagagtgagtacatgttctaagtgttgcccactagttgagaaattacgtaatacagatttcagagtcaaaagaattttgagtattgtatcagctgttactcagtattttggtgtttccttttagacagctgatctctcacgttagaagatactgcataaacagctttattcccaaataaaagtgctgagtgaagccattgctcaattcattgttttgctgaggacttatatgtgtagaattctctcataaattgatttttaattaaattaattataaacatagaagtttctaaagcagaattaacacaatagcccatttcaacaagctgtatatttgagaacagagtgacagttattaacatccagtaggaaattaagagttgttgttcacaaataataaattactagattctgacaaagactaatggggattaagtaagcgtgactcaatataacaaatttaagcctaagcatcttctaggccctgaaatgaacaaggtattgctgccagttaaagtcagttgtgtcttacaacctgctagctgtcttgctgtaaaaactgtaacgtaaggcccttgaaatagatgccgtcatcagccccagcccccaagcattcatctatttaaacacatgacagaagatggtggaagagagttcagcagctattcatgtggtagaagtggttattgtattaggacatactctgttgtaggccagcaacttttgagttaaaacaccgcagctgtttctcttcctttctttacatctttctcttcttttttttttttcttagcaataaactcacttttttttccccacaaacattttgtgtagatccaaggagcaacaaattccaactttctgctgtagcaattacacgctttttgtctgtttgactagattttagtattttactttttttcttctttttaaaggcaacggacagccaagacgtagatccatccaagacttgactgtaactggaacagaacctggtcaggtaagacaacattcaaattttctatctttgaagaatactaggcagaaaacaagaattaactgtattctactctgcaaaattagttttatgagttgacctaaagttgtgatagagaaattcattgcacctgaacttaaatacttaggggggaaaaaaacataggtgccattgttaatttaacttgaaagataatttattaaagtaggtttattaaactccatggaaaagtaaattgttcattagcgctgtatatatgttatatggttttatgtatgttttaataagtattcaattttataatttaacaatttatcattaaagtgtcctttaaagtgaatcattaatatgtctcctttttactaataagggtagtaaacatttccccaataagttgctactcctctagcgccacgtagggcattacatggagaactctaacgtcttttaacttggcatatccactggattaatatttttttcaaatatccttaagataacatttactaagcaaatgtgtaaactctcgaaaggcttctattccagtggttaagatttcattgtttatatttctggatcctcctctaaactctccttgtctctttatcactgctgctttgcagatgatgcagacagtgttataatttaagccattactgattagtgcagagttttaacccaccaggtatataaaagtagctcagtcattgttttttctgtgttactcagattaatacacttgacatatataatttattatatactatattctgtaaaatgaatgaagattaattataaggtgtttgttttcagctgtacaagaataagttttatgagagcagcataaaagtaatgaaattaagtaatgaaattgttacatattaagaagtattaagtattaaattattaagtattaagtaatgaaattattacatcgtgacccatatttttgtaaaattttagcgtttatatattataaacaatctgttgtaatttatgataatatgtattagtacttgtcatcctaaaaaggtattttattattatatcatttgtataatatacttaaaatttgggagatcctttgtagtcattaataaaaaagtcttttatacccatc

SEQ ID NO: 121932 - DNA, 1608 bp, Homo sapiens
ggagatcagtttacctccatgcggaaaggtactgtgtataagggacgtactttaaagaggtggaagcatttaaacttacataccgctgaactgtgcttcccttaaatgtttgagggaatcaggaaaatttagacagatggcagtgtaatcttatgactaagcattaagaataaatttatatatggcagcgtagcccacgctatacaagataatgggggagggaaaaataaggaaagaataatagtttataactgtcaggtactactggcatctagtgggcagagaccagggatgctgctaaacatcctgatgtgtaccaggcagtcttctccaacaaagaatgatccagcccaaaatggcagcagtgctgaggctgaaaacccctgattagatgttctttgtgccctacaaagtagcttaaagtacatcttattttacctttatacaatcttacaactaggttatcggatgaaattatagctgtttaacagacgaagaacttagatctgatgatgtttagtggtttttccagaatcatatagccaggaccccaacccagatcttctgactccaagtcacatccattttttgttcttttgtttaagtcagagaagctagagtaatttcttcttgctttctcttagtgttcacattaaggagagctcttcagccagggagatcctcttttatgacattgggcctttatggaatcaggtaaccttaattctcttaattgccagagcagcagtgctattcatatgaaaatattattcagtaataccttttattaaatattctttttaggcttttcccccctcagatatcaaacattaacttactcaggtgcactttctttaatagaagaatacaagctgtagaattgacactagtggacataaaagccaatcatgaatgtgctcataggtaatgtttttaaattaaatataaaaataccgcccatcctttgggaatatctcaaatttcctacatgacattttaattgtaaagaagggtgatacttaatttccaaaatttcttaatactttctagaaattgttttgttctaagtggatttcccacaagctttatggtattagcaaatacttcttgatatattcaaactgtttaattagcattaaaacccaattgcaaggattctttttaaatatagctttttaaagatcttatttacatggataagagtttcgttaatacttccctttggccaagtgcaatgtactgagtctaatgtacttcttggaatgaactacctctcttaataagagcaatccttcaagcatcacaaaaaaggttttgtatatatatctttaaagtcactaaaatgtctaacctagtcataggtaaagaaatgcaaagaccctaatcttgtaatcttgttttttgctcgctcttcaaaatgtgtatactatgccatcagtcaaatgtggaagaaaaagcaacttagcaaaacagcactatttatcaatttagtagtctctcagatcatacagaaattaacctttaataccttaggactccctgtgggtcagactgtacaattttttatacctcttctaccatattactggctctgaagaactgacaaac

SEQ ID NO: 121933 - DNA, 1087 bp, Homo sapiens
cacacattaaaattttgcctaagtgtagaacaaatgctattgtacatcccttgagttttacacaatttaaattttttcatgaattgtcttacttggaaagagtcatactttccagccttttgacagactttgtgtttactgtgaatgtaccctaaactttggaaaatataataaatatttggtactagaaatatgtataagtatgactacaaaagcatatacatttcacactttgattcaataattattatttaatcattggattttactttatagcacacttcaagaaacacctaacttgaacatgtattcctgtgtttgtgtaattaaaacaaatacgacaacttactttttaacgcctttcttcctctcctccttcgttcccccacccccatcacagatcagtgatttcacttaggtagactgtttctatgaatatatttgaaattttgcttcctcattaccctgcagctttgtctctgttctttttatttttttctgctaattaaaaccagtgtgtaaaacatcttgtatttggtagttgtttgctctttaatctcgccttttctgagcatggatgaaaagttaggtagttctgcatgccattctgcatgaaatgttattaacatgaactatttgaaaatgagtctatttttgtagttaatcattttccgtgttactgtttgtggttgtttgcatgtatactgtatatatgtgtttttgcagcctattccaagcctaaacggggccaccgtaaaactgcttcatttggcaacattctggatgtccctgagatcgtcatatcaggtatcatagaccacctgagttggtctaatagctgtggaaccggaataatgatccctggtacttgtaaaatgcttcttgctccaatttttacaagacatgaaaatggataccttgcatgcagtaattagggagacagattgaaaaactacatttattctgaagcagtcttgaaaagatacctctgatctacaataagtgaggataaaatagaagagaaagtaaacctttttggagaagggagaacaccaacccagaattctaccaacttcctctctacttt

SEQ ID NO: 121934 - DNA, 2245 bp, Homo sapiens
ttccccttctttcttgagctgactccattcagacgtattatgccagtacttcagaattgttcttgtcaaggtcactagttatctctacatcactacatttaaggaatcattttcatttctcatcttgactctcagtagcacttgacctaattcattactttctccttcttacagacagcactttcttcagttggcctccgagataccatactagcctagattccatcttacatctctggccgtctgttctcagttttctttgctggttattcctcatctccccaacctagaaatgttggagtgcccagggcctgctcatttggcttcttcacttatctgtctgcactcatttccttggtaacctcattcattattatggccttatataccatctgttggctcataatgttttccatcttatacctgaactctatactcatatatccaactatttcctttacatctactagaaactcaaacttaatattttccaaactgagttcctgatacttccttcaaactcactcttcctttagtctttccgcatctcaattaatagccctcagttcttctactagctcaggttaaaaaccttaagttattcttgactattagaagactatttaggcatcttggttccttttttgtgctatccttaagtttctcttaaaatgggtttgtttggatatcttcattagcttgaaaagtcttattttatttctgttcctgcctggctagtttataaaagaatgtaagttacataataccaagtgaagcatttgtattatttccagccattagtcataaatgtttctgcttttcctaggctcattcatggacattgcttctacaaatacgagtaacaaaagtgacactaatatggagcaagttcctgccacaaatgatactattaagcgcttagaatcaaaattgttgaaaaatcaggcaaagcaacaggtttgttatgttattacaagtaaaactggtaaccttaccagtagtcacaatattatactaactgaaattaattatttaccatcttctattttataaatcctgaattttcttcctgaaacatgcaaaagagcttacaaatagagacacgtaatgagattctcctaccatttattaccaaatggtttttccttctaatgattgctacctttgccaattctaaatccctatctataataatccctaaatgtaatggttgatggttaaaaatgtaaaatgggtatattttggctgcgctgcccagttagaggagttgttctaagtctatcatttcatgctgttcagatttattatatttttgccattgttgatttttaaaaatatttcaaggagtgagtttattcattttgcctgaggcatttaggttaacgaataattggggcttttagctcccagttctagtgactgccttttcataaagacagtatctgcagcttgctttcccttacccctgtagctccctctcgtacaaacttccctctcctttcagagcagaacaggatctatcagaatcccatttgccatcttcctccttttaggttgcctaagattgctaaatctaaagaacttcagtaattcagattgacctgtaattttaacagagtgaatctggacgtttaagcttgggagcctcccgtgggagcagtgtggagagcttgcccccaacctctgagggcaagaggatgagtgctgacatgtctgaaatagaagctaggatcgccgcaaccacaggtaaaaaggaactacaagtctgaagagtgaaaatgtatataagcctttttggccatggtagtttcagttgtcaaaggttttttgtgtgtgtcttatatttttttttaaataggaagtaggtttacaatatatttttctaagttactagcaatagtttatgcatttatctcaaattccaaataaggaaggtatgacttgtaaaattatttggatgagaaagtatgccttcctcatttacagattttatcaaatgtaattctttctgctcaaacatgagttgaaagtctaagtgagaaattgaaattctgccaaaaccagaatattttggggattttcagtgatactactagatttttgtgctgaactcaaataatagcaaatattttgtttcaaatttaacagaaaaatgtattccagatccatgtatgatttgaccttctatctgcttcttcattccagtgacaaaataatagctaagctggttgtggttaattttttt

SEQ ID NO: 121935 - DNA, 2814 bp, Homo sapiens
cacccggccaatacctgctatatcttattgtcagtggaaaacctacagattctgtggtcaggaagagttcctcaaaatggtatctaaagaaggtacctgatgatctagggaggtgttttatacactatcaagttgtgcttgtgcttgtattttatcttttgcaagtttattcacatttacattagaaattaaaatgtgtttttaatcttaacagtgtgaaagtaagcctacaaagataatttaagttcagatttcagtgagccctgaatttcctgttcaaggctggtgaacttttgaagtcgagtaaaggagtactaacataaaactcattcaggaaaattatcttgaatcatcagaaattatcttgatatcttgaatataccagtataaaacaaggaaactagttacagagttcttataattttcttgggtaaaaagtgtaagagtttgaacaagaacattgagatgcgggaaaaaagctttgttgaagtacatatagaggtatactggatttagcattcttttcactggaatgattatgagagtctttttggtattatggaactgtgaatagtagtttatctgacttattttagtcacattggactaaaagagaagaaatttccaaatagtctctccagatgtaaaaagtttataaaacttgtaattaaaatgaattcctatgtactgctattggatattactacaatgtgatggtgcaaattatattacccatttctatttctctttgtcatgaaaagcaaaaccttgtaagtaagagtatgctacttggtgactgtagttgggtaatagtacacctaggaaagtccgaatcttaagttcagaaaattttccagaaatctctcattaggtcattttagctataatagatttgtattcctcccacacattcatagtctaagcacaaaaatggttttgggattgaacatttttagaagtatcttcaaaataaagacattaaattacagaccatttttttccttctatattggattattttctttatatagtgttactattttttaagtaatacatatttatgattaaactcccatttcaggataccgtaatgttgacctaacagaagttttttaaaccccacgttttattttggccagatagaagtatgatcaggaaagattttggagctagagatgaagacatcagaatgtgagtctagcagccttccaaagagagctaggttatggttaattaatttttgcttattatttctctgaactattaggcttttatagtgaccaagtaaattagtcatttcacagaagttgaatgataacattcattttgcttaaccttttccatttccacaaatgtctcttcttttattgtagaataaaatgttggccttgtaacttttgatgttttttgtttttttttaaacagcttactgctggttgcaggggggacagttctaaaaatttgtgattttggtacagcctgtgacattcagacacacatgaccaataacaaggggagtgctgcttggatggcacctgaagtttttgaaggtaaaatggcaaaagtatggtatgtttgataatctccctcactccttgtgaattcatatgtttttatagattttccccatttccatggttttatttctgcataatacataaagtatacaatgaaatctaaggggatattaaatatagtgttatatcctaaattttatagtaagatttaaatcttctatgcttctaagcatatgtacagttgatcctcattgttcaccaatttcttaattgcaaaattgcctatttgctaacatttatttgtaaccccaaaattaatactcatggtgctttcatggttatttgcagacagtgctttcatgtactcgcagacagtgtgcatgcgctgagcagtgcaaattttgagtcatctaacgcatgcttccagctgaggttgaacaagacaacgtttttccgtcttgtttcagctctcatgctgtaagcaggtgtccttttttgtgctgttcagagccctttttcatttttgtgatttttgttggtaattttgctacttaaaatggccctcaagcatagtactgcctaagtacaagaaggctatgatgtatcttaacagacaatatacatatgttaaattatcttcattcaggcatgagttacagaaatgttgactatgagttcaatggtaataaatcaacagtatatatgaataaggtgtctttaagcagaaatacgcatgaaacaaggctatatattgatcagttgacaaaaacatggtgaccagaggcacacaggaacctacccctgtattttccttaggagcagtgattcagtgttcactaattcagtgttctcagaaactttatagaacataaataccaggaataatgagaattaactgtgcttttgtattggtttcctagcaattaaaaattgagagccctaaagtttaaatgaggatgccttaaaaagaatgcaaatagctgggcgcggtggctcaggcctgtaatctcagcactttgggaggctgaggtgggcggatcatgaggtcaggagatcgagaccatcctgtataacacggtgaaaccccatctctactaaaactacaaaaaattcgccgggcgtggtggcgggcgcccgtagtcccagctactcgggaggctgaggcaggagaatggtgtgaacccgggaggcggagcatgcagtgagccgagatcgtgccactgcactccagcctgggtgacagagcaagactccatctcaaaaaaaaaaaagaatgcaagtaattggacagaaataa

SEQ ID NO: 121936 - DNA, 2327 bp, Homo sapiens
cctatgtagctattttgatctgctatcttagatgtatttctgaaagaacagttatagtttgttcatttgacttgtttctagtcttttagcaaaactgtatcggaagagttcttttaggtgattttgtccaataacctcatcttcttatgaggcttttgatgtcctgtggcagcacctacttactggcactggagaaagtccccagaatatcctgtgattgtattttacatacatcttcactgttagtggactcctagaagacagtcttagtcttaggtcatagataccttttccttccctagtactattcacatagtaggggccaaaagaatgatttttaatatatctataaaatcaggggagtgaattaaattctctctcaaaggccctaagatgatggagcttcttggttaatgcttctgatatatgtttcctttaggtgtgtcttgtgatggaatatgctgaagggggctctttatataatggtgagtgtcattagacctgtctttatctagtggattaaaataatttgaaaaattttaatataaaccctaagttgtttaacattcttcacaatttgccgtcagagtcccaaaagggcataatttttaaaaatctgctaagaataaaaatggaaagataagattctataacattagtatgtgaaatttagaggtctatcaattttttaagtagatggtactttgcatttcattaaaagcatttaagtaaaagtttactttttaaatagattttaaaatatcttcagatttttttctttttgccctctcataactttgagcctcctcattttagaattctttaaccatatttcgatttcactctgctttattttttcttttttttcaaaaaaaaatgtgaaaactcacttcacacaaccttttatttgtagtaatgaaaaaaaactttgtgtagttacattggagaacagagttcttttaccctaaaaataccaaccatatgcagaaatgtattgtctcttgtagcaccagttatataaaacaaattgttacattttattttttaattagtattattttatgtaaacttttacttatatttactgcccatgtgttcatcattgtgatggatatctaataccccattgtcttatttgattgaactacttctggtttttagccattacagaaaatacaggtgcaaacatcttgatatacattgttttgtttctttctgtactgttctctgcctctctcttgtagtagtgtgccataagactgctcataatttatattactttataaaagtctttatctgtttgaaaaaatgtggtaatgtatattgattttacttcaatgtaggaataacatttaatagatgtactattaaatgttaatatcatggcaattatccactcaaaattagtagatattttcatcctttttatttagaagaaaaattaaaaggccaggcatggtggctcactcctgtaatcccagcactttgggaggccaaggcaggcagatcatgaggtcaagagatcaagaccatcctggccaacatggtgataccctatctctactaaaaatacaaaaattagctgggcgtggtggcacacgcctgtagtcccagctactcgggaggctgagccaggagaatcgcttgaacccaggaggtggagtttacagtgagccaagatcgcaccactgcactccagcctggcgacaaagtgagagtccgtctcaaaaaacaaaaagaaaaaagaaagtaaaaaattaaaagcaggactgatggagcatatgtatatgtagaaaaatacccagtcatgtgttctgatagtgcttgcattcacattgtgtcttttgttatatgcaataaagttctttttagtttgtgcctttctttcgcagtgctgcatggtgctgaaccattgccatattatactgctgcccacgcaatgagttggtgtttacagtgttcccaaggagtggcttatcttcacagcatgcaacccaaagcgctaattcacagggacctgaaaccaccaaagtaagttataataatgtgacacccctcagcctcttcctccttctctctcactctcaccaccccgaacccactctctaattcaagctcattattgtacaggagtttctcttttctctatttggcttactcagtgtttacttttaactcaccttcatcatttagtcatttatctaagcttgtattttagatgttgtctttagtgggatttttatttttggtaacctctaccttagattagcatacttctagaatctgttagcctataaaaatctcattttgtgcctgcagtatataat

SEQ ID NO: 121937 - DNA, 1239 bp, Homo sapiens
ctatattttgtctgtccttcatagccggtcttttaacatctatatttatatcgtttctcctccattccctatccctgttgaattattcaaaggctatttttaatttcttaaatatgatagctgaaaatatttattatatgttcctgctttttgtttttccatatcatcttctgtcttctcattcatcttgtctgttttagtttttttttctccatttaacaaatcactttactttgttcctccatgtgtcttttttggttttacttgagaatgaaagggtgtacagatcataaactttcaaagatagagacaagcatgcatttaattatcttctcactttaacaaaaattcatacttgttcagtggcaaatccagatactgttgatttccatgttttttttttttttaatttaaagtcttaaagattgactttagttttttatattgggctgatctatttgattccgattcttgtggtgttttttgtttgttttttgtttgtttgtttaactcaggttgttggaagaggagcctttggagttgtttgcaaagctaagtggagagcaaaagatgttgctattaaacaaatagaaagtgaatctgagaggaaagcgtttattgtagaggtaagttgagatttcatttcttttgtgtagttctgcacttaagatactctgtgaatttaatattatgaaaaagattggtttctcagatgtcatttctttgtatacatgaacatcagcaattcggtttaatcaaaggtactgccataggaacattttctcgttcatactcttaattctgattaaaaattaggggaaaagcgacttaactacataaatgaattcacccctgaattaaaacagtttcatccatggaattcagatctatttcaaggcgtaatattttaattttaaaatagaaaagaaatggtatgctttcccattatctaaaattaagaaattttatacacttactttaaatggaatgtttttagaaactcagattattttaaagaaaaattatttcaaatttgatttttctcatttagcatgaaaatttgcacctattcttttagaaatagattagattgaatgatgaaagaaaatccaataatcatgaaattagcatattatcaaatttatcctttactaactttgttattttgtattttggatcacattatttagttaaatcaatgtttttatcactattaaacctcattggccaatggataag

SEQ ID NO: 121938 - DNA, 1605 bp, Homo sapiens
aatatcaggcagtcatttgggttttttgtttgttttattccctttcatgtttaatacttagttcatttttgcattaaagattgaatttggacctttctgatattgaaagcattacataatttccatcatcttcttcatttgcatacattaaaccagtgttacacaatccagggtgaaccatgaacacttattagctatttgtcaacttagattacacttccagttcaattgtaagataaacagaggaagatgaccagaaacaaaaactattttatgttgcttccaatattttatattgtatgagaatattaccttctaaattaagaaaatcatgtatttctcaatgtaattgaattgtattatatcaatataattagaaactgtaaaaaaaataataattcaactacaggccaaatatgcagccatttagtagatacatatttctaagacattagctgatcttgcatttctaatattgtaactcagtagtattagtttggcacatcttagattcaattcaattcagtcaaattaggtaaggtctcagcctcagaaatctgcctaggtactttttaaacatcatttagtgtttaccatctagaactggctgtagagaatgttggaataaaagaggggatgggttgcaagaagtgttacacagggtagtatagtggaaagtgttctggactgaaaaagaaaatttagatgctgtactgattctgccataatatatttttgtaactttgaggaagtcaccacatttttctgggcctgtggttactcatgtaaactgactgaacaagatcatttaaggtcttttccagttctaaaatgaaaacacattcatgttttccagtatttaactgttttctatagtaagcttagcagttctttaaagactgatcatggtctcctatagaattcagttggtgaccaactaatcctgggttgacagggcaaatgatatcccattgtacagatattgacaagcagtcatagagtttgacttgccagaagccgcatgcctaagtaaatggtaaagctgggaattgaatatgagacttctcacttgtgagtcagttgccctttccactggatttacagtgtcactcagtactttctgaagtactctataaccaaacctaatatgggaaaggggaaacaaaatactgatttcctttttagtgtagttggtcctgagcatttaatgaacattctcatctgtgcgtaatactctgaggtactataaaagataaatagggcttggtgcggtggctcacacctgtaatccgagcactttggagggccagtgcgggcagatcacttgaagccaggagttcaagaccaccctggccaacacggagaaaccccgtcactactgaaagtacaaaaattagctgggtgtggtggcacaggcctgtaatcccagctacttgagtggctgaggcatgagaatcgtttgaacccaggaggcagaggttgcagtgagctgagatcatgccaccgcaccctagcctggacaacagagggagactctgtctcaaaaaaaaaaaaaaaaaaaagatgatagaagaatcctaggattacctccttaaaatgtctgac

SEQ ID NO: 121939 - DNA, 1030 bp, Homo sapiens
gtctaataaagtgtttcccttagcaccgaatggttctcaatttctccgataccgcacagcaatactcgtaatgtttaaatgctcggctttcagttgggctaatgtaggtgaatttcaccataagtaacatagactggtctacgatcaaaagatgtttcaagtagcatattctgaagagataacgaatgatttcggtgacaatcagaatataatattagactagaaatcgctatcagaaaacccatatcctttctttattctgcagtaatttattttagaacaagatatttcaaagtgactttaaagcgtcgtttttcaaattaacaggtaaattgggttctaatgactataaaatttagaaaagtaaaaactgcatatatattttttaaagacactttagaacttgttaaaaactttggttgaaaatactatctcttaccatttatttgccattttttaaatttattaagcactttgcgttatatagtccatgaaaaacctagtgaaatattatagattgtcaacgagttatgtctactttaaaattctaaaattatttttaagtgtcagcaagttcaaagtagtgagataacgttcaacaaataaattttttttcctgtgcatgttttggaagagtaatggattactgaattatatatgttttatcacataaagtaactttagagattattgagaatatcctcattttacaagataatatggtggaaagagcaaggtctttggagttagaggaaagttcagtgtatcagatatgccatttattagctgtgtgatttggggcaagtttcctaacccctttgaattttagtttactctaagaaagggctaataaattctgtttcattttatctgcataacagatcttagtagacattatatgcaaaacacctaccacagggcctgacacatattaggaaacctagttccagagaggaaatgtgacctgctttaaggtcatatggctaaaagaagacctgtattttgaaaagagggggaaatgtttttagtt

SEQ ID NO: 121940 - DNA, 1032 bp, Homo sapiens
gttcgcgcactttaattacgtcaggcgtcctctctcgcggtatcatccggttgctgaggccctgtaataaaggtctcgcgaaatttgttctagaggtccaagtttgcttcttagcttactccaccccacccccaacctgtccctccttttctttccaagtcacaaaattctcccctcccctaccccggagtttacggccctcctcctgtttccgatttcagcccggaaccggaagtgtagtgggcggggcccgtcggcggaaaacgcagcggagccagagccggacacggctgtggccgctgcctctacccccgccacggatcgccgggtagtaggactgcgcggctccaggctgagggtcggtccggaggcgggtgggcgcgggtctcacccggattgtccgggtggcaccgttcccggccccaccgggcgccgcgagggatcatgtctacagcctctgccgcctcctcctcctcctcgtcttcggccggtgagatgatcgaagccccttcccaggtcctcaactttgaagagatcgactacaaggagatcgaggtggaagaggtgagcgaggcccggcatggagacgccggtcccggcctgccccgcccccgcctctgcctggtgccggctctgaaggtgcctcccggggcccctctaattcgcgggaccctgcggggtccacccgggagaccccacagccctcagtaacgtgggagtgggggttactctctgagctcaactgctcgggagtagctgccttttttcctctcttgggtactcttgattttggatttgatattccggtgataaacaggagaatgaactggtgagatagtgtggtccaccagttctcgtatctgtaagtagtagtttcagcgaagatcgtagccgttctggagtttcagtccgctggacgtaatgttcttttttttttttttttttttttgagacggagtctcgctctgtcgcccaggccggactgcggactgcagtggcgcaatctcggctcactgcaagctccgcttcccg

SEQ ID NO: 121941 - DNA, 1035 bp, Homo sapiens
ttaggcttttgattcctccttgccagaaccactagtgaccatatgaactaaagagccaatatagtatactagtcctgagtgaggggctggagactggttaagctgaagagaatgataataggcttatgaataaaaggagactttaaaagagtggtatatacagtagttctcctttatccatggtttcactttctgcagtttcagtgaccatattcagtctgcaaatattcagtgaaaatgccagcaataaacaattcatacatttaaagttgtgcactgttctaaatagcatgatgaaatcttgtgctgtcacattctgtcctgtccctttgtccggggtatccatgctgtagaaactacccacccattagtcacttagcagccatcttggttatcaggttgaaaaaacagtatatagagtttggtactaggcatggtttcaggcatccactagaggtcttggaacgttttccccttggataagggcagtctactgacaaaagatattggcgtagttatcggtgagcttcttaatgtcctagaaaattgtgttaccaacttggtcaggttatcattgaaaagaaaacagctagctttgtaaccacaggaagacatttcattttaattatctctaaaggttccttgtatgtaaagtcaccaaagcctacttgtctgaaagcttagagctggatttccaattctaggcctctatggaagctatcagatgatcacattcctttgggggcatatcagagttccttaagacaaatgattaattgtaatcttccttgtctagagtatgttttttgaatatagactttcctgggaaaataagaggttttcctgttagcttatttgatgagataattatactttagtgttgcatcactatggttttcttaatagtattctcttttcttatctgatgccaactattcttaaaacttgagtagagtagaaagattctttgattttaggaagaagaaattaaagttgaaatttatgcagagtaaaacgttttaaagaatgcaaggt

SEQ ID NO: 121942 - DNA, 1039 bp, Homo sapiens
ctaggaaatgaagatattttattcattctataaatgtatgttagatgaatgaggtcacaattagccaagttatatattatatatatattttaatatatagataaatatgaaatatatattatatattatgtaatatatattacgtataaggtgcaatacacaaaccatcacaatagtacacattcagacttatgataaagtaacatgtgaagagaaatgtgtggatggaaattgctaaacaatgttcgggttgctctactacttctcttttctttgtttctcttttctttagtgtgctttctcttctctctctttttggtgttctaataaaggagaaaggaagaggtataaaatgttgggaaaatatcagaagttggagtaggaatgaagcaccacaaggaagctaacctaagtaaattgtccctttgtcatccaatgctcataaaaaaactacaaattatttttagatttctaagttccttgttttggaattcaagttagtgcccacagtttaaagataccaataactcataccgtcttggaggcaattgctttaagttgatttactttgatcaatggaggaggcattaagttggtttacctttgtcccagatgggagaagtaggatctataatggaacaaaaacattttctaagatgaaaacttgtgggatgatgagtttcccatttcttttgttgcctgcccagaattcaggtgagaactcagggttttgtaattcaagcattgattaggaagtgtgtaaactagggttcatttgttaaaagcaaaattaaatatcttaggcaacttatgcaagaagggaatgtattgaaaggatttgtgaaagcttggagttgctaatagagtctagtagacctatggtggaaaaaagaaaaatccaggcaactccaaaaggtctagttggcaaaaccactccacaatacaggcaagacaccatcaatggaaagaacaaattcctactttatttaataaatgtttattgggtactcataagatctgggcagggggatactacaag

SEQ ID NO: 121943 - DNA, 1023 bp, Homo sapiens
ggataatttttttttgtatttttagtagagacgggtttacaccatgtttgccaggctgatcttgaactcctggcctcaggtgatccacccacttcggcctcccaaagtgctgggattacagatgtgagccacagcacccagcctgtcattgtttgttcaatatactcttgccctaacaccacacaaatctcaatcagttgagttgccttgtaaacttgaaatgatgaaacttgtaatggtattctaaaaatcagataaataactttaaatacgcatagagattcaagatgggtagacctgatgctgctgaactaccaaccaaaaatgcacatatgtatttatggtattgccataaataatatatcagttattatacatatttaaaatgttcatttctttttataacagggtggaaaaattccagtaaggtggacagcacccgaagccatccagtaccggaaattcacatcagccagtgatgtatggagctatggaatagtcatgtgggaagttatgtcttatggagaaagaccttattgggacatgtcaaatcaagatgtaggtgttacattcatttaaacaaaaaggattgaatacattaatggccagtattactggaacatgtaggtaaaggctcattaagaacacttttaaataattataaaaatacagttttccacaattactaccacactaattaccataaattagtggttctactaattttattattttggctttcattttgaataatcactttctctttttataatataaattctatggacacaaaatagaagcttactaatgatatttcctccttaataaagataatgtttccacacttgcacagctggagtgggagcatcacatgagtaaaagaatcatttgtgaagaggagggaaggaagtttggttgtgctttgttttgtctttgaagcttatctttttcttttagtgttctaagaaaattctttaaattatctactgttgattggtttaagttttagtttcatgggacaat

SEQ ID NO: 121944 - DNA, 1046 bp, Homo sapiens
atacaatttctacagtttcacaaggaggttagctaatcaatgaaatggatcagtgatttctcctccttcaatgagcagcccattaatactagcacaaaatacatgctagacagttcaccactgagtcacatctttaattatctatcatactttcttattataatattttatccaatttatccctaaatatctagtaaatctgtactagtaagagggagcctcagcatagaatatttttcagcttaccacagaaattgaaaagatatataaaatcaacttttattgctgtatagatattatttttcatgtgaatttataattgtcagttatcaattattaaataaagggtataatatttgattatgaatatatgtaatctttcaggaaatcttattgaatctaccttccaaatatttgtaaaacatgtgtatatggaatatgaccactttcttcacttccacagctatgtagcccccagcatttcctatctggattactgcaaaacttcctagtaggtcttcgttgttctatacttgactctacatccagttctcaatcacagcagttacatcctttttaaagcatagaccattttgttcctctgctcagaaagctgctgtgagtccacatctcactctgagcaagagtagaagtctgccaggctttatgtgatctgctgcctatcccacctcctcagcgtctgtggtctcagctcttaccacttaccccctcattcatgtattccaggcatgctagtctctttactaatccttaaaacacaccagaagtgttcctgtctttgggcctttgttctagctgttcctgctcccttaaaattatcttctcctggatatctgtttggctaccaaactcatctctatcaaatcattgttcaaaccctgcatgctcaatgacagtgtgcaaacaaccttacttaatataacaacttgtaacttcttaacatttttgaccccctaaccctactctttctagagtattttgcaacttccacaccataaagtttccttagttgttaaatttattgt

SEQ ID NO: 121945 - DNA, 1005 bp, Homo sapiens
gtaaagacgtgttcattagttagagtaggcaaatgaataacatgtaaagccatattttctaataactgtcatttaattggatattttgtttcatctttcttctcttagatgcataataaacatatatacgataactcaatatagaaattagatttagtatccttctaggtaactgaaattaccctgccatccttataaaacagtattttttattgttcttacactgtaaataaatgtactggcaataaagaattaacagcacatccaggaggactttatttaataatgacaatgtaaaatacttcttgtgccattctatttatctaatttataactctatttgattactccagcatgcctttatctgtaagaattgcaccctagggactagtcaacttattaattcatcacttgtcattttttatggttgcaatctccattatagtatgagcatagagtgatactctcttctgaaagctgccagccaactggttccagtctaggtgaccttttgtttgtaactatggtcctaatggtttttctattggcttctatttctaatagattacattacaatctacttttttgtcttatggtatcatgatgaggataggacagcaagagtgaattccacacctgcaattacagagttttaaaaagaggaaagacttgcttcaagttaacctgtaggctttttaaaaaatgccttttgatttatctgtcacctgatccatcagcaatgaataattttcatggaaggtgcactttaattacattcccatttgacttgcattatcaagccctatctaggtaattaatctcaccaagtatccaatttcggcctttattgctggcagacagaccttcagaattatgtgtgcttgagtgggtcttgggcctttttcaccaggcaggccctgaaagagatctgaggccttccaaatcttgaaagtatgcctatgaattttttctcttagatattgtgaataaattaaattatatttg

SEQ ID NO: 121946 - DNA, 1042 bp, Homo sapiens
agagtgtcagtagcctcctaatttatttgtgtgcatttgatcttgctccccttcattattttttctactcactctccagcgtcattttttaaattgcaaattcaatcatgttatgattttctttaaaatatatcatttcctcccatagtttctaagatctttcttaatatttaatcaaaatcctttttttacttacctttgcttatctttttatgcatcacctaatgacactgaataaatatcctaaatgttttattcccccctgtgattataatatattgtaattttctgcctggattgttatctctttacagaaggttcttctaagcttatcacccttcactattctccccatttccttctgaacaagcccacagtcgtgctggtcagagaggctttcaatatgtacccactttactgtaatgtgccccattagattataggttactacaaaataatagcatttctttatatccttcacatagcaccctgcctaactcacctaatgagtaaatagaagagcaatgattacacatataaatgaagtcatttagataacttctgtaaagcaggaagcaccgattatatgtccttatccaaaatgtagtgaagtaccaacaagtgattttgatgatggtaatattgataataatagggattctcttccagggtgagaaaatgccttttgacttttgaaaagatgtcaacttaaatgtccaagaataggggattaagactattatgaatatccttatggtgaaatgtcattgaaactcttaaattatgtcattaaattatatttgctttcatggaaaaatgttaatgatattagactaaggaagaaagaagtgcacaaagtaatgtgatacatgtttttaggaaaagactggaggaatatacaagataatgttcatgtgggtcatcttttgttggtggactatttggattactctatgttctttatattttcctcctggatcatgaattgctatatgtacatgtgtatgtctctgtgtctatctatctattctatctatctatc

SEQ ID NO: 121947 - DNA, 1066 bp, Homo sapiens
gtagctcagatgccggagtcacagtttcaaaatgctggtttcacaacttattaggtgcataaagtaggacaatctctccaaaccttaatttccttaagtataaaatggggctaatagaaaccctcatagggttcttgtcagaattgaatgaagtaatgtatgtacaaatcctaaaaatagcatgtgggacatagcaaataatcaatgaatgcttatcattaataataaaacaaggaatttgctaagtaaagaaacctcatggtgatgaacaaatgaacatgtatctcacaggccacaaatagttaaatatcctttaagcaagtaatttcacacctgttaatttatctaagaaggcatttcaattaaaaaatattttacataaccctttttttccaccagcagtgtatgcaattttaattattgataataacctaaatgtccaaagttaaggtgtatcaccttgattgaacttactctatagaatatcaatgatattataaaggaattttgaatttctattaataattttgaatgaaaaacaaaaatttgtataaaatgacatttagaattatgcaaaatatacataggaaaaagagtagatggtagtctaacaatgaatgtatccatgtagtgggattgtgggtgatcttttgttctgtctataattcaaaacatcttgaacattaacttttatttttgtacactataattttaagttctaagtaaccaggtagcttatataaagacaacttgaattgtatctccaaaatatgggtttttaaattaagtttgtttatgtataaacacagggctcaggtactatagcagtagtaagtggcaaatatagtttaaattatataaaaggtagaagatattaatagaaggcattcaataaatacagctcatagattttgttcgtttttagttgttaatagataccaaatcctattttaagtacttgcatgtattaagtaatttaaccttaaagggaggtgttactaatttagtctaatagaatgagactattattacccagtttaaaagagaaaaaatactcttaccgtga

SEQ ID NO: 121948 - DNA, 1045 bp, Homo sapiens
ggttctaacaacaaaaaagtaaaacacactttacttaaaggcacagctcatttcactgtccgggctccgtgcttggtagctgagagaaggcttgcttcgcctctggtttctaaaagatcgcgcggagtacagctatagaaaagagtgtaagttgggagcgttattctcggatttattctgctacgcgaaagctgcggttgctaaaagcagagcgtccaaagcagcacacacctcggctaccatcctcgttctcctctgaacatccagcgcgagctcagaacctggagggaatcctggaccagcaacctgactccgctcggcaccgattggctcctgcctcggaccccgcccccgtggccggggcggccatttcgccgggacccgccccttggccctgggaatcgcctcctggcaggccggctgtgcctgccactcagcccgagtggcggaggctctcagctcggagccccgccccctccccccctaattgatattattggagtgtggagcaagcggccggtctgcagtcggagacttgcaggcagcaaacacggtgcgagcgaacaggagtgggggggaaattaaaaaaagctaaacgtggagcagccgatcggggaccgagaaggggaatcgatgcaaggagcacaataaaacaaaagctacttcggaacaaacagcatttaaaaatccacgactcaagataactgaaacctaaaataaaacctgctcatgcaccatggtttttcaaactcggtacccttcatggattattttatgctacatctggctgctccgctttgcacacacaggggaggcgcaggctgcgaaggaaggtaaggtgatgggaaagcaaagtttgttctgacttatttatttagatgtctacctgcacaagccagctcgtccgcggcgctgccggccgcgcctccggcgccgggcgaccctcccccgccggctccccgccccctcaccgctgaggccgctcctggcggaccagcgagcgcgaaccagggctgttccgagccgcctacagccctgtgcccgg

SEQ ID NO: 121949 - DNA, 1050 bp, Homo sapiens
ggggtggaaccctatgtgacactggcttggtcctattttatcacattttattgctctccattgatggagtggtctccatcaatatgctgttctttgtgaaagaatgagcatttgtctggggcactactcaaccccacatccattccatccattaattaagtctctgtctgcagagctgcatgtgtagcagtgcaggcagcagtggcagctgctgtggagctgtcaggcgagagcccatggttggcttcaagtaaacaaagtgcagagcagcaccaagcccgtcatctgccttggaaccattgaaactggcacccaagatcagctgcaagtgccattaaagggaaattgcaagaattgagatcttatattgataaaaacttcctaattgcattgtggtaatggtatcaaacaagaaaagacagaaccaaatgacagaagatctgtccctatttctaggaaataatataatttgattcatcgtatggcttcatggtaaactactccctgttacaacaaaaccctctagtctaaattcttctgataccaacatctttaatagtaacatgccttcaagcaagatctccccaagtttcagttggggagatggaagaaggaatgaagctgcagtgctgctccttgtcatttctagcactaaaccttaaaaaaaaaaaaagattccagagtcttttaagttcacaaaagtagaaaaccactaatgtaagacatattgtaaggctggaactacaatttgactagtgtcaacagtgaaaccatgcaggaagccagcatcttcggaagatgtgattgatgataagccagaaccagataatctcattgaagaagacctcaattttgtgctgaggaatcacttatctcaaaaaaaaaaaaaaatctatagcgacatgtacatatgggccttctcacccctctgttgaaatttactcagtatcttcaagttaaaatgcagatagaggtccattgaaacaggtagtaatttcaacaacagcaaaacaatattcacgctgccaagagagttgataaatagaacaa

SEQ ID NO: 121950 - DNA, 1014 bp, Homo sapiens
caaatactctttcagtgtatcctctcctcaggtgatgcctttgttcttattggaatctgtgtaagagaatccaatgacctgacctgtcttctgcccagagaccatggagatttagcccagtctctgcttgccttccttttccatggtgtgccactggacacacttctgaataaaaatctttttgcctttctcaacatcactcatatttaattctgtcttttattccttgcactgcaaaggttcccacttggaagccagacatcctgttctatcctttgtgtaattggtagcacttaacaattcattgtagctaaagttgtttttagtaattttgtcttataaccctcacatcatagataaaattgctttatacaccactttttaatattagagaatttcaactatgactctttattatttattgagttatttgccttcatgtgttttatgttattaattagtagcccttcgtctcaacttaaataaatccctttagcagtttctctagggctgacctagtagtgatgaaatctcttagcttttgtttgtctggaaaagtatttatttatctctcatttctgaaagatagttttgctaggtaaagtattcttggtgggcagatttttaaaatttttcttcatcattttaaatatatccttccactctcttgtagcctgcagggtttctgtttagaaatatgatgacagtcatattgaaactcctttgtatgttatatgtttcttttcacttactgccttcagaattccttattttacttgaattttgatagtttgaatattgtgcatgttggtgaatttctctttggattaaatttaattagagatctctgatcttctcatatctgaatgtatgcatcttttctcagatttgggaaatttacagccattaattccttaaatatagtttctagaacttttaaaaattcttctgtgcttcctttctgcaaaggttagttctcttgatgatgtcccatgattcctatatgcctgcttt

SEQ ID NO: 121951 - DNA, 1093 bp, Homo sapiens
tagattggtttcttggccatttgctggcccagagatttttgaaaaagttaccaactgctcagcttcatcatttgtaaaatgaggttaaaaaaaattctgcggcctggcgcggtgcctcacgcctgtaatcccagcactttgggaggccgaagtgggtggatcatgaggtcaagagatcgagaccatcctggccaaccaacatggtgaaaccctgtctctactaaaaatacaaaaattagctgggcgtcgtagcgtgcgcctgtagtcccagctactctggaggctgaggcaggagaatcgcttgaacccgggaggtggaggttgtagtgagccaagatggcgccactgcacttcagcatggcaacagagtgagactccatctcaaaaacaaaacaaaacaaaacaaaaaacagaaactaaacctcactgaatttctgttaaccagagggtacaagtgtttacaataaaactgacctgggcaaggattgattttgaaactgattttgaaagttccagatgtgtcttctagtattgagttatatttatctccggtggcttcatacaaaataaaattagaagaaaacaatatattttttaaaaaaagcaccagaagtctgtgtgatttaatttagttaattgaaagggaagtctttttggcttttgtgagttacatgataaaagcaaataatttttgaagtactaattcataccaccctgcttctgaatctcttggggtctcttagctagctggatatgtccaataattttttattagacatcactaagcttcaagtcagcatttcaaaggattaaaagcacaaaactcaaaaaatagaagctacaggttcaaaagaacctattgtgtatgagtaatgtaaacagtcttttgaggagaaaacagattttcagtagccaatactttgagtaggtccctgccttggaaagatatatctgcaataaacttgtaatattttctctatggtgacttataatacttttcttttattgaagctaaattagttcctccacccctttcctgcaagatcagacattttaggcatctcaagggtcattgtggttttacagcgttgaa

SEQ ID NO: 121952 - DNA, 2238 bp, Homo sapiens
acatagtgagaccttgtctctacaataaataaataaatgatttttaaacagaattttagttcacatacatagaatgttcccttcctacattcagcatacatgtaatctgttcaagtaatgaaaaacatattttaatttcttaaataaaatttcctaaaggttcgtctgactaaacgtaattggcatgtacatggtgatatatccaaatgaatattgccgtttattctagccatagacccttattgtacacatttatatatgatgatataattaatgtcttcactttcttaatttcaccaatatgtgatgaaatcagtattaattattcaatgtaatgaaatttatggattttagttttcgtgttgaatatattggaaaatactgttgataacacttactaattatcttttttcaataaattgcagcaaaacacttactattttggagtttaaagtatgtcatcatggcaaagtttcggagaaggacttgcatcattttggcactttttattctatttattttctctctgatgatgggtttaaaaatgctgagaccaaatacagctacttttggagctccttttggacttgaccttcttccagaacttcatcaacgaactattcatttggggaaaaattttgatttccaaaagagtgacagaatcaacagtgaaacaaataccaagaatttaaaaagtgttgaaatcactatgaaaccttccaaagcctctgaacttaacttggatgaactaccacctctgaacaattatctacatgtattttattacagttggtatggaaatccacaatttgatggtaaatatatacattggaatcatccagtgttagagcattgggaccctagaatagccaagaattatccacaagggagacacaaccctccagatgacattggctccagcttttatcctgaattgggaagttacagttctcgggatccttctgtcatagaaactcacatgagacaaatgcgctcagcttcaattggtaattattgtatatatatatatgtgtgtttgtgtctgtatatatgcatataaatgattttttgtgtaactttactagttaattttctcattattattaattatattgttaagctcatacctccaaattaaactgtatgtatgatcttaaacatccaggcaaccacattttaacactgcccttagtgtatattgtttaatttttacattttggagcatttctggatatattgttgatttctaatttaattcactttctcaattttattaaattatgatttacataaaatacaatgaatttcccactttaagtttatagctcattgatgttactcaaaagtatatacctgtttgaataccaccccaatcaagaagtaaaatatttctatagcccaaaaagtctcatcataattcctttattcaggcctaccttctcccctaccgctgaaaactgtatacatatcagctggatctgatttctatcagatctgatttctatcactggagaatagttgtgagtgttctattactttatgaaaatagagtcattcagcatttgtatgtgtgtatgtcttttgctcagcacaatattttgaactgcacttaactatatcaatagcttagtcatttttattgatgagaagtctcctattgtttgattttggcaaatttgcttttatattcacctgttgataggtgtttgggctttttcaaattttaggcatgtagcatgtaatttagtcctgcttttctgtttcttaaagttattctgtcagtcttaatgtctgtttatttcatttatgtttaatgtaataatgatatgattttaaatctgccatttttctgtttattttccatttgtcccacacgtctgtttctttttttccttctttttcttccttctcttacattacatatgcgtattattctgttttatattttcttctggcttatgttattcatttgttttatttataactgtacctttttacaatacgcccctttaacttaactgattcttattgttgttcccaccgcttctcacctttctcttctccttccttctggcactccaattacatatatttagatagagtcatattgtcccacaggtgaattacagaaaaaatataacttggtgcctgaaaattcttcagtttgttaatatagtctttgtaaaaccttccagtttcagtttcatttatctttttagtgcccctaccagtagagct

SEQ ID NO: 121953 - DNA, 1051 bp, Homo sapiens
ctaatggagagcatatggtataatagatttgtcaaaacctgtcgaactgtacaacacaaagtgtcaaccctgatgtaaactatggactttagtgaataaaaatctttcaatattgggtcatcaattgtagcaaatgaaagatgttaattataggagaaaccgtgtggagggttggggcaggtaggaggaagagtatatgagaactccatattttctttgctatttttatgtaaacctaaaacttactctaaaatgtaaagtctgttcacttttacaaaagcttattaatgcctgataaagaggtcataaatattgacaaagtgatcaaatagccatatgtattctgaaggaacttaacaaaaccacctcgtataaatatgttcttctattgttaactctttggtacttactgtgcctttttaagaatatctgcattcatgttcttgtcttttccctttctttttggtcttttctattaggtgtactagccctctcttggtacccacctgatgtaaatgatgaaaatggagaacctactgataacttggtacccactattttggataaagctcataaatataacctaaaggtattttattttattttcaagctatacataagttaattcttttggacaagaggagagtaataacaatttttgaaatagtaattttaattaaaaatgataatgacttagaatcttttaaatactatatttcataaagaaaatttctataataggaatttcaatcttatctaaattatattttagagattctttactatgtttctaatgttttatttttttatagtagaaagggattgaaaggttcttttgtgaagataatatagtagtgaagatttatatgtctaaatatcttagatgtcaaaaatctaaaaacaagtattaaccatgtaactttgcatatttataaagtagttaaaaaataaacttgctcaaatatttttcaaaatccaattttcatttaaaccttatttaatgtgcatacacatacacacctgagtaaatatagaatacagcagaaagatc

SEQ ID NO: 121954 - DNA, 1075 bp, Homo sapiens
catgaatataagtatgtccgtgattcttttttaaatgattttcacctacatttgaaacatgttatattagtcatggcctctcctttttctttttccttgttaaatgaatattgtgaattcatggcagaaactttgggaatcttacctaaatccagtataagtgacagacttaagagtttaactgttgtttgtttttgcatgcaaatcattagtccatttatttatgcatgcattcattcatttagcacctgctacgtgtcagatacagtcccagatgctgacaatattaagaagaaggatgaagtattatctctttccctaaaatgccttgtaatctactggaggtcagacacaaagacaagtaaatttcaggaagagaaaagtatgaggtattatggcaccacataggagtaggaagacctacctcaattttgttgtggcaggggataggggagtgtgcaggggtgaaggtagagaatagagttggagaaggagaaagttatcagattttcattcaaaaaagttcattttattaaaatttatttattaaagttattaaaatgcagggtagggaagagacaggaaaggtcaaaattaaaaacatgaaatgagggaatgtttatattcttattctttaaagataagaaagacatttcattttatgtatagaattctgttattttaaaatttattttaacattgatctaattgatttttccaaatggaatagagagatggagactagatcacatcattaattaaaattgcaaagtaatggccgggcgcggtggctcacgcctgtaatcccagcactttgggaggccgaggcgggtggatcatgaggtcaggagatcgagaccatcctggctaacaaggtgaaaccccgtctctactaaaaatacaaaaaattagccgggcgcggtggcgggcgcctgtagtcccagctactcgggaggctgaggcaggagaatggcgtgaacccgggaagcggagcttgcagtgagccgagattgcgccactgcagtccgcagtccggcctgggcgacagagcgagactccgtctcaaaaaaaaaaa

SEQ ID NO: 121955 - DNA, 1039 bp, Homo sapiens
actcggaattcagatcatcaatattacctccaacaaactgggtgacctggaacaacttactgaacctttcttaaggttctgtctatctttgattacctcactaagaaaacagaaataccttagggagttgtgaagattaaccaagataataatataaaatgtttagcatgttatttagcagtaaattttattggtaaaaattctctggtagtttctgtgttcaataaatattcatctttaattaaggtgattaaatcagttactttattaaatatattaagtatacttctaattttacattatagataatttatcccctaactgattttattgtttgttttaggttacttttcacatagaaccatatagcaatcgagatgatcaaaacatgtacaaaaatgtcaagtatattatagacaagtgagtttcttcaatatttataaatattgttatattatccagtgataattattgttttaagaatagtacattaaattatatttgagatttgaatgatttatgattattccatttttaataaaattaaattgttattgtaatgaatgtcaccatcatttcgaagaacattgctgaagtttcttataattcactttctttttggaagattgctgtttttactgttttacaggtttataggctatttatgatttctgtagttttgatattttaaaatgacattattttctaaaccttcagaatatagctttatctttttaaaaagaaggttcagattattaaaagtgaactacttcttttaacacagtagacccagagctgatattttcatttatatctagcctgatcaaaaagaatttattaatacagttttcattttttgaaagaattttactgataatagtctgtgacagatgccatagtcttacaaagaaacttgtcagcaacagtagaacatttatcactgatagataaaaaagcagtttaggtattatgtagagtattatttataatgtagagacataggctttttatggcattagtcatcatttgtaaacctcaa

SEQ ID NO: 121956 - DNA, 1097 bp, Homo sapiens
cttctggtagaagaaaaacataagtatgatattcttcaaagtggttttgatggaatttacacatattttgccacaaatggctttacttatggctcatcacatcagaattgggctagcctaaaattattttgtgataaatacaacttaatatttatcccaagtgtgggcccaggatacatagataccagcatccgtccatggaacacgcaaaacactcggaaccgaatcaatgggaagtattatgaaattggtctgagtgccgcacttcagacacgccccagcttaatttctatcacctcttttaatgagtggcatgaaggaactcagattgaaaaagctgttcccaaaagaaccagtaatacagtgtacctagattaccgtcctcataaaccaggtctttacctagaactgactcgcaagtggtctgaaaaatacagtaaggaaagagcaacttatgcattagatcgccagctgcctgtttcttaatgcattgattaaagtttaatagttatcaaaatcacctaatttttaaaaatagctttcgttttgagttctggaaagaaaactgtcaaaatcagtatatactattagttatatttaaaaatatttttttaaattctttacagataatattatacttgttacccttcacaataccacatgagaaaatatctgagacaaaatgtatacaaatatattccttatggcataatttattgcatttctgactgaaatcaaaattctgatttgatggcaattgaattttcattttacaatagataaatgcttgtgctacctaaagcacttagcacacagttaaattatatttacatcctagacccaaataaataggattgtgtgtatatttgggatatctattgaagaaaaaaagaaaaccccttaaagataatgtacatgcttcatgtcatgtctttaaaataatttaatcaactttattgtcttagtatttagactctggataactctacaataatgaggaaattcttaagaataacaaaatcactgtaccttcctctcaattttgctgtgaacctgaaatggctttaaattaatactcttattttttatttaattta

SEQ ID NO: 121957 - DNA, 1051 bp, Homo sapiens
ctttaagttgttactattgtgttattcatgtctttaaatcagataccaaatattttttaggaaagaaaaatgttattactgtcattaggttgtcttttaatactttaagttattttgacgaaaagtaatagagaaaatttacttagcattttagattctagagacatggaaatgaaaattattttatgtctagagtaggtcctgaagtttggctttacattaagtttagcactgtatcagaatgaagaaactaatattttacataaaaactaatactttcaattttttatatagtaatatccccattttgtaaatgttagacttttatcatacctgtaagttaaaatacttgttatcaataacttgtcatgttgtgacaaattgatcacttgtgtacgaaaaataaatctccttaaaaactaaataaaatgcactgtattcttacagttaatgtttataactatagtaaaaaattaatatatatcctattacataaatgttatttcttaggtgttccattaagaagagcaatagaataatgctaaaaaataatgcctataaatcttcagagtataaagacatccattcagaaacaaaaattagcactaaattttttataaaatagaccagatgacaaaatttattttatttttaaacagtggttttgacacaaattatgttattgaaaagcattattaatgtttaatttatttaaaattttggaatttgccatttctcagagaatgatcaggccttaggaaattaatacagtagtagtaatcattttctaggggaaaataaaagaataaatcactatactgatattttgatacaagcaagcacttacatggtaatcactatatagatccaacctgtggattttcttcttatgtccatttaactagaatatattattttaggtataatttacaaatgtcacacctaataatcttttataatataccatatttcattaaagttttgttagagaagtatctaccacagaggagtttttgtcattgtgtacgttgtgtatttgaacccaccatga

SEQ ID NO: 121958 - DNA, 1041 bp, Homo sapiens
taattacagtcatccctcagtgtctgtgggggattggttccagttacccctatagataccaaaatctgcagatgctcaagtccctgatataaactggcatagtagttgcatataatctatgcacatcctcctgtatacattaagtcatctctagattatttataacacttaatacaatgtaaatgctatgtagttgttataccatactggttagtgaataattacatgaaaaaaaagagtctgtacatcttcagagtttcagtcggcaatttcttggccatggatgtagaacctacagataaggtgagccaactgcattaggaaataactctaataattctgttaattcttagagaggaaaactttcaaaatcttcctcaggtatttattacaactgcctttaccattttagttgtaacacagtttaaattgttatgataacaagtaaataagagcaaagaatgtatttcttaattcaaaactatacgtttgaattcaatatggtataacttaaagtggtataatacatacaatgcatgaatcataatggattcttttataagttattaatttttatggtttaatcagtctaattgttttgactgttatagaaaccaaatattttactgtttcttttaaggactaatattgtcaaaaactgctgttattaacttcacttgagttgtttaacttccttctgttttaagattgtaattaaaaattactattttgttatatggaatggttaatttttacctaataaaaacatagatgaaatacattgtattttagatattaaagtctatcatttctctttatgaaatgtcttatttgatttccgattaacaaatgaaaaggagtatccagtcatcattctttatgttttctcttttgagatatgcagcacttacaaagtggatatctttaactgcacatactttttaaatctataaacttgtgttaggttaatatacacacatacatgcacacaaagtttttattttttttcatttgagagctgtttttctatttttttttctt

SEQ ID NO: 121959 - DNA, 3171 bp, Homo sapiens
gggagagtgcagggggtcgggcgtcaaagcttggcgcggagagaacatcttttggtttgggaggcaccccaaaccagctgctgtgattccccgtcctccaggcagagggtccagggagggtgttgctctgtggtccccaaggggatgtttgatttcaactccacctgctggcaacctgaacccctctccgtcttggggacagctgcctgcagctcgcagtcccgcctcaccttccagcccccaggctcccacactagcagcagtagatggccccgaccctctggtcaccccaaacagggtcatctctactgttactgtccctgcgttcccaccttatgccagtgcacaaacgcccctatctgccacccttcacccgatctcgcgctgacaaagccttctccacaaagtcctccctgacccaccttctctcctttcccaaagcctggctctcgagcccgactgtcccgtcctattccttcccagggtgaatggtccttagtgaattctgacctcattccctctacacaatggtgcctgtccagattttctgacagtcacctcaggaaattgacacagacacgctgtgatcctggtttctgtacagttactttgtgtgttactcagcacctgggctgttaagggtattatcaagcgtgaaaaaataaagacaaaaaccaaaccctttggaaacaaactttttgttattgttgttttaaagcgcagaactatttgcattgcttaggtttgttctgttcattgagaggcgtcttagctgagtacaggaaatacacctattttacctgttcctgcggaattggtcttacttccaggttaagaacggaggacttgcctaggtggtgaatctctttcagcaacaacactatcaaaagctcagcaactcttgaggataagaagctttttcttgaaggagatgagagtagcaccaaacttaccctttaaaatcttctttgaaattgcaataagccaaagctcttatttttctttaggtgtagtggctaaaagagcgatataggaggattagaaaacattgtaccaagaagctcctgcactatttgggtgcttccagagttgtgtagtatcttagcaccagacggtattgctgtagaagttttcttagaacagtagtcgtttcttctgaaaccatgtttaccgttttattatttctagttggagtgcgagaaaataaagagttgtgttcgatgaatgaatatgagcaagggggatggagtgaacatcgggaggggtcatttaaataataaaatttgtgctctcaatttctcatgtattgaaatcttaaaaacaaaactaccccacaaaatttatggtttaatattttagagaaatgatgaaaaggcattcatttcaacatggcattgtactccatggaacccttggtcacagggcttgtgttctaagcaatacggataagaatatccagaaataaatgttaggaactttaaaaggtgccccactgaggcatgcagtgtgtcaatataaatttcctggtattattatcactataatttgaggggaatataaattaaagtgccattcttgctcttgcagttggtggagagagatgtatgcttcatcaccttaaaggagcaagtctcaggctacataagaaataggaagggaaagttgagccatcatctagggaatttgttagttaatattgccttaataccttctccaatgtcaggaatttttgttggtttgttttcattcaaactgtatctgagattttatttcccttttgtgtaagacataggcagaaatgcactgagcaagtccactgacaaggggtggttttaagtaaatgtggatagccgcattaaaagtcaagaggggctgtgaataatgagtttattgttggttttctaaatttgaaaattttagttggttatatttagggcttgactgagaacattcaaagctgttctcatttgggtaacattagggtgactactatgcacagtatatccaacagtaattaatctgtatcagaatcgatacatcccaaattgaaagcaaggagtaatactttgatcagttattgcccataattatgttaatgataaattaaagtcaatgtattctaatataattccaattaacatgaaaatattaacaaggtctcagaattatctatgagaatccaaataactagtctgccaaaaattttggcaagaatttctataaagaattatggtgagctgaaagtcaagaagatctgccaggatttaatgtcattggcattagtaagaaaggctaaacagttaaatataatgtatggggaggtaaggcacaccaatattggaatggcatatctttgagtaccattgaactgtatcttataatgctcataattatatgccacctagaggatgacgggtttaagtatttgcaatgttaaatataaattaaacattataaagagatatttaaaattatggaaattatatagattattccatcaacaagttgccattggttgaatgttccatgtgaaaccatgttttgccttgtgtgtgatgaagagaaagaatggttaaggaagagaaagctgcaggaagggagagatagagagaaaggcttcaaccccttggagactggcttaaattctttaatcaaattaaggtaactaaatatgagttctattattttggtatttagttaccttatttgattctttaatcaaataaggtaactaaataaaagttctattatttggtattattttggtatttggaatagcaattgttttcccacttgaattttaggatatgactccttaattatagcaataataatacaagttttttaaaataaagccttttattccttttatttagtaaaatctgagcatcagaggcaaaccattttgtgtaatccaattgatgaattgaactaaataaaattctagacaaatttacaaaaataccttaaaaaaagcacacatatttacacctcacacatacctaaaattataataatagataaagagctaaacaatttagtgtcttatgaaggcaagaggattcagtcaagagataaccacatacaatatttttatactctaatatatatttcttgtattttctttttcattgcggtggatgtattattacgtttttataagtatttgca

SEQ ID NO: 121960 - DNA, 1267 bp, Homo sapiens
ttcctcacttatgcagtgtaaggtttttcatgttaatagcatgtcatggacacttccatataagcttttatagacaattgactgaaaaatattcctaaaataacagattttagtttctgtaagcaaaatgcacttacagtttcatctccatgctgattcaatatttatgtcatcacagagaaggtttcgtatccatatgtttatttatttttaaatttttacctccatagactgtgaataactcaggtggtcagggaaggtaaatttgtttcacaaagtttcaagcccacagatgaaaatcctggcacttttagctttctcttcactgatagccagagggatcaatggaagtgaatgactaaatcaataggaaaccatcatcattactgcgtaaaaaaataagctctaaactgtattcttggttatggtggctcatcaccatcatttcatctaggaagaataacatggtgacatattttgatatctccattacattttctggaacaacactatattatctaaacgtgcttggactgatgtaaactaggggaaccagtgatcttgcactgctgggtggctgattcaaaagctgaggcattgatcttaggcattggtcttcttatagcacatcaagatgcaaatttggatgagaggaaaactacacttctaaggctcccctgacatagtttctttggagtgcaattcagcctctctttattgagggcctatggggcaagaactgaagtgatgatggcaggcacaagagtaagtatgatttaagctctgacctcaagcagcttagagtttaagtggagaagccagtaagaacaaatagaaaggagtgatgagacaccagctgctttaacctagggatgtcaccttggtattaaacaagggtgtccaggaaaaactcaaaaagaccaaaaaagaaaatctgttttgtgtaacatggatctaggcatgctgtggctaaggcttgacaacaaaaattatttagttccttaaaaaaagcaagtttccattgctttctatactaattttaactctgacagagttttttgttgttgttgttgttgttttgttttttttggacaatgcaggaacctattagtagtatgaacacaggtagtcccaaactaacaaattcagtggttgattcagtccttggaggtcatagggtaatcttttaatggaaatgtaactaagtatatacttttaaagtaagtaggaaatgcttaccttttaagaaacttaaatcttcaaggaa

SEQ ID NO: 121961 - DNA, 1181 bp, Homo sapiens
cccaataaggtgctgaacattgtttttgtttgttggggatgaagagacagcagtttttctttgactaccagaaggattaaacattgtgaatctgctcatttagtcccaagaaactttatttgacaatcagaaccctgaattttgtcagaatttatcagctgccgtggttgatagaagtgtgataacaccacagtcaatttccattgcaatggaagcttctaactggctgattaacaggacatcatctgtatagtgaaagctttgcaccatggagagtagggacacttatgctgacttatgtactactgatggcaaatggcagaggaatgttggtacccctgggagtaacctgtagtaatgtgggaggttactacaaatgtatattggtggctatgttgtgacttgatctttgtcctcagaagccagtggtatagaaaagctggtactggcacagtccaagacaggataccaagagtttaatctgtgcaatggattcagttacatgaatagttgggattatgggattaacaacttgattcagttggtgataatccattccaagcttctagctctcattacactgtttcactggtcatacagtgctgttgtattaaaacactgcatctcttagcacccatgttcccttcaagtctgtaatcaaggctgtgattttctttcctctttttcttcttattgtttttgttggaccatctgggaggaaatagagaacaagaccagaaagtgatttatgtgtccctttagcacttcactacatttggcctttcccaattgtgataatctccccaggcacttaactgatgatgaagtataagcacttaatatattaattactatacaatcggatatagaaaatacaacagtacatggaattggcccaaagggctccattcatgagatgatgttaacttgcctttctcactgtgaacactgcttaaactccattagctaaatcagacaatcttttctttctataaatccagttaaaaacatgacttaggtgtccacatcccaatatcctaaaagtctgattcccttattttcctgaaattccccaacattcttggataggtgcatatgtcatttgatacccattgggaatagagataccctgacttctagtaatatttctctttaaataagctgagattatgggagaaggg

SEQ ID NO: 121962 - DNA, 1028 bp, Homo sapiens
ttggaatatttaataggcctgcagggctctcatcttttctcttccagaaagccatgactttgtcagcatcccatcctcatcactaacattataaaaatctctgaagggtctgagatttttctctgctcacaacttaacatgaaagtctgccacagttgaatggatgctggtagaaaacaatagactcctaggtcagagatgaaggacaatttatttttcacagcaatagcagtagcaaaaatatcaacattttggtcctgttccctgggtcccaatttccacaaggcaacatgaagtatacacattacaaacaaaaaggccctcaatttaaggaatgtcacccctttataatgggcagtgaacatgcctctctttgttccagaagatactatttctatccaaggctgtctgctttacaaacatgttcttaaaacagttcaaaacaaaagcagtcaatgattctttcataagatgtgcaaaatgtgaaagacccatggaaaattgtctcccagtagtgacaaaagacttcaataagtgactgtttggataggcttcttatctgtggtatgatatatgttcatccttgctatttcctactgatggaatgcattaaacttttgttatctgagattgatgaacctttcactaagatagaaaataagaaggaagcttttggaacaaatatattgtatttaagctgcaatattagagtctaaattagtaatttctgactataatctatatagattacagcatagggcgtgttaaagaattgggaatttctatgtcaggaagtaaaaatgtgagcctaaaccacaaaatatattaagcatatactttgtgtaattataatgtattgtaaatcaaaatcattaagcaaaaatgtgttattacatatttcccatggccataatatttctccaatgctttatagtttgaagggtgtccaaattttcctaaataatcaaaagaaaaaggtgcaatgctgctttaatatgtttaattttttcaagactgagcataattgt

SEQ ID NO: 121963 - DNA, 2142 bp, Homo sapiens
tcatattctaaaaacaacaaaaacatcaacaaaaggactgtctctaagggacagctgccctttccttctgtgcagtgaacttgaaggatcagataaagtgatgggttctctggcttttattctttatttgttggttattcaagggctggctgtgtcttcacttcacttcaagggctgtatttttctgctttttttccagagccattttggaaatttaagaattctaaattcttggattttcattagccaatgttttgctgttttcttcataaaaaaacaggtttttgtaatttttttgtccctacattgccttgttatttaatagcaacattaacatgtgaataccttagaacttataaaatatgtgtgtcatttcaaggaataaaaaggttggagtgaatcaaacacaagacagatatgtttttatgggaagaatggaaggtcaagaaatgactggcttgcttggagtatgccagtggcaatcttgtgcagaagaaaagaggaagatatcaaacaacagaaaaacaaagaaattctgtagagagaagaaggggcaaagtagaagttctagaaaaatagagacaaatatttacctatattataatagggcttcatggaaacactgcgttacatggaaaaaaaaacacagagctgtaaccagatataactgggttcaaattcttacctgtttattgagttaactgttcgactggtacaaaatcactgtggttttggccagtatttttaatggcaaaggaatgcttaattaaacattgagtaatgtttaatgtttttaattaaacaaagacttaatatcaactatttagctgagagattaaagtcaaatttcttagtatatctgagactctttttcctattacataaaaattttgcttaattattttgaatatggaattggataatatgtagaaatctttgaaacactgactggcactgtaaattctaattcaataaatgttacatcttctccatacttaagaatttaagaagacataatcatttcagtttgtaacaaataaaatgagcctatttcccaaatagacaattagcaagtgacaattggataatccaattcgataatcagcaactaggagaactttggaactttcagaatattatataataatgcaggaagaagcatataatgagcacggaagagctaattagaatcatactttccatgataatatgaagtaatcacttagaaaagaagttatctattttaataattattcagtcacagtggtataaaattttttccacaagaattaaaactcatgaacaggaggagttcttcttttaaccaggatgaacaaaactggaaagactatcaatcccaccatcacaaaacaaagccagaggaactacaaaaccataacttttgttaaacctgttgtaaaaccgagttcaccaggcaaacaaatatctaggttttcaggaaatgataggttcctccactgagaaacgagtcatggggatagtgtcatatgtggcagagaatagaataggacctggctgtcatacaagcgatgatagaaattattattatctaaattatctaacaagaaattctgtaaaaagctaaaatcattacaaattgccaaagactgactgacagtttagaaactctggtaatccctgacgcaagggtagtttgatgtcacccattggggcttatatgtggacttccactaggtacgtatgagaaatattggaagcagggtggggacaggagggagcctcttggtaatacaggtgcagagtaagggattggctgccacttcagataaagcacaaaatcccagtctattcaagctcgcatcccacatcctaagcacaaggctagaggaatgtgaagtctttggcatcctgaagatcaactcttgactagagtaactcaatgccccaaacgaatggcttcagaatagcaaaagtacactctgtttctaggtataaatgattggcatcattcccaattattttgcacttgatatttgacatttaattgacaaattataagatatacaaaaatttaaagaaagaaaaacgattgtcaaaagaagtcaagcaatgaacaaaaccagacttagggatgatccaggagttgaaattatcaaacag

SEQ ID NO: 121964 - DNA, 1042 bp, Homo sapiens
tgctccatctactagtcatcaaaaacttagttatattgattagtacattttgaagaattgactattgctctaaggaaattggccccaaatttaaatactttacttctacttttaagtctttttaaatatatttttcctagtaatttatttctcagtatattttacaaaattcttgatggagaagaattttaaaacaaaactagtactttacttcaattggtttgagaaacactcattcccaggcattcaaactaactaaataaaaatgacaactgaaagatctgtagccaatgtggcctatggctttccagtttgcagttcttcctttaaatattctaaacttgagacctgtgtaccaagactgcattattctcaccttttgcagaactgatgtacctatgttatgttttcagtttacattgagctctgtggaacatattgttacatttaaaataggacttttaaaaaaaatccagtttattacataatacagagtccttttatgataatctacaggagaaatgtttctcacactttgtttcccggaggagtcgtacttattttgttactgattttattgaatgagcctctttttaatggctgctaggaagctcagtgtcaactttctatccctaatgactatggagagactatgatatgcctttttaaattaagtgacttaatttatgaatgttgttgtttaattttatgtttccaaccttattcagtcagtaatttttttcgcataatacatgttaacttttaataaagtaaaggacactagaaagaaagacaagtagtaaggaaagaaaagaaaggaaggattactcaaatatgcttgtatactacatattaaatatctgagtaactctagagtacattacttctttaaattttactctcctagatacctagttgaaaaatattctttgaaaatataactttgaaaattttaatgttaagaatacctgcagtagggggaaatttaatactattgtctttacgtgaaagtaggcagtaaaattcacccatatttcctttt

SEQ ID NO: 121965 - DNA, 1487 bp, Homo sapiens
atattatatgtattatattaatataatatattatgtttattatattaatataatataatacattatgtttattatattaatataatataatacattatgtttattatattaatataatataatacattatgtttattatattaatataatataatacattatgtttattatattaatataatataatacattatgtttattatattaatataatataatacattatgtttattatattaatataatataatacagtattataattaaaatataatataatatttaataataatattatgaaagttctcatctgcaaaagaatacttttgattttagatttcttatatattttgagccaaaacctttatacttcagaatcgagattctatataaatactaaatagcttaatatttaaaacataattttcatccaagatgttctttaaaataatatttgagttaattttgtaaggttctaagcagatttccatgctgcaagagtaacaaattatgaagagtaaatatatatctgaaatttgctattataattaaataaaaccaagagcaatgttaatctgatacattgagtctgttcatggtttgcataatcgtgatggtgcagatgattattagacataaatgctaagtaattcacataaatgactatcagtagaattacttggttaaactaactttttgggttttgtttcttcccattttgtcagtagggcctttagcggtggtaacttccccataacatgtacatttaatcatgattgttattaactcaaatataacataatgtaaattgtttcttccttacagaaccttaagtttctttcactggagagctcttcagttcatccatgaagctgagtcccagattaaaaaccattgctgtggtttgtctgtattttggtgtatcaaagcagacaaaagaaaaggaaagcacctccaatccatcttaataatcatcccaccttcctttctgctttcatatgacatttatttaaaccaagctatagctgtgcttctcaaaccttacagtccatgtgaatcacctgaagatattattaaaatgcagattcttattcaatagatctgggttgggatgggagatttctaacaaactcttaagtaaactcctactctggaaaccacactttgacaagcaagggtctgtaaaactagaaagctagaggccttttagttcatggctcttaaccaagagcctgcgaatctctgggacatttatccacaggttttaggattctatgagtcccaagaaataaatgcaaaattttatatgtatgtgggtatgggcatttttttattttctggagagttaacagttattagcctttgtaagaggcttatgaagacctaattaaaataagtgggtagtgattgaatcagtcccatttttagatgagtaaactaaggtctaaggaagctaaattatctgcgaggttcacagagtttgttac

SEQ ID NO: 121966 - DNA, 1009 bp, Homo sapiens
aactgaggccatctcaggcttctattagcagaacatctggctaaccaaaacaagccaaaacccatttttaattcttcttctttgccgttatgcgttaaaactataaagtgaatttgaaaaagaatgtgggagactatgaggaaaatatagggtaacttcctttaaattttttctattatgcttttaaaaaatgttaagaattcagaagaaatttggcatttctagaaaagcagttctcttccagaatggtagctggggaaaaatatgtccaatatgtttcccaccagctgccagagatatatttaaaatgcaaatctgactaggtccaatctattcttcaacatccatcaatgacttttaattgatatcaggatagtgtttgaatagctttaaatggctttgaacactttcttaatctagttcttgtttatgtcacaaatctcatttttcactggtccccagtttctactttaagctttggtgatactgacctgaatgaccttctttgcaccatctacatgaaaatgtggctcttctttagcttatgctttcattctgcacagaatatcctctttggcctggttaattaaccaaaaactcaggtgtcacctcttccaggaaaacttccccaaacaaccagcctggaataatcaagcctcccctcaatgcttcaatatttctaccttagcacttaatgtattattctgaaattatgttagtgaacctgcccttctttctgcattgaataatctctaagagtagatgcatgactttccttttggtacttctatcactaagcttagtgatgggcacataatttacgctcagcagatgtttattcaattgaactgaacatcattcagttatatatatgtatacacacacacccacacacacacgtatatgccattagtgaaaaccaagcaatggagtgcaattagtgccaactatgtggaatgcaggcatgagacaagagaggaacttcacagtcctcagagtatgtttatgg

SEQ ID NO: 121967 - DNA, 1269 bp, Homo sapiens
aagaacaaaacacattctatttgaggcactgaaaatttcaactcaggcctacaataaattcatttatttatccatcaactcactagtgcagtcatgtggtctaaaaagagcactgcttattagctagtattccacaagtgaaaaggcataagagtgcaaaaccatggtgcattcctagaactagcaatcctcgatattcttggagaataaagctggaagtagaaaagggaatgaagaagtagaaggtcatgtgacattcagaaggatcagatcaaaaaacacctttcacgacaggcaattgagccggcattttattttgtcggtgatcctactctgtagtatcctggcaatcaagtagagggttggagtgactaaacccagataccacagttcaaagaaaagagatggggagagcaagaacagtgcagtgtggatagaggggaatctatgtaaaaaggtacctgttttggaggtagcattattagagcttgaatgatggaatgtgggcattgaaggccaaggagaaatctaggatgaatccctggatttggcttagtggtaacattcaccaagacactggaagatggccaagtttgttgaagttgatgttatagcagtttctttgtacttggcctttttatcacttttatttgtttctactattgtttaaagggtttaatgagagggtgggaaaggaagaggaattgatgcactagaattctcagatttgagcctacatgtgtctttacctgtgactgcccgccccctttcctcatcatcagctgccccatctcttatttgttctgcttttctctaggctgggccagtgtccctcccggtttatgcctttccccagtttttctctcctgtgacccatcttgcaaaacacgactttgtacatgtatttacacatcagtgtcttccccatctagtagactgccaacttcttgaggacagggtttatgtgtccacaaagcagccagcagaatgcctgatacacaataaaatattttatatattgaattcttatttaagtgttctgaagctaagaaattcagagtgatggattttctattactcaagttcttccctactgtgcttggtagaatacatgatttataacttacatgtaaatttcataagctttgtgtaaataattcaaaattaaatgtaatcttttactgttccctgaatgtaaacagacatctactcatattaaggtaaatgattttatctatggatttccttccaacatcccatttctatgca

SEQ ID NO: 121968 - DNA, 1945 bp, Homo sapiens
ttctattcctgctataacaaattgccagaaacttggtagcttaaagcaaggtaagcttattatcttacagttatctaagtcagaagtccaactcaggtcttactgggataaatcaagatgttagcagagttatatctctttctagaagcttttgaggaaaatttgtttccttgacttttctatcttctagacgctgcctgcattctttggctcatggttcttcctccatttttcaaagtcagcaagtttcattgccctgacccttcttctatagatacgttcctctgaccacagcaagtaaagggtctctatttttagagacccatgtgattatattgggccctccagaaaatccaggatatcacttgatcttaaggtttttaacttaatcatatctgcaaagtctctttagccatataaggtaacatattcacagctttcagggattcccacccagacatcttctgggggatggggaggttcattctgcctgtcagagtgggtaagtggaatgataagtgctagggagataaatttgatgaaaatgagcagtaacattggaaatcattacatgcctaccactgttactcaatgggaagtgtttgtagcttgagcttgagaagagaactttcctgtgtaagatgtaaggaaggattgacaaagagaagcaaggtttccaaattggacaaaaggataaatggtactcccattcatgaagttggggctagaaggagagaataatggagagtgaattcatattgtcatattgatttaagttcctatgatacttaatgctacatctgggaggagatgagtgtattctcatggaacggaagcgaagaaaagagatcggcagtggatgctttgattagcatgtgctcactgattcatcaaatgttcctggacacgtcctaagtgccagttgtgggaaatgagagggggggaactgaccaagtacaattggaactgattcaaagtctgattttcctgagtggtgcatctgcagtaaaaccaggtgtggaagagcaggaatgctatagtcagcttgtctgcatttgaatcctgattctactaccttctacttgggtaaccttcaggaaattatttactctcactgtgcttcactctcctttcttctgggatagttataataataaaaatgttttcttcatagttttgttgtgagttcctacatgtaaaattatttgaatagtgcctgacacatattaaataaatactacttataaatatgaaaagacaagggaaaattatggaatggatcctcttgaagtaagggtttgattggtctaagtcagaaagtaatggataggaagaagaggcggacatagagtcatcaaatcatctcttccttccaaggttgtagccttctgggtgctgtcctctggaatccttagttctcaggctgcttttctggagtctctttctaagaattatgcaagctagcaacattcagtctcctggcatgtcaatcatcaaaatgccaaaacacatgctgctcactgataaaattcagtgtttaaatagaagactaaaaacatttatacacaatttacacatctctttctaataaaggaagtatatcttagtcctgtccttcttgagtgggtaaacaactctttcttacatcttccacatctcctatgaggccatcctgtttcaaaggcgagggccaaggtaaactatcagagagaggtttgaaaagaggtggttggttttaatactcatccatttgtattagcatgagaataaatgagagatctaccagactcccatgttggccccaaaatttacagcgtctggagtgagaaatacaaattggacaatagttttgacttttcctcctctttagactctgttttgcttatcttaattatttcttttgtgttttgagcatctctgttattttcattcacagaaaagagag

SEQ ID NO: 121969 - DNA, 1995 bp, Homo sapiens
tggagaaagctcaataagagacatcaggaggtttggcttcttttcagaggacttaggaagttttgatacctaaatgatataacataagactaacttttgaagtaagtgctaaaactatttatatatactagacaattttctcaagatttgtcctttttgtctcttagactctcactaaaactccgtcatcaagttgtaattcacacatgtagacaagccttcagcctctccaaacatttttaaaatctgtaaattcaaaacatttaaaaagaagacacatgatctcatctggactgctgcttgatcttgtttgatattcttcagcactctactttttataacgggtcaatagcagacgggcggtaactgatctccttatttcagagctgaaaacacaaggcactttgcgttgggtgcagttctattctgttatgctactcccgtttgtcagtaggtaaaaacttttcccattccccagaaggcagtacttctatgaatagttgctttagacaagcattcattgttcaaagggtttgattcctcactgagcaaaagctacagcattataaagatgccagttgaaatttttttaagcttgaattttttaaagctagaaaggaaccctcactgttggggaagtcatgaaagaaaaccccttttcacaagccctggaacaagtggattaagagagtaagagtaaaagtgcaaagactgggaacctggctttattccaaaaaaaaaaaaaaaaaagccagaaaaaagccacagttagaagtaattgaacactttggaaatccctttgaagacctaatgcagtagaattttttgaaatgaataaaagctaaatgcataataatttcaggtaaaaaaatacaaacgaatgtttgaagaaccaaataataaatttataaatgtttaacgcagcgggacctagcagtaccaacctttgataatgtatggtaagcattagcaatgttgttacttggaaaagacaaattaaaaacctggcaatcttacctcatgttgttttgtactttgtatacttggcttggtttatagtgatgatattatctgtactgattatacttgttcagtagaattttgtacacttgcaaatggaatttttagacacaagaaacaaggtacaaaaattgcctaactacaaaaatttctccctcttttatattgggactaatgatatgttaaacaatctgatgtatcactttagaaaaacagtaatggcagttgcatttgccaggaaaatgttacaatagattttagctctcttaatagaacataaaatattagtttttaatatcttgctatatgtggtgtttttaaataaaaaggcatagaaatcattgatatttgaagaatgttgatataaaataatctgtgtggaggataatgtaggttgtgaactaaaacggaaaaagccccaagagtgtatatcacactaaagaagagtgtattttctgctaaatggagtatagaatgttgtgcatttagtacataggacatatgcttgcaatcctcccctaaatatcccagtggtttctttgtgcaagttttctttagactcatttctccatcttgatctgtgctgactccacgtgaggtcagtcagagaataatgttagtccaaccacttgtgtgcacacctgcatacacacataccagaaagttaatgttgttttactttaaagcagtgattttactctggaccatgtgtatgtggcagaaggatgatagtgacttgtacataagcatctacagaggaggaataactgatatgtatggtggagtttgacagaatcctggatcaggaaaaataacaatcttaaggttggaggagatttttaaaatcatcttgaccagctatccatttcattacatcattcctcactctgaggctcatttctaactggtgttaccttggaagatgactaatttttagtgcttgttttgaatttagtttgtggaatgatttctcag

SEQ ID NO: 121970 - DNA, 1048 bp, Homo sapiens
cgctatctgagctcactgcaacctctgcctcccaggctcaagcaattctcctgcctcagcctccccagtagctggggttacaggtgcccaccaccacacccagctaatttttgtatttttttgtagagacaggttttcaccatgttagccaggctgttctcaaactcctaacctcaagtgatctgcctgcctgggcctcccaaagtgctgggattacaggcgtgagccatggcacctggccagcatacttaacctttacagaggcatttttagctggacatttacagcatttaaaggatggaattcaattaataaaaaagactttttataacattgaaacagtgagtttaagagagtaaatctgttgccattttagttagttttgacaaagcaaatattataaatggccaaatacataagcctgttattacacattaaaatgtatcctatatttaatgagcattaaaattgaagtttactagtaattccatgggatattattatgaagttataagaataggagagaacttatagtttatttctgtctcattttaggatcttcctattatggcacatgaattttaatcgactttataatggtgtcattgaagcagagtctatgatattatcattctagtatttaactacatctccccttaagaatgattttatcacccattattctttaaacctctcaagatacttcttaggctctgttctctctggagttgtgtaaattctaataatcataacatatattattatcttagaagtcattaagtcttctcttctttatttgtttttagtattcctagtttctcatgggtatagttttacaaacgctttcattctttgtatcagttttcatttcatatttgcctttcccaaaaatgcatcaaactgcttccttttttattttcttgtttcccatggggttggtaaactccttcttaaaaccttacagtagacttatgcaaagtctcatggaatttttaatgctttttatatttttttctgattttattttgttaaactgatctccactatg

SEQ ID NO: 121971 - DNA, 1023 bp, Homo sapiens
gggaggataggatggagagaggaaaacctacatacctagggtttaacactgcatagtgaaatttcagaagatttttttcttctttatacctttttgtatggcttggatattttacaatgagtaggtaatgtttttataaaaataagaggaaaataaactgtttcccctttgtaaaaaaagaaaatcttaaattaaaacaaagatcaacaacaaaacaacaacaaaacaacaaaaagatcaaaaacaacaaaaaagtgccttcagttaaatgatctcttttaatactggagagaaaaagagttaaagtagctggcctataatccattcacttactttctgaggaaacagaaatgggggtgttgctggaatgatgtggagcagggaatttggtgtaatttccttgtgaaaagataatgactaaacctcctcgtaaatgaactaatagtattagaagaaaaagataccttatctatgaaatactcttagcaggatgttcctggtttaaggttgcttataaaacatcaatccagaatctgtggatttatggaaaatgagaaatataaaagctggctgacaatttagggtgtattaggccattcttgccttgctataaacaccagaggctgggtaattcttaagaaaataggtttaattggctcacggttctgtatgttttacaggaagtatggtgccaacatctgctcagcttctggggaggcctcaggaagcttacaatcatggcagaaggcaaagggggaacaagcgcatcacatggcaaaagcaggaacaagggagagagtatggggggcacactttacaacaatcagatctcatgtgaactcagagtgaaagctcggttattaccaagggaatagctcaagccattcaggggcattcgggggcatgatccagacacctcccaccaggacccacctccaacactggggattacatttcaacatgagatttaggcacagacaaatatcctaactctatcatggggtatgaaatgtaaatatttaa

SEQ ID NO: 121972 - DNA, 1168 bp, Homo sapiens
acttatgcttcactgttttgtgagatagatgaaggcaatgaagcattgcagggtcatggatggataaagttactggatctagtgagtacataaagtgggaagcaaaaagttttatctttggagacgtaatttggtgaaggatcctgaagatgccacctataccctgcgcaccaggcagatgcaccaaagtatctcagccaatttcattgagattcagactggcaaggagcttatggtaaagtctttataattgaattaaaaacttaagtaattgtttctgttatttaaactcactggaaaagcttcaaaatgagacaatgatttgaatgaaccagtagtctcttggttacactattagggataatagatatccccatcgatctagaacttataatgtcacaattgctaccaaagttcacaggacagttagtgtaaggaaatccagaactactcacattggggtagaacaattacctcatttttgctagctcaggattaaccattagtggataagttgcttgttcacactggctttctgtgataaagaactcatcctgcacctattattaatgttattaccatggtattcaaccaatagtctcatatcttcatcagaaacttgttacctatgagtttagtactgagacccagcctgggtctccctgctgagaaggagaactgaatgaggggcatagagagtatagtaatggatcatgtggaaaatgatgtgttttctttgagcattcatcaccccatactggcaatgtacaaagagaatgtgactgacttgcaggtgcatagtaaagacagcaaagaaaaaaatgagggggctgatggcgtcattagagcaaggagctcttagagtcttctcattcccatgggagaacttggcacaaaacctctacttggaagtaacttttctttggctcccagcacacacacactgatctacattgaaaaaaatacaaacataaaagtagctcttatatagaaaagtgggtggatctttaatcagtttgatttgtcctctattcttggcttatttgtaagtagcttctattcaaaccattctttatctttatctttcaccttaatacacacacatgcatgcatgtgcacacacacgcaaacacacatacacacaccattcaattttctccccacctca

SEQ ID NO: 121973 - DNA, 1054 bp, Homo sapiens
accactgcattgtttagagttacacaaccctgatttttgagtggttattgtgtttatcccaataactaccttatagtaaggaaatagttaagaaagttaattgattgggctctgttttagtttcttttttctttctatttagaattttgcttattctcatctgtttctttaaagtgatttagtatggttcacattaaaatgcacatttaatacatttgtatatcaatataatattgatataggatagaaatttaaataaaaatctagaactaaggggaatgataatcagaattattttattataagcattatgattctaacaagtatactgattgctctacacattgtcctctgtgacagatgtggcttatttaaccacaagtatgatattatcatttggtactgacagggctattgtcatccgaagccatttattcctgtcaccactcataaattactgtaaaaaagaggccactgttctcctaatttaacatgttcttccacattccaaccatgatggtgattttgtaatccatttgtcttcttaaagcaataggaccataggccaacttcctcaaatggaaagcaagcccccaataattagtaagctgatagagtacataaaaatctttgtataactcatacaaatatatgtactttatttccagaactacttgggaaaggcattacttgcggaatagacatagtaaagattttcctcgttctcctccctgaatattcagagaaactgtgtgtggtatacctcttccagaatcttgcctaattcctggatcttgcacactcaattttttcagttgtaggagaggctgaatttttaaaaatgaacatcatggaccctaaaatatggtttacctaaaagctttatattcttcattactttcttaattcattcatgtgttcagccaaaacttattgaatagctgccatgtgcagagtattgtatattgttaaggttaaaaaatatagatcaataaggcatgacctctccattgaggaattcctagcttaaaggatattgatatatatgtataca

SEQ ID NO: 121974 - DNA, 1219 bp, Homo sapiens
ggatggtattactgataaacatgcaacgcaagtaaaggcctaaaggccagtgagtgtgtagtattcaataggatataggataagcaggtctaaatatcaagagtgaggtcaggttgagaaatggattgaacattatcagtatcttgctattaattaaaatctttgcacagcatgagaagcagagctagaagaatagaggcttgaaagggcgatggggaacagaaacattaaaggcgcgagatgctaatgaggggcccaagatggtgctttaacaaattgtttccctccttataaattgttctatatccagtgctgcctctcattagctgtgtaaccttgtacaaccctcatcctgacacaacatctgtcatctgtggaatgaagaaagactcattcattcattcccaacttgaatccccacaggtagtaatggagttttcaaactaaactaaaattccatttagattttcagtattacaaaataacagtataactacggcttgtttactgatttaaaatcttttaaaatttagggcctgcaattaaaataataaaaaatatctactagtgagaaggttgcaaaccattagcccagatgattccagttctaaaaacctgttattttattatctcaccgaatattagcagtagttggtttttaacataaaatttgtactgcaccaaacaatatccacagtgtccccatccctgagaatgcagcctgcctggcagctgcacgtggcctattagcacagccgtttacataaaatttgatgatgtctgttttctttggtttgttaaaaaataaaacacagcatttacaagcagagctagaagaatagggtcttgcaatgactttcttcccagtcatttcttgggaagaaagcaaatggtataatgaaagtaatattgagtttggacatgaatttcctgaagaagccaagtttattaatatatagttaggagtcagatttttgtttaataataaggctcttggaagaaactaaaattagtcttctggcatgtcccttttcttctttgttaaagggataggatcataactgctctcacttcatacttcatggacatttcctaaagaatattttggagtctcattgttcttttgaacattaggttcaaaaataaggtcatttaaaagcaatatggtcacctatataactatagtttttagaagaaaaattacctttatctctaaaac

SEQ ID NO: 121975 - DNA, 1044 bp, Homo sapiens
agttgactggtagtttttcagagtgtgaagttaattttctcacacacacgtttgtgactgactgtgcgaatactcagttattagcaaattagcaacacagtaaatgtgtctcatagaaattagactaaggggactagctgtatatgagccataaaacctataaatcttgtggacaagatcttgacatacaaattagaaatagaaattattttgaagccttggatactgatagttgcattacttagcacactatggtcttcagtcccaacttctcattactgattcccatttgtatgtcttcactctccacagacatttactctaatgtttgatatacatccctgtttatatatataacccttgcaaaatatactatgtttcgtgtgtgtctattatttaattattttatataaaggatattatgatgcaccaagtgtcataaagtattgttttgttcagtttcttgttttactgaataatttctatccacattgctaaatgtatgtatttcccagtttgactatttgaaaggacttatcaggctccacagaacatattcgcataaggcttttatttaaatttttttaaaaatacagtacagcaaaagaaaaagtgtataagcaaacattagagattccaaagatatgccatgtacagggcactatttctggcatagctcaaaggatgtcttagtccatttgggctgctacaacaaaatagcatactgtgtagcttataaacaataagaatgtatttcttatggttcaggaggctaagaatttctagatcaagatgccagcagagttgatgtctataatctataagggccctcttccctcatagatggcagcttctaactgcgtccttgcatggtgaaagagactagctagctctttgtggtctcttttataagggcactaatgatattcccaagcgtagagcactcacaatctaatcacctttccaagaccgcaccttctaataccattatcttgaagtttaggatttcaacatttttggaggacacaaacattcaaactatgg

SEQ ID NO: 121976 - DNA, 1094 bp, Homo sapiens
ctaaactaattttaagaatggaagagggtattattaataattatgccatgacaacatcatgaaccagagcctgggtaaaccaaggcatagagtactctgaatcacaggctgcacatattcacgttaacactaaccagacttttctccagaccgcataaatgtacctgtctacacactttattgccaacactttgtgttttcagatttccaattttgaaatttgacatgtgcagtgttccttccgtttgcatttatatccacatatttgctagctatgcagtctacctttcttttaatttctgattcaaagctttggtttatttttcctgcttatcaatttgttgtcagctttacacctagcagttattttccttcagtttgtcccctattcattaactttgtcttttaccagaaattcttaattttgatatagtgaatcaactcatttctcatctttaaattatactatatgtaatgcttaagaaatacttccccatcttaaagtcacaaagatattctcctgtattttccttcttaaagtcacaaagatattctcctatattttcttccattagctgtatgattttccctttcataatcaggaatatactggactttaattttgtaatcaatatgaaataggaacccaagtttatttttttcttcatatcaaaaatctggctttgaccacagagttcttgcctttgtgtgtaatccttaatcttaactaagaactcattatctaccatgcacctttgcattttctcagttagttaatattttccactgcttggcctctcttttttgtcctcacactaaaggaagatactgtctgaactaaggtattaaaaggcacaggatgatatcaggaccctgctgtcacagagaataggtttcctgcaattcaggagtgtgcagcctgccaattttcggttagcacctgtgcctcctatatagtcagtggaacacatgccatctcaacacatggggatcagcaaggagacaaacgttacgcatatgggtgaagaccagttcttagcttttgttcttcctgttgtacttgtttttaaaaatctagacctggtttttagata

SEQ ID NO: 121977 - DNA, 1055 bp, Homo sapiens
aaagtgtagcacaattttgatagcactccatgtcctttctcacctcatgcttctgctcaggctcttcttttggcctggaacacctacgtcctcttcgtgatatgtggtaaattcttatttacacactagtttaaatgtcacatcatctgtgaagccatctattaacccttcaatcacatgcccatatatacagaataagcactaatgagctataatttcataaaataatgtgaatgatccctcacctttaaagagcatctcctatgtttaaacccagctctaaacattgcaaatctcatttcttaatacttacaataattacttattattatctaatttccctccagttcacatatcagttctcagattctctttccaggaaactcctctatggagatgattacattgcctgattgactcctttcctcaactttcgcttgaatacattcaactaggcttgccccaccattcaccatagcttttcctgtctaacataccaacagctgctacattaatgaattcagacaaagtatcagtcctcatttatttaaattatcagcagcatttgacaaagttagtccctttttagaagttcaaacccattcttcacttttctttcaggatgctgtcatttctggtttgctttgtacatcactggcaattttttttatggtttactttgccggttcttctcatctttacaatttctatatgttgtcctgccccagcctttggccagtaattccattggtgatttcatcaaatttcatgttgggcattatggctaagaggacagacctttgcaccaggctgtctggctttgaattacagctcaactagtttgttagatgtgtaaccatgggctagcgatctatctctacctttctatgtctacctctcttttacctcatcggtaaaaatagggattatagcagtacctcagtcatagaactgttgtcatattacatgatgtgatgtttgtaaagagcataatgtccagcaatatatgtttttgctgatattacctataatctaatgactcataaaacctatct

SEQ ID NO: 121978 - DNA, 1270 bp, Homo sapiens
aagttagttaaattgctaaagaaaacttatttcctattttattgtcaagaaattatataattacacattttgtgggatcacaaatgtctgcttattaaacattttagttcataaggctgcttttctttttttcttttttcttttttttttttttttgagacagagtttggctctgtcgcccaggctggagtgcagtggcacaatctcagctcactgcaagctccgcctcccgggttcacaccattctcctgcctcagtctcctgagtagctggaactaaaggcgcctgccaccacgaccggctaatttttctatttttagtagagacagggtttcaccaagttagccaggatggtctcgatcctctgaccttgtgatcagcccacctcggcctcccaaagtgctgggattacaggcgtgagccactgtgcctgaccaaggctgcttttctctaaatccatgcttacatagattagtgattatctttaatttttatttttgtttttttgtttcatttttttgcattttctctctctttaatataaattgtgttcttacttgcttatattccattctagaatggcttctagtctcctcccagaagtctgaccctgccagttctaaatttttttctgactctcatcctcctgaattttgctctcctccatagtcaacaattttgtacgcctccttttctttttttaaatgacattcagtttctgaaatattggcttctctcattatacttccacccccattcttccaccatgcaaaaaataactcttcctctctcttcttttggctaaactttccaaaaagatgtataattttttatttttgaaaaatgtgttagtgacattcgtcctggttaacttattccaaataatgtctctatcttgcattctgtcttactgttctacaacctattccagcaccatcaacagatgactcatttcagcctgacctcatgaaaagagcttgcattctaggttcagacagaataacaagagactcctatttttaccatttgctggctgatgtaatcttacatgagtaatttaagctataggggtctcacctcctttatctgtaaaataggaattctagtacatgggatggtaatgatgatgtaaagaaatcatgtatagaaaacatataaatagcatactctttctacccaggaggagctacataattgttaaatcttgtgtttatttcttattatctcttactatgttgactgttcttccaaattgcataaccaaaagatc

SEQ ID NO: 121979 - DNA, 1048 bp, Homo sapiens
gcaatagaaaaagtgatcattattcttctgactcattctaaaactcttacaatgtacgaggaaactcttggagctttgcttttctctttactgtggcagtgcaaacttattgcttgctactctgcagctatttctgaactcaagttattttagaaattcttcaaaatttaacattttctcctgatcctttttgaggaatcagtacaccatagtggtcgtccctgcttataagacggggttaataatattaccacctacactgttggtttgagaatgacacaagatggtgtgtatttgttatgtgcaggacccactacctggcttgtatggaggagccctttctaaataagtactgctagcattattttttcttctatgagttcctatttctcttttactctaaattatcatcacaataggctatacattatttattttccaaaataaatgttatggtaactacctgcatgaagaaaagtgaaaaaaaatagaacatattatgaatgactatttctgaaaattcaactatctagcattgtacaaataacaccttgacgagtagcttgatttttctcattttcaacttattttttctttccttctctttccatatttatattgtaagtggttgccagcactgaccaatgcagttatccagactacaaatgtagtgttgtcatactcctccaaacacacacatacacacgaacacacacacctttgtttcaaatcgtcaaccttaatcataattgtttaagcaaaaggaggaatgcaggctacaaatccctatctctgagaagaaagttttatagacagcttattcgcattctactgcttctagaccttcagaggaaatatgtgcttgttccataacctcagaatgctttagggaatcccagcttccacgttcattcagtgattcttctgggagtcattctcataagtaccccaaagaaattgagattgagaaaagatttcctataactttgcagacattatggaaaccaaaagaagtatcctttttttcttcacctggtatacaacaaat

SEQ ID NO: 121980 - DNA, 1313 bp, Homo sapiens
ctcccttttctcctttccttcttcttatttttaatataccctttccccatatctcaacccccaattattagaaataccacatcctcaatacatgtgtgttaggcacagggtcatttggaactgtttactaccagtatttgtccaaaaagattattttaaaatataaaaatataaaatcgttgggtggattgaaattttagataagatggctgagtcactgtttgtttgcacagaggtaagtgggaatgtactatcttgaaagaagctaggagggagtcatataacagaggatagagaaatgcccatttaaataatttaagcagattgcccttgcttattccacaccacccaactgcttttaatttttaccacttggaaataggtaatgctggttgtgtacttagaaagccccaattcagcaagtgaagagataagtcttcccagataaaatagtgaactgtaccccttaatccctgtgctcttcctctccaaactggctctcctgtttaccctgctcttgttcagaactctctcttggatatgttttctcgacatggaggcttcagctgcacacactcatatacgtagagtaatgcaaacttgtttgttatatcatctgtgactcctgcttttgggggaagttagtttctaaatcctttttcttccttagtgatttttttttccaattagttgaacgaatgatggtatttgtttgcagcttccagtgttgcccataaagaagagtagttattcatttagggaaattgcttgatcagtgctatgcagggccattatatcttctttgtgctggtaggagaaaagagtgatattctagattgaaacaactggaaaaacagattgctgaattaggagtgaagatataattagatgcaccctacaataattggatagaattgaaagcatttaagtctgtacataatcaaatattgcctggaaatgctacagcatcttcattttatgctaaacagatttttatggaagggctataaaggaggaaatctgcttgctaatttgattaaaaacaccatggatctccgtgatttcagctattaagattccaaatgggaggaggctaattataaaagaaaataagaaattgatttcatctttaagatctattatcaaacattgcatagtttaagtggaattattcataacaaagatgcacttcaataattgctctaagaatagatatattcttagttccattttaaactgaaaggaatctaaagaaaaaacaacactgtataatcagtatttatgggagaggtattttattaaccacataagcc

SEQ ID NO: 121981 - DNA, 1220 bp, Homo sapiens
catcagttgatgacatccagccatgacggattcaggcttgcataaataatctgcaggagttctttgaatatatcacagccacactagataaaagatgatctgggactacgatatagttaatatttcagaaaaaaaagtgcatttgatatgtttctgcatcagagataaaggtaaaagaaccaccgaacatgggataaagagtaccgaagcgaaaattagttttagaaacactacaaagcaaagactttaaaagcaacttttatgttggaaagaaaaaaaaaatattgaaactgggcagcccatgtgcaattaattgaagtccagtccttccttaaaaacgctttctaacacaccaaatatctcacaaagctgatggtgactaaaagtctttccaacagtttagtgcaatagacttatcactaagcttggaatgtaaaaatctaagttctagctgattaaatgatcttgagtaattagcactcagggtctcagattccaacctacagaataggaaattgggtctagaaagattgccaaagtccctcctatctccacaactatttgattctaacagctccacgtagctctggggaatttaatcatcaagcaagtttctccattaaggtggataattaaaatgagggagtactctgtaatgcatcaaaacagattcagattgctggctttttcaaatttacagtttcgctttcagtaaaaattacatggtataatcagtcgagctgtggaaatgggctctgaaggctattgattcctgagttcttgatactttcattgaccctatcaaaacacttaaatgttccaaagcctggagtggccctggagaagcccaagttgtaacaattttgtactgcctgaggtttatattactccagagagtatgtattttgtaatagggttgaaaagacagtaaaatttttaaaaagtggccactcctatagtagtgtagatacatgaacatttaaccaaatgtattgcctttattctgagtctgtacatgcgcagaaatcccagcaaaatgttctctaactagtcttatgtgaccctggcttaaaatgtgggctgttagacttttaactacttgaggccaggcacagtggttcacatttgcaatcccagcactttgggaggcagaggtgggcagatcacctgaggtcaggagttcgagaccagcttggccaatatggtgaaaccttgtctct

SEQ ID NO: 121982 - DNA, 1221 bp, Homo sapiens
catttcaattccactcttttagttattttgaaatatacaataagttattgttaactatagtcaccctattgtgccaccaaacactagattttactctatctaattgtattttcatactcattaaccctcccctctttaccccccttctccattacccttcccagcctgtggtaaccatcattctattctctataatttgtaataattatacttctagagcaaaagataaactctgcctacctgggtcttgattctcttaggacggataagtcatgtccaagaatagaatacaaaaagagaaaatggtgtcagtagtatggtgttatactggtgtgctatactaaatggtgtctgtttcaggtaaaatgacattagaattcagaatgaaggagtgattccagctggagcaattaggaatcagggaagtcattgtaaacaaagtggcatttttgatagacctggactttaaaatatggaaattagtgcagagcgtgatgaatccagcattccgaggaaaaaggaaaaggagaaggaggtgtgaggcaccaactgaaaagaggacttgatcttcctgagcctctagtgtgtgaaagagaacaatgggctgtgaggggctagatggtgcaaagctttggaggcctgatgtgcactttaatcatcaggcttggaccaggtacagagggttttaagaaggagaatgacagaaccagagctgtgcttttggagatttattctggcagcagtgtgtaggatggattgaaggaggtgatgccagctcaggctcaacaatttcttaaagtggagaaaaggcacagttgcagtagagactaatccacgtgccactaaaaattgccctgtgttccatctgcagcaccaatgtgaagactgttcacctctttccagaataccgtggatctgtgaacagttaaaacctattacatgagctgtgtggagctgacctgataggaataattataatgaaaggtttatatcattccctaggactgggggtaagggcaatataacactctaacactcctactttgttcctgttttagcttttgaagttttataatagcaagttacttgatttgtcttgagatttgagctgtatcactgatataagctttctaattatctttatcaacgtggctacggcaaggaaaagtgtgattccacaatttagatttgcagataccaaatagaatgctaattgatact

SEQ ID NO: 121983 - DNA, 1039 bp, Homo sapiens
gaaattgttttcctgttatcaggccaaatgcagacatactttaagggaccagccttctttaaagattttatcaggtagagacatcagttctgccttcctccttgcttcagggcactgcaaatggcttcagagtacatctatatgctagttcactggaaggaatcgttgttccaaagttttgcagaacaaaactcccctaaattctcaagagaccagttccacaaagctgtgagctgagttttgttatattcagattcactatccatatctctcatgagctctgagtttcagctacgatattttgaacctaaggaatactttaccctttctttttctccaggaagcaacgatccagtataaaaggagttatataatcaagacataactgtgagctttgaaactattttaatcaccagagcctgcttcttaccataaaacgatttctcaagctccataatttgggatagaaaacaatagcaatcttgaagaaataccaggaaggacattagagagatgaagtagagaagcattcaaaatgggatcagaggatgcatctattcacaggtccacctgatgccagggcttgtagaaaaaaatttagagatatatttagagccattgaaactgttcccatttttacatagggagagatcagcattatattttgagaaaccatagggaaggagcctgtcttttaaagtctggtgctacccaggattctgtctttgatcataggcttatctaatgggtcatatcttactctgtcatagtttttacctattacacgctgtatatgctggtaacatccaagtctaaaaatccagcccagacataatccctgaggttcagatttgaagatctgtgtaatgacctagatttatatgtggatatcgctcccacaggcatctggcacccaccctgtcttctagagtacccctcatagcactccttgtattgagttctaagtgcttatgtcactgcctatctcttccactggaccaaaagtactgggaaggtcagggtgaggtctgttttgttc

SEQ ID NO: 121984 - DNA, 1088 bp, Homo sapiens
ttatctaattatcttttctaataatgcttgttctattagtgattctttaagactggataatataattgatatttacaagtaaaattatagagttagagaaaaaataaggagctagagaaatcacatttttacaaatgtattcctttcatttgcatcatatctttaagcaaaaatgagcctgtctctaaagaacagacaggagtagatttgaagacaagtgatttttgaatcaacagagaaaaaaatgcaaggcagtgttgctctatattaatatgatattgattcaaattataattgcaggactgagtagttcctactgaggaatggttttattcctgttttataaaacatgtcaaataagattttgaaatcattaactgaattagttttatagtcttcattggcatttctgagggttagatgtttaaattttcctacattgcttttgcttgattcagagaaccattaaaaccatggttgccttcaaatgtcattatttgtctagaataaattctaaactggaactttctttataactaaaataaacactcccaaatccaggagtattgttcactctaactcagtgtacattcctcaactcattttattaggcattctcttccaaaggaaaaacacaaaactaaactcaccaaaataataaaaagattatgaaaagacagagaatctttacagtttaccgcatttaatacttatttaacatattctgaggagctcaaggtcctcctttgtgatgttttcagtgactttggtaacagactctgaggtgtcatgggcagaattgtcacactcgtttcataattacaagagaaaacgaaagtgaaggtactgatcatattacatagactcaaagaatataagaagaaatcctagaaaaacacacatcttagttagcctttttagccagtcatagtttcatgtctttctctggggctaggtacagttaactcaattcctttggggataggcttttaggcaaaagcattgcactttatttctttctctttcatctaacaaagaaccaacacaaatttaataggaatggaggggaaaaagaacatttcaaacta

SEQ ID NO: 121985 - DNA, 1036 bp, Homo sapiens
ggttgctaagtatatgtagtttataatgtgcacagtaggtcaaatcgatattgtgatccttagagttaaatgttttattggataaatgcagaaacccaagtttgactctaacagaagtttaaaataagttataaataagatttaatgttaacagcagggattttttctaaccataaactgaaaaatatacccatattaataagttaggattatgtacaacaatatatcaaaatcaaactgtccttttttttcttccaaaagaatagccaatgaactagttagagctagttaaatcagaataaaatccctttcacacacacacacacacacacacacacaattgaatagtaataaaataagaaaataatgttactgtcacttagaatcattgccttctaggttgaaaacaatggttttcctatgatatcttcataagttaatacaaatcaataaagtatataataatgacaaaagaaccactgtcctggtattagaaagaaatatctttttctaactctccattcatacaacatattttaaaccctggagaatgggacatttggggattgtgctctgagtcaagtagaaattcaaagaaaattccagtgataaaacaaactgtcccactttctctaagttactcataacagtgatttagtacataaatgaagtaactgtctacacttttgaggacaacatgtagttcactcattctgcttttttccccctttctttccctacattctcactgtttcagctgtagtacttttgaaagcagggtctgagacaaagacttgattgccaatcatttggaggagcatacaatcctaagaaacagaagtgcagaacagggcaagtgaaaatgaaaaggggcaataactgattccagaatgcattttcaagttggcaaccaaacaggtgactgagactcaagcccatggcacattctgaggaggcttcagagctgttttcctggaggatgaaagatgaaagcatttatctgtcagttccaacccgcatttggatgagagtgact

SEQ ID NO: 121986 - DNA, 1072 bp, Homo sapiens
ccttgttaaaagaaattaatctaaattcaactcatcgttaaatagttcttaattacagaataaaaggtagagaccagggaaatcaagacaacaaaacttgagataccaatagcaaatggattattcacgtttgtattatttgttcaaagtagattacagaaggaaagagagagcacaatccagtggttaagctggttacttgtatctgtggcctgcaatttcctcatctgtgaagggatgagaaaaggtgtcctttttaggggttctagaaggattaaaggaaatgatgtgtgtaaaatgcttggcacaaggcctggctaagggtgagcatttattaaatggtggctatttcatttataacctgattatattgaactgacatcatttatttaatggtttttgccattgcatttcagttcaaaaaggatttaaggaaacttttaatcagagtatttctaaaaacattaaacattggtctcacaggaagaaaacactgcaacagtcagtcaaatcattcatattaaaagttaatgtttttccaatgaaaagagaccctttcagtaaggtttttcagtctgtaagttctggagtctagatggaattgagagattgtccaattaaatttatacttaggatcaaatgcaactaaacttccataaacgtactcttgaatcacatcacgatctatttctaatatttattattgctgaatttttgtatttttgcatctgtgttcataagcacaaatgactttttttttttaaacaaagtcatatcttgcttgggtaacaagattataattgacctcatgagctaagcttctttcttaatttttgtattttccaaaataatttttaaaaaaggtggatggtattcctaatttattgaattgttgatatcataggaaaaccatttagacctagtatttgcctttagttgttgttgtttatgaattccatttctttaactgttaactgctgaatcagaatttttctttcacaaatattggtatttctgtatttgtacaaaaatacaactatttagtcatatttcaaatttttcaacataaaat

SEQ ID NO: 121987 - DNA, 1210 bp, Homo sapiens
ttttaaaaacagtttagttttctaacgaattccatctgaaccacaaagttatggtacagtctcaatatgcgagtaaataagtgattatatcaactgggagatgttcacaaatctgatgtggttacaaaatactaaaaattttagtcatggctttagcgatgacagtctaggttgtgccacttttctacaagcaaataaaagtagaacagttaaggatagcattgaaaaaaacgttacttggtttgaagatatgctggtacttttagaagagtttttgggaaacttccttttgaaagctgtttcttggctttgaggaaagttctgtttctctcaatggtttgataacactgaaaaggaaaatgcagttgattactacttgtttatctcatatttatgattttaaatatatctccaatatatttatgattttctcttcattcccaccgctacctccccttctgtctttctctatttcgtaggaaaaattatgacatcaacatccaaaggaattcttcgcccatttttaattgtctgcattatcctgggctgtttcatggcatgtcttctcatttacatcaaacctaccaacagctggatcttcagtccaatggaatcagccagctctgtgctgaaaatgaaaaacttcttttccaccaaaactgattattttaatgaaactactattctggtgtgggtgtggccatttgggcagacctttgaccttacatcctgccaagcaatgttcaacatccaaggatgccatctcacaacggaccgttcactgtacaacaaatcccatgcagttctgatccatcaccgagacatcagttgggatctgacaaatttacctcagcaagctaggccacccttccagaaatggatttggatgaatttggaatcaccaactcacactccccaaaagagtggcattgagcacttgtttaacctgactctgacttaccgccgtgattcagatatccaagtgccttatggcttcttgacggtaagcacaaatcccttcgtgtttgaagtgccaagcaaagagaaattggtgtgctgggttgtgagtaactggaaccctgagcatgccagagtcaagtattacaatgagctaagcaaaagcattgaaatccatacctacgggcaagcatttggagaatatgtcaatgataaaaatttgattcctaccatatctacttgtaaattttat

SEQ ID NO: 121988 - DNA, 2118 bp, Homo sapiens
tggaggaaggatttcactgtaaatcttccacgattttgggaatcacatgcatgtttggcttgcgatcatgtgaaaaggcatcaagaatataagtctgttggtaatttagagaaatggttttggaattaaaatttttcatcacttgcacacttgataaatattttgatgagatatcatccaagtattgaggataagaagagatgcaacatactacttttgtgtcacaatttatttttatcaccctctctagggtaacgtgtatattttggtggagatttttaaaagctcagcatgagcaatcattccattcggttttaaattatcctgtatatacctaattatgtgcactggagagtaatttattcttcattatcatttgtaaacattgttttttcacatttttgtagttgtccataatgtaagcttgtggtttgattattgtttccacactgatcagctgtttaatctatttgggaaatgaagatgcacatcttaaagtatgaaaaattttcactaagtattacaatgtctagttccaactttgcatactataacagaggaagaacatgttgcgattgaattctaacctctttgactccgaagatgaatgaagtgtataactgtctctatttgatctattttttttacctgtttatcacatttgtgaaggtgaaattattcatggagtgaataagaaagatatgaagcagaactgttctattcgggaagctattagacttctcatttattttcattaagctgatttgcagctacttattctcatggtcttaaattaaattattcaagtatttttaaatatccaatttgttgtgattttcagcacctgggaagtaatcccaataatactttagaaaatctaagacagttctttctgctactgatgacactcattgtcataataaaacaaataatttcctcaaataacaaagaaaaatgatacctataaatatatttataaatggtgtcatttatgaacaatgtttaattatgtatcaatttaagatttttttctgaagccctaatatttaaaatggtcttattttaccatatggatataagatttggctcataatgatgagccctatcatttgatttgagttctatcatttaagagagcctaaataaaattatcatcaaggtattaaatataagacgttaaatataataaagtggggatatatagaaaacacacagtgttagcacacagtaagatctcaatgcacatttgttggatgaataaataaatgcaattgaattcccagaaaaatgattgtttcaaggaagtgacagttctactttagaagtactaattggagatgacttttatatcccattttggtaattattcatacatagcacatatgaccatgatgttcagggctttatagaaccaaataaacctaccattacatgaaaattttgaagagtatattcctgaacttgcagctgcctatagcattctcctccataaggctagaggagagctggatataagcagagatcgtaggtgaaaaaagatgggccattaaggattcttcaaggaaaacattcctcaaaatgatctttagtgcctttattcctttcaggccaataatccacccaaaaattagaatgttctgagacatccatttgggtctatttgtgacttattcgtattacaaattgacatcagcaaaattcaaaaagaattcagtaaaaagggcatagatccagctatccagactatcttgtgagagaataagctcaccccagcaccagaaagatttgagcagaggaatattcctgtaatgaatagaggattgtttgattctcaggtatatttcttaagccaagattgaatgcagtgtcaggcactgccttaacacccacagagataagatgaacaaggtactatcactgcctaaaatgagcttacaattaagtggatagacatataaaagcttcctttcaattcagcctgagactgtttatatgcatgtgctactccgaatgacgtttgtatgggtcaatgctgatttaatggggaaaaaaagtagaaaatttccccaattgcttagctgtttgacatgtttctgagctgcaaactttgtcaactct

SEQ ID NO: 121989 - DNA, 7277 bp, Homo sapiens
agaaataatatttttatgtggatgtcctcctcaataagtaaagatctccatccatatttaattaattggtaagacagtcaaattcatacatttacatttactttgtcaaattttttggtctataaaaagcatagagatctaaagaggatacactgctaacaagtttagaaagcacctgcttttttttattattattatttttgtgatagagtcttgctctgtcgcccaggccggagtgcagtggtgcagtctcggctcactgcaacctcggcctcccaggttcaagtgattctcctgtatcagcctcccgagtagctaggattacaggcgtgtaccactatgcctggctagtttttgtatttttagtagagatgggtttcactgtgttggccaggctggtcttgaactcctgacctcaaatgatccacttgcctcagcctcccaaagtgctgggattacaggtatgagccactgtgtctggcccacctgttttttttgaaggcagaaaaacattcaatattaaaagcattcaatattatttcaacctgccttggctctagtgaatgttcatgatttgaaagaactgaaagacctaaaggcagtgtctctattgttgactacaaatgtaggctctttgttggactatgactataatcacacactgataatatgacgcaagtagaggcagtactactaagtatctagcaggtgctttgaaaccccattactaagtcccagaagactgtttcctaaatttgaagtggaagaattaaatgactcaatggaaccctttagctgtgggtccattgatgtgtgagttttagagctggaaggaattataattttgttgtttataattgctataatatagaaattataattgcttttctttctacttatgagttaactagatccagagatatttattcaagacacacattcacacacacatacacacacacacacacacaccccacagctagtgacaatagttaagatttggatttaaggatcctatctttctttatcccactttcttttcaatcgcattcataacttattatagaattatgtctcaatttttacaaatgtgaatgtcttattggtatttttagggcctatagaatggtacacctcatgtagaagaacttcgacttttgaaggtatacaataaataaaacatcaaacttgttagcattcgttctggtttaaatattttaggagttgagttcagcagaaggaaatgggctatcactacatttaagtgaaatacaaccctcaagaaagtgtatggttcacagccactcctttaataaatcctgtgggttgcaattctttgtaagaaactcatgaaaaagatatattgattcaacaaaattggtttgctgttgattatacaaaccaataattatgcctagaattaaattgtggacacaaaaaagggaacagaccatttaaaatgttttatttcaaaatatcgaaaagctattaccttcaatactctaaatatttaaatattaattattgtagacatcagtaagaataaataaatgttaatcattatagaccttactaataagaatatatactgaattgtccacatccagagtattacaccctgaacaagaaagacatgagagcctgacagtcatatatattatgacagctgtatatctgacaatatgaagtagaaactgaaaaaaaaaatcatcttagtgggaaacaaatacatgcttaaaattgttatatttactgtaaaactcctgataatcttagattgtgcagaaatgtttcttattttgaggggcttagaaagctcagcgcatttgatgtataaagcaacagaatatttaggaattatttgcggaggctttaaattcttacctccaattggaggttaaatattaaaagaataggaaactatgcctctgatattttttttgtcagcctatttttaaactagattccatgagtcttaaggtaatatcctagaattttttttttgcgtgaattaaagttaccacaaatttcaggtccttaccttatgactgtgtttgatcatatctttgagttcccttgaactctgatctcattttgagaaacattttgagaaacttcttaacaattacaatcgagctgttaaatataacaaacatcagaatctaaaggataagcacagtgcctaatgtacaggagggtcatatcaaatacttgttgaataaatacatgaatgtgataagtggtcctgtaaaatattttttaagagtagtgacaatgtttattggtaccaattggagatgatattttatatttattttgttagtttgtcacctggatgcaaaaggaaggcattttaattcctttctatcttacaacattgtaaagcatcaaaagaagtaacatctcaagaaagattagaaaggatttggatcacgttaacattctatgcaaatattagtaacatatcaactgtttctaaaaggaaagaaaattagtatttaaggagagtataaagtgcgagcactgtgaagggcagatatctattaccaaaccacatggagagaaatatagtctctctcctaacttcattccattgtattgcaatcagtcaattaaggtgattttttttttctggatgtctcaatctagagattttgtagcattttgcaaatgggtatgcttcactactatccacagtgttctcccctttagtaattcatattgaatatatccatattcatatgcattttataaaacagttaacagaatctaaataagatatagccggctaaatctggaatgtgagtgctaccctaggttattagttcaacaaactaattttgagagagccacttaacctctctggaccttgtttgtaagctttcttctagcactattactcttatctaagatcgaaattgatatatgcatgaaattcctaatggaatttcaatgtccatctcaaagtaattttttaggatattccatacagatttccttctcatttctctgtgtagatatttaaagtatgaaattgattatttaaactaatatgtggaaagaacctaatccagagcttggaatatagaaagtgctcaattaactgacattcctcctgtatttcctccctccccttagttgtctatgacttttgaactcactgctcactgacatcttaattgcctgcagaaaaatcaatcatattttaggcattattttgaaatattttagagttttctgtactattcaaactcttattacaaaaatctaaagatatttattgatgcaaaaaatttagggagtcattggaaatacctgaggcaatcccaggctaacaataaaatagcataattttaagtaagctagattgagttcatttgaacatttagttattttttagctcatagttaacatatgtccatgcatttgatttactttaaaaatattttatttaaaaataacctctcaaacaccagttgctttctgtcagttttactcaaagcatgcttcctaggtcacctgacctagaatcaccagaagtgttaacaataccgatttctgggctttgagccatgaaattagaatttcttcaaataatccatgcccccccgtcacccaaaaaaagagcatgcttttaatacatttccaaaattatcctgtttctgctataactggtgaaccatcctgtcctaaactagcagttctcaaacatgcatatgcctttgaaacttcctagatcatctacataaaaatcatttgaaatattgttaataatacacagcttctgaatctctgggtgtgagatgggaccaggaatcttattttaaaaatctccccagatggttctggtgtcctgctagttttgaggttttcatcccacctgtttagatgggtagtattctattaaatatgaggtattacctttctttagttcacctggaatcttcttaaatatatcggtaaagtattctacttcaaaatccaagacattttgtatacctaattatttcacacaagagcgtggaactcaccagtcttgtgacttggggcaggttatttatagtctccagacactttttccagttgcgagttgcttatagtagttcgcgaacctgaatgcacattagaaccatctggagaggctttaaaattgcagatgtccaaaccccacctccagagagctgatctatttagtttgaggaagagcccagaagtctaacaggtgtaaatgttccacaggtaatactaatgcaggcatacctcaggaaatcaccagttctcgtcttggaggaactattaggaaaataaaagattatatatcttgaaaaaaatctctaatttgctttctaggttctaactgcatgtttatattttgcaacaggaaagactggtctagacaattactaggatatatgcttctgtgatctgcttttctattgtatgtgtttaagagaccacattcttgggttccaaagtctccttgtctgataggtaatttgcaattgagatatggcaaagaattgtagcatccaaatttttgacaactacagatttagaattgaatccaaggtctgccattcactagctatgtgcaagttactcaacttctcttatcctcagattttgcagctgtaaagcagaggtagcatatttctgagaaattatattcaggtgactagatatgtgttcaagtgttatcttttattcttataaaagataattgtgaggaatccagtgctattttcacaattttaattctaaaactctgaagacattaaacaggcagtttgtaggaatcattgaaattttatacaagccgaaggaacaacattcagcaaaacggaaacaaataaatacagcatggaagcatatattcatgtttcccataattactaagttacggaaggggtgtgaggagctggcagtggtggtgaataggcattgtttgcattactaaatatatataccatttcttaagataattggaactcaagcagtcctaattttctctccctgttatgagcaatcagtaaatttgtagtcaatttaacttattatcagttggtatagcgcatgtcacagaataggatagcaagaagattctcagagatcattttctggtaaagaaaaaggcctagcaatatttaacagtttgacttaatccatcacttcagctggtccactagttttgacacaggactagttaatgatttgttaggaagtctccatctactcttaaactaatttaaaaaaaagctaaaagttgcttttaatatgttagggtataacttcaataaacaggagtatttatctagtggttcagaaataaaataattgttagccagcctgtgattaaggctaccataattgcataataaatagctttgacgtgaataatctcagttgttcaagtgtacaaatttaaagctgtactatgttagaataaaaaagtaggctcaaggaaaatttctatttttctatatgaaaaagagaatgatattcaaaatagtatttttaagtagtttctaattgtgttcctttaaagagtattagaaatgtctgttatgtcagtaacattagaaaacttcaaaaactgatttatttttctgagttctctggaaaccaaacaattttgaattagttgtgtaagtaaagtaagttaagttatagcttgctggaattttattgtggaaaacaaatatagattttatctgaaaaattttaagggccaattctacagaaagttatgctaacatgctaactttccacacatggctgcattccattttgattaatgagggttcaggaaatagaaaggcagtctctgcagaagcagtatccaaaggctaaattaacaacccaggactaccactcattatgtgagaaatatgggccagagttacaatatcacatctccagtctcagattggcctcattagccaccttcagttccttaaatgagataatcctgaagatgccatccttgtccaaggtgagattgccagaggatatgagctcatctaggatggaatacatgtctccagggactgtaatgagatcaggcttttcatttactggttttctgcctcaagagtccttaagcaaatgaagattatctgattgtctatgtaaacctggaagtagtctactttttagataaaagataatctatcttgaatatttcatatgtgattttaaaataattaatcaaaaaacaaagactatcatatttgagaacaagattttacttagaagggaaaaaaaagaactttcagcttaatcggggttaagggagtaattgtgacaatataaaatggcattgttatagaatccctaaaaggtaaataatgtatgagatgaaggtaggaagtaatgtgtgcttgcagaaatgcaactggtcaaaattacttgaatgaaattgttgaggttaaacatcttcattataataatatgtcttattctgattccaagacaatacgaatgtagagaagagatttttaaatggaaaaagtaaggagctaacaagtctgtacctagattcaagttcacaaagcggcaaaaaggagaaaagtgtcaacaagaaacaagaagaggagtagtaaactaaggatcaaagcccaagttccagttttcacaatctgctgtataattcactaacatttctgagccatagatttttaatctgtaaaaggagtgtgatggactgtacattagaagtacctgagaagctcttaataaatcttgatgaattggttagaaattctaatttaattagcctggcacagtgcacaaactgccatatattcgtgcagatgttttcttcttttcttactgcgcatttccatgtggccatgtcactacaaggggtggggaagaagttaatgtgtaattgcttcaggagctctgaataaaaggttgctgaagcaaaatactgcaatgaagttctgaaaatgaagagttaggactttacatgatttctcttgcctcattccctcaagaatgcacatatagacacacatatgccaatatcttttttatgtagttcaagtataactttgaataaaatgacttacattcaaggaaggtcaaaactattattctgaaacaaaatgtgacaattctagccattatgtgaattgtaagggtcagtaatccataaattatttggatggtaattgtatgttttattaatgtgatgtaattttgcactattgtattgtcatatttaatcaaactcttaaaaataccctgaaacataatgccaaatgtacagttta

SEQ ID NO: 121990 - DNA, 1356 bp, Homo sapiens
aaattgcatgcaattggtgaatcatgcagctttggggacatttacactgccactcacacacaggctctgtctcaatccgtatgcatgattcacgtcctttcaaaagtcccttttcaacatttggtaaagtgaaaatgttattcatagtgctaatgagccaataaacaatgctgcgtttcttttttctaactgcagcatattgtggtaaattttctcccaaaactttatttttggagttattgttggcaataaatacaacaaattatttgttggcaagtgatacaatttactgtataacaacttaatagtacaaagcatgaagatgtgaaaatatcatcttaaccagtttcattctatgaacataatattctggcagctttttctataactgagaatggtatatctttttatacactgcctaaatcagtactactgccagtcacctgaggtcaggtctgcacaacactaaattgggcaataacatagaacatctaggcagtcttgacagtcaaccagtgtaatcactaggggaagaaaaagtaggcctacccttttacttattaacttaagtaataaaaattgtataaaaatatgaatgttggctgcagaggagcctttacatgcagataatttgaagcagtctttgaaaataacaaaaattattccatttaatgaagggtttgttttgtttagcttttctcttttattcagaaaacatacctgtgcttttgaaagggcttaatcccaaacaggtaatatgtgtggatcaatcatctctcctcccatgaaattaatcattcatggtaatatattaaggctggaacgtagctcttagtgacttaaaacatgacagtaagcatttacactgttggaaggtaatttcattgctatgttattaaaatgatgggaatcctatttatacatttatttatttatttatttacagaagattggttccttccagttcaatttaacagcttcagtgaagttagtataatgataagaaaaattgactgtagctattattccaagtgaaaatcatgcagctgagtcctgctgcatcctgggagcaaagcattaattcaaatgaggagtagtcagtcctagcactgtagacgccgactttaccaaccaagatagtgtatgtgtgtgacattcagctaacattgatctaggcacttagtttgctaccacattgttcccttcattgattgaaactgtaaataacataacactttaaggcagctaagcaaatattttaataagccatgaaaggcaagatgccagagaaaatctgtatattcagctatttggagaactcgtgttttccacaaattaaactggagatgtcatttg

SEQ ID NO: 121991 - DNA, 1629 bp, Homo sapiens
tgcctgcttgcagaccatgtgtgtaagtgaggcaattatgcacttaatttaaaagaaaattctgattaaactggaaattagggcattttttgttttgttttgttttgttttttcttttttcctacctaaataaatgtcttcaattttcccttcagatttgaagattggaagcaggcctgtaagagacaacagacttgaaatttgtgatgggatgatgtgtaccaattaaataaatgatttaagcatatgtaaacctacttactctgaaaggtttttttttaacttattgaatcagttagtgaaaaatacagatattgtgatgtagaagttagtgactaaacaaactttttaaaagcctgttttcatacattgtattaattttattgagcgccaatgtctcaagtggacttttgaaacaactttttttctttccctcaggttgtccgagcggaactgcattgagattgttaataaattgattgctcagaaacagctagaagtagttcatacactcgatggaaaggaatatattactccagcccaaattagtaaagaaatgagagatgagctacatgtccgaggtggtaggtaattctttagtgtttttttttttcttggatttttggaaggggcaaaacaaacaaacaaaacccgtaaacatgtaattgcatactaaattatagattgtaagatatcgttttcaattgttaatttgataatcaggcttaatatttttactgggttcatgcaaacatggtcatataatttaaatgaactcaaatgttgtcacttaaaatattttatcattttgagttatgtgtactatacatgaattaattgtttctttttacaattcattaatttattgcatgactcagggaagggtattcagctgccttttattaggtggtaattgtgaagggggacagtatcttacaggattatagatttttgaaaatcaaggctgtatttctttttaaggcttacttgtacttacaaattaggtaactcaatccagtgtggtgctacaccaatcatattgtatgaaatgctgttaaaaacacgcacaaagttggtttcctttgtcttcttaaaatttgaacagactaccaagcatatttgaatactatttgattaaaatagaagcaattatgaaagcctctcttcatattatcagagtgtaacattggtctttgtctttttttatttatctattttccttcatagtacctttaaaatatgagctataatttgaattacttaacagattttcttatgctgatatgtagaagcctaccttttagtatcaaataattgaaaaaaagttcatcttaatttagttgtcaatatctctttgatcacagtagataaattctgaattgtgaagggaaatgaatacccttcatagatagagccaatttgtgtgccagttggtgctcataattggcctgatgttatttaaaaaaaaaaaaaaaattgaaagtaagttattgcttatggcttcagccatgaagacttagccatcagctaatggtgtgtatttgaagacattgattattctggctctctgttctatgcaggactttgaccaaaacttaaatgttagaatttatagctttgggttggtat

SEQ ID NO: 121992 - DNA, 1053 bp, Homo sapiens
cgctctttatgagaacctaatgcctgatgatctgagatggaacagtttcatcctgaaaccatcccccacaacccgggtccgtgcaaaatttgtcttccatgaaaccagttcctggtgctaaaaaggatggggaccgttgaactaggagatacatatacacatgtacatacacccctctatacatctgtatttctgtatctttatgtgtattgaaaactgtgagtttgtgctgatacttccatttctagtccaataccgtaagtttcatttcattctagtttccttcttttccatgtttgtagctttgttcactgactaagaaaaatctaactcctattatccttaatgtatttagttacttgattaattccccttatgtgactggtttcccattgctactgcagctccctttctcatgtgggtgttctctttattccatgtaggctctgacagtctgtgccacatcaccctcctaacacaagaaatgggtggttgtttctggggaaagaaactgggtagctgggtggtaggaatggagagggattcttcagttttgtaacttttttgtaccctgttcatttattactttgtcaaaaactaaaaactaaaaatatctttgttcctatttataaatatttaccttttttctttgactaattattgtggtgatggtaattttcatcaaaatcagctgtgtttttctcattcatagtagtcctgagtttcgctatatggaggtaccatcaaataatgagaggaaaataagttttgagcctcaaaagatgttgctaggttgtgtggcttccagatagtaccatttaaggcaccatatctttgtatttgtctcttaaaaataacgaaccatcccacttttctagtctaacttcaaaggagacacctgcatctctgacttttaaaaagtttatattttttgtttttatggatatttcttgttatcatggatagccagagagaagagcaggaagcagttagtgagaagaatgatgtatgtaggtatactaaatacgttgtattccaaattgacgtaaaaat

SEQ ID NO: 121993 - DNA, 1330 bp, Homo sapiens
aagttattctaaattctgtgtctgaaattctactgtcatttggataaattggactgaatttagttattaaaacaattagcatatatatatataagatatatatacacacatatatatagcttacttagtttgatcagttttataatccaagtcaaactgcataacagattacttcctcagtaataaacctgtaagtccttagtatataaataatttaaacgtatggtagaatactgggttttttccttacgttttcttgacttcctgagttgtacttttcagtttcttcaattataatcatggattagaactttgttataactagttttcttaagcatgattatttggggtggagttagaggagttaagaaggtagacatctctaataactttattggctataacttttaagtctttatttttcacttttgtcttacatgtaattgacaattctaatccaactttgtgatatatttgtagaatttgatgctttgtccagacttggaatcccagatgctgtaagctacataaagaaaagatataagactacacaactcttgtttttgaaagcagcttgtgttggtcaaggacttgtggatcaagtggaagcatcagtagaagaagccatcagctctggaacatgggttgatattgcagtatgttttatcttttcctcacttttctttaaacagtgacaactgatattttactaatatttgaccatttagaaattaggatacataaaggtggtcttggctttggaggcaaattctaatcattgttataacaaaaataatctttatgcttaaagtctttcgggtgaccttctacatgtggacagtcaacatccagaattctataaatctcaaaacaaacaagcaaacaatataacactcctgttaatcctgataaagaattgatgagacttctcacatcttttccacgcattcacagccgtactggcatcaggcattgtgtagcatttgtttattccttatccattaatctctgctaatgtattaacacaagctgccttggcacggatagtgtttacttcagtgttcaatgttgatctgcccttcagtatgccaaaaagataagtgtagataaagataaataaacgaggccaatccattattttctagtcgggcccagaccctctttataaagcagaaattctctgttttggatatgaaagtcccaaagattccagatttaactgtttttttattcatctaacaaaactaccttctgtgtgccaggcaccgttctattaatacttgttggggatatggtagccagacaagcttgctgtctttaggagggacac

SEQ ID NO: 121994 - DNA, 1712 bp, Homo sapiens
tttgcataaaaaaatagagatttctattcttaagccttatttccatagaaacaaaattccttatctatataaatactcagtacattttaataaactaaatatatttgtcttatgcacagacctcttaataaaacttatctcgaggtggtacgttcagtattcatgtcttcaacaacttctgcttctgggacgggcagaaaacgcacaatcaaggacttgcaagaagaagtttcaaacctgtacaataacattaggttatttgaaaaagggatgaagttttttgcaggtatacttaatctttgttaatcttgttttttcattgattttcataatttggggaataaattagttttaataaaggtcctttattttccagatgacacacaggctgctcttaccaaacacttgctgaagtcagtgtgtactgatatcactaacctcattttcaacttcttagcttcggatttaatgatggcagtagacgatcctgcagccattacaagtgaagtatgttaatgatctccctaccactattgatgtgttctgttttgcatctatacacattttattttatcttatttggagtaaagaggaaaataaaatacagtgaaagaggtttgaggaaaaaaatctaaaagttttttattcaactttagtactatatatacagttgctagcaggattggtagtataactagtctgttaaaagtaatgatgcttaattactttagaataaacagttttttccctaattattatgtcacattccctcttcctaatgactggcaaatcccataacattctgacccatttccataactttgaagttattttcctttaaggacatctcatttcaatatttagactaattccaattaattttttaaaactctaatctcaaactaaattcaaaagctcatctcctcccttcttgctatgtaatgtagagaatggctcccagttgcctagaggaagaaaggtgccatctatcccaagatgacaacccctccttctccttctctttcttctctgtcctcctcccaccttctctacctcctcttcctcctcctctttcctgttcttcttccttcttcctcacctctctaggtccacttcgagttggagatttaggaaaaatgaggcaggaaaaagcgtcttgatgtgactgactacatgtcactgctttgatcaaggtcaaaccaaatcagtctgatgtttgtggtctttggtgatgtagttagtcattgcctcataggcgatataagttgtttccctggaatgttgtttagtttcatgtgacttctcacagtaaggaccatccctcaaacagaggaacagttatttcttcctccttccccagcaaggtgctggcccccttcccttcttctgcttaagaagcaaatccccagttgtctagacagtttcatgtctcctgcccttataccaatctctgctatggaaaatacagaatatcttgttccatgccctttaagggccacagaaggattggtgtgggattggggcagagaggctagacaggagcaactagcccttaatcttcccagacattatacacttcagggcctggtgtcaagccatactagcaagtctgctccaaaattttatgccagaagaaactaaaagactctgatcaagaataccataaaacttcagtggacacttacatgtagagagaggtgctgaaaagattc

SEQ ID NO: 121995 - DNA, 1135 bp, Homo sapiens
gaaaagatacaataatgtcaaatctcccatttcagcttctttaggtttaacttatccatcaaggacccattcaaaagtcttgtcctatcccttttagctaaaaaacccctcagctaaaagggaacttccctatccctttgactgtatctttggtgatagaaccaggtgataagttgactttaccataagtcaacttatggtaaagtgatttgcattcatgttttatctctcctaaattgtacactccttgagagcagaaactgctagattagacttgctacttacatggccagttttttgtaaagatgaggaccttcaatgtgtattagttgaagaaattctactttatctgttccacaaaaagataaattgtgttgattaacttttctttcccttttcacaggatcagcatgctcttttggtaaagtatcaaggtttggttgtaaagcagctagtcagtcaaagtaagaagactgggcagggagattatcccttgaataatgaattagacaaagaacaagaagatgttgccagtactactcgtaaagagcttcaagaactttcttcatccattaaagaccttgttctcaaatctaggaaatcatctgtgacggaagagtaatgatcttaatttacatttgtcatatagtaagcattttcccccaaggttgaaggtgagtggtcacaaaaaagtagtcactatacaactcccctctccctgcaaaaaccacctcatacacacacaattcagttaaaacagtagtattgtattaaatgtaaatcttaaaaagatgtgaatttttgtaaattgggttcttcatggaagtttttttccacctgattttcacacaaatactatatgaaatttttcacattattttcacataattttaaaaattacatatttcaggtttgttctctttccaaatgttgaatgaaaaacaaattttccaatccatttatccctggggaaggattcatttgttgcgagtgccagtatacttaaatgtatactttatatacatttaagcagaaatttaaaatgtggtcttttttttttaaaagaaacacttctgtgtcagaaatgaaaataaatcatgttttttatttttaaatagaaagcacttcaaaacta

SEQ ID NO: 121996 - DNA, 1104 bp, Homo sapiens
agttggattagatgaatctctaacgtcctgtccagctcaaatgtgctttcctctatactagggtatagatttttgaagagcctagctgacttcagcatcacctcaccctttggtctccagtattacttctttacattttacttcattagctatttcttaatattaaatgtctgaagagtgtggcactgtatcaggagttggggcattgaaaggttgaagacatcatgaaatatctgggaaactctgctcttaaggaaattgcaccgatgttggaactcattgtccagttaaagagctctttggggactcaagcatattattcaacatgttgttttgggattatcttcaaatgatagtcacctacctctttcatttctaatttttattcacaggtaaaattgtttttgtccatagggattttataggacataagcactgtagtagatactagtagcattttgaagtgtattatgctctccattttccatataaactagatttcaagcagatattgataaggacattttttattagacttttctctgaggaaagtcagcatgatctgtattcatcttacatattgataggtcatgaagactcctttttggctggaggtgaaactgagctttgttttctttgttcctgttttatgggcagtctttaggtactttcatgctgcttaataggcagtgcctcatttggtgagagctctggagtgcctgccgagacgctccctgtttgtgaacaaagattatgaaggggtctttgtgagaattcagcagcaacactgaacagcagttctttttacactggattatcttgatctgatgagagtttacaaatcattttgaacatttttattatgtatacattgtgaaagctttaaaaataagtactatggagcacctttgagaaacgtaggtgcaaaatcatatgttgcctattcccccatattttcttgaggcagggaaagataccactactaattctcactgcttacaggcataatcagaaatggttttttgtttgcctgtttttccttctggctagtaagaagcgtaaaagagataatgaaatatttgtggtcaaaagaaagatgcaagg

SEQ ID NO: 121997 - DNA, 1026 bp, Homo sapiens
gttctttgatgcttgttaaggttagctccatggacaatggcaggtgttctctacaaataagtgttccacgtgtagctttaaaacgatgtgtattctctagctactggatgcagtttcatgtgtatctataagatgaaaattttaaatgtgctatttaaatctttatccttcttcatgtttttatctacttgatcatttaattactgagagattataattatggatttattattttcatctggttaattcaccttttactttatatgtttttgaggtttattattagatacatacaagtttagatttttaaatatttttgtgggaaattaacccttttgtcatatgtcataccttctgtatctctaatagtattgtttgaattaaagtctctttttctttgatagtaatacaacgatgaagggtcccctatagattatgatgggcttgacacacctttccctacttgttggctttaaagttggatctatatccttatgattttagatgtgtctcttgtaaatagcatatagctggatctttgcatttaactggagagtttagtctctttatatttagaatgaagactgacttggatttatttatcatattattatgtattttctattctgctttttctttgtcttctttcctttcttgccttcttttggatagactgaccctctgcccctaccattttttttttttttttactgtttttatttggggggtcaggagattacctataagttctacatctattattttagtggttacccagacaattttaatatatactctttctagtctaaagttaatatctttgccttctattacggaattgaattgtatcccccaaaattcatatgctgaagccctaatccccaatatgactatatttggagatagggcctataaggaggtaatgaagattaaataagactataagggtagggccctgatccaataagatctctgtggaggtacagagatctctctctccctctgcatacacagagggaaggccat

SEQ ID NO: 121998 - DNA, 1853 bp, Homo sapiens
atgggaagcaggcacggcttatattgccagagcaagcagaagcggggtgtgggggaggtgctacacacttttaaacaaccatatctggtgagaactctatcacgagaatagcaccaaagagggaaatccactcccatgatctagtcactttccaccatgccctacgtccaactttggggactacaatttggtgacatgagatttgggtggggacacagatccaaaccatattagttgttatttgaagaggaatagtgtagatttgagaagtatgaaagtagatgtcaaatcttttctctcatcctaaaaccttttttttttgatactaggtaaaagctgctgaaacatgtcaagagccgaaggaattcagattgccgaaagaccatcattttgatatgataaatattaagagcattcccaaaggcaaaatttccattgtagaagcattgacacttctcaataatcataagcttttcccagaaacctggactgctgagaaaataatgcaggaataccagttagaacagaaagatgtgaattctcttcttaaatattttgttacttttgaagtcgaaatcttccctcctgaagacaagaaagcaatacgatcaaaatgaagaaaatcacagaaatttcctatgtgtactcctcatccctcctgctgtatattttctcattttttgcgtaataaattatgttaattaccaaatatttaatgctctcattgtgagggcatactcttaatatttattgagctccctgacttttcaagattgccatagaatatcttttgttttattttaatttggtttaggcatatttcataagtgcatgtcagcatgactgagcacatctgtacctttattatggtgaaagagttaatttgttattttaggcacatataccaacttttaaattggtcatattaccccttgggaaatgtcctgaatccctcaactgagttttactttccaagttaggtgtttagttcattcttctcatgcgatagtgaaagtaaaagctttcctgacccttaagactgacattttctcgttagggaaagagactcgatagcagggtagactaacagtagttcccaaataaaggcacacaggagaaaatgaatcaatagaatctaattaaaattactactccagggaataagaagtattgaggatttattttattttgaattggttttaagtatggaataattgtctttacagttataaaaagtaattagtggtgtttacaaaatgttgggaatttctgctttgacagataggtaagtcccatgggaatttctgctttgacaaatagttaagtcccatggccttcagagaggcaggaagcagaaactttcaaaaaagtaacatttctctggatttaatgtggaaatagagaaaaatttaaagaataattaaaaaaccatggtagatgaaatttggtgattacatatagtttcggatgttaatgctagttgagagaagagaaaaagatagcaagtagaagcagagaacaggatcattggaagggacctgagaaattgccatttcatccattttagcaaatttaattagcatagcatgtaccagtactaggatcttgagtgagtgtgtgagtttagctctgcctaatatattactacttgggggatctttgggagactatatcttcttggagattgagtttcttctataaaataagcataatgctaccctaaatgtaagggttatcatgaagataaataataaaggactacaaaggaccaagcaaataggaattattttttgcggtggagaaacaagtgcctggggagaatatatgaccgaagattctgtagtttatgactt

SEQ ID NO: 121999 - DNA, 1033 bp, Homo sapiens
agtattttcctaacagtccaaatgattatgtttattttttaaaaaaattaaagtggttaggccgggcgcggtagctcaagcctgtaatctcagcactttgggaggccgaggcgggcagatcacctgaggtcaggagttcgagaccagcctggccaacatggctaaaccccgtctctacaaacaatgcaaaaattagccgggcgtggtggcgcgcctgtagcctcagcttgtcgggaggctgaggtgggagaatctctcgaacccgggaggcggaggttgcagggagccgagatcgcgcgactgcactccagtctgggcaacagagcgagactccgactcaaaaaagaaaataaaagaaagcgtttgtgttaagcgtttaggatattacaggaaattttccttgattttaatattgtgacttttttcctttccttagtctatccagaagttaaaggagagattgctcgtaaagatgaaaagctgctgtcgtttctaaaagatgtgtatgttgattccaaagatcctgtgtcttccttgcaggtaaatgtgtgtttaattaagtgaatacacaatttacttattttggggcttcaggaaaatgattaagtgtggcaagtagtaaaaagagtgctctgcaagtgtgtgttgtgatcaatctacacgccttggcaaagtttaagcacactggtgtaagacagcaagacacttatgccttggttcactggatatttaccagaattctaaaataacttgtggaagtattgatacaagcaactgtgtgaattatttcatagtatttcagaatttgtaggatttggtaaggcattacttccagtggttgtcatttgagtgacaaaagcagagctttaatattattttctcattcttctgtggattgaggtatgttctaatctcagagactcctttagtaagtggtgttgttggattttgtggggtgttcctgtttgtttttttaaggatgtattcagataggatatttaaaattagaaggatcaaagaatacattaggaat

SEQ ID NO: 122000 - DNA, 1011 bp, Homo sapiens
tcctcatatttgagcaaaacacatgtacagttatagaataacaccctataatttcccttcagtggtttgatcatagtctctgagccaaaagacaatattcatccatctagtcattgatggctgggattgcatcagagcattactcaatactggattgatgacatgagacttctaaataaaatgatagctcctgcatatttacataacatgtcctactagatgttgaaggaactttgcatgtggtcactgaggtatttagcttatattgtataactacactggaaaatgagagaaaaccaatttggtcaataaaagaaaacccttctgtatcacattggcaatagggactagagtgacctcatgtgggtcacaacaccccccattgtttcctagctactgcatgcaataaggatgcattaccagggtgaagtcagctgaaatggccagggaaatcctgatgcttttttctatcacaaattggtatatgcctatagaggtaaatctgacacaaggaaaagaatacaggacttgatgtcaaaagacccatttctgcaacctaatatatttgtgcatttatgaaaaaccaacatgctgatactcagttttatcaacatactgatactcagcaaaacaagtatgataatacctatgtcatagggttctacggaagactgaatgcgatcagacatgtgaaggtgcctggtaaactgatatttagacaatgtacagaatttatatgatggcaatatgcctccaagagatgaaggtattccccaatataattatccttttaaattcatgataaagccatcacatgcagaccatttttatgtaatacaacattgtgtgttagtgatgtaaattttgagagattgctatagttgataagaaatttgctatacagtattaaatacttcacatatttaaagtgataataaaaccatggcagcacaacagattataaactagctcttatgattaaccatatttcacacaaataaactcagtaat

SEQ ID NO: 122001 - DNA, 1027 bp, Homo sapiens
tcacagatgaggatgtttaagccaacattatgtcagactgcctactaactagtttgggcaagttatttaacttgtctaaggcagttttcttaaatgaagtaatgctacctacctcataattgttctgaagattaaatgcttataaatatacatgtatgtatatatgtacatccaaaaacatactaacatagtgtagcatttagtaggagcttaataaatatttctagtaccatccaagcaagaaaaagaattcctaagatatggtgatggtgacataactgaatttaagttcagaatttcttttatgtatacatagctttattttgagcagtcatctttgatacacaagcttcttctcttcctcttttgtaggtactggatgtaagcagagaaggcaaagaagaagtattctatgggcctacactcccttttgcttccaatggaatagcagcatgcttccttccagctccatattttacatgccctaaccttcaaactcttcaagtgcctcatcacaggattggcaccatctgaaaagccaagccatcatgaacaggaggaaaacatagctctgactgttggatactgggcatgaaaagactcagtgctccatgcttccttgtcttgctttataggtcttatattcggataaatttaagcaaaaaatgaacaattttctaaaatacgttattgaaaactcgtcacccttctcagtgtatgtcaacattcaatatgtatgacttttattgtggtatagcttagtgccaatttaaggtatattgtgttccatgggtctttagagcattctttgtacactttttctaatcagcactgtcttaagacaacataacactgttagtaaggcaatttattggacacaatggcatcgatgatcttaaaaatatatatattctgtacttaatccctttattatttaaagccgggcttgtaatttttctttttaaaatttaacattatgcagccctgctcagtagagactcactcagcattatgacatcataaattt

SEQ ID NO: 122002 - DNA, 1440 bp, Homo sapiens
aatgtcatttttcactaaatgattttaaataagacatctgagagttacttgaggcaagtttagatacctgtacaagtttagattttgagaaactccctatttcctcattgtgtgtctctttcacatgctttttagaatcatttattccacaacatgtttccaaattctatctagtaatttttaaacttcaaaaataatctccctgttcaattacaaggttctaaagacaataaaataccttataatttcagtaacaacatttttctttttcttgggcaaagtattacaaagtgttcgcctaatcctcataatgttcttttaaattaacgtggaaatcagtaattatcctccttaaaaggtgggaaaactgaagcactgtaaagttaggttctgacccaaggtcagagtaaccaaggtgaaaaatctgggtatttcaacaactgctgttccagtgtatgtctattattattcgtatcaccttgaataaaatatggcatttaaaaatttatgatgtcataatgctgagtgagtctctactgagcagggctgcataatgttaaattttaaaaagaaaaattacaagcccggctttaaataataaagggattaagtacagaatatatatatttttaagatcatcgatgccattgtgtccaataaattgccttactaacagtgttatgttgtcttaagacagtgctgattagaaaaagtgtacaaagaatgctctaaagacccatggaacacaatataccttaaattggcactaagctataccacaataaaagtcatacatattgaatgttgacatacactgagaagggtgacgagttttcaataacgtattttagaaaattgttcattttttgcttaaatttatccgaatataagacctataaagcaagacaaggaagcatggagcactgagtcttttcatgcccagtatccaacagtcagagctatgttttcctcctgttcatgatggcttggcttttcagatggtgccaatcctgtgatgaggcacttgaagagtttgaaggttagggcatgtaaaatatggagctggaaggaagcatgctgctattccattggaagcaaaagggagtgtaggcccatagaatacttcttctttgccttctctgcttacatccagtacctacaaaagaggaagagaagaagcttgtgtatcaaagatgactgctcaaaataaagctatgtatacataaaagaaattctgaacttaaattcagttatgtcaccatcaccatatcttaggaattctttttcttgcttggatggtactagaaatatttattaagctcctactaaatgctacactatgttagtatgtttttggatgtacatatatacatacatgtatatttataagcatttaatcttcagaacaattatgaggtaggtagcattacttcatttaag

SEQ ID NO: 122003 - DNA, 1317 bp, Homo sapiens
acttataagaagttaaaagaagaaaatgggatatatactgaaattgctacacaggtctattttatggttacagaatttttgttttaatacttacgcttgtgatacaagtcttcccattgtaatcataccatcattgtccttaaataatattccatgaatgcattttattacccgtgagcattataatatttcggaaggttaatgaacttttacatgtcatttttagcacacattttatatataaaaatcatactttaatacatcttaacatctaggtttactcacaatagatataaagcattactttttaagaagtgttgtgctaagcctgctggatggatggctgaatagatggatggatggatgatgggcagacttaatttgtaaatactgaaatgaaaaataatgaaaatgttaatatatttgctttcttttcttttttcttaaacagggaagcctatagcaaacttttgtctcaccttggacagatgggacaagatgagatgcagagactggaaaatgataatacttaatatattttgtgattcatcctgtctattaattatcagtatctaaagccacattgttccactctaattcctacttttaattaattgtataatgttctgtttaaaataatttctaggattttttttccttttatatctgtaagtaaaaaatgtataaataaggaactgaaggttaattagcaactgtgtaataggatccttggaactttttacaaaactgcattctaccttgatgaaattttagttaaactaaattaaagaaacattttctgagagtgttttctgtgtgtgagtattaagcagatacttcatccatagactttttgttgtagtatgacttcctgcctccctgccttgtgactgatttgtcatgtttattttttatttttacaataatagttatgttttaaaatgatactttttcaaagtacctggctaccctatactgtgtttttggtgggggaaaggtgttgggaaatgtgactgtgtatttgtttttcttttttatatgtgtgaggcaagttaacaaagaaaacccttacaaagcacacttaactgtgttaggaatgagactgaatctggctaaaggattatacagctgatatccaaaaagaagtgtaaacatgccaacagggtttatatttaggttccaagagttgccaaattttttttttattcatcctttcttttggagttgtcattaaaaaaaaaatcatatcaggaggaggaaataaaggagactttaagaggagagtaaataaaaatattctagaaaagtaacaatagt

SEQ ID NO: 122004 - DNA, 1034 bp, Homo sapiens
ggtcctagactgggtttgagagagtaaagtgggaaatgtgagtcatgatgacaggtacacaggccttcagaccttgctaaacatgttccgctggatccattgtagaagtacatgtcactgcttttctgacttgctttagtatactaactgtagcttcagaaagctccgttatgtttaatttgtgaagcatggactttatagaagtagatctattgttcataagaataacagtgcaacttgaggcatattttctttttcttccctgtcttgttccctttagagtcttgtgctgttagggcaatacgtttttgtatttctttctgaagatttcttccagttcacctttattattcctatctctgccttaccactaccatgagaaataatttgcgttcgtttccttcattctatgttggatctttgatacctccatttttctcatcacataattagtgcctgtcaagtgtttatagtttatttaaattgtgatcagtcagtaacaatggatttgtgaaaattgtgaagccctaggaggggagaaaaggattttctatgatcaaagattgaatgttatctataatttactaagcgaggtggcttttcattttgttgattggtagtggagggtagaggttttaaggctaaatatagaatttttatttataaagaccttctatgggtctaaagtcttttattcagttaaggaacataaaatatattaggaataacttgctttcctcataaaaatattgtttgacttatatagagctacaaagaactaaaaaataactaggaaatctgacttttttctgttactgtctcccatatcctttccactcagattcaatatgtagaatattgcaaaaaagtcccgggattagatttttaccccttcttctccctcccaagcttccaactcttcccttccctgctcctccccacagtgctttcactctggtcatggctcaacttaaataagccacttcaattctttattttaaagtgttttaaatagttttcatattgcatccaga

SEQ ID NO: 122005 - DNA, 1041 bp, Homo sapiens
tgttcacggtatctagtttgctacttacatgtttgtgagggggtgggaggaatatgcttatgaatttttaaaaaatcaatctgcctgtctgtaaatcagctgaatttgtaaaggctttcttttgtcggtatgttactgtttgtaggattaggatggtgtaacttttttgaatatgggcacctttctaagagaaaaataggtcttcatgtattatttcagactaaaaagtagacttttaaacttttatattttcttaaaatggaagataggtatactttagaataaaacaaaaacttagaactatttcattttgaaaaatagaaaaaggatgtacatactttaagaaaacaacatatttttctaaatcaagagtgttcataaaaatgaggatccagatggtcaattcagacacagtgcctaatgctgtaatttttccttctagttaaaaggctggccacagagaacctgcaatacatggtaaaagcctgccaagtggggtcagaagaagaaccttcctcccagctgacttctgtgtttaggtaactggaaaatatgccacctggcaaggaaactattgccagccatttgacagccaacatgttttttaaataactaattatccaaaacataatgtgttactacttgtttatagtatttcaattattgtatttttggcagtagttttgttacactgtgatgttttattgaaaaataaaagtgccagtgaaaaagataagtgaggggacttaaaattacctgtgaatttagtgaggaagaatcttgcatgaacagtcatgtgtctcttaacgatagggataagttctgagaaatgtatagttagccagtttcaccattgtgtgaccatcaaatagagtgtacttatacaaacctaggtgctatagcccactctgcacctaagctatatggtatggcctaatggtcctaggctgcaaatcagtataacatgtctctgcactgaatgctgtaggcagttgtaacacagtggtaaatatttgtgtatctaaatgtatccaaacatag

SEQ ID NO: 122006 - DNA, 5032 bp, Homo sapiens
cacagacacttatggtagtgtgctcagtattttttttttcagacctcatctattagactatgggtgaggagatataagagaatacactgtagaggacatcagaggtaaaagagcaaaatgggtaggagttggagggcttttcatttcagagggagcaacatgtacaagggcatgagctttaagaaaatatagaatggttctgttgtggctggagagtcatatgggaggagccatgtaatggagggctttatattccatcctaagaagtttggacttaatcttttacatggggacctgatgaatttggagcagagaagtagaagtgacataatgatatttacattttagaaagatgattctggtggtcatatgtaagataattggtgtggaggttttggaaagcagtggtaactagttccttgtaataatccacatattgtcagaaggttttgacctaaggcagtgggaataaaacccataacagcagatttcaaaaacatttgggagctgtgattaagagtacttgctaattgagtgttgtggaggaactcaaagaagtgaaatgcttcctagattccagagtggctatctgcgtagatagtagttctacttactaacgtgggaaatcctggagatgtcgggatgaaggtaaggattggtttctgagcagctttagtttgaggtaggcagttggaaatattgatctgccattcaggaaaggatgagactggaggtgtactttattattcattagtgtctgatgttaaagataagtgcttcttaatttgaggtccaacaagggaagctgaggaggaaagggaaaatggattttgattatgtaacaatcttttttcaaagatgtatttcttaacagagttttaagattcctgagaagttttaaattttccctctaatttttattcataatagcatttaaaatgaagtttagtgtgttaatctagcagaatgacaaaaaggggaggcagccacaccacagcctgaaccgccaatcccacagagggagagatgaatagaggggagtggtgagcagcaggagagtctggaatatttcttccatgtggtcctcttaaacccaaacagtccatttaataagaattctcttaagcttcgtaagtggtaaatttaaaagtttggtgtattatctgtttggtagaactggagctatgtctttaatttcttcatggtacccagctctcctcttcggaattttcagaaaatattcatttattacttcatcttcttctgatttaatgtgcttttccttaaactactcaagaaacagagttggtggtggcgggtgggttgggggaggggttcattgtttgatttttttcagttgtttatttggtacagttttaacagctgtatgctatttttcattacaaataaactttcagaatttcttattgggtaagtacccgtttacaactaaaatggagacttcaaacattttaaattatttctcttggaaaatacgttgtgagtcaccaagtaccaaattaagagttaacttttataatataatgtattgctgtgttggtgattatctatatttagtagcatttaatatttactaatactagcagaaaacattattttctctcagagtattggtttaagtattaaatactgtaatatatatgaaagtattttgttaactgctatacaaatgtaagagattaaataaacagacatgcaaccagatatcaagagttctgtgtgactgtattaaactcttcacttttctaaaccttagttatcctagctgtaaaatggagatacaatattactaactcagtggttctttgagaaatttaaatgaaatagtgaatataaagcacacagcacagtgcctgttataggaaaactaagtaaattgttattccgagtcttaatttccatattcctcgccctttgttattactttaaaaaagattatcagatttttagcatggaagacttttagcaaaaattgtatagtcttagacaaaataaccagtacctagaaaaaaatgacctaaaggtgttttataactttgtaagtacacataaatgtagttgatgagcaagatgttcaagtgttctgatgattacaggaaaagaatctgcctttgtcttcctactgttctcccctgcttcctttgtccacacctcagacacacatgcttagttagatgccatatcatatgtattgcccaggcttaactccttgtaattcgtatgtacattatctgtggattacgtgaggtatcctttttgatttttatattctcacatgattattaatgctggggacttcattagtgagtttctaaatattgtttgttctttgaaactttacctcttagtatttcttactttttttccttgtagggcatgtgtatcgtgtgttgtcaatctcaaaatccgaatgcctatttgaatcaattgctagggaatgttattgagcagtatattgggcgatttcttccagcttcaccatatgtttcagatcttggacaacatcctgttttgctggcattgagaaacacagccactattccaccaatatcatctctaaagaaatgcattgtgcaagtcataaggtacatctaaatattaaatataggtggtatgtacaaattattaagctctattaaagtgataaagtggcatttcaaacatattggcaacccttaggatactagtagttcagaagctttttgttttcctgagaagcattatctaagattttattaaaatgacatttgcttatggcagcctaagacaatgctctttaaattccttctcttttctctatgtagctattaccttccttatatatgtcctaaaggtatatttttgctttttagtttttcatcagataaacaatatttgtattttatactgtataaaacacagtaattatatttggctgggtgtggtggctcacacctataatcccagccctttgggaggcagaggtgggtggattactagaggtcaggagttcgagaccagcctggccatcatggtgaaacccagtctgtactaaaaatacaaaaaaattagttggacatggtagcggatggctctaatcccagctactcaggaggctgaggcaggagaattgcttgaatctgggaggcagaggttgcagtaagctgacattgtgccactgtactatagcctgggtgacagagcgagacaccatctcaaaaaaataaaatacagtaattatattttataaagataattaagtgaaaaaatgaatgctaatattggaaatgaagcaccctgaagtcttgttagtttagtcttaactcagttttattaagcaaatgaaaaacaaaacttcttaaatattctactaagtctatatcctttaactttaacattagaaagttcagtaataaaaaatgttttgtcattgccttcatgtattatttatttttatatgaaattagcttttaaactttaagatgctatggtgatgtatgttattcttatctagtattagttttctgtgttttttaatgacccaataatatctgttacctctcatagaattccatgcctaaaatctgtctcccctctcacctttttgagttcttagtgtcctgttactcaggtttggaagctttatcttctttgcttcctttccttgcccatcctttggcaatcctgtcctccttttcctatttctcttcccttagtgcattatacctagactattgtcagaatctcctgactgctttctgcatctctagtcttttcttctagtccaccctaaacaatgcccccagattacttttcctaaaatactctttcattatgaaacttccctgccattaaacctgcaatatcttttttgtccatgaaataaatttcatgctccttagctctctgcaatccatcacttaccgtttccaaatgtattacatatggtgtcatacaacccctaataagattcatattgcccctccaaaatgcctcatacctccctatgtcacagctttattcaaattgctttctccattaaaatgtcatttttttgggctaaatcccacgtatcctttataaaacctacacctgatatgtcagtgtaccatgtatgtttccttttttgaaatcatatgccctgtacagctcaatttgcagaattatgatagttttgccttacttgtatctgaatttccaacaggattgtagtaacctaacacagtgtttgagatattgcataagtaattatagtacaaactaaatgacagatgctgaagtgaaattgaatctgtaaaactgtttaaaaccccagtgtttaggatcccagaattagttgactttcctatttacttaacacacagtgaaaatgtttttcttgtggtttatagttgaaggctttttttttaatactcaggaaagatatagagattgtcttctatgacttcttccatgccatgcttctctattcctgcactccctcatctgagttagggctcttttctctgaattcctgagaattctgtgcttatctttgtcaaaagcaccattatgctatattataattgtctttttctttttctcatttaacttctccactccatggtgggcctcttgctttcagagaccatattttattcaattttatattcttgttcttagacatgtacctggcattccactggcgcccaatatatgtttgttctaggcattaggaattcagcagtaaacaaaattggacaaaacctcaaagaatgaattttctaatatgtagtatttgttggaagtcactgtagggaatagaaataattactaagacatagttcctgtccttatgtttataatacttagtggtttctcttccttatggttattattactttgcaaatatatatatatatggatgtctagtttatatttagctgtatttgacagattttcacattgtctagacatttgtagaaactaagcaattccaacttttatttattcacttaataaatgtatactgaacacttgttatgggcccgga

SEQ ID NO: 122007 - DNA, 1549 bp, Homo sapiens
gcaccaattgctttcagtagtctgtcatgagtcacatttcaatacctgaataactagaatggaccttttttaaaaaaacgcttatctattgttagaattaaaaacatcagaaaactatcgcttacatctatttctatgctctgctctgtatgaaggagataggatttaatacagcactaaaaatatttatgcttcaaatcttgtttctcacaatactcttcccttttcaaaaagaaatcattttctatgcccgttctataacaatggagtttatctttctttaggaagtcagtgattaacatatctttttttcacgaaaaccatggtgctaaccaaaactaggaattggataaaggtaaatgagaaagatttccttagaagtttttatatagaatttaagttttttgtttttttcctttatttctctgtggtcaaaaccttttatctgttccctttaatcttatgaatgtatgagtaagcctgattcgggttgtctgaaaccttttatctttgttgtaaaagataaaggcgaatgtgaaaatgtgtaaatatagaagatgtaaattacaggaaaagctatagcaattcaggcatcttaattttagagaaaaatgtaagtgagaatttataagtttaatagtaaaatacacattaataaatatattggcattcatgcttataatttattagtgtctacaaaagttttctgtttccagatttagatttttgccaagataaatgtctgatatagacatgggacaaaattctacttaggaaaaattgaagactttctttgctttgctgccttgttgatttttgtctccatgcgcagatctgtattctttccttttgtctaggtttcaaagactaggaagagtatattgctacagtgttgcccatttatttgttaggaattaggataggtaacttaatgatttcttcatgttaaaggattagaataaaacagagaaagagcaaagtataaactttggagagctccaaggtgttttaaaatgtgttggggttgggatagcataaccatttgagggaaggagttaaccactgaaacactgtactctatttaccttgacagttcctaactggggacacctctgctgttcacttacaaggttgcaagactgctagtgaaaggcacagaactgttgatgaaatcacctttcatattaaggagaaggcatctgtgatcttaattgtagctcagttatttctgaaaaggcatggtggatccatcaacttctctcctctgtagattttgttttgttttgtttttctcattcttcatatctgatagttttctgtttccatgtataaagctttcaatcatccctgtctctttggccattcttccccattttgctttgtaattgaaattcaagtcatgaccctttggtgccaagtgcaaatttccccacttttcccacattgccaagtagacttgatcatctctctcattacacttcatctatccttttcttgtgatatgatattatttatagtttgccatttgttaaaattacttgtgtacttg

SEQ ID NO: 122008 - DNA, 3390 bp, Homo sapiens
cacttgttattttcatgaaggttggcctgaaaaaaatcctccaaatttattttaatattttattatattagttggtgttacatgaataacttttggggcaaggatgttcataagtgagagaaatttaatttgaagtccttgtgtggaaatttgaattttaaaagaaagcatgtcataagtgaagaatactgtattacttctcatatatacattatatatatgttgtatgtgtggttatgtatatagtatgttatataaattgatataacaaatactattttattttaacagaaaaagagtacatgaaacagttggtcaaactgacaagattactatttaatctctcagaagtaaagagtattttctcaaaggcccaagttgaatatttatccatctcagaagaccctaaaaaagcacttgttcgattctttgaggtatttgtcatttattagtataattgtccagattaattacaattaattttcagaaaaacctgaagtattcttaaagtttttctataaaatgaattcttataaattgaatcatattattgattgcctgctattataaagttctggaggaagaaaaatgtgaatctaaggtatagtacaattcacacttaaggacagcagaaaaattacattaatgaagaataataaaactaaagaataccacaaaaaagctttactctaaggctaatctaaattgtaggaatattgacacagttgctggacaaccgcattgttcagatgcttgggaactgaatatccttgtaaacattccatgatactcccaccttagtgtttatcaccctgtagcgaacagtgtaggcataagcaccatctacttcgtatgatagtatagttggagcattaaaatccaatccatttgttttgttttgtttccataataaacagtaccattcaaaattttatttttaattattaattgtacagaaatttatctatgtgagagtgtttgttttgcaaacctagttgttaatgtgtttggattagtgtcttttgtaagctattaattgtaaaagttggtttattttcccacagagtggttggtattagctgcagtgaaaataattaaaatcaataagctctttccataaatgttaattcttccattggtttctattaagttaaagtacaattgtatgacaattagagatgtcatgcaatctctaaaaatatttgataatagtaaatgcagatgtaaaatacacattccatttggacccttatttagttgttgattggatctgaacctgcaattaaatgcctgtggtgtgctaggagctataatggatcagaaatagagctagaaatcaagttcttcattgatagttttcatctagcccaaattaattgttctttcaccactaagaaaatgagttttttgctgaatgctagataatattatgctagaacttcgtagggatttgaaaaatcaaaagaagtagttctttatctcaggtggcctttacttctctgtggatataagacatacacaaagactaaaatagtaacacaaggcattatatgctaagtgccagttggttgacagatcaatcagtaggtaaagaatttaaagcattttagtataagaagtttggattttatcctgtgaagattgtgaaggctttgtaagtttttaagtagatatgatttggttaaataatttttttaatgaaaataagtaacaataatataacttaaaggtgcagagaactgttggccaaaagctaatgaggtttagaaggaatcaaagattgaatggttgtgggatttctgaatggatatgaaataaatgctgtgtttgactaaaagagtgatgataccttaaggagaaataggaacatcatgatttagggtgacagagaagtaggtgaggaattcagttttaaatttattcatttttaagttgtgtcaggtctccccaagattatccctcggttctgtgattcataggacttagcatatagttgtattcacagctatgacttattaacagagggatacgaagcataatcagcaaaaggaaaagatgcatgaggaaaagtctgaagaaaccagggacagcttccaagattcttttcccagtgaaattacacaggatatgcttaattctttcagcaaggaattgtgacaagacatgtgaaacactacctgccagggaagttccttagtgactcagtgcccatggttattattggggactggtcacgtatgccctctttgcctcatacttagagaattccagttccagaaggaaagcaggtattcagcataagccatattatttgcatagaccagtttaggatcaaggaattgtaggaagcttttcaaaatctaagaccccaaataccagccaagagccagccttgcaagcaggacattttaagagtagcagtcttgggtctgctgtattaactcttttctgcacagaaatgatagtatgacatctaagttattattatcaaggtaccgagaaatacatgttttttaggctagggaagttaagcctaagcatagagcaatattgagaagtctaaggcactggtgttcaaaagtgtagtccatagacccctgggaattactgataccacctgctcaaaacagtattaatatttgcacaaatagtgtaaaatcttttacatgaatcaacactgcggcccaagattatactagtattcattataattgatactgccatgcatttacagaagaaaaagccagtttcacttaagaatatcttcaatgaagcagtaaaattatttattttattacgttttgactcttgagtacatgtactttcagtattccgtgaacgacaatgcaaagtgcacttaaagcacttttgctgcataccaaagcaatgtggttgcctaaatgaaaagcacttgtgtgattatttgagttgcaagctgaactgactgcttttatcttaaaagaacaactgacaaagtatggttattcagacttggctatttggcagacattttctcaaaaaatgaatgaagtgagcctgtcacttcaaagcaaacaactgacagtatttgttgctaataatataattcaagctttcaagaaaattagaattttgagaaacttgtatttgtcatcgtgatcttgagagcttcccgatacttattttctgatgagaatggtggtggtattagcaggtgtgatttttttttcctgatataaataatgaagtgtgtcaacattgggaagctgtgtaactcagtgaaccacaattttccaaatgacgaatataggctttttaaaaagcattcatggatgtaaaagattcactcaaaatacaggatagaccaatggcttttaatttaacagaatataaaatgtttattgacatggt

SEQ ID NO: 122009 - DNA, 1037 bp, Homo sapiens
tttgtttagcatggttaactaaggaattctagttcctagactttgtgggttctaaaggaagtggagtgtcattgattgtaggagatctctgtttaatagaagagaatgtccagtgtctaaggtgagaaggaactgttcacctgtggcagatgacaggcaaatttgcttccttagaagactagatgctggacatattttataaataggtcttttgaatggtggaggcacattagccaaaacctcaggcatagaatttgtaattagagggagccattatagatctgtaatgataatgcagagataaattcttctaggcctttcttggagatctagatgctacagaaatttctatgacaacatgaatttgttcagttttagctttttgtttgctctacatttctaagtagaacattttattatttgttacttaaaaaaaaaaaaaacacttgttataattggccaggggtgtgtgggtcagaaatggtttttaaagattcctgactttaagtttctctcattttgaatctagactttactttgctagcaatggacatgccaagcacagctccatcagattttcagcctcagccagttatatcaattattcaactttttggttgggatgatatcatctgccctcaagttgtagcaagatatttaagtcatgtcctacaaaataggtacgtgcttttatttcaggcatacacattaatgcaaacctgtgacagatcagtatcctaggaagctaagaattttcacaaatgaggactgatctctactacatatactctcactttgtcaggtttttgctttcagatatatcagcctttcgacagtagtaatagtaagaacactaacttatattttgtggcctgctttaaaaaaaaaaagttgtttgttaagccctttcaaaactgtttttgtaagactgccttatcatcatactgaagtgacctttctacacatcccactgtgaaagaaattacacatttattattactgaatctgtaagatactggtatttattacagtcttcg

SEQ ID NO: 122010 - DNA, 1161 bp, Homo sapiens
gtagagttaaaagaattcaattattgctgttaatccttaccagtcatatttattatattatgctttttccatgtgatgaaaagtccatcaatagacaattttaattttccttaaactttgaggcatcatgtattagaaataattaatatacaactgtgaataccaggaaagtggtatataggatgtcataccttattctataacagttataggagaaacaatggtatgccaagattagaggcgaaaactataagcagtggtccagtaagtgttcccagaagcctgcctaagttactagggaggagcagaaactgagagaccagactggcaggtagaagtttcaggtacagggttccatgcgtctcatatgatagatgcctcaataaatttgtgtgtctgtggggataaggtatctgtgtgggagtagagaggtgggggcaaaatggataagtaaacatgaaatcaaagcaagaagtagcagacaaataaaaacaggaaatcttggaaagtggggcaaaagagcagtcagatgaaagaatcaggaaaatacttgaagataatgaggaaagctaaaggaggcagggtaactgagctaaaatagaagcgtaggaacacctggataattggtatgtgaaagtgtgggtgtttatatagtgtaatgataggcttctaaacttttcagaatgttatttcctgtggtcttcacaataaccctgttaggtggatatagcaacaattgttcctgttcttgactctaaagaaaacagcgagttgggaggttacttgtttttccaaagccacactgctctggatagctatgctaataaccatgtttattacgcagcataattactccttttgtctcaattttctcatatataagatttgaataataattatgcctacctcatagggtgagaaacgatgcttataaaacactttgcatggtgctggtctcatagtaaataccagtaaatgctggatgttgctgttatttccaccatgagagctgcaatttgaataacttgacattcagcaaatttattttctactatactgtattgtatcttttataatgtaagagagctggttacatgtgtgtatttccttatctgatcttgtatttccaaactgatcttaatgtgaaatctgtctttactc

SEQ ID NO: 122011 - DNA, 1175 bp, Homo sapiens
tcttaaaagatgtttcctgatcattgtacaagtacaatgttattgtacaaagttctatcaatcatcatccccatactgtgatttcttttttatacataaagctcaccacaagttcaggtattacatggttgtatgtttaattatctgtctctcattagaatataagttccagagggcagagactttgtctgtttgctagttttgtaccctactgcttagaacgtatgctgtatatgttgaattagagagtaagtgatttgattttatatacctttgtgtttttactttcctccttttcacctaaacactccttacctatcctttgagaatctcttccacgcccattttcttgtgcttccccccaaaggtttttctcctctgagttggtaaaacaatcttatactttgttttgcacttatacctatagagtaaaggagtattttcaatcctcctccatgacaggattatgtatgatcttgttacttagtctatgaactgctagttgcatggtcattgccttatctgttgcaggaattaaataaggcctattcaataaatgaaataattattgatcagaaaatcaaagattgtttattgaaaatatatatgccagatctattctaagtgtttggcctttattaatgtaattctgtaggtactattattatccctttttttttagatgaggaaagccaagaaggtgactgcccacagcatggtgcaccataggatagcagcatctgcctggtagaaatgtagaccctcggccgggcatggtggctaacgcctagaatcccagcactttgggaggccaaggtgagcggatctcaaggtcaagatatcaagaccatcgtggccaacatgatgaaaccccgtctttactaaatatgcaaaaattagcggagcatggtggcacgcacctgtagttccagctactcgggaggctgaggcaggagaattgcttgaacccaggaggtggaggttgcagtgagctgagatggcgccactgcgctccagcctggcaccagagcgagactctgtctcaaaaataaacaaatgaggccaggcacggtggctcacgcctgtaatcccagcactttgggaggccaaggtgggcagatcacgaggtcaggagatcgagaccatcctggctaacacggtgaaaccccgtctct

SEQ ID NO: 122012 - DNA, 1040 bp, Homo sapiens
tatgttgggtatataagttggttttctctcatttccagctaccttaaagactttacttttggctctaactttttgagatgacatgatcctctatgacctgttccttatcaatactatagttacattatacaaatgtatagttacattgttcttatcagtactacagttccttatcaatactatagttactggcacttgactaaaggtaataccgtctactagtaataccacactgtttgtgaatcccttcatgtaccatgcaatttcatgtcactatgctttactcatgttattttaactttctgcaactctattatttttttaattaactaatatgacttctgtaacaggtaatggcatgtcttctccaggaagtcttctttgaatcctgttttttactctttacatacctctgtctcggcacttaactgtacattctttgaaaggaaggactatatttgataacatctagtacaatggctcatgtaattaacagacattgacgtgttcattaagatgatctgaactattaggtagaatgattcctgagtctgattgtactcttcgactctaggtccagatttccaaaaatattttcgatagtgttacttcaattttctcttttcatatcaaattatatcctcctgttataattaactgtccctcgtaactttcagtttttctcccccaaaatttggcaatgacaggctgctccttcctttccctcacaaaatgcgaaataattagtgttggctttttccttcataaagtaactgaaaatgcacattagctcttacctggatgtttacagaagcttcttaattagtttcttttatctttagtcagttcttgttctgacccattctgtttgccattacctgattaatctttcccaaagcacttttttcattatatcaccctccagttcagaatccttcagtgtcttcttaccactttaagaatgaagtcttgatttttcttttaacagcaggattaaccatttttgtatctctagcatcagacatagtgactagcactga

SEQ ID NO: 122013 - DNA, 1026 bp, Homo sapiens
tattttaaaaattacacgtttttcagcaaacagtggaatagccaaagcaagacagagatagagatgcagggtgggggaggattgggaggaggaagaaaattaaagattgtgaggtgttcttaatatcatagtaattattggctccagtgctgctaagttagatagattggtggtctcttccaaaatgaaaatgagggcatattccataaatattttgttcacactgttgcttgtattctaactttcttttttagtcaccaattcctaactgccccccggcctgagctcattcttttttcttctatgagaattcaatacataacattttggataagatctagtgcatgtgtgcttgcacagttataccctatccatttacatttgaagaggaagataattgtatttgaaatcccaaaaaccagtataacaacttcacatattttataaggcatgtacattttgttgtgagattattttcagagatgatctcacctctgagtgcctttaaccccaaggacaaagatcctggaccttaactagtggtcctacccacgtgatactctggtagtagaaaacttggagactgactagcttcatattcagccataatctccccctcttttactttcgttcattacgttgtacccacacacttgctattaaatttggaggatgagttcctggaaatgggagccctaactgaatacaagcagtgcaagttgtcacaatcagatgatgatcattctgctcttcttttagaaattactaacctacgatgacgtctgtagttccttatagttataatgccaaaggatgtacccaagccttaattgtggcctttaccctcaaccatttccttgaaggcatcttgtgatgctgtaaaacttaaattttaacatccagcgtgaaaatttttattttttttgtgtgtgttaacttcaggactataacttgttggtcataatgatgcttataggtgaagctgatgcttatgggtcagcaccgaagcttatgggtagctctgcc

SEQ ID NO: 122014 - DNA, 1356 bp, Homo sapiens
cttatcccagcatatgcatggatttttttttcatcaggagatgagcttttttgatgtgcagataaatgttatcaatggtgctacgcagatgaaacctgtcatgtacaaatagcatgtatcaagccctaagcatgcagataccagataaatcggttcatttgctgaagccttgcaaaaagaaattagtgctataataaacgcctttgaggctctcagccctaataatggagctttataataaaccccacagatcattgactcaatggataatcttttaggaaactttttcccctcctctatcttttcctcccttttaaagaactacagtaaaagtggtaaatagcatctctatagggaatgtatgtggtatgaaactacatatctggaaaaccataatttaaaattaagaaatttatttactgctaaatatgatattattctaaacgagcttatactttttgatgattttcataattgatcttaaacatgtattagtcactgctttttctacatagaattcatattaaacattcctcctaagttagtgcattttgtacatgaggttacagttggattgttgactacaacagaggcacagagtgaggagatcaaaataaggcagaagaggagtcagggagagaaattgagaggaggcattcagcttgtacttagaagtgtttataaagtggtagaaagcagaagaaaggggatggggcttatacacatttatgtatacacaaaactttacacataatttcaaggagtttgcagatttctaaagattatatatgtactgcaggtttagcactatattacaatggtgactagactgttatttccattagggtttggttatacttttgatgaataaacactttaaaaaatatccctaggtactttttgactcttacttgactgagttttgaaatccaaaaagaaaaaaaaaaacaagtcactattggagctgatgatgaggtttgtagatccattaacacaattggcaatggtcactagtttctggttgtataatttactgcattttttgagtgtgagagaagtgttgaggatgcagaatgcttaagaggttttagaaaaattatttatcaaagaacactacttttccagtgcattagctattgtaattatacattggtacaatctgttcacatagaattggatttgatttaaatggaggtggggggaagagactggacattttcaatatttattgatacatagtccgttaaggtaaattataaagcaaatttcactgtgacgggaacatttgggttgatgtagttaataatcagtcaacattaccattagaccctttatttataaaaatttattaccaac

SEQ ID NO: 122015 - DNA, 1428 bp, Homo sapiens
tatatcctttttgtacaaagcaattattttttttgatgtggcaaacaaaatgcataaaaacaaggctggaaaccttaaggaaaagaactcaactgccaacattaatgaccagtagtcatcttaacctgatcatcccttgattagtagtatagttctttaatgaataaatgttggtgattaagagtattataaagatacacctcttataaataattctgtgtgtgctttagtcttattttactattaggtactcttttaaaccttcaagtgtaagagtttaattattacagttaaatcttgaacaaagatggtttatagtgaaaaatgctttggagtcagatacacctgggttataattccatttctgttacttagtggtcaagttatttaacctctgagtccattttttcatcaccaaactgtagatgatattatttactttacagtatctaaaaaaccaaattagaaaatactagaaagtagtactgagttaatcaggttagtcaacgctaaggtaatagctcaggaacccaaagtcattgaagattatatgcataggatccctcccataatgctagaaaggatatttaaaagttgtgttgcagcgatcttcgcagctttgctctatatatatagatctgaaacatccattgccatatttaaaggtatatgatctcaggcaagtggatagagaggttgccaggtaaacacccttctgttagtgcacaggagtagctacttggaaagccatctgtatgaaatctatgctagtttaaaattcctaggaaggcctgaatagtaaactgttatttaggataggtgggtgagctctatttatgtcctttccagcttgagtgattactcagttgtttagtacacagcaaaatatatgtaaatattgtcatctgtgttaagtgctaagtaaaagacaaaggtatgttgttataagaagaatacagtggtctcttggtttactttctcctaattggcagtgaacatgtgtcctctgctatatgtaagcacaaaaatgttactgtggaaacatttgtaggctttctaaaagtattgttcgagggaataagctaagactgatatttatcttaaacacatagcttgtccaatatttaaacctaatggacaagatgtgtaccagttgaaaatgtaatatttatccagtcatttctattctgtcaatctaggctctaaagcaatagattgcactcatagagtaataaatttttagtgaatttggagataaaggctattggtggtgattgcttaaactctttttgctcaatcatctgaatggtgcaaatcaaagcattttgtcagactgtgagaagtttcacctagatattgcttcccacacacgcgggtcaccatataaattacattcacggttttacagcatagctggtgctggaagtt

SEQ ID NO: 122016 - DNA, 1049 bp, Homo sapiens
atttttagaggttgggtctcacttattgcccaggctagtctcgaactcctgggctcaagtgatcctcctgccttggcctcccaaagtgttgggattacaagcatgagccactgtggccagccctagttgattcttttaaaatgctaatgttttatagctctatgcatttgttttgggtttcatttctttcacgttcactgtttagagtgatctgtgatgtcatgcctaatacctgcctcttcagtgtccattatacatccagttaatgttatcttaaccatgaggatggtaaattttctgaagattcataacttgaaatttaggtttctactgaaaggaattcctagtaatagatactaagatgtcagttctattgaaggggaggcatggggatgaaatgcttgactgactttgaaacacttaacaatgtcagtttggaacactttgaaaattttatcctgttttataaaaaaatacaaatacatgccaaataatattgtttaataaacaacaacaactttttctataaattttttcggagcatcagttaatctatgctgctgtgttacagtagggtttggcattcctcactgtgtcattgaacatggaaagtatgggccactgttaaagtttggctgcctttaagtggtagtcagctactactgctggagaaatttagcatcatatattgtttacttgttaatatgcattaaatataatgagctaagtacttttaaaccacttttattcaatattgtgggggaaaatttagccccttccagaagaaagagatggtcagaaacagctgctttgtaaagttggcatacaatcattatatttctccaaagaaaaaatggttaccctgtaataatcggtctaatgaattcagaaattcattgattgtcccagctctgggtagattaggtagagacttgcttcaaggagtggaatttatgaaatgtttgctgcatccagcaagcagagctgctataatacagctgcctcctcagtggtttgctttgatcctgtggaatgaaaggacaggagga

SEQ ID NO: 122017 - DNA, 1132 bp, Homo sapiens
gttaaatgtgtgctataaattgtgcttcttgaaagaggtaggaaggaatgtggaaaaggaaagtagagaaattaaaaatcatttcaataaaatgctttaatttatgcctctgcagttaagcagtgctcctggttaacagaaatacccttcagctacacaggattttggagggttggagggcactcatttgcacataaatagccattaactgataaattcccagaggtctcctgttgcatgttagtggttctgacctacttagctagctggaatttgttttacagaattattataattctatccttggtgcttaaactttgtgattaatgcatgcctcacaatacaattaaagtataattacacagttttgcagtttcctattgtggagttattattacaaagatctggattttgcaaatagaagagttacggtttccatatttctcacttttgctgttattaggtgattatcttaaatgggaccattttatgtctgaagaagggattggagggaaggtgaatcattattaaatgtagcatttgttagcttggaaatgattgggtcagctaatgtgtggtcatttttgcatgctgtctgcattgacgtgtcacaggcattcttaaaactgttttgtgcttttcattgttgctttttcaagtgtttctgaattatagtagaatcttcacaccattttctaagaaaagtagtgttgggttaaatgttaggaaacagtagagagacacagtgggtctcaggagatctaaattctgatgctgacacttgctgcttagttatgcagaacaattcatgtccctgaaagtttgtcgcgtcatctgaaaaatgagtagtttagactagaaaggattggaaaactaaggcactgttggtcagatcttgtccatagcccattattgtgtagccatagaacttaggatattttttacatttttaaagaattgtaaaacaacaggaagaatatgtgagctagacattgcatctgtaggcacagcaacttagtctgggcaacatagggagacttaaatgcttaaccctgtctcttaaaaaaaaaaatacgtggccgagtatggtggctcatgcctgtaatcccagcactttgggaggccgagatgg

SEQ ID NO: 122018 - DNA, 1059 bp, Homo sapiens
gcattacacttttgaggtatactactagaagatgaagattttacattagggaaatgaaagattaagtcaagaagaagaaatcttttgatatgtttgctttgaaaagcctataacacagaatgtggattgttctgataccctcttattaagtaatctattttttcttttaatattaatttgccacaaaattgtattaaatacatcaatcttctatacattacgtatgttgcaaatatattggccccacttgaaatttgcattttatgtatttttttggatgtgtaaaagttttaagggatttttatatataaatgtcataatcttaaaaaattatatacacacacacaaaagtaaacagctaacagttttttaattgtggtttcctaagaggaattccaatgtaattcagcaaatgttttttgaatgcttctgtgtcccagaactgtgctagtaagtactcttgtgtacatgaaaatgttcctgcacttgtagagcttatagtatagtagaaagcatttatactatcatgccatttaatgccaccaagtttttatgtctccatggtcattcctttttaaattctgaaatggttggaccattaatttgatacaaaatatggaatctcttacattctgcagactactcatggaagatggtaagtggcctctggaatataagaaattacatatattaggttgaattaatggtccagctatttcagaattatattacagtagaagttttgtgagaacgtgtaaccaaaatatcccttgtttcccagaaggcaagtgtattttgcctaatttagagattcaacacagttcagtctttccatgatttctatatggactaatacaacacagttcaatctttccatgatttctatatagactaatacagtcatgtcttgtcttttggtatgctgttctgaatttgtcatttagaatgtactagtgggcaccaggaacttgaataacttaaatatatgaacttgtttacatgttggacagatgtatttattctcattggaataatgattgtgggagaatgagtcagatt

SEQ ID NO: 122019 - DNA, 1018 bp, Homo sapiens
ctgtagtcttcaacaagtcttgtcacttctttgaacctcagtctttctgacctgtaaaatgtgtataatgatacgtattgaagagctgatttggagaataaaaaaggtaatatatgtcatgtctaacagagtacctagcggtgattgcttttataatcattactgtgtgttggtttcagagaagtaaagtgagagaatggtttattagacagagttttccattctaaattaagattttttagggctccattctgaatcagtacaatgataggtattccatgaaaagaatactatttatgctttaagtacataaattgctttcttggtcacatctctgtccccttttatttttcttatgtctttggagaaaattctgctgtattaattttgtgcttatgcatgaaacagaaatgtctgtattttccagccagtacacttattgagtgcccatcaagtacctgccatgacagactttgtgctggtattggagaaagtagagatgcataaaatcagaatgctgctcttaagtgccccacagtgtagtgaggtagacatataaacaaataaatgaaatacactgtgatggatagaataatagacagatgttggagacttttcttaaaacttccatgtcacttacagaattttctctgagattgccctacataaaataaagcatgtgattagattatgtggcagtaagtcagctacactatgtcatatagatgataggtggcaaatattagaagggaggaattttaagtctttagaagtttgtgtttatttagatagcagttcaaaagtttttaaagtttttcctgacatctttcacacattccattaataataaaaataattaactttgctacttgtacacatatttaaggtcttgagtgaattgttattatagcactgtgttattgatacactttgccgcatttctttcttctgacatctacttttctacttctgacattaggtgtcagagaatgggaatagaagaaaaatagatgtcaga

SEQ ID NO: 122020 - DNA, 1599 bp, Homo sapiens
atggaagaaaaatgtttctcctataagtcaaatgatttgaaaaaaaaaaaaaaacaaaaaaaatagtaaaatcttatgatataagatctctttgtttcattttactcctacagctgtaattttttaagaaatcaatattaggctgctattatatatatttctggtgttaaacttagaaaatgtagatggattttttaaaaagttatttaactcaccatgctgagagaactactattgatattttgttgtattcttctacacattactattcatatacttttttaaaaccaaaaataagattaaatgctgtttagtgggctggcttcttcgcttactatatcatcaacaactttccatattgatgacatctacattattattggtgttcattgtgtagatataccataatattccatggtgtggattaactatttcttatttgtgaaaacttctgctattttgaatttttcaccattagatacaaggctgtggggaatgtgctcctgtgtgtcttggcagggctcttgggtattgtacaaattgtgtgctgcataacctcaagggtaccattcacagcagtgtaaatgaggctttgatcttcatagacttgtttgattatgtgtagaaggtattttttttaatgatttgatttaaaaaatagaaccttagatgtaattcttaaaaatgaatgggagccatagcgtatgttcaagatccaattacatatatccaacagatgcaaatttttaactagttgaaaaaccttagactagaaaatttttttttaactttttccagatttttaaaacaaagctgtagttctgtagatggaaaaacagataggaggcttctagagcctgtggtgaaatgataggtaaaaggattaataaattaacttttattttccagtattagtattttttctatgcttgttagtataggtaccccactatttctctaagccttttttcttactattaatatcaaatatcaaataacattttcagtgtaatttctgaagcagttgaaggctctagagagtttttaatgcctctcttttacatttttatattatcaaatttatgtatcttgcaaagaatgtaaataatacagaattatatgtagtagaagatgaaactcattcttttcctaaaccctacccttcgtctgcaaagggagccactatgaacactttggagaatatttttcccagctgctattgcttctccttttatctacactgcctcctttaccacctgttttattttgaagggtggggggacaaaagtgggattatactatggaaatttctacaacctctttctttttttttgaggtggagttttgctcttgttgcccaggctggagtacaatggcgtgatcttggctcaccacagcctccacctcctgtgttcaagtgattctcctgcctcagcctcctgagtagctgggaccacaggcatgcgccatcatgcctggctaattttgtatttttagtagagatggggtttttccatgttggtcaggctggtcttgaactcccgacctcagatgatctgcccaccttggcctcccaaagtgctgggattacaggcgtga

SEQ ID NO: 122021 - DNA, 2412 bp, Homo sapiens
taattaacgtgggaggtgaatgaagctttataattagattttatttggctgggtgcagtggctcacacctgtaatcctagcactttgggagtctgaggcaggcagatcacctgaggtcaggagtttgagaccagcctggccgacacggcgaaaccccacctctactaaaaatacaaaaaattagctgggcgtggtggtgggcacctgtaatcccagctactcaagggctgaggaggctgaggcaggagaatcgcttgaacctgggaggtggagacttcagtgagccgagaatgcgccattgcactccagcctgagcaacaagagtgaaactccgcctcaaaaaaataaataaataatgaattaaaaataaaaatatattagattttttacaagattactcctactttcaagaagcatagaatagaatagagctttatgatttctgatttatagttattaccaaaatttgaagttaccagtaatatgatttttctaggatgaaacccagaaaattgtcttctcataattacagaggaaaaagagaaaacataagggtggagaaagaacactgtaaaacagaaactagagtgaagaacattggataaaaggagaaggaaaaaataaatatactctgtaaagaaagcatttcattcctttgaaagtggatcaattcagttgtttagggaatagaagtgccatgattatttttctttaccagccactggaatatttctctttagcaaatggcaataaatcaaaagatgatgggatgaggcaaaagctacttttcccaatcttatttatgtcactgtgattcctagtctgaaccctgtggttcactataggtgtttagaccacccagatctttgaagctttagatgaaattcagcaatgagtttgtaggaagacatcactactgtgctctttcatggcaccacacggtgctgtttcttaaaccaaagacaggctgtcatagtaagtatattgaagactggtaaatcccattcgtgacagattggttaaagttaactcttctctgactatggaataggttaaaaacacctaaaattgtgactttggtacattgacctagtttaaaaaaactcagtatgataaactggcattgtggcttttggttataaaagggaagtacttgggaagcaagtaaaatttcagcatttacattcaataaatgcactagaataagctaccagacttttttttttaatgatgtaatatgacagtgagggaaggaaaccaatcttaattattcctgtaattaattacttttggattaataaaacctcagaaggcactataaattgtggagaaaatagattcattatagttttaaaatacttctagctattctcaccatcttactgttaccctaaagctattttctttaagatgtgttttgtagaaaacatcagagtacatgtttaatgatatgaatttactgttgccaccatattgtttatgggaagcagttcttagctttcttcatccgccttgtggaaaaaggtgagtaactgctgtttgaaattttatttatattttaaagaaattgaggacaaacaaggagtgaaactagcatttgaaactcttaatttcaattgtttcttctttaccttacaagatatatatttttctctctttagggtatctcttgtcagatttaaggcttatttaaaatgaaaagaaagctggagcaattttctttattccatttcagtctcctaaggcctatttccccctggtgagctcatagcaacaggggggtttaagggaattcagctttctgcaaattaatgtctcacatcatgaaaattcaggacttttttttttatcttgaaaagtaatacagtgagtgcgagtattatttcttgccagcgggtggaagatgaatgattttgtcacagttttactgcttgatgagcagtgtcctgagggtcaggcttaagtctgtgtcactatgctgctcattactcttgagctaaataagggctgattggatctaaattgcctagcacatgggccacagatgagctcagtgagcaggggatgacctgctattcagtctgggagtaaccccggtgtgcaaatgcagcattagaacactgtgggagaatgagaggctaccggctgctgccagcaaaagaaatcgaaatgtaaaaactctttgatgctgtgatgttagaatttgaaatgtaggaagtgacaggttgatggtacttatcagctttggctggattagagaacagtgtcatcttgcttatataatgacagaagaatgaagtcagcagctaactactgtgcagagcagagccgctgctgttgccacagccagtcattgctgcctcctactggcagttttcctggaaactagtaaaatattataaagaaaaaatc

SEQ ID NO: 122022 - DNA, 1249 bp, Homo sapiens
cttgtagtattgagtgagttctcacgagatctgatggttttataagcatctggcattttccctgctagcagctcttcctcctgctgtcatgtgaagatttctgctgtccagtagggtagcactagctatgtgtgacagtttaaattagtgaatataaaataaaaaattcaattcaggggtccttgcttccccttcaccttcctccatgattttgggttccctgaggcctctctggccatggggaactatgagtcaattaaacctcttttctttataaattacccagtctagggtgtttatggcagtgtgagaaccgactaatacaccagtcttgaataatctctattcctgttgaatttcctgaatagttactaaatctctaatgtcctttattgttttttaccttgtgttgtaattattttctaaaggggagacatattcatgaaaaacaatttattcaacaaatttaactagtatttttgaatgcctactatgatagtaggcacttaggatatatcagtgaaccagtcacatgaagcatatgtagtatgcactcatgtattttttacatgaaagactaagatggtagagaggaaggacaaagaaacttgtatttatttaaaccatcactttttcaccatttcatactacttgctaatggtttatacttgtcctgaaattttatatgcttatccaacaattcttgccagtgtccatatgcaagcagacaacagtatccatgcagtcaggatatggatttaatgcataatctgaatttcatctctgtgtttattgtcttctaagtacccatgggtagaagggacctctagaggatgataggaggtttgttcttcccagttgaaaggttttcggtgttattgaaaaattcagtgtgttttccttagtattttctggatgactattattattttatctttctaattcactagttatcattgaattttttccactgaactatggaaacaggtgcagcaagtgggtcctttgagcctttaccttccttttgagacatttcggaaccagtctctcaaggctgggtctgcaggaacactttgaatctacaagtgcagattgtctgtattgggattagagtggaaggaaggcatttggaagagggaacttagaaaatggaatgaaggaaataatcaataaaacaatttaagaaaatttctcagaaccgaagattctgtaatgaaagggcctattgagtgactccagcacaacataa

SEQ ID NO: 122023 - DNA, 1017 bp, Homo sapiens
aaagaaacttttagtgacactctaatagacacagtagaaaatttcacatttcttatcatggtctttaaagccatccacagtcttcttttaccttaatctgtaactttttcttgtgattctcctttagtcagatggagctactagttctcaagaaatccccaagtctttctacctttatttatatcttcttgtccaacgaagttgagggtcaaagttgacaagtttgacctcttgtcaaaaccaattgagggttcaggccagaacatgaccagtatagcagagctgaagctgaggactgaataagcatgtcatgtgagagtcactgcttagaaaaaggttaagttgggggaatggaagtaattgtcaaaatcaagagtcagaagtggtcagtgttggtaatagtagacataggggtgagatggcagagtatagaaaaagaaaaaactagaggtatttgaggagaatggaaagtgttttcagaagttagtagtatgttgatgagaggtagagatggaattaaagagcatcatatatgggaggagccagtattccaggcaggagacttatgcacacagcaagttttgctttttgcctttgcttcttaaggaacctctagtagtgcctgatagttgctgctgtcaaaacattgtattaaaaagcaggagctttaaggtcagtaaacctgagttcagatcaccctctttcatttaccaacagtgcaatcttaggaagttacttaatcttttctaagtttcagctgcatctttgtaaaataatatccacctcataggatttccatgaacatctgcttagatttctgctgtccagtagggtagcactagctatgtgtgacagtttaaattagtgaatataaaataaaaaattcaactgttctgtaacaccagctatatattaagtcctcaatagctatatttagttagtggataatgtagtggatagcagcagaaagacttgccaagggatagcactgactttgatgctgcacctgtccagaac

SEQ ID NO: 122024 - DNA, 2152 bp, Homo sapiens
taagtaaaataagagcaagtgttcgtgagggggtgcagggagaaaagagtttaaggaaaattgttacataaaattgtcctgttaagatctctgtaaaagcatatcaaattgtatttaaaagattatatattctttcttatttactaatcaaaataagaaaagaaaggtgatgggggacttgaataaaaggaaaagccatgtactatatgaaaacatttctactttcctttggggaaagccattgaatcctttgattcacttacaggtgatttgctgcatcattgggaaatttcaaggtagggccattatgtgttttctaagtaaaaaaagtgacaaggcagcatcaaaataaagaattagcttaaaatttaatgagattgttatgagtattgaaacaaattttcttttaagagatacagatttttgtgaatgaaacaattttattaaagcattttttaatgttttacagaatatattcaaaattccatcaaaaaagaatggaagaactaactgaagttggtctacagaacttttttagcctttttctactgttagcagctgttgcagaggtagaagatgttgcaagtcatgttttagacctcctgaatttcctcaagcctgcttttgtaacgtctcagagagccctcatttggaagggtcacatggccttcctcttgatgtatgcccagaaaaatctggacattggtgttttggctgagaaattttcatgtgctttccgggagaaagcaaaggaattcttggtgtctaagaatgaggaaatggtacagagacagactatctggacccttctttccatatacattgatggtgttcaagaagtgtttgagaccagctattgcttgtatccttcccatgaaaaactgcttaatgatggatttagtatgcttctgcgagcatgtcgagaatctgaacttaggacagtattgagcttcctacaagctgttctggccagaatcaggtatggttttcagttgtatgctaatttatgatttgttttatataattacttatgtggattttatattaaagttatatatatgcatatatacaaatacacatgaaatccaaatgtagaggaaggatttagttttctactacatgggcataaatcagtacaggttgaatatatccgtgtactaaaatgctattatatgaaaagcttgggactagaagtgttttggattttggatttgtttagattttggaatatttgcatatgcataatgagatattttgaggaggggacccaagtctaaacataaaattcagttatgtttcacatacatcttatacacaggctgaatgtaattttatgcaacattttgaataattttgtgcatgaaacaaagttttgactgcaacccatcccatgaggccagatacaattttccacttgtagtgtcatgttggcactcaaaaagttttgaattttggggcattttggattttgaattttcagattagtgaggctcaacctgtagttttcaagctgtttttcaaacaatagcttttcaaaagaaagcttatatgcaaacacaagatgcagaactaaagtcaagagcagctctggtgcagtctgagagccatgctttctcttagcccttccttcccctgctacctctcagaaaagtgtattattacccagagatacgttacagatattctgagcaagatcatgagctcatgtctgaggtggcttttactgaagcatttgtaattttgtgcccataaggaagttttggtcacattacaccattttttaaaagtgactttctttaaatttttgcagcaaagtcatagccttagctgcatcaaatgctttgaaataaaccagtttgctctgaaattaacatagataattctattaataacaccaatcacctatacaaaacttactgtttttcagatccacttaaattatgcagatatgttaaatacactcagacacaaacttgatgtggataagaacaatggttatgatatttattgcctttaggcacttttcacatagcagttttacctttgaagtacatgttcttaagaagttaaatactaccactcagtatggttactcactgtcacagaaaatgattgtatttgaaatcatgtccaaagataaacagactgcttc

SEQ ID NO: 122025 - DNA, 2097 bp, Homo sapiens
aaaggttaaaatagatgtactctgacaatcctttggttttagaaagaacaactcctataatcctataaaaagatttgaccaagtacttaagtatgaccaagcactctggatttgtgtacatcttaatcgttacatcatttttgccacttctttttggtttgggttccttttctggtttctgggtttccagtaccattcaattatgaaacacctgtaatttttaaataattgaattaaaagtcgagttatgtgacttctgttatctgaatgtgttaatggtgtttaaaacatgtttttggaagtatgtgttgtgttgatttagacctagtctgcatatgagaatgggtatgattgggtgacacatatttattttctttttagctgcaggttatatacagcacaatatcaagtgaaaatgtttatattgccagagcccatttaccttctcataacttcagtttattttttagggtgtcattctagaagaacaattacgaatgtatcttcactgttgtttgacactttgtgatttctgggagccaaacattgcaattgttaccattttatgggaatattatagtaagaacctggtgagtgaatagaataggaatttgctccaggaattttaaaaatttgtacatatttgaggaatgtctttatggtttaattatgaatagttatggatttttcttaaaaagttaatttttttcagagtagattggagtagctcgtgaatagttttatctttaacattgtagagctttgtcataagggaaacagcatttggtatcctttttctcttgagagcaagggtaaacaaagtagctaaaatgtatcagatatttataaaatcttcatttataaatgtttctaataataattgattgctcatgacacattgaacaggcactgctgtcctgagtaagaaacaatcctggcatttgagtagcttataggctactagtgggtgggtatacatacattgtgggaaaaaagttataattgtggaactccagaggagagggtatctaacccggtatctgtatttgtggaagacttcatgaggtcataatttttgaacttggctttgggaatgagtagaattttctaacagaagaaaaagggatccaggcagaatgaacaacatggacaaatacatggaggtatgaaaaagcatggtctgttcctaccatgttaaatagttctgaattataggcctcggataactatggagagaccgaagataggagactagagaaggcagtctggggctaggctatgaagggttgaagataatgtacagttaattctggtttattcaggagacactaaatagcgaggatgtgacttaggtatgtgtttgagaaagctttttttttttttctgaaagtggtgtaaatgaattgggtacagacaacttagtggtttattgtagttgtatgagcaaatgatactatggctgagaactgaaataggaacaatatatttagaaaggagaggatgagtttggaagattgaaaatttaaaggtagatttaaaggatttatactttgtatatagaaaggaaatttgggatgttttgggtttggggtaaataattagtgaacctctcaatcaaaatagaaaatggtaatggaagatttacaagtaaataatgtttggatttgtggataatggagcttattaaaaaattagaaaaatgcccttctctgaagcataattttaggctagttggagaaatgactgattgtagtcttgaggcaggaagagtccagggtgagtctagggtgtcttgtcataccagaaagcaggaaaggtatcaaattaagctagagtcatgtcagaagaacacaggagccaacctgaaggaatgtccattgcccagaaaatgggaaaatttgagcataagaaagaataatgactgcaatagattaaaacatattaaatatgtttaaatctctgagtttatgcttctttgtaaaaagttactctgaaaaaagaaacacctaattctgaaaactgtaaagaaaatacaaactatattttagagtaatcagatttctgatgagttaattaagaaaacgtgatagaattaga

SEQ ID NO: 122026 - DNA, 1483 bp, Homo sapiens
tcaatttattttctgtataaaatttttagttactttgtttactaaagtagatggtctcaggtttgttattcacaaaatgaaggaaaaagctctagtgattaaagtggaaaatagggatgattactcagcataaaaaaaaaaacaaacaccaaaaatacatgtggctatataattttttttttttcctgttggattttgtatctgaaagcagaaattaaatatttggtagaatatttataatcttactgaagcaccactgttacaactcctgatatggtttgtattggattggaatagttgtacatttttttctgccaagtttgttaactctttaccaaaggaatattagaaattcaagaaatcacattgatgctgaatgatagaggaaaatgtactgcacacttaatttgctataccctaattttaaatataggcataatcaagagcaataattttgatgcactattttctccctttctagagaaaagtggaatcaaattggaactttgtagaagaactgctgaaaaagtccatcagtgttcaggtatgcaattaaagtaagacagtttgtggattttgcttaatttttatgttacaaattttatttttaaaaccaagcaagctgttaaaatgattcagaaaacaaataactttcatgctttgaagggttaactcacagtagtttcttttagtgattattctttaaagatttttaacactaagttgtcagttaaaggacaataatatcctagttgatgactttgacaaaatgtattcaaaataagtggtagatgcttcagaactgtatgccattccttgactgtatgatatcaaactaggtgacacaatgagggagatagtcattggcattgaaaattcagctatatcctcatcacagcaggaaggtgacttgccttgctgagcaatttgtcttacaggcttgaatcatattctaactgataaggtcctagtttctgaccattcgtttcataccttatcatttttctttctgcagagctgttaatgtagtgcttcatggcctagaggtcagacttgacctccttttaaaatagttttaaacatgctgttcatcacatttttaaacatattgtatggaagccctgtaaagttttgtaatatgttatcatttttgtaagagtttatggagaattataataaataatattttggaatttgggaaatatttttcttttaagaaataaagattatttaaaacttgaagaggaataaaaaatattgtagtataatattgctttatatgtgtgtgtgtgtgtgtgtgtgtgtgtgtgtgtgtgtgtgtctgtagtagctatgtctttggaaaaattttaattgcttgaaattttcttttacccattatctgcattaactcttacttttttaggaaacataaaggcatttagttataatatgaatcacataattatgaactaaaaattttagcttagaatgccaaagaatt

SEQ ID NO: 122027 - DNA, 1450 bp, Homo sapiens
gtgcctatcagagaatacacatgaaatagattgtactactttttttttttttttttgagatggagtctcactctgtcacccaggctggagtataatggcgtgatctcggcttactgcaaactctgcctcacgggttcaggtgattctcctgcctcagcctcccgagtagctgggattacaggtacacaccaccacgcccagctaatttttgtatttttagtagagatggggtttcaccatgttggccaggctggtttcgaactcctgacctcggttaatctgcctacctcagttaatctgcctgcctcggcctcccaaaagtgctgggattacaggtgtgagccaccgcaccctgccagattgtactacttcttgcttcaaggaacatgcttttaggttattaaaaacttgttggaactgtattaacacttttttgagtgcgtagtatattttaatattagttgatattgaccccgccagatattctcagtgtggtaggcaatctagtcacattaggatatattgttgccattgctattgtaatatggaattgcagtgatataaccacctatggttgcagtgctgaagtcactcttctatttctttttttttttttttgagatggagtctcgctctgtcgcccaggctggagtgcagtggcgcagtcttggcttactgcaagctccgcctcccgggttcatgccattctcctgcctctgcctcctgagtagttgggactacaggtgccggccaccacgcctggctaattttttgtatttttcgtagaaacggggtttcactgtgttagacaggatagtcttgatcttctgacctcgtgatccgcccgcttcggcctctcaaagtgctgggattacaggcgtgagccaccgtacctagccctacccttccatttcatacagagaactccagaggagattattgcttttattagctctgaatcaagatagtaaatgaattgtctgtgtttaaaatagcttaacttgcgtcttttaatatttgtcagcagttcctgattttcttttgccacgattttaaaaaatcacatattttatgtagaaggttttaaaagaaaaggctgtgataattaatagaaaaaggatatgataaaaatgatgaggatgtgtaatatatatgtgtatatgcacatgtaaaataaactttgcctttatatatgagtcctcaaagagtttatttctggatttcctaaaggtttttaaagaaaagctctctagttaataatagttttcattaggggtaaaatatgtgctgcatttgcaacatatttagtatttcacagtgactgtgtattatctcagtgaaatattttaaagtaggtgagagggtaatatattcattttacaggtaaagaaattgagatacacagtggttaaatatcaccctattttatctcttagataaacttgatatt

SEQ ID NO: 122028 - DNA, 1035 bp, Homo sapiens
cctgggcatttttattatttcagttttatatatgtgttttgtcttttgtatatatgcttcattataaaaatagagaaaaaccacgaaatcaaaggttattgaaactgtcttaatggaatcaaattacttctgtttctatagtcattttggaactggttgaataaactacttaaaacactgcttgaaaaatcaagtgaccgaagaagatcctctatgcctgtaatccagtccagggatccattaggttttagttggtggattattactcatgtagcatcattttacaagtttgatcgccatggagtaccagatgaaatggtaagacttcattttttaaaaactttcttatattgtcaattaatatgtaattatttggacaaattagaaaataagtgagcagaaacaagaaaagtcagactacaatcacagagataaattatttatgtataatgtttctgtaaacatcttgaaaaattataaagtttatgttttaattgtttaattaaaaaaaattacttgtagaagatttggtatgtagtcctggccctgctactgaacaattgtgtgaccctgagcaaattacttaaacctttctagctttgtcttccgttaacaaaaaatcatgggattggattgtcacaaagattccttctagttttaaaatctattatgattggcaaagaaatttctcgaggaatgaattacttatttttgtgaataatttaataaaagtacttcagaatagcacttctttagtgaagctttttgctaagataacttattaaacaaccatgaagtttgcttcaaatacaaagagattttaactagtatattaatttctcattagaaacattttttacagtgttacttaaaaaccctatgaataaaatcagctaacagatgtttactttgaagccctatttttatacaatttctaccatattcagaaattaatagtattgtattattgtatcagcctatcagctccataaaataagcatctagaatcatgaagccaacttgtctatattttca

SEQ ID NO: 122029 - DNA, 1164 bp, Homo sapiens
caaaactataggatgatgttaccttttgtataagaaattaggaaaaaggcaatgtgtgtgtgtgtatatatatgtgttcaattgtgcacaaataaatactggaaagacaaactattgagattggtgggtaaaaataaagatgggtgggtgaaaatggagtggaagggtttgatgtaattatttgggtagttctgactttagaatcgtgttaatgttccacatgccctaaaattaaatcaatctgtatgaaaggtgcactcaatggaatataacagaaacaactgaacttaaatgtattttaaatgaataacactctttgaggggattggcaatgttaacccaggtaacttaagaatgtactattttgacactatactataaggctaaagacaatcataaagaattgtaaatacttaggagatttgttttttacattgttatgtgaggattagcaattttaaatctattatatttgtattcttggactggacaaattaataaatacattgtgggtaattggagtcaggtttgtctgtgttggggaattgagttacacatatggaaagaaggaaagccagcatgaagcacattatgttggattagaatttgttatagtatgcaatacttctttttaatatataggactatatataaatgtatatgtgtgtgtgtgcatacctccatttcctacctttttcactgggtgggcttacaagcaatgatactgagtaacaatatacacattgcagctatatcttagtttcaaaataaccattctgtagtgaaaggaaacgagtctttgaacaaatggctgattacaggatgaagcatggaaagtaaacatgagcctgaaacatcttgtaccagaaactaaggaagtgctcaaaaaatgatgagtacatgtcagaaggacatgagagtcagccttaaggtctataggctaaaatagctttattttacctcactttttaaagatattaataggtaaagaattttaggttgacaaatactgttttgatacaataaggatatcatcccactggcctccattgctgttgagctacaaaatagtaagggattgtaatctgttcactaggaatctgtgagtccctactgatataaacaaattgggaaaagggaagctcttcctaatagatgtagagt

SEQ ID NO: 122030 - DNA, 1710 bp, Homo sapiens
aaatttttaaagcaggggaactttacagtcttcaaaaaataaaaaatcacacactaaaatactgttcttttctgaaacaaaaaagcataataaaataaaaagcatctttcaagactttatatatttgttataacagtcttgtatatgaaatgtcttgttttaattggtacttccagttgagcttcttttattttttaagaactctctaggtatatattagttgttcagaattatgtattgcaaatattttcttttatttactttttcatcaagtaagctgactttctaggtcgatttgaattttttagatagttatatttttccgttttttgttttatctatgctgttaaaatattttgattgttgcttttatttctttaattcatgttatttttaaacatgcagtgaggtgagaagtctaactttagtttcttgcaaagttaaaaatcttattttttattgaatgacccatacttttcccatcgatttcagatgccacataaatttatttctgtcttgtctgttcttgctgtttgttatctatttctgtcccaatattgttttgtcagtgtagcattttattttgtttgtatacctaataaggcaggtctactcttcatcattctttctatttgttttaatggaacatgttatgtcattgtatttatttttatagtgatgctaaatgctgacaggaggaaggttattgataacccagtataacacaatacttgaaagtgctgggttttgactcaggtagaattgagtttgaatactaatacatgaattgagaggtaaattttttcacctcttttaacttctgtttcttaatgagatgacaataatgtctacatgacagtctaaagttcttttgttaaaatattttataggagttcctgggtactcatacattaaaaaaaatttcctagctaaattctaaaacaaaattatgaaaatacgtgttaaaaaattcttttactgccttgcagctgtagtagaatcagaggttggttggaaggtacctttactatacaagtctattcagcagccccaaggtgggtttgtcttaaaccaacagatgaaaatatttcctgctttcaaagatcttcagtgaaagaatcctctaatgaacaagacagaggttttccctgagcttttgaatagtggtaggttaattggttctttatccttgtgtttatggaggagtattgtgacatgctatgaaatacctagtaaaatattaatgaattctcaatcacagttgataatgtcatccacagctttttccaccgtcatggcatttattacatctccacttggatatacattggctggtgctagaaattctttacatgctgggtgaaaaattgagtaagtttatggatttatgatttatattctttttaaaatcagcttttattgctttttaaaattacataagtaataagtgctttctgatatttaaaaaaaaatcaaatagtaaacaaagtatgaagtaaaagttttactcctttctttccagagataactattgggaacagcttggtttatctttccatatttaccttctatctgttagtatacatatatagaaactcataggtaaaattttgtttttgtttttaaccacagatatgatcatcatactgttcagtgtgatctttcatttatcagtgttttagcgatctgtttatgttagtacctatagtt

SEQ ID NO: 122031 - DNA, 1257 bp, Homo sapiens
ctactgtgggagcaagttacttgagggtaggcactgtctattagattgggcaatgtgggtgtgattggtgactttaataagagcattttttgaggagtagcggggagcaagaaccataagagaatgtttaatataaaatgttacaagatagagaattgctgccggtatggcttacaacattttttgtcactgcccatgataattatttgaactatgattaacattgtctattttggtttcagggaaggtatcaactctacactgcaaagcagacaatattaggcagcagtgtgtactatttctccattatgttaaagttttcatcttcaggtaggatatcagatgagtattttgatcactgcatgaatttctgtgtgtattcacacagactctagttgtttattttatctaattattttttaggtatctgaaagtacagaatgctgagagtcatgttcctgtccatccttatgaggctttggaggctcagcttccctcagtgttgattgatgagcttcatggattactcttgtatattggacacctatctgaacttcccagtgttaatataggagcatttgtaaatcaaaaccagattaaggtttgacttgtttcatttgatttttaaattatcagctttttctccccacaaggagtattcattcaagaaggagagaaattagtcagaattacagctctggaacctgactgcctgagttgaaattcttgccccccatcctccttttattaattgtgtgcttttgggcaaatgacacctcagcctccacatctgtgtaattcttacaacttaccagaatcattggatgaattaaataaattcatatacatgaagttattaaaacatagtagtcattgaatcagtagctattctcttgatttatgacagtataagtgtctgaaaattttaaagcaaatgaaataatctttattttctgaaatttttatcatatattacagtaagattcaagatcagcttataaaaaaaactttcaagaccacatcattatgtgtattctgacttttgaggcctttttggaatgtgattaagattgttttgactgtgccctttttttcctacctgtgataatcattccctctgaagtttggtttttaaaactttatattgttaccgtgcctagcttatagataagtaatagattctgcctatgaaaatgggagcttatatgaataacaaattatggtaattcacagtgagattccctgaagtctcaaccc

SEQ ID NO: 122032 - DNA, 1046 bp, Homo sapiens
ggggagctggtacagttgtagggctcagtttctctctgggagagcaatcttatattgtcttgtgtccagagcctgaaaacttgcttgacgtaatttttatggttttcagctttacagtgggagatggagcaatctgattattttactccgtcttgcctggatgcagatgttcactgcagttatttttaagagagtactgccttaatgggccgagaattgtgaaaattgggatgatatgactttttatgggtgaaataaagccataaaaatgcagtttaatatggaggtatttacacaactgcttcacacttatgcttctattctgccacagtagtggcatgattgttcatttgaattaaactttagtttcatgtttagtatggctgtaaatttgtagcctataattctcatcatgttttctttgcttttgtttactagattgtctcttactcattctctatataatgattattagtgttttgcccatagtaactacctagataattattgctgatataaatgctgaagtaagtgagggaaagctgacatggagtgaggttgggagaaaggcagcaactattaaaaggtcgttcagagctttataaattattattaggagttttgattttattctaaatataataggtattctttcaagagttttgacttgggaacaagataaattgatatacattttaagcagattttttacttagtgtatagggggacaaaagagagcatggaaagacctgtgaagagtgctattgtggtggtttaagtgtttatagggaaaatggatagtttcaatgtatatttggttattaacttaataggactctgaaggattagatacgaggttaaaggaaatgcaagaatcaagaaccatataggccactggtggcaccattttatgaaaggctgaaaacaaggacagcatcaacaggttttgaaagaaatcaaaggaggtattatttgcactgtctgagcaatccaagtataggtgttaggcagtttaacacggaaggtctggagtgcaaaggagagat

SEQ ID NO: 122033 - DNA, 4043 bp, Homo sapiens
atgcgtctgtaatcccagctactcaggaggctgaggcaggagaactgcttgaacccaggaggcggaggttgcagtgatttgagattgcccactgtactccagcctgggtgacagagcgagactctgtctcaaaaaaaaaactcatctcaattaataaaaattaaagttcttcattatcatttaagacacagttcatattcagattttaggtaattttaaacaggagtcagttattgaaagctaattattccaaaacacagtaaaaatctatatgtgatacatttaaaggaaaatggagaggtggaaggaattctctcaccatcatcccatgaaaccttttgaagagacttaaactgtatctacgccatgtcatacgttttattgatagaacaggctcagtgagtgatcctctgtaatcctgaagattacagaatgagcgagtctttatctaggacataggttataaatatgggttaatttttaaagactttgaaatcaactaggaagaatagcaagaaattgctatcaggaattaagatggaacatgataaataacagctttccctgatactttagtctacattattccttttttgaacttctattgtataactgtatgatacagtttaaaattttattatgtaactgttaacctagaatgttttatgtatcttaaacttctttttttttttttttgagagggtgtctcacactgtcaccctggctggagtgcagtggggtgatcttggctcactgcaacttccgcctcccgagtttaagcgcttctttgcctcagcttcccgagtagctcggattacagggtccccccaccacgcccggctaatttttgtgtatttttagtagagatggggtctcaccatgctggccaggctggtcttgaattcctgacctcaggtgttccacctgccttggcctcccaaagtgctaggattacaggcgggagccactgcaccccatcttaaacttcttttttttttgagacgaagtcttgctctgttgcccaggctggagtgcagtggtgcgatctctgcttactgcaagctccagctcctgggttcacaccattctcctgcctcagcctcccgagtagctgggactacaggcgtccgccaccatgccgggctaattttttcgtatttttagtagagacggggtttcaccatgtttgccaggatggtcacgatctcctgacctcgtaatccgcccgcctcggcctcccaaagtgctgggattacaggcaagagccaccacacccggccgtaaacttaaagatataaacagtatcttgctgatggtgaaggctatggtatttgaaataatttttgagatatatgcagtctttaatagataattttggaaggtcaggcaaagatgtattttatcttttcttaaagttttcattacctgaagctgatcctttaattaacattcacaaggtattaatcatcatccccaaattaaagaggtattgaagctgtgtaatttggaaacattgtccacgtaattgttacatgctttaaagtgttctaaaattaactctcaccttacatttttaaaattaggcaacaactgtacaacttggaaaccttgttacagtccagttgtgattttggtaagtttaaggtgtgtttaatgcaaaagggaatggtgcttcattatagtgagttgcacatgggtccatgatggtataattggcatatcatgataatacagaggaagcattaggccagaagtttacgaatttagtgttcagaaaagtatgactttttaaattttgttgtagctgagatatatagtattttcccaaatctgtagattttaaaggtaaaaccgacttaagctaaaattctctgaagagaattagtacttgttttggaggtagggagtgggatagagaacttaaatgagaactaaacagtgccagacctcatgctgtcttcttgattttcttttctgctttctgcttttgtgtttgcttttggtgtgtgatggattactgatttttttttcttttgtttagattggtatagttggtttttttttgctttttttttttttgatagggagttctgctcttttgtccaggctggagtgcaaaggtgccatctcagctcactgtaacctctgccccccgggttcaagtgattctcctgcctcagcctcccgagtagctgggattataggcacctgccaccacccccagctaatttttatatttttagtagagatgggattttgccattttggccaggctgatcgcaaactcctgacctcaagtgatcccctgccttggcctcctgaagtgctaggattacaggcatgagccaccgcatgtatagctaaggtaataaagggaattgaagggcagtgtgttttagtgcagtctggctgcttctcctttctagtaattttggtgcagtgcagtgtttagaatcatggccttgtcaccctggcttccaaccctagctaattgtgggtcttacgtcaagtaatagttctaactttgttgagcgtgttaagtgcttaacacagtgtctaccattattgatgcctagcaaccaaagactacctggaacacttttggtcaaacagaggtttattagattatgaaaaaaggaaaaatacacattacaaggaaaagctggggcttgtcagtaagagggagtaggaagggacttgtgatatgtttggggctcattctggtgattttccgtagggcttaagggggataaggctatattctggattggatgctgttaattagcaggggcaatttgaagagtgggtattttaatttttatctaggaggtgagacaaacaaagggagcatcctaattagtaaaaaagtattgtcctggtcactggaagagggaggatgtgtttttttgttcattttgtgtgtgtgtgtgtgttttgtttggagtgtgtgtgattgcatagtgccatgttttgtattcagacatggttacagaggttttgtttttgtcttgtttcactgtaatggagtggccctgtatcattattatttattattattattattttttgagatggagtctcgctctgtcacccaggctggagtgcagtggcatgattttggcccactgcaacctccagccccctgggttcaagcaattctcctgcctcagcctcctgagtagctgggattacaggcgcacaccaccacacctggataatttttgtatttttggtggagatggggtttcaccatgttggtcaggctggtgtcgaactcctgaccttgtgatccacccacctcggcctcccaaagcgctgggattacaggcgtgagccaccgtgcctggactattttttatgttttatgaaaattgtttattttcagtaggggataccatggcctagctgttagctatcagcttttaggctgttttatattttttgttttcttaatatgttacgtgatttgtaaatgttaagtattattgtttcattatcatctgatgggtccctggttcatgccaggtactttgcaaggtactgacgaatcaaagaggaaaaatatgctgctgatgagtttgcagttgtgtagacagctagacatgcaagcatacatcagcttggtaaatgaaaaggtacggtgataaaggaatgtacaagctgctgtggaagccaagggctttgtctatctgtgagctcctcactaaatgatgccagatctgggtcttcacagatgggaagaaattagctaggcaaaagatttgggaaaagtttttcggacaggaagaattccaggcagaaaaaaataaaactgtataaacaaagacgtgatgtgtgtaaaaacataaaagtttagagagcatggattaaatattaattacatatggttggatcagaatgtgtgtgagtgatgaatttggaagggataaaagcagagttggctttgtaaaccatgacagagagtatgatttttattttggaactcctgtggagccactaaaagattatagtggaaagaaccaaaatacctttacctttacgta

SEQ ID NO: 122034 - DNA, 1191 bp, Homo sapiens
ttttggtaatacctgctgaggcagtttcagtgaggaaactatttttgttgaccttatagttgtaccttgttagaaatcttaaatagaatactcaacttcattagttggatactattctccagacatggctcagaataactgttagcagttttaaaattaaatgtcccctcaaaggatgaaattctacaactgaagactactggtgaagacaggcagaaatatgttttttagaattcttgttgatttttcctcttaagttacattacactttagtcgtacattttatcaatatagaagattgacgttttaatacagtctagctattgtaatcttgaatgtgtaaagtaccaaggcattttctgactttttatacatgtcatgtataatatggattcaaataatgtaaagaaaagagccgtcgtattatggtacttagtatactttttatgagattgaaacaattttcatttcagattgattttgaatcttgaccctttaccaactaattttgaagaagataccttggaaatatttggcattcagtgggttactgaaacagcattagtgaattcatctagagaactctttcatttattcaggtatttcttcgttataactttctgtgagtgtaggtgttgttcacttttgtaaattacgttgttgggtggcttctaatactgatattacaaaagaccagaggaattgtgctggttgctcacttgattatcttaccagtaacaataatcaagcagcaatgcctgatgagtaatggttttaatgagttgcgttttcagaatctttattctttgcatttgacacatgtattgacaaatatttaaggctttgaactataatttttagaagaaaattaaaatatttttgttgtgcaatagccatagtctttcagtgatctttagagtatggtcttaacaaataaattgtttagactgtgtaatagaaatattaattatttggacaacatttaaaatttttttaatgaaaaattttaagcatacacaaaataataatataatgaacatccatataccctccttcagttgcagtaaacaacaactttttattacatttccttcatctgtcttgtctcctcttcttttggcctaagtatttgtaaggaaatcctaggcatcatgtcgtttcacccataaatacttcagtatgaatttctta

SEQ ID NO: 122035 - DNA, 1095 bp, Homo sapiens
cgagtgctgccaggcgtgggcctggtgggtctcgcctcctccttggagggtcggggttggccctaggggttgctttcctaatttccaccccgagccggggagggagcgttctccaccctgctgctgggaaacgggcggagagtggtttagaaacgttgcggagggcgcagttctaggcaagcccgggacgctatgtcctgcagacatttctttgcttttcaccttgtcctgggctgcagagcccgacttagtggccggatttcgaggtccctgccacagccagttggttgtgcattttgtcttaagttctgacagccttgatggacggagggcgagggggaattgggaatttggcctctgggtttgttcgtttgtttttccttcctgctggcggacgtcttgagaactttctgaagtaatccccactctctcggccccacccccccccccccaacaggaatctcttcacaccttctctttggagcccttaatgatacgacgaaccccaagtgtttcagaacatgaagtaaacaatggagaactgttctgctgcatcgacgttcctgactgacagcttagagctggagctggggacggaatggtgcaaacctccttacttttcttgtgctgttgacaacagaggaggaggaaaacatttttctggagaatcctacctctgcagcggagcccttaagcggtaggtaaaactcagagacattttccctcatctgattattcaccagttttttaggaatgttagttatttcagcccattaaactttggtgttcaccaagtcgtgttttataaatcagcttagtatatcataagggtacaaatgattatcagttctgctggcttcttggtaagggcatatctaaagtatttggggtattagggaaaacttccttggtaactgatgttcccttactgtagggagctgggcactaatttttcttctacttaaaatgaattcctaactatctgagccttttgcagtagtatttccttctaaagagtgtgataatattctagagctttccagtaatatttaagagagacaaacattttttattgcccctgttccttctaatcct

SEQ ID NO: 122036 - DNA, 1001 bp, Homo sapiens
atattagccatatataaaacggaggaaagtaggtgctgtcaatgagtagcagcagcaaggttgaaatggtgggcataaaagaagaacatataatcctttaattcttcatgagagactgaagacatagactgctttgggatttaattcattaacatcttctgtctggagtgctcttaaatggatttttaaataaatgagtactcctggctgttttatgaaacagtggcagatccgtgaggtcagtgggcagatctgtattaacaaggatgtggatttgtttacatggaagcaaagcaataggttataattaagaatctgacttactctaaacagtttgcatgtctgagcataacatgtaaaagattggaattatttgatttccagattgaagactatgatgtgatagctagcatgataggagccaagtgtaaaaaactccggaccctggatctgtggagatgtaagaatattactgagaatggaatagcagaactggcttctgggtgtccactactggaggagcttgaccttggctggtgcccaactctgcagagcagcaccgggtgcttcaccagactggcacaccagctcccaaacttgcaaaaactctttcttacagctaatagatctgtgtgtgacacagacattgatgaattggcatgtaattgtaccaggttacagcagctggacatattaggtaaggttacaatatataaatttgttttaaatgtctgtttccttgacagaaaagccaatctcagactttttgttaggaaaaagaaaatttttggatacaataaaaattttatcctgataagatggcttggtttgataggaaatgcaagatagatcagttaatatagggaataattatatatgtactttaataaaatagtgaggacaataacaattttatagttgaaactgtaaaaaactataaccattaattcttggtctacttgtaagagtgagaatttacatgagctgcgctctctattttt

SEQ ID NO: 122037 - DNA, 2191 bp, Homo sapiens
taaagtcaccagctcaatcctgatttggggtgactctattggcagttccatcaagctgcagctgatcagtgaatgtcagagctgcagccattcttcaggagtgtcaccagcctgctgcgggttttttgtctttttgtttttgtttttggagggaggagtggtttagcttgtcttgttgttcaattgtagccagactttcaaattgcttacctttgggaaatgaaccgagaggtcatagggaatataggtatctttagggcatccaaaaccatacacaaagtgattacttacatggagactagtaatgattaccttgactccaagccaatcaatggtggagcctctggggactcattaaatggcatttgtggactctgtaacctagcttttgagctgcatttcaggaaaagcagtgacagcctttaatgtctaattgacctcttctctttgtttcactttcattcactttccatatttgcctctgatgtggtccctaatggcagcaaacagcactgctcagcattttgaacttctgttcagagcttcagcacctcagtttaggcagttgtgtcatggtaagtgtttgagaattctttatactactcaattacttgttctctttttcttcctatgggtgaaatgtatcctgactcaccctaccccacacacacccacagtttttcagatttatggttctcttctttgtcccttgctttcaaacatttttcttaaattggaaagtatgtctttgaaacactgacattatttatccatgagagcaaggaaagaagtatagtgtggtggaatagagtatagttctgcctcaagccagatgttgtctccgacaagctaatcacctctctaggtttcttcacaaactaaggtgttagtcatacctaaatgccgatagttcagtaagtttttcactaagctcattttagcttttaaatcctgagatacttttcttgaaattttaatgataatagataggtttattttatctgtttgtttttgtgtttgttttactgtccttactggtcaaaacagaaagattaacaccctatgttggaactcttttttgtgtgtggaaattttactggtctgtgaaatataaaagcctagggactgttggactagataagcttcaaagtccttccagatttttttttttttttttttttttttgagatggagtcttgctctgttgcccgggctggagtgcagcggcgcgatcttgactcactgcaatctccgtctcccggattcaagcaattctcctgcctcaacctcccaagtagctgggattacagggatgtaccactatgcccggctaatttttttgtatttttagtagagatggggtttcaccctattggtcaggctggtcttgggtttcaccatattgggcaggctggtcttgggtttcaccatattgggtaggctggtcttgaactcctgaccttgtgatccgcccgcctcggcctcccaaattgccgggattacaggtgtgagccactgcgcccagcctagtccttccagatttaaaatacgattttatgtgcccttgaaagagctcatggaaagagttaaatgttttaatctaaaccacataattatatagcttttaaataatactgagatataaaggacaatagaaatcttgtgtggagaaggtgtgcatgtgtgtgtttgtgtgcacacataccgtaagtgaatcttccagtgtaactgactggaagaattcattcctcctcacttcatcccctgttccctaaaacaatgtaggtttaggagatccccagaccattccatttctgccttgcattcacttagtaggaagacttgaattagcaaaatgattgcaagattctagaaaacttctggtatgctagggagtatttgctttaagtaaccttacattttgagaaatattttattagagtcaatagacagggtccctgacctaaaatgagtaccatttgaacacctcttagagctcagtgtggcttcagaaatgcctcaagatttggcagtgtagactaagtaggcctcttttgatgacatatttatctctgtgtccccatggtctttaaaatcttgtggttaggtcttattaaaccctaagtatgggctcaggccatctcagtctctagaaacagtcttgggagcccactagattttcctcacttct

SEQ ID NO: 122038 - DNA, 1077 bp, Homo sapiens
gtttactcttccagtttgatcccaggttaagaagcgtatgcttcttatgtgtggcgaattgttgaatttattacttgaagttattcattgggttttgaagctgctgaacagggttaataggtagattttaggtggaatgtaaaataaatcattgtttatgaacatgtattctactgctagatgacagcatgcacctagagtatgttttggtaattctgtagaagaaattatcatggacccagtcactccttagtgaatgccttgccatagttgtttaagtaaggttgccctttgtttgaaaattacaaactcatttgaaaatgaatctgctgccttgcactattaaagctgctattttaattatattttagttttatagaactactcttgtacttctattgaatgagttttgagacctaaccagcagaatgtgtagacttggggacctgaaagatactttatgtcttaaataagaggttcatagaatttttcacttttcatttctgaataaatactgtgccattttcacagtacacctaataatatagctttgatccatccatttgtgtgttctagatatgtagcagtgctgcatatactcattatagtagaattgttttgttctcctaagtagagattggcaaactttttctgtgaagggctaggtagtaaatactttaggccttgcaggccctatgggctctatcacagctactcaatcctgctgttgtagtgtgaaaacagtcacagacaatacattaatgagtgggaatgtctgtgttccagtaaaactttatttacaaaaacaggcagtaggctggatttggcctgtggacagtagtttgccaactcctgctccaaactattgagttggtggtctctacaaaatcaggtccttctgtatctggaaatgaagagttaatttctccgtagtttattctctttgctttgacatcagtaacaacattttaattctgaatactaatagcatggagaaagaatattttaaagatattttaggaggaaacgggttaactggatttaaagacattgtaaactgattccataggcatgttc

SEQ ID NO: 122039 - DNA, 1617 bp, Homo sapiens
aaaatatattatccagtacttgatgggtactgttgagggggaaatatctcccaagagtttagagttttgttatgttttgctgtttttttttgtttttgttttttggctttaccaactcagatgtgaattataggtaagtgggaaaaatatatcttctactttcttaattttccacttagcattagctgactttttatatgatgtgaattcattttgttctctcaagttgatttttttagcctaaccattcatatttcagtatgcagtgaataagaatttaagcaaaacaaattttacattttccctaatagaaatctattctttcaaatgtatctacttagagttgctaaaattccaaagttcttgcaaaaatatcttttagttttataaaattcacatagaatgttgttttggcaggtttctgaaggtttgtggatccgaattagtacgccttgaattgtcttgcagccactttcttaatgaaacttgcttagaagttatttctgagatgtgtccaaatctacaggccttaaatctctcctcctgtgataagctaccacctcaagctttcaaccacattgccaagttatgcagccttaaacgacttgttctctatcgaacaaaagtagaggtgagagtaattcataattttcatcattgctattatggtagccaactgaagatttggttttctgtaattgctcataataatgtgttttttatttttaaatcaagtttatgatgccttctgactactctgaaatcaatagagctgattcagtcattgtgaagttatttcaaacctaatatgcttttaaattataaggaaatgttcttctctatgctcttaaaatttttgtgatgctatttatgtccccaggaaaaaaaataagcgttggttgaggtaagccaaaatgctggcagggaatgaattagagaaaggtaggaggataatatgtaagaggacatttgcttgcagtgggaggaagcaaagtgatatttatcctggaccagacttgggggttaaaatttgtaataccatagttaatgagtctcatttaaaaaggaatcatgtcatatatattagtctacttgctttttcactaatatctctaggacatgtttccagggtcagtgcatatattatctaactcttttactgtaatagtgtatgttataccataatctatttaacattctccaaatgatcaacatttagtttttccagttgttttccttttacaaactacctagcactaacattcttctgtgcatagttttttttttcttttttgagacggagtctcactctgttgcccaggctggagtgcaatggcatggtctcagctcactgaaacctccgcctgaccagttcaagcgattctcctgcctcagcctcctgagtatctgggattacaggcacgtgccaccatgcccagctaatttttgtatttttagtagagacggggtttcaccatgagcctgtgcatggttttacacatacttactattactgctgttggatagagtcctagaggtggtattgctaggttaaagagtatgtacctgggcccctgtagtacatactgtttgtcatatactttttccctctgctgc

SEQ ID NO: 122040 - DNA, 1286 bp, Homo sapiens
aggtaggtagtatacattttgaaaatttaagtagagataatatgaggatattaaataatctgctcagagtaaaaatatgcaatatgggattcttgagagagagaaagaaagtcagaaaggtagtataggtatagactttatcttattttgctttcaaattccatcattcattaaatcaagttgggaagtttcctattgtctcctaacagtttgctttctggtataaagccagagtctttatagtgacacacactacgtcaactgtccctcatctctgatctactcatctcgccatcattttgcgcctcctgcatcccccgtctcactgttcttcactctgcttgttatcctgccctggactgcccttccctttgcctagaatgctcttcctccagatacctgctttgctcaccctctcgcttccttcagggttttactcaccacatctctgaagcttctctgactactctgtccatccttgacactttctattgcccttccctgcttttatttcctcctgggcacttttcacaaatttgcgacttactttactcatttggttatcatctccttctctcttcaaaacattagtaagcttcatgagagcagggattttgttttgtccactgctatctccccagtgcctagactattgcctggatgatagtagaagctcagggcatatttgttgaatgaatgaatgaatgtgcttcatgtagactgcagtttagctaatacagctagcaaaggaagcagcagtgagaggggttggaggagatccaagagagggagttatgtgaggagtgtcagagttttaaggaaggagtgtgcagttgtatgaaatgtcacaaatcaaataatacaagtttgaatttagaataaacgggtgttcacgtgtaaataagatgtgcaggctactgggttatttacaatatttaaatttgcagcaactgaatttttttattgtttaaatgtgaattggccaagatttaacttatacttaatgtttatggggtgctttgacctttaaaaactgcatttgcgtagtatttcagcttcaatcccacgaggcagtgtggtgaatgttgttacatacttcaagtctgcgtttacagctgaggaaatgctaagacttgagtagatgccttttccaaggtctctgctaggaactagtcaaacaatgcaaaaaactccatcttttaaccagtgttactttcttttatttacacaactaatctgatttagtcaattttactttgtatgtgtatttgtaagctcattaaatc

SEQ ID NO: 122041 - DNA, 1180 bp, Homo sapiens
gctgtccagtgaaacacagtttagtcctttctacttccctttgccccaaacacacatatttcaaattcttttctctgctaataggaccaagaaagaactgaagctaatgaagtctgtgaatatttagagtatacattatcataaaccaagactaactgaatatgaaaacagaacaagtggtgtcagtaagcattattttacattatgtagaccattagggtattttaattaccctcatagctctttcccaatgttttccattattaagaatttattaaacgtttgttttcaccctttgtgtgcaaggcattgtagtgggtgttgatcatatacagagacatgagatatataatatagttcctgccttcaggctacagagaagataaagatattaagataaacatataaacatatcccttatttttataaacagagtaacagggtagtaactaatgtgtagacattaaagaaaatattagtcgtgaatggctgaagtccagctgtactggcaaagtgctgcatatgactgtgataataacgagtaaaatataaagctaatattaatcaattttaaaaactttatgcagcttctggcgcttgagaagaaacatcacttataagaagaaaacttagccatgccatttaaaaaatttttatactagtaatggataaagatcttttgcaaagttagagtttctatctactttctaacccacaatttatcttccattttcaattcacccagggtagttgctgtagagcagtttgaataatcagaaaaagccatatataaatttaagttctcatattttactgtagtatttcagccagtaaaatcataaatcttgatggcattcctttaagtgtagtcactattcccattaagaaaagaaaaagttgaggtaagagggagagagaaccttttcttgtggggggcatattggagttttgcctactgattactgttggcccccatgacttgactgctgaattgatagttattatggcttgtaggcagcattcccagaataaacaataaatatgcatggcttgattattaatgaataatctttgaataagtatggtctatttatgctcagtactatgaagaagacttatttgtaatactttaaagaagaaaagcacatttaaaaactagagaccaatgttgatgagctgc

SEQ ID NO: 122042 - DNA, 1731 bp, Homo sapiens
ggggaacacactggggcctgttggggggtggtggggctaggggagggataacattaggagaaatacctaatgtaggtgacgggttgatgggtgcagcaaaacaccatggcacttgtatacctatgtaacacacctgcatgttctgcacatgtaccccagaacttaaaagtgtttttttttttttttttaaagctgagtgttcctggcacaggtacactgtacactttcactttggagctaggtctgctaggctttagtagcattctgtgtatctttttgtcaaagctattaaaacgtatcattgtccttaccaatccccactggactgtaagcactctgagaatgggcactctttcttttctgtcgccagtgtctggcacgtagtagctgttcagtaatgctgagtatgacaaattgtattagtcaatagattaccaaagtgtatctttgcacctaagaaaatgagtaggcaatgtgaggtgagtatactttgaataatcttgaaatgcactacagtcaaatgcacgtatgatttcttttatttggataattctgttggatgtttatttactatgtgaaaatattgttataaaatgtatgacacttttattccttattagattatgttatatgtttcatagaatgatactgcttttcactcttgatgatcttggtttctctgtcttatttagcttattcagctgattctgaatcatcttacactaccagacctgtgtagattagcacagacttgcaaactactgagccagcattgctgtgatcctctgcaatacatccacctcaatctgcaaccatactgggcaaaactagatgacacttctctggaatttctacagtctcgctgcactcttgtccagtggcttaatttatcttggactggcaatagaggcttcatctctgttgcaggatttagcaggttagtacaaagccttgatgaagtttttttcccccccagcagcaggttatacttattatgtagtggttttcataataaaagtttgaaattatgtaacatgtacttacaaaaataaaaaggaaatatattttgagtgtcatgtttagaatgctgctgcttataaaaaaataagtgttttactatcctcttcagctaaattttatatgaatatgaagggaaactataccctttacttcatgtttcttaaatcccaagtaactttcagcagagctcctgtttcttctttttcatatttgcagcacagatgattaacacattttaaaaactatttccaaatcaaaatctacctctctaatgtgatttgtcagaaatggaaaacaatttattatagaacatttttaattaaatcttaattacatgtgcaatacatcacccagatttagaagctcatttaaactaattatgttgaaaatgcagttgcatgctaaatagacgaccacacttgcagacctgcccaggtgtttccgctcctttctatttaagcatttagtttccttactattaaatgtcacctgttaagcatttgaaagcttgcacaagtgcatattcatttagtaatgccatagtaattttttcttaggatacaaacaggtgtttttctcctaaccttgatcatggtttttctcattgtatgttacatataatcccagcattttcatgaagttaaataatgaagaagtagaaactttagagaaattttctgttatttttaattaatgaatactcttgtattc

SEQ ID NO: 122043 - DNA, 2145 bp, Homo sapiens
acatattacagttaaaatgccatggcacatcctgtgaagtagctaaagttgccacataaaggtgaatttaagtgtccaagttaatttggtctttaagccatgggaccaggatcccacccagacctcatgtgatggaaagggagcttcacagattggacaaaactggcctttactgggaggagggaggaaagatgaaggaaaagctgggtttggggagagagaggagcatgagatactgacagtgttgctcctcagggctctgcggtgggtctgttgttgcagcagtgggagcaattcatctggaggagagtgaatcgctgctttgattcttacccacttgcaaaaactgtaaaatagaaatataatttcagcaaatacattttaaacagtttattgaattttatccagacctgataaaatgcttgacccatagaatttgaatgaaggccagaagacacttgaggcaaagggaagagaaggtacaaagatgagaagtgaaactgtgtgacttgtttggaaactccagtatttcagtgtgaccaaagcataggatttgataggggaggctgcaggagatggaattggatggaggctcagggctgcctcagtgcacagctccatgcacatagatgacagtgattgggactccctgtctttggcagtgtggagtctattctgctgcgtcatagaggtctgtttgggtttcaccaagagatttgcattttatcccttcagccagtgatcttcagggtggtccagtatacagccaaattagtcaaggggagtcacagatactttagactttgcagataatttacttttgctaaaaaattagaacatgccctagagtaggaaaatacaataaagtaaaaatatcggttttccttaatcagtgtattcaatgaagtcccaattaaaatgcaaacagaattttttaaaattgaagtttgcctaaaaatatgaaaatactcaggaacattctggaaaagaagtgtgatagaggagtattagtcctgattctcatttgcagtcaaacaatccatgacattccaacacatatgctttaaaaaacttagttattttacttggaggactattgatatgggagaaatagcatatagataaatggaacagaatagagtccaggaacaggtcaagaggatagtgggaaatgtatcgacaactcccctgggaaagtgttatgtttctgttgttaaaaaaaaaaagaaacacaaataaaaacagttttatatcttttcttccttttttgtctttcagaataaaaacgttttgataccaatgttgtctaggatataagcaaaagggtactttcatacaatttttatggatatataaattgatgggaacattgtgaatggcaattctccacttgcatcaaaacttctaaatgcatgtaatttactataaggatatattttcaaagtttgccaagatgaacatacatgcataatacatacacacaatgatattgcagtattatttgcaataggaaaaaaagcaggacatacatcaatgaggaactagttgaattatgtcacttctatgaaacggaaggaggtgggtctgtatgtgcagatatagaaagatctataagatatatcattaaatgagaaaagcaagttgctgaatggtgtatatagtatcattcttttagtgcaaattcaagaacagaatttcatacacatttatttggaagagatcagaaaaacaatgattatctttggggagagggatggttagaactgagtgtagagaggaagaaacttcttattttagacctttctttaatgtttgggtttactttttacttgaaatttttgatttttgtttgtgtaatattttacacatcaacaggtgtatctggatgatgagatttgttaaagaaaaattattcaatcgttctaggtatagggaccactacaatgggattttgcagtgtctgagagagattgggttcaacagcatgggcaagtgggaattaatagccaaggagcagattagaaagtcagtaaattactaagaaaattactaagaaacatcaggagtaagggagattctggctacaccctctttaaacttattttaaagatcatgttgttgttactctgcgttttgtgatatttt

SEQ ID NO: 122044 - DNA, 1200 bp, Homo sapiens
aaaagctgaagcaggagacctttgtgaagcaaaatgatcagtttagtttccgcagttggtttaagccatgcacacagggagcttcatctttgtgtgttttattctttgggtttacttatcttgtaaactgtaatgttgttcagatacctctaactacatgttccagtttttaaactgatcaatgtgaaatctgtaaaaaaggactgtttggggacttataaaaataaattaataaggtctgtggcatttggttttttaaagttttttatatcttgggaacaatacttatattggattctatttattttgatgactttgtttcacactgtgacatattgggcatgggtctataaccttaagggaccagtagatctcattctaaactgtattatagggaagtttctttttttggcagatgggagattctttggtcagagagacctacgaaggtgaatgcttcccaagctcgccagtttaaaccttgtattaagcagataaatttccccacaaatcttatacgactggaagtaaatagttctcttctggaatattacactgaattagatgcagttgtgctacatggtgtgaaggacaagccagtgctttctctcaagacttcacttattgacatgaatgatatagaagatgatgcctatgcagaaaaggatggttgtggaatggacagtcttaacaaaaagtttagcagtgctgtcctcggggaagggccaaataatgggtattttgataaactaccttatgaggtaagccaaaaatatttagcagcagtattggatataacactatagatttttaatctttagatattaatgtttactgagcatcggtaattgagcattggtaagttatatataatttgatgtgttgtatattttgattttggaaaaactagacaaaatcatgttttaactaatttcactgcttttgttttggtttggcattagtgtttctgggtaaactattaagtatatattttcatattgctaattaataataaccaaatacaaaaaccagtaataagtaacaatccactttaattcatattacactttaactgtgggcaatacatgcttaactttttattagttatgttaaagatgatttgctattaaaaataagaatattaataagattgtgagatgaatgcttattctgtttaatctgtagtttctctaagtgtca

SEQ ID NO: 122045 - DNA, 1021 bp, Homo sapiens
ttcacatttgtattttaaaacttgtttttttagtttcattctgagaaattacattgagggtagagcctgttcattaccttatccatgcatttttctgcttatttaaattattttacttcaccaagccattcatttttttagaacatccttcaaagagttcatgcatcttactgaggacacctgaccttttgaagcttcataattcacatctagatgtcaccggtctttcccatgttaacagttctgaccatgttttattatatatgccttcggcgccgagccaggacagctacaagaggagaaatgatgaacacccatagagctatagaatcaaacagccagacttcccctctcaatgcagaggtagtccagtatgccaaagaagtagtggatttcagttcccattatggaagtgagaatagtatgtcctatactatgtggaatttggctggtgtaccaaatgtattcccaagttctggtgactttactcagacagctgtgtttcgaacttatgggacatggtgggatcagtgtcctagtgcttccttgccattcaagaggacgccacctaattttcagagccaggactatgtggaacttacttttgaacaacaggtgtatcctacagctgtacatgttctagaaacctatcatcccggagcagtcattagaattctcgcttgttctgcaaatccttattccccaaatccaccagctgaagtaaggtaagactaattttttaatgacctaagttatatggtagaaaggttttggttgttaatattggagatcttttttattgcaagcattcttttaagtaacttaattgaatttgattttgaaaattttccttagttttctgatggggaagagagatcactcatataaagatttaattcaggctttatacctgtaatacctcatactgtaatattcatggcttatgatatttgtatctcataaaatttaccaaaaccaaaaagcacaatttgaactcatagggacatgggccattctggga

SEQ ID NO: 122046 - DNA, 1019 bp, Homo sapiens
gtccagacagcgcctggacaatttggacttctgcattggtcgtagctctccacatgagtcctgagacaatggctccattccctttttcagcttcatttcccagggaaaagtagagagagctatcctttcttctccatatgttcttccccacccctaaaacacttttatgtgtcatcttagcagattggaaaggagtttagaatcaatgaaggacgttagcaatgggtttgtacatttctcttttttatttctatgccttgcttattttcaaaaacaggttttaacttctataacattttccaaatagcactgctggaaaaagaataaatatatttgcttttttggtatatcagactctgcatttccttcctttaaaaatttcttttgccatttttaactttatttcctgaaaaaattagcattaaatattatttttatccatagttgaaaaaaactaaagcatccattttacatttctatattgaagaagtttgaacatataacacatatatttacagtttataactcacttttacatatgttgcctcaatgcaaaattttgcttaactttaacacagcttaaacataatattgcccatatgacagtcttgcttttgatattatcttataatctacaatggtaaaagctgggaaacagtttcaaagtttgtagcttggtatgtcaaacagaatttgactttcacaatttgtctaaaatctttttgccaaaaatgcacaacacagttttataaagaaagggggaggagcttagttgaagcaatttatagaccgtggagtgagaagtgatgtccagagattaagcagtcaacttattcatccactgtggcagatggttttctgtccttcccttgatggtttccaggaataacacatccatagtcttctaaattagctgatttgtcaattgatttgaatacatgttataggttgttctttatttcctaaattttatttttgcagtttaacttgttaattctttttctttttgaaaagagaat

SEQ ID NO: 122047 - DNA, 1581 bp, Homo sapiens
tagtttttccagttctccataatcaacgtactgttttaacacagatttggagtgcaaaaacatcattgtatttgaggaaatggctttcttttacctctctaatcatctctttcatgaatctttctttaatttcaatcagagtttctttgtgaccagagtcaagactcttttatgtattcagaagctgcttttgtactaacagaagttactacttttttcattctctttgaacagtaaaatttcaatatatgtactattccttcttggatggcttcaaagaagttcatacatttgattcttacctattgcgcttcaatttttattacccgtttcctctctttatctctgtatcaagatatggaacatttcttgtgtcattttttggtttacatgtgccttaggaagagttgctggtttcatctctgtgtttattttaaacttattcattttaattctcttatgccatctactcttccagtctccgtaaaacaacagatgtttattgagcatatattggcatgtgctagactctaagggtatggttataattaaggcatgttctccgaacttggggagttcatagtctattcaggtagagaaatatttcagcatgtaagaaatagcaaataatacgaacatataagagcagaggaaaggtgcatggtagataaagtatgaacctgaccttgaaggatgagtaagagagtgccaagcattggaagagagggggcattccagagccatccagcctcagttgaagatttcaggatgctgaggcatgaaagcaggagtgctgctgagggcatggtggaggttctggtgggtctacagcaagggtagtgggtgtggacatgaaagggaaggggaaggcgggctcaaagttagatagaatgttcttgtatatcatgttatcaaaaagacagccttcctttaatggtacctctgtgtatatgagaagaattaggaagaagaaaacctgggaggagactgagaagttaccagaggcaagagggggcataagagcacaagttggtgtaaaagctagagggggccagccaggaaagagagctgataggaatttcagatgctacatcaaattcacattatcattcccctcttttctccattgatgctttctttcattcccctgttttgatttctagattcaaccagaaaagtccttcctcagaatagtatgtcttgatcagtttcagcaggattcagaaataatgagcatttaagggttggccttttttcttgattcattaccacattgagcattctaattacattttggtactatgtagcaaagctgtctaaacttgctttttttttttttttctatgacttcattgacatgtctctgtgggctcttttgcaagtaaatattgtgttacaatttgccttgtatgtatgcctgtgccttattgcctgtcctttttgtgtttttccatgttttttcactgtagtataacttgagaataatcctcttttgagttttaaacttgttttcaggttctttcatctcactgtgaacctagcctttacgctgtcctggctctggttcattctgattgctgc

SEQ ID NO: 122048 - DNA, 1061 bp, Homo sapiens
tataagcctgtggtcaggtagttgcgttggcaggatgcccgtctggctttgtgctccggagggcacattaccaccaggtgcagggatctctgcttgctttggtctgttcacagacacaagctgccttttctggttcttgcgtgcactccttggtttcttaagttcagctataggtatatatttttttctttcaggctcacttcctgcctccattatcctgtaccgcatattgtatctgttggttgagtagagagagattcatccagagtcatcagcgctccaatagtcctttatcagattaaggacttgagggaaatgtgcattatgctttagtaggcactctaaaagttccttgaattggattcttctttccatacttatgttctgagtactaactttgttttaaacttctgcgccaaaagttggcttttctgaactctgcattttcaaactcttcccttctgttatttgaaaatcagataagtcaactcattgtaagatggataatttctttactcacgccgtgatgaaataatgcgattatagtactctgtacaatggtacatatggtacttgcacatatggtcagttaacaaaaactgccccttctttctttactgtgttagtctcatcctcttaatgttgctgcggttaacattctcgatcttaacttcgcggatctaacacagtgtcctttaaaaaaggcctttatctacatgaattgtatataaatatccacctccgttttcttctagtattgttaatgatcttatttatatttaatgtgagataagaaggctctaactttataattttgttagtgactccatcatcatttgttggaattctatttttccctgctgatcagtcctataaataccataggccctaaattcccgtgtattcttgggactttctgaacggtctagtattctttggctccctgtggtgatcctggcttctgtgatgctcttattgctctaggtttataatgtgttttaatatctagggatttgaacgatgcctggcatattgtagacatcactaaatatttttgaaat

SEQ ID NO: 122049 - DNA, 1036 bp, Homo sapiens
gaaaccccatctctattaaaaatacaaaaattagctgggcggtagtggcgtgtgcctgtaatcccagctactcgggaggctgaggcaggagaatcgcttgaagtggggaggtggaggttgtggtgagccgagatcacgccactgcactctagtctgggagacagagtgagaccctgtctcaaaaaaaaagaaaattgatgttaatctcattcttctttctctttctctctaaattatcttagaatttgtatttaatcttaatattctcaagtttcaatatggcatgtgttggtgtgggtctttatatatcctgtttggtcctttataaactcttattatctgaggtctttcatctcttttgaattctggagaattaattatcaattttgttaaaatatttccttttcttttatgtttgtttttcttttccctcttcttccttgttccctattatccagattttggaaactctgcttctattttctatgtctctctactctctacttgaattcttttctgcttctttctggaagcattcctctctctgagcttcctttgcattgctctatgtgtgtttgttgttgttgtttgtttgtttttgtatccattatgctatttaccccatctattgtgttccttattccaacttttgtatttttcttcttaatgttttctttcagtttgtattagtaatctcttcctttatccattggaggatatttattatgttacttaaattttttggtctgtcccaataattctgcttcatgtcgtataattcagtgcactgcccttctcatagtagtggtacttatctagttattttggtttgagaactccttttaccagggatgccaacttctctgcctgggaatttgtactggacgagggctaaagcccaggccacaggtcctgtacctctgagggagtttaaaaaaagaaaggaggtgagcctcaggcatccccaaactactctggtccttttgctttgctgccattcccccaaatggctcctgcagctccggggttcaccttt

SEQ ID NO: 122050 - DNA, 1029 bp, Homo sapiens
gaaatttgtgtctgttaatttacatgaaaataccactttgtgatgggaattatttgactggacaaaatcagttaattgtcagatctatagtttgtgctgtcttggaacattgtctaaatgagttcttgattttaatacctgacttctcgaacattccatttaaatgaaaacatttcttttatagttaatattgccagaaagcagcaattttttttttttacttgacatattttcaaaatgagtcattctgtactgtgaagttgagtgggcccttgggtggtaaacttttcaagagagtttgttttactaaatggggatctgcaggaagtgggcatccatgtgatgaagatacaaagagcttgttcttgcttaggtagaaagaagggggtgtggtgttgtactgggaacaatgcgagggaaccagaggctcaggcagggccaaggggaaggaagagtgaagtttatctgactagaaatcagctgggtcaaatgaagatggaaattgcaaaagggtcccgaggagtggggtatgagtggggctgtgtggaatgatgagcttgcagggatgagaccatatctctttggatggggataaattccactattacttaatgcttgatagtttactaaatagttacagtattaccttatgtaatcctcatgataaaccatacagaattggtactgtcctcactcttcaggtgaagatggtggagagatctaggctaacgtggccagtaggaagcagggcttggatttgacaccagttgtccagacttggaatccagcattcattccattatgtagtggttattgaaaagctgtatgcagggaagtccttctcacccaaaagagtagccaaaggaaaagatggatgtgtggctgagacaggagaaaggggaaaagcaggggtactgaaatacatgctgtgtggtaaaagtggggatactgggaaggcagaaaataaggaagacagagctagagagagagcatccagaaggcaggttccatggcattacaggtgaaaga

SEQ ID NO: 122051 - DNA, 1033 bp, Homo sapiens
tgggattacaggcgtgcaccaccgcgtctggataatttttgtatttttagtagagatagggtttcaccgtgttggccaggctgctcttgaactcctgggatcaagcgatcctctggcctcagtctgctgagttgctgggattacaggcatgaaccattgcacttggctaattttttttttaacttttttgtggagatggggtctcactatgttgcccaggcttgtctcaaactcctggcctcaagaaatcctccctccttggcctcccaaagtgttgggtttataggtgtgagccaccatacttggccagttttgtttctggacaaatgtttgagttgaattagaaagctctgaagtaatgcaaacaataaaaaagggctatttctgaatacttagtaggatgggctttgcatgtgtgactgcatttattcctcacaactgttgtttgttcatttcatagataaggaaattgcagctcagggaggttaagcagcttgcccaagatcacacagtaagagtagtaggatctagattcaaatcagagcctgcagtttttaaccactgcctcttagaaagtacctactttggcccggcgcgcggcagcttacgcctgtaatcccagcactttgggaggctgacgcgggcggatcacgaggtcaagagatcgagaccatctggccaacattgtgaaaccccgtctactaaaaaacaaacaaaaaaaccccacaaaaattagcctggcgtggtggcacgcgcctgtagtcctatagctactcggggagctgaggcaggagaatcgcttgaacccaggaggcggaggttgcagtgagccgagatggtgccactgcactccagcctggcgacagagcgagactccgtctcaaaaaaagtacctactttgaaatccgttttgttggaggaagaggaaggaagagaaatgtggagaactgaagcattgctcagggaagacagacctgtatcaggtgcctttcttgcagcgtctaggggaagaggagtggaggggcaaagggaa

SEQ ID NO: 122052 - DNA, 1838 bp, Homo sapiens
cgacacaaagagcggggcggagaggcagctgcggggggagccggcggccgctgctgccgcccagggctctggggccccgccggccaggcccgccgtccgcggccagtgcccttcctcctcctcctcctctgccgccgcctcctcagtcgccgccgcctcctcagtcgccgccgcccgcgccgcccgcgccctccgcgcgcctctgagcccgcgccgggccgcgccggccccttcccatgcgggcggcgcgggccctgggaggggcgcccggagccagccgcgcagcatgcactggggggttggctttgcttcgtccaggccgtgcgtggtggatctgagctggaaccagagcatctccttcttcggctggtgggccgggtccgaggagcccttctccttttatggggacatcatcgctttccctttgcaggattacggtgggatcatggcagggctgggctccgatccctggtggaagaaaaccctttacttgaccgggggagctttgctggccgcagctgcgtatctgctccacgaactcctggtcattaggtgagccggagagagggccccgcacaggggcgcagagaggggcacctggctagggcagggctggcgcgagaggggcccgtgccagcccctcggtcaagctgcccagatgcccaagcgccctgcaattacctttccctaaaggcatttgtggtcacctggccgtgaggggcagtttagagttgaaaggagaattaaaccggtgctgggagggaaaaacatttgtctcccaaaatgctctgggtcacttgtcgttatctattaagaaatggccttaggaggatctaagtgcagtgtgtttgcaacaatagaattgggccctgcagaaataggttacacttttatgaaatgccttgtttataagtaataatgctggaatattaactgctaaccttatcttttacctaaaggttagttcttccctaaatgtcaacatcaaaagactgaaaaattgcaaaagctccagaaacctgcgggtccctgttaaagatgcatgaccaagtgtagtggtgggcagctttgatgcagccttaacctggttctctgcttatctggtattgaacgccaagcaccatcttcaggcttagatgtcattgttgtgtgagcagtaggacaggctagcacatgggtgtgttgggcacaacacggagtcgcccagtgccgtaaacagttgcatccgctgccgcagaatgtttacaagattgagttggaaataccagaaaatggaggcccctgctgttggtacatccagccgggacgagatttttgtttgggtagagtaataccacagggcactgagacagtcgtttggctaattgatacatcaattaatggttaaaatttccatgcatttgagccttccgtcactggaagattaccagaagcccagttttcaatagctcagaatgtctctttgccagtattttctaaagtgagagaaatgtgtccacactgccttattccagtggaggaatcctacacaataggttataaacaaagacagtgataggtgacctgtactagcctgcagggatcccaggagattattgtgatggcctaatgtaggcatttggcctaacgtacatattttgaatagttcccatctctgaaagggtgggaaatcatttaggtttggagaaatgtattggttttcatattatttagccatatttgaggaagtttattttaagcttgttgcacatttaattctctcaacacattgccttgaatctagctgaaccaaacaaaaaaatttaaagagaattatctctctagattatttgttaatt

SEQ ID NO: 122053 - DNA, 1883 bp, Homo sapiens
actgcagcctctgcctcccgggttccagtgattctcctgcctcagcctcctgggtagctgggattacaggcacatgccaccatgcctggctaatttttgtatttttagtggagacagtgtttcaccatgttcaccaggctggtcttgaactcatgacctcaggtgatctgcttgcttcagcctccgaaagtgctgggattacaagcgtgagccactgcgccttgctggtgcatacacatttagtattgctttttcttcttggtggattatcccttttattgtgatgtaatgcccctctttgtttctggtactttctttgctctaaagtctactttgtctgaatgtttattgaacaactgagtgttctgcaacacagctgctggctcataaagcaggcccctgtgtaagttgagcatatagactgggtgaatgtttattttaggttttatatatacacatacattttttttcctctgtaaagggtattgagcatatgcaaaaattcatttcatgtagctaatatggaattgacagaatttgaaatagttttgacaaataatttcagaattaatattatcctagtttaaaacataacactttatatttgaatatcattcctgtcattttatgtacataatgtagatgtaaaaactaatggcatgaaaaactttataaacagatgcattacttgttttggctaattacaattttagaaatgtctgggttagagttagataccagaatgtaagacctttattttattttattttttaggtaaaatcttaaattaagtaaaaaacaaacaaaaaccctttgtttatcaattgtaatgtaacagtattaccatataaaataaaattttgtccaggcccagtaaatcccagcactttggaaggttgagacaggagtatcccttgagcccaggagtttcagacccagcctgagcaacatagagagaccccatctcaacaacaataacaacaaaaatgagctgggcctggtggcctgcgcttgtagtccccgctacttgggaagctgaggcgggaggattgcttgagcccaggaggtggaggctacagtgagccatgattgtgccattacactccaacctgggtggcagagcaagactataaaataaataataaaataaaatagaatcttcaattacatgcatatcagggattcttactgtgcaaagcttttctctagatatttaattttttttttcagtttatgtgaagaaccagctcagtgggactctacagattaaaccaggggttttcaatgaatacagaaccatatggttcaaatcctacaggacgatcttttcctgtttgaacagaataaagagtttcaggtgggtttattattactgtggcaaatattcacgtaattatatgtaataggtttttagtattatctttaataaacccagtcagtatgtaatagtccatgtgtcttgattaaagtagcttgtgtttatttaagtagtctcaactaatttattttctaacaatttttaaatttggggagtttcaaacccacagaaacggtaatagaataatacagtatatagacaataaacaaccttcattcagattcagagatagcttttgttttcaatataaggctattacttagagaagaatttttatttcctcataatgtccttatgacaagacacaaacaatgcagtgcttaaaatcataaatattacttataatacctaatacaatattttaaaatttttagaaatcataagtgatttgggtgctgcataaatatgataaggtggctaaggtagcaaaattgattgaaggtaatatctttctgtatttgtattttataagccaacttttaaccttgtgaaaatattgcacagc

SEQ ID NO: 122054 - DNA, 1025 bp, Homo sapiens
gtgatcccagaatccgagatggggactgtactccagcctgggcaacagaacagactctgctaaaaaaaaaaaaaaaaaaaaaagtcggctgcagacggcgaaagtgatctcggaacctttatgttggggatcttttttcgggagggaccggaaaagaggtgggatcgtttgtcgcgatgtggagtggccgtaagctgggctcctccgggggttggtttttaagagtgctggggcctggaggctgtaatacaaaagctgcgcgtcccttaatttcctcggcgggtgagtgtgtgtgcggaggtccttcgcatgcagtcaattgcgagcgctggcgtctctgcgcatgcgccgggggtggggcggtgggttgtctctggacctcgcgaggggtcagcgcgaaacctaaggcttggtcctggccccatctctctccattgtaaacctcgcatagtcccgttggcggacgccggggaaaagagctcaggaccagtggtcctgtctggaaaagcgcaggccgcgggtctcttgtggctgagctccttgccccaggagccggcgacccgctctgcgtgtgctgcagtctgaaggtcatgcatctttcctttgccggggcaggaataactcacgcctcgtagttatgcatagctttgtatctgtgttttgtttgcacaaagcttgctgtttttttcagaaagaatttaaggcagctgtattactttttgattaataggttaatccaacagactgcatttgcaaatgagatcaagaaaataatgcactgctcagtgcttgtagacagcagtctgattttcgaactctcagtattaagtagaaacttaagctcatctttcacatggaactcttaacaaatactgtatgccagacactggtatgagcactgggaatttaaaaatgaatgacaccgcaaggatctctttaaaaatgttaggataaacctaagatcaggatataatgaacaaaaaaatggggaatctaaccgcccattaataaaggttattagttgg

SEQ ID NO: 122055 - DNA, 2372 bp, Homo sapiens
tcctacttgcctcacacccacctctacatcttgatactgtattttgctacactgtccaggagggtaacgtaactaactacaagctatagagaacttgaaatgtggctaggcatgtgctgtgggtataaattacatgctagatttcaaaaactttacttgaaaaagagaacagaatttttttaaatttattatgtgttgaaatgataatatttttggtatattgggttattttacctgtttctttttacttttttaatgtggttactaaaaaattttgaattacttacatggcttgcatcgtaattctattgaaaatggtgttctattgttacagtctggtagcttgacatttggtagtatgagaattttacatgaacattttcttagtgtttttgtctttttctgtttcagaagaaaagcagcaaacagaaagggttacaaaagagatgaatgaatttatccataaagagcaaaatagtttatcactactagaagcaagagaagcagacggtgatgtggttaatgaaaagaagagaactccaaatgaaaccacatcagttttagaaccaaaaaaagagcataaagaaaaagaaaaacaaggaaggagtaggtcgggaagttctagtagtggtagttccagtagcaatagcagaactagtagtactagtagtactgtctctagctcttcatacagttctagctcaggtagtagtcgtacttcttctcggtcttcttctcctaaaaggaaaaagagacacagtaggagtagatctccaacaatcaaagctagacgtagcaggagtagaagctattctcgcagaattaaaatagagagcaatagggctagggtaaagattagagatagaaggagatctaatagaaatagcattgaaagagaaagacgacgaaatcggagtccttcccgagagagacgtagaagtagaagtcgctcaagggatagacgaaccaatcgtgccagtcgcagtaggagtcgagataggcgtaaaattgatgatcaacgtggaaatcttagtgggaacagtcataagcataaaggtgaggctaaagaacaagagaggaaaaaggagaggagtcgaagtatagataaagataggaaaaagaaagacaaagaaagggaacgtgaacaggataaaagaaaagagaaacaaaaaagggaagaaaaagattttaagttcagtagtcaggatgatagattaaaaaggaaacgagaaagtgaaagaacattttctaggagtggttctatatctgttaaaatcataagacatgattctagacaggatagtaagaaaagtactaccaaagatagtaaaaaacattcaggctctgattctagtggaaggagcagttctgagtctccaggaagtagcaaagaaaagaaggctaagaagcctaaacatagtcgatcgcgatccgtggagaaatctcaaaggtctggtaagaaggcaagccgcaaacacaagtctaagtcccgatcaaggtagtatactttttaaagtattttgtctgatttttaaaaaaaattgactgaatttattcaaagttgaaagtgtcctttctctctctctttaataaactcagtttggtacttgataaataatcatagtcttaaatgttagaaatcctatataatattatttatttaaaattgcagatttttaatttaaaatacatttttatttttaaattttgtcttttcccttttttttcagatcaacaacccctccccgtcgtaaacgctgaggaatgatgtggcaagaatgccatgatgttctttaaaaaaattccatgagttttaagggcttgtctcattatagaggcacattgtggctgtgtaggtgaaaccagaatcttttttttttttaatctgtaaataggtgtactttttccaatgctgctccaagttacttaataggatttctttgtattacgtttttttcaaaaaatatagtgcataataagactataaacatgccattctctttcagctgtaatgttcttaaaattattcttgaatgtactgtgatgtcaataaagctctttagttcatttttgttaaactcttgcaccttaattttatggttttaatctaaggaacgtacttttataaaaaggcagctggaattttgtataacaggttttaaaggtaccttctctcacctcccccaaagaaaatggtttttacttaatagtttgtcaaagtttgtaaattgtacccatggacttttgccagattccaactttaagggtatgaaagagggctagaaatagacctttacttttcatttggaagtatttgacaactttctaaacttttcttcctattttggggattttcaagtaatatattctct

SEQ ID NO: 122056 - DNA, 3143 bp, Homo sapiens
cagcctggaattttgttgaagttttgatgttacagaaaaatgttcaagatactttattccttgaaatggctgctctgatgtctaaaaatattttataaaatggttttgtggctgggcacggtggctcacgcctgtaatcccagtgctttgggaggccaaggcaggcagatcacttgagatcaggagtttaagacaagcctggccaacatggtgaaaccccatctctactgaaaatacaaaaattagctgggtgtggtggtgcacgcctgtagttccagccacttgggagactgaggcaagagaatcacttgaacccaggaggtaggggttgcagtgagccaatatcacgccagtatgatccagcctgggcaacagagtgagactgtctgaaaaaaaaaatggctttgcattttaatatttttgaagatgtcacactattagtagctataataattagaaatactgtataaaatgctcttttttagatgttgctgacaaaaatgcttctaacagaaattctgctggatgtcacagatgaagaaatttattacgtagccaaagatgcacaccgcaaagcaacgaaaggtatattttggtgtttctggttttgcttttcctggggtattttggttctgatgactattttggcctttttttgttgtccttgttggatttctaccagatatttgaatattctcttgcatgttttaactcttaaagattagattcgtagacaccatattaaagctatacaaatatttttgttttatctgacctacatgagtacaaattagcaatcatgctgttttcctctaaaatgtattgtggaaaattccaggtgttcagtttatttcacctgattttttttaatagataacatggcattgttgtgtgacttctgatacagtttattttgactaatgaattttgaattatctacctacaatttttagtttaccacttatctcttacagaagcaagtgatttcctacccctagatttttagtaacaccttaaaaatgtattgaaaacaaaaattaagttacatgtcataatctcagaagtagacatacagatatacctgtcaacattttttctcattataaaccaatttcagctcacatcagagttataatttcaaagccagacatgatactggtttaaaatgaatgttatgtttttaatgtttcttctctccccaaaaagcagcaatagtagtagatttaacaataccatagactcatgactatgaaatcgtggctatttgtgttaacatgttgttcctgttgttgatgtgatacaaagctcctgcaaaacagctggcacagtccagtgcactggcttccctcactggactcggtaagtgttttccatatttgtgagagggcctaaagggaaaaatcacacatacattgtctctctgcgtgttctattttgaaactgtattagtcctactcagtttataaaaacctaggtcttagggttatgtcatcctgtctaaaaaggtttgcctatttttttgactaacgcattcacagtgagaaatttataaatgtgatggttaattcatagtttattggggcaggttatattggaagatttccttattgctccaatatatgcattttatatatatataattatatatgaacacctatagtttgtacttaataattcataatttagccatgatagtatctaagctcactttcagaattattgcatacatgccttagggaagaacctatccactaatgcttttaataacttacatagattgtgttgcggcaagtcaagttttaatatagaggaaagggtttatcttatcatagtaaaatagtagtgatgtgttcataatttactatttgcatggtatattatcaaggctgtaaaagcttgaatttgccttttccacatcttcatttcaaattaatttttgtgaggacccagagaagtgggtagaaccaaatgcccatgtggttttgttatggttatttagatcatttcagggtggggagtattttcagcaccataatatttctgtaccagggagattatagtattctaatttttttagggaaaaattgcttagctctagggatttctaaactttgaacaataaaagttaattttagaaatactttcagggtcatcattaagctttagcgtggctttgttactgccctgttaagtagttttgttggttagtatggacagtacagcaaacccattatcattcctttacagtgagaaaaatatgaaatagtccagaaagaataagatattaagtaacctttgcctgaaggttctgtgaactccttaagcgtttgaatgtatacttctccccaccccgaataagcgtattcttctgggaaaaggcaatgaaaaaagaaatgaactttcttctcagaccttgaaaagtttttagtgcatagtataatttttttcatatgatagactgagctttatgcacacaggtggactgggtggttatggatcaggagacagtgaagatgagaggagtgacagaggatctgagtcatctgacactgatgatgaagaattacggcatcgaatccggcaaaaacaggaagctttttggagaaaagaaaaagaacagcagctattacatgataaacagatggaaggtgtagtataccttttagacttaattttggtccagttttgtatttctttttattttttaactaacctaaaaatatcaaaggataaaataaaggctatattataaataatatgtgatataactgaaactaaagtcacaatttttgtttggttgttttaggagccatttattgcagtggctataagccaagctatttagggtatttttatttcttgctaaaagtcttgaaatgaaaaagatgacttttgaaatgggaaaaatatatttgtaagactattgaaaagtaatttgtagctaggatatataaggataatagagaacctagaagttttttacttaagatactttacctaatactaggaataacaaaagagaaaatttacttagaatttcttctttgaaaaatctaaggtaattaagagttagcagctaagacttctctataaaccacttacttacctttaaaattttgctttagttggacaaaagggaagtc

SEQ ID NO: 122057 - DNA, 1110 bp, Homo sapiens
tactgagtttcagggccagctgagatcttggccctgaaaaatctgattagagatttttcattttaagtcgtgcaactttaggtaaatagcttaaatatatagctgtaaaagttatactgaataatatgtctatggtccatttatccaaagttctataagtgtctcatttcaggcccattatatgtaatagatagtaattaaatcagtctctgggcattatgtttttctgggtatttataaaataaggttaaaattgactaagggaaaagtaaaattgaaaaaacaatttattttcctaagccttcttgtaatcttacatttttcccaggttatactttttaaattatcaaatgaaatctgtagtaaatgtaatttagatagcagtttcactcatatttctgtttcatagactttttaatttggggtttaagattttctgtatgtaagataaggattttacattatacacatgaatttggactaccatactattgttttttataggatagtgatgaggaagaagaagacactgaaaatgttgaggctgcaagtagtgggaaagtcaccagaagtccatccccagttcctcaagaagagcacagtgaccctgagatgactgaagaggagaaagagtatcaaatggtagaatgttaaagttcttactatgtacatggatttatttcgtttgcaattttttttggagacaatattagaggaaaaaacagaaactagaactgctgaccagtattattaattgaagagatactccttttaacttaaaacaattatagaaacctttattaatagggacttttttaaatgttttgatttcaggctggggtaatcctagtacttcaggggaccaaggcaggaggattgcttgagtccaggagttcaagaccaacctgggcactgcagtgagaccttgtctctacaaaaaattagccgggcatagtgaggtgcacctgcagtcccagcaactcaggaagttgtggtgggaggattgtttgagcctgggaagcagaggttgcagtgagccgaggtggtgccactgcgttccatcctgggtgacagagtgagaccctgtctcggaaaaaaaagaaagaaaaa

SEQ ID NO: 122058 - DNA, 1111 bp, Homo sapiens
taacttactagcaaatcacttaattttttcgagtctcagtttcctcacctgtggaaaaaagtggagtaatagtagtgatctctgagggcttttgtaaggattaaattagatgatggtttaacatgctttcattgtgtcctggcagattgtaagcactagagcagtggtccctgctgttactaaaagtgatggcattgaagaaaggcatgatatttaatgggatattttttaaatttactcacaagtttgtagaaatattttacttaactgacttgcgtatatttttcccacgtgaaacagacgcagtaaaacgcaggactcttcccgcttggattcgcgaaggtcttgaaaaaatggaacgtgaaaagcagaagaaattggagaaagaaagaatggaacaacaacgttcacaattgtccaaaaaagaaaaaaaggccacagaagatgctgaaggaggggatggccctcgtttacctcagagaagtaaatttgtaagtagaatccccaacatgaaactccatgtgaaaatcttggttgtgtgaaaactttactgaaatagatattttagcctataggaaagtattagagtgatgttcctaagattacgttcattaagtatattgaggattctgattttatatatgtgttactgaagatacagtaaggagaaaatgggacaacaagtttataaacacttcattccagagagctggctagatcttgataaacaatctgtattcattcattgtggtacagatgactccctggtgatagattataaaacaaagctacattaaaatagtaatagagaaataaaatctccctcttttgaacatttaaacatatacctgaggatgtaataattttgattgtttttgacgtgagcactggaagtataacaacattttaagtcttcaaatcttcctcagttagatggcttgagtggtttaggaacttttttattcagcaggtatgatagccacagcactggccagtatgcaactcaggaaatttgtctgtcttgcacggccattttctgctttagaaataagtctcaagaagagcaaaataactagattttggcaggtattagttttgcttcaattccata

SEQ ID NO: 122059 - DNA, 1999 bp, Homo sapiens
catttgaaaatgttttagttcctaagtttaagttcttaaatgactcccgcgggcatccctaccccttagttttactctactttgtgaccctgggcaagtgatttacctctgtgtgcctcgattttccctcccgaaattggcaaaaataatacctaatttctccctacctcacagggatgttgtgaggataaatgtgttcgtgtaagaaagaaattatataaaacctcaaggtattatttttgtggtgttgttactaaacaaatataaaaattcaacaaaaatagtgctttggattttgttacatttgttaaaaataactttgggcatttggttaggatatgaattagagtggagttagctcattttgaattatatatgacagtttagttcattgcttatttttaagataaacaaaaggaatttgaccaagaagtcataagttgttttttaaatctgtatgtttactgaaaaatctttcttgagatcttaaaattctgtgttgattttgttataaccgcctgttgaatgtttttatgcctaaatcttaaatagaatggggaatgcatcagcaacccccacacccccctccagatcagccatggatgccaccaacaccaggcccaatggacattgttcctccttctgaagacagcaacagtcaggacagtggggaatttgcccctgacaacaggcatatatttaaccagaacaatcacaactttggtggaccacccgataattttgcagtggggccagtgaaccagtttgactatcaggtgaaagatattttgttgctttaatattgtagatgtgcacgtaatccattctttggaagtgtctcatcaagaatacctaagatacgtgtttcacttttcagacttgtataaataagcacattctgtctcagttatcaatttttgagtattaaaataattagaatttgttttctgatttttttatttcattaggaaaatggtataaaagatcattacggaaaacttttgaaaaaattaaaaatgtataagtgcaatagctatatgatgttttattttctaatttatatttcaaaatggtatatttaaatgttaaagactagagaatgcacagtaattgaatatagctcatggttaagacatgaataaaaaatatagatcattttcctaagtgtaattccttgtgctatgtagaattatgactgtttttctagtgtcattttttttccattctgacatgacatgttaatggaattgtatataatttcctctgtagcatccaattcattcctagggacatagaactctgtggggaatagtgttgtatgttgggctttatttacttcattccctctgccagggtctacccttaaattatagtgctaggtgtcattttgaaataactgattgcaattattaacttataaactgctatcataatttaaaattttgaaagaattatttcatgaattctagggtagatttgataatggacatctagtattcaccttgagatggtaatcctctcattaataaatattcagatacttgtatacttggtatacagatacaacagtttttatgttgtttgaagaaatataatggcagggagcatctgcttaccctacttttgcatggtagatcccatgtaaacaagacaaagagctgtattggcagctggcctagaaaagcctctgaaaatagcaaaattgcagaaaatatttaatgattcattaacttctatctttgcttataaatgaatatatctgcaagattatagaaacagcttaagttgtttagttcactttttgttcactgtaagtaggatgttgaaattgacaaaaatgtctagttaaagagaaattagtatctatttgatgtcttagtgttggtaggattagcttgtaaatggattcagaatgaaaaatttcatatacttcttgaaagtagcttatcagctggcttttagaagcctctttgcatttacatagccggaaaatcttaag

SEQ ID NO: 122060 - DNA, 1666 bp, Homo sapiens
attttgagtaaagactggctaagaagttgtagccagactacactagtcatgttttggctagagaagggagccttatttaaagaagggcaaccataaggaaaaacagagttaggtagctgctctcatcaaaggcctataggctcgaatgcaggcctggaaagataaataggacatgttgaaggaagaaatgatagcgtttgattatttttgtggtgattttttttttgtaaaggtgatgacatttaaaaattcagtaaactaagatgcaggggataaattttatatgaattaatattagaaatgggttaagagtgttttttgtggagttctttcctgaaagtgtaagtagtttatattattttttagcctgaatatgggttatttgctaagtaccctttcagacacagtatgctttaatatttaagatctcattcaaaaaaaatttttctaatttccctcataccctctctgtctgaaatatttaagatctaaggaatagttgagctgcttattttacatagaggcactattcttttaactcctacattctgaatgctgaagtcagtgttaatttacgttaggccagattgattgggctgcattggcccaagcttggattgcccaaagagaagcttcaggacagcaaagcatggtagaacaaccaccaggaatgatgccaaatggacaagatatgtctacaatggaatctggtccaaacaatcatgggaatttccaaggggattcaaacttcaacagaatgtggcaaccaggtttgttgtttatgttttcacaattttaagacttttaaaaaacagaatgaagattattattaaattttttaatttgcttagttgtatgacttctggaaattaatgcttcttaaagaataggcagttttcaatttgatttgactttgacattttgtggttaaaattattctgtactcattctgctagctttgtggcactcagtttgattcttttcttggttcttcattcctaggctgacaggggctgggaacactctggaaacctcacttggcatctagggaagagagcattctttgtctctctattgcaacctctggccttttcagaagcagcactggcagagtaaaacatgtctagcctctaattaaagaaaaattgtgtcactgtgtgacaaattagtctgtcaaatatactctgcccctaccatccgcctacctttttcttccctttttttttttcagatagtgaagatctttcataagtttttgtgtgttttacttttttgtttgttttatttcacagtatgatgtagatttcttgatgctaattcagtcttccatggcttgtgttattcctttttaatagtcacttgaaactatggaggaatcagcctctcatttgggtatgctgatggtgaagtcataacctcctttccctattaatactttttgtttctccttataagaatggagacctcagtcgagaccagcctgggcaacatagcaaggccctgtctctacaaaaaaaaaaaaaaaaaaaaccttaaaacttagtcaggcatagaggcgcatgcctgtagtcccagctacttgggaggctgaggtgggaggattgcttgagcctaggggattgagactgcaatgagctgtgatcacgccactgcactccagcctggg

SEQ ID NO: 122061 - DNA, 1099 bp, Homo sapiens
gtaaggtttcctgaattaatattttattacttttggcaatatgatagttttctaattctgttctacattcttcatttttttagctgtaattatttataaggaaaaatttttcttcatctgctgaagctatttggttactatcttaaaggaatcttgattggggagaaatgaaatcacttttttcctacaatcttcaaaataattacatatccagaaatttatattgtacaaaaaatagagttttttttaaagtcttttttgagctaaattcattgtgttatgcttgccaccaaattctgagaccagcattaacataaaattttctacctcgtttggtaccctaaaaattctagttgcctctggcaagctattgacaagaattttagacctctgatgaaataaatgtatcatcatataataatttctgatgtgaggttttaagattaaataactcactataatttttaaactatgtttaatttattgaagatagaaaatcaagtatattttaaaagaagggatgtgggatcaaggaggacagccttggcagcagtggcccttgaaccagcaacaatggatgcagtcattccagcaccaacaggatccaagtaaggaaacaaattgaatttgaaagggcggggttggatatgtggaaatgggtagaagacacatgatgggattaagggatatggaattgagattggtgtactggatcattttatggtcagaatttaatcttctcataaatagccttgccatagcatatatagcaggaaatggacttccctttggaagactctcaaaatgtagaaagctttttgaagattttacattttttaaactgatttagtccttgtttttctaaagaaagagaaaagcctaaaatatgttgcttatggagaacacttctgtgaattctgactcttaaagttgtatattatattgaactggatggtgtgctatatcattttaaaatttctttttgctgtggactatttcaggcacacatacaaaggtagaagagtatagggagcccttgtttattatttagctttaacaattgttaactagtggccaattttgtttcatccgtaagacc

SEQ ID NO: 122062 - DNA, 1052 bp, Homo sapiens
gcttccagcgcactaagtaacttgaactgcgctaagcaactggccagaattggtttggtttggtttgaccctggggttcctccgtagtctgtaagtggagttgcgaactcaaccccttctccaaggcgggagtgtttctaggagggaacatacttccccttaaaggaagatcacgttgctaaagtaaaaaatttgaaggcgccctatgtgtagaacacttacgttcttggctttctggccactataaagatgggtcgggaatggcgccagctacgttaaaaagtaacgtgcaggaatggttcagttgcccggtgttgaccagagtagagatggttttgcccacaaaaaaaatggcgccgaaacatgtcaatccgcacaatcacgtgttcacaaacctggatgagagatggtatggcttcagatgacaaacggatgttattattctttacttccgggtgagacaaatcgggcgccatcttgtcttgttcccgaagaagtagaagcatcgaaagcgttggagaggtgttaccggaacggcggcgacaagggtgttcccgaactagagtgggtaagtgatggagaacaattatacgtgggcacttgccggaccattacaacgttcttggtttctgtggcgaaggtagcataacttaaaataggctgcgtacgctgcttggcgcgaccgctggaacctcattcctttaaagcgctgcggtccgccagacttggtaaatcagagcgctgctttcgctgaaaaggaaatgtccttgttaaagagagtgctcacggtcccatcttctcacagagtttcctctcggacgagaagggactaattgttgggttcctgaccggccgttaaacactgcgcgtgcgcagtgggaacccccttgtgggaagggggttcatgggggcggaggaggcgggggctcgcgacctggagcttataccctttgaggctctgactacgcaggcgcagttccttagtttgtgtttttcgtgtgttcttacccaatgatggatattatgtgttaagcttcgctaaaggtagtatc

SEQ ID NO: 122063 - DNA, 1018 bp, Homo sapiens
taccccagcttcccgtttttttccaaatataaaatgataaaatattgattatgtgccaatattgtcatttaatgttcttaaaacttgtgaagaccacctttttaggtagctgagaagagtgatagttggtatcaatttgttagccaggcatggtggctcatgctgttgggaggctgagtggggaagatgcttgagcccaggaggtcaaggtgcagtgaaccatgatcacaccactgcattcctgcagagtgacggagtgagaccctgtctcaaaaataaataaaaagaagacagttggtatcaattcaaagaatagttgatgcctgttctcttattttaaatgtaccaacagagctattttactgtatttaatagttcttagcttccatgtgtgatgattttaatcagtgattttatgcaatagctgaagaaaattttctgaagattaagctgtgaaatgtatcaaccctcatctaatttttgtagtacaaaatgacatcctgattccttttaaaaattcacgtttgtaatttatttttctgcatgtattgatcaaataagcctaaaccaaatatgtgcaataaaattgagcctttagatagtatctagtgcattgttaaaaaagattatttctagatatttatgatgtttttgtttacgtagaaatcatgaattcaaatgtttaaaagatgaccatattttcaattttgagtaatacatattattcctactgttttttttcttttgccatgtttctagaaaacagctgtgtaacttattgagcgttattttggtgttactgtataaaacatgcataataaatattcttatttatctcatgttacaagattggtcctggaattttcacagtttacgttattgacagaatgttttatcaacaatgcatttgcttatgtcttagtccactcaggctgctataataaaataccatcaactatgtggtgtattaacaaaaatttatttctcacagttctgggagctgggaacttcaagatca

SEQ ID NO: 122064 - DNA, 2400 bp, Homo sapiens
gcgctgggccagacagcattattaattatacctataatattaatgctttgaaagaatttgttctaatgagtacacatggacacagggaggggaacatcacacactgggcctgtcgggggaggggggctaggggagggatagcattaggagaaatacgtaatgtagatgacaggttgatgggtgcagcaaaccaccatggcacatgtatacctatgtaacaaaccacattctacacagatattccagaacttaaaaatataatttaaaaaaaaaaaagttctttttggaaaatgcttaacccaagaaaaaacaggcttctcaggtaaaatttggcattagatagagtttgtaatgaatatgttattgtttgtaatttagagtaagaacctaaagcatacttactttaaaattgtacttctttttgttttgctaggtttgaaagcggctgataatgaatcagcaggccagtgggtccatgttagtgacacttacttacaggtggttccagaatcaagagcacttagtgcacaagcctaccttcttttctatgaaagagtattataactattaatggtaatgattatttaggtcatttgtttttgaatgccacagtgataactataatatataatgtgcctttctagtcttccctcttctgtaggaatagcatgttcctcaaatggtcctgaactttttcaccattttggtgaacccttttaaagtaaatttactcaatgctttaaaattcatagtcttaaaataaatgtgaattttgtttccaggtatttattctggggtacaaaaacttcccagaatttacagtaggaaaggaaacccctttatgatgtggcttattattacaagcattcagaaatgatgctggctaagtcaaatcattccttgagacagtgattcctaaatgtaatgccaccttcctgaactctcacatattctatatcatggttattttaaaaaatatatttttagccttttgtaaccttagtcttgttttgagcaatcatattccgtgttttatgtgcttttatatttttataataaatattaaagtaaaactattaaaaattgtttatccacgtaccacttaacttaaaatcatctcagggccatctagtggtatatatgtgtactaccatttaggaaactgctataacacataatttcatgaagtaacacctaatacggtgtagttccctggtcatattttatacaattcaaccatataaaagggtgtcactgtaatttcagtagtgtgggtttacaaataatctgctggttagcttattaccttgaggttttgaaaaactagaattatattgaggcatttcataaacatatctcttgcaccctcttcatggtggagttaaggataacttgcaggtggttggccaaggcccaatatagatgattataacatttagaattggcaattagaagttgataatccatataggaccataggatagctttgaaatataaattaccaaattatatttgtaaatgatagagaattatattcttaacagaaaaatatatactttttctacttcttgtaaatactaaacacagttttggggttttgaaatcactttgtcttcagcaagcatcattaataagttcaggtgaatttagcttttaatggggcattaagctggcatttttgattttctttttaaataatagcaaaaatatcatttttcccctctagaatacaaattattgagctgtcaaaacttggcatgaagaatatactattacttaggcttaaatatcaaaagataatggctacttcagtgtcatattgttgaaatagaaacaaaactgcatggttcaagcatcctaatcattagtgccaatgaatgatagtgcaggcaagtgccaggtaaatgcctagtcccacttcattctcctcctgggaagaaaggataagaatagtggctgcagataaggtatggaaatatttaatcaagactgtcttaaacacataagcatatataatgttatcaaggttaccagtgctgccttttgatatatggatgaacataactgtaattaaagacggtaatagtatacaaaatgcagagcttaaaaatgtcattgcataaattctatttttaagatgttgaaatgttagtagtgtttttcttgatttttaacagtgaaataatcaagaaatatatctttaagttaatctgcaaagtcaggctgtgttctgtaaaaggtatttcacagcattttctgtttaactgtaatctgttatcatggagatctcagtaccagagcagtgaattttttgaaaaatattgactgtctttattcaagtcagccatcttggtaagagcagttttcatccccccactgcccaaatgtaaatatagatca

SEQ ID NO: 122065 - DNA, 1453 bp, Homo sapiens
tgtttgttttaatgaatgaatataattgaattttagaactgaaaaggacctaatctcatccttttatatatggaatcaagttgacaaccagtcactgagttaggcctagaacaccaatctgtttactctttagttgaatatattttcatgatagcatatgtgtcagtagcttagcttttatattgaatttatttttccataagtgttgaaaagccataatgaaagtaactattccccctattgtttgtggtaaaaatccccatgtaaatgaataatctttgcagtaacaatttatgaaacctaatttttaatttattcatattaattttagactatacattagtcacattttttatctatgaaaaaactaagtcctacaatttctcttttggttttagttaacaaagacaatgctttatttctaattgttgcatttcaaaaatgttttggtctttttaaggctggcttgagtcttcgtaaagtaaacagacatgtagattttccacttatgctcgatttagcaccattctgctctgctacttgtaaggtacagtatattaagatatttaattgatttataaattaatatgcttgaaagtatcctatatattattagacaatgctttttctaaaaaaataacttctcttctgaaagggaattttaatagccagtgattaagtcagtaatatgtggaacacttaatacattgaatatgatttttgtcctttgggagacaaaggaaaattgaaaaggtaaggcatgaggcatgatggttatgaaggtctaagctgtttgtaagtgctactggaagctgatggttgctgagagaaggaggttttgtgtcctcgattgttccttgtgaactgtttaatcagtagtagttttaccatttgcggagttctgtatcttttgcaaatcagtgtagaagtgaattgtctttcgtgccacttcatgtgtactactgagagtggtgtacttgtcagcggagtgtgatacttcaaaactgctgctactttaataattaggtacagaaagcagactggcttatcattgcttattttacatgtaagaattgtgtagatgaagtagatgacttggtcttccttgaaggaagcagttatggggtaacatactgtcctgttcatgattactggctagaagtctagattttgtagtatgtaatagaatgcttattgaacttaatactttcagcacattgataatcaaaacaaaatcatcttaaatgcaatttttggttgaattacagtgtatctgctgtggaataccagcactatctgtcaattgttaatactcagtattcctagaatttaataatgtggtaaataataatgaaatttaacaatctttgtgttaaacttatgaaaacatatttttaaaaagtacctattacggagaatttccaataaacacaaaagcaaatagaacagtacc

SEQ ID NO: 122066 - DNA, 1676 bp, Homo sapiens
agccaaggtgggaggattgcttgaggtcaggagttcaagaccagcctaagcaacatggcgagactttatctctacaaaaaattaaaaaattagccaggtatggtggtacatacttgtagtagtaactacatgggaggctgaggtgggaggatcacttgagtccgagagtttgaggctgcggtgagctgtgattgtgccactgcactctagcctgggcaacagagcaagatgctgtctctaaaagagatttttcttttaaagaaaaaagtctccctcatagccctgttctacaaaagtcctatttccttccccacaaatagcctctgttacactgttgttagtttcttgtgtgaagatttacttttaaaatagaactattttttagtatatcttctagtgatcttagtttcagtaggcttaggaaatggatctgagagaaatggtatttaataactatgatatgtttaagaattattggcatttattttcaatgaggttacaagactcttttctttgaaaacactgtcaacttacagagtcaactaattcatgaccgaaaatgtattagaaaattgtcatctggagaaactgtcacataccagaaaaatgaaaaccttgaaatgaatggggattctttaatgtttgccagcctcatgaattctgagtcacgtctgaatgaaagccctactgatgacagtgaaaaagaagccagccattctgaaagcaatgttgatgctgacagtgagccttcagaatctgaaagtgcttcaaagcagactgggctgttcagatccagtagtggatccggtgtgcagccagatggacccctttaccctctgtcagcaggtaaactgctgtacaccaaggagactgacagtggtgataaggaaatggcagaagctatttctgaacttcgtttgagcagcactgtaactggagatcaagattttgacagagaaaatcagccactaaatatttcaaataatttatgttttttagaggggaagcatttgaggtcttatagtccccaaaatgcttttcagaccctttctcagagctatataactacttctaaagaatgttcaattcagtcctgtctctaccagtttacatctatggaattactaatggggaataataagcttctatgtgagaattgtactaaaaacaaacagaagtaccaagaagaaaccagttttgcaggtaattatttttttaattacataattattgatctcctgatagtgtctagtgagttacaaatttcactgagaattttactgagaatcttgtccctatacttgtgttacttaggcagagattgtttcattcatatttgtacctgagcgcttacaatactgggcagaacagattttcaagtttttttatttaaataaagagcaggaagtatacaactctgccttgaaaatgcaaacccatataatcttatttgagggaactacctatctgaaatctatccagaagaaatatccctacaacttttttttttttttttggagatggagtctcactctgttgcccaggctggagtacagtggcgcgatctcggctcactgcaacctccacctcctgagttcaagcgattattctgcctcagcctcctgagtagctgagattacaggcgcccaccaccatgcccagctaatttttgtatt

SEQ ID NO: 122067 - DNA, 1002 bp, Homo sapiens
cctactggagggtgcacagggtgggaggagggagaggatcagaaaaaataatattggatactaggcttagtacctgggtgaagaaataatctgtataacaaacccctgtgacacaagtttacctttataacaaacctgcacatgtaccctgaacctaaaataaaagttgaaaaaataaatctcattgctgttcaaaacaaaaacaagtctgtgacttatatgcatctggttaatttttgtgtgtccttctcacctccccacacttgtactctattttctagctagacttccctaatttcttgttctttgtcttacctgtgggcctttgaactgtctcttctgccacgaacagtcccattctcctcctgtagcctctgctcaatttctgcatatttctctgatccactcaattctggattagttcttttcctctggctttctatagcactgtatttctcctatcataacataagttgtacctaacatttgagttcttaattatgttatgatcactgttttcagttatttacaccaattatattgagccaagaggtggattaaataacatgcctaagatcatacaagtagtctggcagaaatggggattcagacaggttaaacaaggaccatgttcttaaccacgtatactgccccctgctgacttgaacttatgtctcaccatacttttattgggatggattgcaggatctgcaaacaggaactgagtctgtccttcttgccactatgtctcaggtgcctagttcagtgcttgtacatggatggtgtttagggagaccactgagctcattctcatgattgctgccaatcgtaatagctgatactggctgggtgcggtggctcacgcctgtaatcccagcactttgggaggccgaggcaggcagatcccaaggtccggagatggagaccatcctggctaacacagtgaaaccttatctctactaaaaatgcaaaaaattagccggtcatggtggcacacgcctg

SEQ ID NO: 122068 - DNA, 2283 bp, Homo sapiens
gaggcagttttagcctatcttaatatactgaaattcattagctatctgtttgaagtgagagaaaaacttctgtgaagagagtaactgtgctacgttgcagtgccctaaaatgtaattccaggctgggtgcagtggctcatgcctataatcccagtactttgggaggccaaggccggcggatcacttgaggtcaggaattcaagactagcctggccaacatggtgaaaccccatctctactaaaaaaatacaaaacaattagccaggcatggtggtgggtgcctatagtcccaatgactcgggaggctgaggcaggagaatcacttgaacccagcaggcagggttgcagtgagccgagatcgcactactgcactatagcctgggtgacagagcgagactcagtttcaaaaaaaaaaaactaattccaatagaaataacttaatgtattaacataatttagggtggttatatcacctttgatttaaagtttatatgacgtattaaagatttttgtgtagacttcactcactttgaacttaataatttttattttgaatgccatctttaacaacttaaagcatgtatgaattttttgtagattttcaattgcttggcaaggaatatttctgtaagtgtatgacttagagtatgataggtttaaatttctgttagattttaatagtaaaaggagcctttattcattttcctgtcccagattatgagtatttttctgtgttctctagccttaaagaagcaggattataaaatatatctcattctagcctgtcacattgaaacacagaatgcatgaccatgattatttaagtttctagactattcaacacagaagttgttttctctctcacaagatagagagtatcttttaaaacaaaattatcttaaagaatctataaaacacagccaagctctctgctttttttcatggctttttcttaacatttcatagtttacttatgttacagccctaagctaaccaaaaatgtctagtctctttagttaatctgttttattaaacagtttttttaagttattttaaatattacaggccagtcatattgacagtaatataaaattcaattggatcaccattcactgatgtttgagaatatcttgttttgattaacaatgtgctgcaatacccaattaaattgctatttttttcaggaacagtttttaacgtaaaattttaggttgcccgggaagtttgatttctttgtactttacaaaactgtatgtttatattagaattctaactgaagttttcaatgtgttttccttttaagatctccacggtgaaagatccattcattgatatttcacttcctataatagaagaaagggtaaggagaagaaaactaatgatgaagctttggtgaagaacatttaatcatttatttaaacatttgttgagtatattaccagatatctgagagtcattattttttatatataattgagtttgtattcataattgagtctgatttgggggtttgtgtaagtatgcataaagtatgatggtttttattctcaaggaatttaaactcttaaacactttttattttgataatttgttaattttttgtatttcaagtcagtcaaaaattttaagatgaggacatccagaatttatttactaaagaggttttggtttctgtatgtggcatttacataggtttcaaaacctttactttggggaagaatgaataaatatagaagtttacgggagacagatcatgatcgatacagtggcaatgttactatagaaaatattcatcaacctagagctgccaagaagcattcttcatctaaagataaggtaagaccataagcatctgttagacgtctgttttttaacagtttattaacaaaagtttcaagcacatctaaaagtagagaacatagtgtaataaactctcatgtacccattttttggcttcataattatcaacttggctacttgtatactaactatatatatcccacatcctccccttcctcccatcccagactatttttggataatcccagattatttttgaaataaatcccaaatatatcatatacttcaatgtgtatctctacaagagagtttttgtttgtttgtttgttttttaagacggagttttgctcttgttgcctaggctggagtgcaatggtgcaatctcagctaactgcagcctccgcctcctgggttcaagcgattctcctgcctcagcctcctgagtagctgggattacaggcatgtgccaccacgcctggctaa

SEQ ID NO: 122069 - DNA, 1049 bp, Homo sapiens
aaatgtactccttagtaaaatttaagacttacacttttattttaagtaaaacacttaaatagctcttagaaatgttattctggccaagtgcggggcctcactcctataatcccagtgctttgggaggccaaggcgtgcagatcacttgaggtcaggagtttgagaccagcctggccaacttgatgaaaccccatctctactaaaaatacaaaaagttaggcatggtggcgcatgcctgtaatcccaactacttaggagactgaggcacgagaatcacttgtacctgggaggcggaggttgcagtggagctgagatcacaccactgcactccagcctgggagacagagcaagactctatctcaaaaaaaaaaaaaaattctattttctagttaaattatctgtttgatagcgtagttaatttttaatattttctcacagacttacatgtaaaagtcaacaaacagacccttggccacttgtgtgaagtggctatttaaccatgaaataaactctttttattgccactgccctgtgggtatgttctttctggcagtgctgtccatatttggtggctatgcatggagagccaggtggtgctgaaaagcatcacacagtgaagcgtggatatatcttggtttgacatttgtcgtcccttactgctgaagggagggggaaaatctgtttttccatatgtttatgctttattttgcctgcagttttgtccagatggtcttatgaacattgtttactttgggatgccatcccagatgttttgaaaactgttggataaatgtggcacacagatacatttgcatattatggtttttaaaatgttatgtgtctttgcaagattaaaatataatttatttctaggagtattttcccaagtgaataatgtgtctgtgtatatatgtattttttaatgttttttaaaacaggcccaataggcgtcgtgtatatatatttcataagtatataaaacatatatagttattatctataggttatttcttccagccattctgttttcatgttaataagctaaaaaa

SEQ ID NO: 122070 - DNA, 1051 bp, Homo sapiens
ttgacgagagctcgataggttcaggcaagtctagacagctgaaaagttgagttttgtggtgtagaagatggtgagaggtgagacttgaggtaagtaagaacagatatttaagggccttgtacagatagaatttgttctgagggcagtgaggaaccactgttaagttttaagcagagaagtggctgatcagtgattttgtagatctcagtttgacttgtatggagacagataggaatgcctatatatgtataactgcccatttattatgttaatatcaatttatcatatgactaagtaaagatttctaaggcataatggttaactggaagttagtcgattttgagagtaaactggcaagctaattattatttggttccaagctaggggaattgtggggcaccaagttgtctctttttactcactctttaaatattaaacttcttttcagctgtagaaatgggcagattacattaatactacatgactggtttaggtaattgcattaagcagttgagatgaaccccagctcaggttcccagaagaatgcttacagctgtgtagatttcacatctgatgttaggatttgcttatagaaacaaaactccctctacctcccccttccccatacatggaataaaaaggtcatatataatgcaagactgaaaatgggcaaataagcatttttgtgagtcccacccagaaataggtattgttaaaaagtagaccagaaaactggagacagtaaaaaaaaaatcagtggttgaaaggggttgaggggaagaaggggtgaataggcaaagcacagagaattttttagggcaataaaactactctgtatgatactataatgctggatccatgtcattctgcatctgtccaaatccatagaatgtacactgccaagagtgaaccctgatgtaaactaggaactttaggtgataatgatgtgtcagtgcaggttcatcagttacaataaatgaagcattctggtgggggatgttgataatggaggctatgcatgtgttggggtaggggggatatggaaaatccc

SEQ ID NO: 122071 - DNA, 1027 bp, Homo sapiens
gtagatggctttgagtcagggggtctggtgttcagatttgactctgtcactaggtgtgtgaccccaggcagtaatctgtttatgcaagcctcatttttccttagtactttatatttccaaggtgcttcagggaatagagattgataagacagtcactaaatctttaagaggctaaagatctgaaagaaggtgtaagattaaacagtaatgatatgcaagtagagtaagatttctgttttaggtaacaaccaaagtccttcaaatatccaaagagggatataatgttcagttgtaggaactaaaaaggaatcatggatgagccggctttcaagctgacccttaaaggatgaactttgggcaggtgaagatgagagaagaaatcatttcaggtggtgggaagcactaatataagccttaattgtgtttatggaaccgtgaatagcacctggagtggtggggcacgggcttttgaggtagtttgagagggagtggagctttcaaagtttgagagatacatagttgttagtttaaggcttttggcagttctagggcaagatgtcattatccctgtgggtcaagctacaggatctctcaggcaagtttgatttaaaataatattccttggcattctagaataagtttttggatataatagtttgccatattgtgccttgtatgcggcttccgtatatttttataaaatatttggaaaatcaaatatgaaagtttttattgaggtttgtaagaatgccggatatgattttgcactaaatggtaatcgtgaaacattgtgaaaacacctatttatgataaaaggaatatgaaactgtattattgtgtttgggtgagaggataagtatgattttaaaaggttatttttatatttttgtactaagtaaaaatagttattgagaagaaagcctgtgcctgtatgttaaacacattttgaagttatgcatgaccagaaattttctttctctttaaagcatgtcattaattcttttgtttctttattcctttactttta

SEQ ID NO: 122072 - DNA, 1975 bp, Homo sapiens
tatcacccaggaaattccaagggatttgggagctctgtgtcaggaagtggagtaaaaaatgaaattcattaaaacaaaagatgctcctagcaccccccccacccccatcactcaggaaattataagggttttaggagcttttgtatcaggaaccaggagcagagaccaaatgtgtatttattatgtcactgtgcaaaatacatacctagaatacatagtttattaaagcaaaaaaattaactatagttaactgactggaaccagggggaaattcttttaacctattctttccagctgttaatagtgatatcactttgaagttgcctaaattgtttattttttccaggtttgacgtcaataaagggaaactgccacaatttttatactgctatttctaaagatgtcacttataaggaacttaaaaacctgttgaattctaaaaatattatgttaattgatgttagagagatatgggaaattctggagtatcaaaaaatccctgagtctatcaatgtaccatgtaagtgacatgtgtcttaaattaatttattaaaaaacatataaataatttactatatctaaaatctaactgaaattcttaacattttctttcagtggatgaagtaggtgaagctctacagatgaatccaagagacttcaaagagaagtacaatgaagtaaaaccatccaaatctgacagctagtgttttcttatttagccggagtgagaagcaagaaggccctggacacagcaatatctctgggctttcacaggtgtgtagatgaatgaaaaaatggattgataaatgtataatccaatgtttcatatatattacatttttatatgtctatttaagaatttcttgtaattactgtcagtaaaggcaggatagcaaaactaagagcctcttttcatcttactcaatttagagataatagcggccaggcgtggtggctcacgcctgtaatcccagcactttgggaggccgaggcaggtggatcacgaggtcaggagatcaagaccaccctggccaacatggtgaaaccctgtcactactaaaaatacaaaaattagctgggcatggtggcacactcctgtagtcccagctacttggaaggctaaggcaggagaatcgcttgaacctgggaagcggaggttgcagtgagccgagatcgcaccactgcactccgatctggcaacagagtgagactccatctcaaaaaaaaaatgtttatagcactatttgatgtatgttttcagtgcttaacactatgccagaggatggaaagaatgggtaacctgtgaattttcagagaagaaacaaggaaattgaatttttggaatacaagttggctctttccttgtgtacatgcagcctaggatagtggaatgagcaaaatattaaaaatctagtcctggcaccactggttatggtaaggggatttttgtataagtcaattagttgttgaatcattttctcatctgtaaattgaaaatggcactctcccctgagataatgcatgttacttgccatggaaatataagggtcaggattctatgaattaatttttaagtagcttagtatcattcaatagtattctaaaataccaggttacttatactacctactcatgtatgacatttgtgttagtataccttctattcatcaaaggggctatgagctagacctgcagattaacacgcagatgtggccttaaaaaaaaatcagttaatctgggatccagagaagtaggtgaaatttgaacaatgaaaatacattaacagcttctaaagatttatagcagtattatgaccagcatggtagtgatgaaatttgcaatttaaaaaattaaaattgggccagttgtggtggctcatgcctataatcccagcactttgggaggccgaggagggtggatcatgaggtcaggagatcaagaccatcctggccaacatggtgaaaccaccccccgt

SEQ ID NO: 122073 - DNA, 1029 bp, Homo sapiens
ttgcagtgagccaagattgcattactgcactccagcctggtgacagtgtgagactccgtctcacacacacacacacacacacacaaaataaataaataaaataaaaattattagtatggggataatcagaacagtggttgctgttctagagggaagaagattaactggaaaaggcaaggagggtggctcaggcctataatcccagaactttgggatgcctaggcaggcagatcgcttgagctcaggagttcaagaccaacccgggcaacatggtgaaacccagtctctacaaaaaaaatacaaaaaattagccaggcatggtggcacgtgcctgtggtcccagccacttggggggctaaagcaggaggatcccttaaacactggaagatcacaccactgcactccagcctgggtgacagagtgagaccctgtctcagaacaacaacaacaacaaaattgaaaaacaaaaaaacaaacaaaaaaggcaaggagagaactttctagggtgatggaaatgttctgtatcttgactgaggtattggtacataggtatatacatttgtcaaaacacattaaacacttaaatgtacatttttggtaagtgattatacctcagtttaaaaataatgaaaacagaaatgcctaaatgtaaatgactcccactagcatgggtatattcctttggaatgttaagtcctacacttaattagtgtgctaatgcactggtggcaaaataaacctgttttctcttgtctgtgcctctttagacccatgtagtgtatttttagactcactcatgcagtcattcttgtagtacctataaggacaatgtcagaaatatatatatttctgtcagtgtgtgtgtgtgtatatatacacatatatgtgtgtgtatatatacacatatatacatatgtatacatatacatatacatatatacacacacacatatatgaaggcaaggagagaactttctagggtgatggaaatgttctgtatcttgactgaggtcaagatatatatatata

SEQ ID NO: 122074 - DNA, 1524 bp, Homo sapiens
tattccctcatgattagaacctttattcttagtatgtttcagtttaaaagataccatcagatggaaggaaatcagctgcagagatagataagaatggacaatgcacacatgctgaaaaatgagatgctagaaggaaaatcctaaacagcactgtggtgaaaaatactgctttcaaatttatcaggatttaaggacagagactatttactgttttctgagggttgtgtagtgatgtatgctctttatataaaaaatgttgcttgtttttgccactgagaacttttcaaatattttcttctagattttggaaataatcagggttattttaaaactatatgagcagtggaagaatttcgatgagagaaaagagatggcaaccattcttagtaagatgccaaaaccaaaaccacctccaaacaggtactttgtagactttaattattgatgtcatttaatcatatatcatacttactatatttttcttagattatgttgttttgtagtttttaaaacatttcttccaaaacttcatgatccatgttaattttattttttaaatttgtgatttgattgagaatgtctcatttaaaaaaatcactaatctgattagtaacttttcctaatgcagtggaggtatattacaggtatctctcaacatatggtcatataccataaatttaaagctgacagaattaggtaagttcatctgaaattcagggcagaattcagaactatagtagtttcatgtcagtttgattctgtgccatcttttttttttttttttttcactgctggctattgtcctgttttataaatttcagtagcaattttcaaaaatttcaatgaatgatctgatattgtaaagataaagaattttggtttttaagtgaccctaaggtccatggcacataagaatatatttttgctaaaaatgaatcacctgtgctaagagggttttttttgttgttattggggtgtatgtgtgtgttttaagtaagatgtgttcatttagttcagtggttctcagccctcactgtgtatcagttcatttggggcagggagaaaaagtcagaagggaaataaagaaatgccatccatcttaattgtttctttagaaaaatgattgttatataacaagatagatttatggattgctactcataagttaatgttacaatttggaaaaagttaatactttattcaaggagctgtttaaggcagtcattcaaacagctacctttggatgcattttttgcagaaattccctgagtgattctccactagtggcagggcctgaagctgcaagatgatggtggacaagataaggcaataatcctattgccaaagttactggtattttcagttttagttatttttaagtattcagcatttttattttaagtattcagcattttccaggaaattaccatatttcttgctgacttataaaggtttgctgtatttatatatgattttattatgcctttggacaacagttttggtttttttttttttttgaagaac

SEQ ID NO: 122075 - DNA, 1001 bp, Homo sapiens
catttggttttttttaacctcttcttgacctaagccctactcatagctttgcttgacttagggcaaccagtgtgtcagttcacatttgagttgctatttgcctagaatgtcatccttagcaaagacatggataaccagaccacggagtataacttaagctggagtgggttaagggtatacaggctgctcagtagaaattgttttaggcaaaattatgatgtagattcctctcttttgttagtttatattgtatataacatatataactaatattgtatacagtatattacatttattttctaacctttatttgattacaacactgaattctgtaaggatgtgcccagctttcacataacttgatcatgtgctaataatgaaaaggaagaaaaaaggccaggcaacactgcttttaactgaaatgtggaaacacagtcaacattgttaaaacctagtatattaattaacatttttgtttgttttgttttgtcacactgacttctgggtgcagtttaacggctactttgtacactactcagggataacttcccttttctgctctcctcattggatgtttttcctctttaacgtgcctgactctcaaggcaactgcaccatgactagcacgcagtgaggaccagatgtcaagaacttgatgtaatctagtaattttttctgtctcggattacattgatgagatggtcagtggtaactctcatatgtagctgtttaatgttttttaaagagtgttggaaaatacacaggaaatagtgaaaaatctttgttagatcatatattctgtgtttgcagttaaacatggacagttgtctctcattttcatttcagcttgcctacatgtagcctgtgttgtacagcagaaagatgccaggcaatggtttgctgagctttctgtggatatggaaaaggtattcccttagttgtatgtaaacttggatgtttaaaaattaatgtcatatttacttatcatgagcctaaaatct

SEQ ID NO: 122076 - DNA, 1840 bp, Homo sapiens
tgtgtgcaaagatgggaaatctggccctctctggaggaaatatacaatcagatgaggtagttctgctttcagtaataatatgatttacatttctataggaggatagtgaatgatacctacagaacggatctttgcctactgtatcctcctttcatgatagctttaggtatgtaagcatggtgtgcctttatgagttaaattgttataaacttatttaggtcatcctaaactaaatttcaccctattgtactttatgtttttatgttccatgaagtaatagactaatccttgcatgtgagctttcaataatatgaactgcaactgtcataaatcaggattattattcccccaccccctttttggtaagttttttttttttttttttgaaaccattcaaaatagttttaatcggtgtctgaatagaacatatttgtttgtttagagggaaaagttcagaattaagccagctaatattagttgtagcatgtaaaataattggggctttcatatcctgagcccaaacaaatactcagaggttgagtaaaggagcatctgtggtccataatgcttggctggaggaagacgttaagtacattcattctacagtctgtggaaagcagtgctgtaatgggtggagtcagatagtcctaggcttaaactttacctcctttacaattgtgggaaaattatctgacctttccgtgtttgtttccttaattgtaaaatggagagaatactaataattccactgagccgtttgaagaattaaatgagataggttgtagagcaccaaataatgcctgttatatattgggcacttgttaatttttgttccttttccttctattgatttttttttttttttttttttgagatggagtctcactctgtctcccaggctggagtgcagtggtgtgatcttggctcactgcaacctctgcctcctgggttcaagcgattctcctgcctacaggaggattataggtgtccaccaccatacctggctaatttttgtatttttagtagagacagggtttcgccatgttggccaggctggtcttgaactcctgacctcaggtgatccaccctccttggcctctcagagtgctgggattacaggcgtgagccactgcaccccagccccttctattgatttttataactccatcctcttgattttcccctcttattttccattggtttgtctttgttcagttgttcaattattccttaaatgttgatgtttcttggccttcttacatcagggctgacaaataggttatacttacacttctgtattactggcagttccctgaaaggactggatttgaaaggattttgagtggtgtcctacccagtgggtaggaatactgggatctgcataggtaggaaggaagggataacagaacatgtgtcacatctttgccatccctgctgtcttcttcttgggtactttaactgagattcatggcttctactatcacttacatgccgaaacatttaaatctctttatttagccaagatcttgccacttggcagttctttatatccatcttccttttacatagctccgcttggcatcccaccagcacctcagactcatgatgaggattgagcttatcactttgccccaaaatatgttcctccttttaatgtctttgccagtttggtgaatagcactagttatataccttagttggaaacccagcagttaggccctttcatctccctcaatacccacatgtagttgtttaccagtacattttgtgccttcctctcgattgttccttctgtaatctcatagtcatcttctcatttctatccatgttaccacagcag

SEQ ID NO: 122077 - DNA, 1062 bp, Homo sapiens
atttttaaaactttttagtaaaaatttttgataaattactataatgtctgtaatttatgttagattaagtggacttatctaatttggtttcatattgacatttcattgataatctttgttttaaacagatattagaatgtgaattctatctgttagaactaatggtaagtaaatcttctgtgattaatagattaaaacatttttaaattaaatgaagttggaaattatttaaagaaatgattttagagaggtacattttaaaaccatccacctaatatgtgatggtgaaatcatggtagcctatttatattagcacctagagtctctctgaagcctgtaaaataatttgtatatcctacttaggatgggaaaatttttctgttctatagtaagtaactataatgaaaggattacaaacagacaagtcaggacattaaaccaccataaattatgtgcacaatttgtgtgtgcgtgcagtgttatttaaagatagattatgtctttggcagaattctgctcctccagttgggaattatgaatttataggctaataagaggtttcagtgtgttgcagatgtgacactttgagtctctaagggaatgaatggatgctgactgactgccaaccgatttatcaaggtatattccagagagagcactgccttcactattacggtagagtttagggctgtcatactgctagcttaagagaataaaagggaagcaagcatgagttagtgaaattcactttgaaatacacaattacaaatcagttgggtaatgataacatttttgtgttgtaataaatctgttttttatacatacacattttttaaactgtttctaggattgttgcttgatagtgtatcatccttatagacctttgctccagtatgtgcaggacatgggccaagaagacatgttgcttccccttgcatggtaattagaacagaagttattaatagtgtaacatgttattagataggaaggttgacaattaaatatgaagttaagtatttttaaagtcattaaactattgccccaagatattttatgttgagc

SEQ ID NO: 122078 - DNA, 1068 bp, Homo sapiens
tacagtttagttaataataacatttcaatattgggtcagtaattgtaacaaatgcgccatactaatgtaagatgttaatagtaggggaagctgggtgaaggcatgtcttagtccacttgggctaatataagaaagtaccatagactgggtggctttcacaacagacatttatttctcacagttctggaggctgggaagtcaataacggtgggtataagagaactgtgcatgatctcagtgtttgagtctacaaaaataaaaggcagaggaatataattaggtagagtttgttttgcttttttcaagggaaatttgagcatattagtatgtgatggaagatttactgaaggaggaaggttaaagatgaaaaaaatagcaggagttatcaattgaatagatgataataagtgtataagtggtaagacaaacaatagagaggagggatgtatttttctccaagttggaggaaaaggattaaaagacagaaaaaaatgcagagcagttttagcatggagtaacagacatgtgacagtatcaggtaaatatattctcaatagaggtgttaggtgtcaaggtccaggggatggggatgtagatttgttttatatacagagataattttactttgttgattgtctaccattatataagaacctgttgtgctggtatactttacatcacaaggatttgtaaaactcagaaaccttaataggtacgtcttaaatttaaataaaggagagaagaaaggaaagattataaatttactaatgtcaagtttaaattattctaggtttcaaatcctggcagatattacacatctaaattagctgtagggcactgaatttgcaaaacaaatctttttgaaaacatagtgcatagaagaaatggaatttctttctttttttttttttgagatggagtctcactgtcacccagactggagtgcagtggtgtgttctcagctcactgcaccctctgcctcccgggttcaagggattctcctgcctcggcctcccgagtagccgggactacaggtgcatgccactacactcgcctaatttttgtatt

SEQ ID NO: 122079 - DNA, 1034 bp, Homo sapiens
gattcttggtttagctaggccgcggggggtcggatagagtgggcacaggtacgggaagtgtgactcagctcaagactgtgaggctacctgttcaggacagttgtggcgtgcttttacctggggtttcttcgggtgatcggcgtcgtggtcttttgtcattcactgtatatcttgagtggatttaatattatgaggagaggagagagtctggcttgtttctgcctactaaccgcttcttgcgcgtactttatgtctagatggagttttatattgataaggtatagggcaggtgccctctaaatttatccatttcattagcctgtgctttatattttgttttaaaggcctatttttccagtgactttgtttacctgtttctttaacctttttcatgaataagttcttgtttctgtcagtgaccatgtgagagctagaataatattaaaaacatttatccctaaatacatttgtttaagcaggcaggaaggtgcgttatggggtaaattgaacatttgagtaggctttccactgtatagttgaaagatgaacagaatttgacaaggtatcttggtataattttttatgctaagaaagcattagtaagtaatttaaatttcgattctgtgaataggatctgttcctgatgttcattttttagccctttgcaaagagaaaaaaagaaacaatgaactcagtaacctatttaaggaaaagcaggttttcctcttgctataaagtgattctgtggagatgacatgttaaagaagctttaccactgatcatatgtgtgtgtgtgtatatatatgtgtgtgtgtgtatgtatatatatatgtgtgtgtatatatgttgcattgttttcacacactgaaatattgcttgggcaaaattaaagtatcgaaagtttaggtattggagttagagctcctgaaaaaaaaagtttaggtagtggagaagagatattctgataaactctgaaagaagctgagagaattgacaagtagctgactgttgatttttcagtttttcaacttaaa

SEQ ID NO: 122080 - DNA, 1055 bp, Homo sapiens
ggacaaacttccgcgtgctcttctgcgtactggaaggcctggaccagccgcagagcctcatccacggagcgtcccacaggcaaatcattaacagtgatctggaaaggacacccttgccatcactgataaagcggcccctgtaggcaatgcccgcatctgttttcagcacggcgtaatcctcagacaagccactggccacctcagcaagcagggggatgttcagggggcccaagtctccctccctctgggggttgttgatccaagccaggtgggtgaactgagagtccactgagatgcccagcacttcgcagcccagcttgcggaagtcctcggcatggtcgctgaacgcgatgatctccgtggggcacacaaaagtgaagtgcagagggtagaaaaagaggaccacgtatttctctttgtagtcctacagcttcacttctttgaaagcgctatccatccaccacggcggtggccttgaagtcaggggcgggctatgccatgcgcgcgattacggaggccatgactgaaagctgcgtgggctaaggctggactcacgggcaaccagacgcgtggactcacgttctcaggaccaaaactgaccatcttaaccaactttacacgtaaagttcagtggtattaagtacattcatattgttctgtaattatcactactatccatcttcagaacttttttcattctgcaaaactgaaactctatacccattaaacaataactccccattcccctttcctcccagcccctgggaaccataattctaatatcaaattctatgaatctgactattataagcaccacatataagtgaaatcatacagtatttgtctttttgtgctggcttatttcacttagcataatgacttcaaggttcattaatattataacatgtgtcaggatttccttctttttaaaggctgaatagtgattatatagagagaatattttgtatatatattatatatgtaatattccatctctctctctcacacacacacacacacacacatatcacgttttagttatccatttatccata

SEQ ID NO: 122081 - DNA, 1043 bp, Homo sapiens
tgtttgccttgaaagaatcaacttctaacctcaaccatccaggaaattgacagtggctgcagtattgactccagtgacataaagttaaccacagtggccttttaacaaatgttgccttttataatgttatctttatgagtttcttgatatgtaagatgaaaaagcatttagaataatcttttaatttgtgtatatttgggatgatatttaggagctatcaatcaaattttacatctcacaatgtactgtttacatggatattggctgctttttttaaggaaaaccacattgagatgtgacaagtgttaggacttgtcacagatttctaactctgccgcataaactataaatctgtaaggtggtacacagcgtgtcttgttagcaaaatttatactttgatatgatcacatgtagaagtagcttcaagaatttcttgtagtcataaatgtttaataatatatgatgtaaaattatattatggagcctaatgatgataacaaagaaaacaatatactgatcttagaaaatgtagacatggttaactgggaaataaaatatagagtggcacttcaagacaagctgactcaatgttttcttctgcttcctttaaataatatccccttactcatctgttcttcttttctttcccttctacttcaaggctttatttctattatctttctgacatatttatttacagaagtagagaagtataatctaattcatgttgtagcacttacagatcatatagtacaattatttgtctttatgctctccaggaaaaatctgagacagaaaatttttcacccctatggataggttttcacctgtaataaagaaaatttctctatgtccaaacaaattccttcttgaaaaatactttttcaaactaaaaacttgttaaaattcaatgttcatataatatgcattctagtggaatgaaattctacctttgtgaaataatttcagttttcttagccctaaaatgaattattttaaaacattttccaatgtcattgttacaaatactagaatttaagtgt

SEQ ID NO: 122082 - DNA, 1052 bp, Homo sapiens
ttttttttaattcctaaggggtagtttggttcatcaggactacttcatttcaattaggtatactcagcagcactaagcaaaatcaaagcctataaggaaatctatagtatatattaaaggaataaaagaaaaaccaaaattaaagtaccatgtacttttaaaaactaactgagaaggtaacaactgattaaaaaaaaaaaagccaatgtattgagaagttttcttgactgatggtgatattgccatataagtgtatatgttagaaaaagatgacctcaagttttttgttacatcttttctgtagacctaggtattctcattcattcattcattattgttgagcacttgctatttgaatactgattttttacaaatgtctttccacttcaagagcaagtataaagttaggtaaaatatcttttaatgtgtcattttaattggtattctcagtatgatgatgccaaaaattcatatttgtttctagaaggaaccctagacttatagaattccttatgatataaaatataaagaatttttttctgaataaatagggcaaatttgaaatatgggccaaaaaatgtacaataagtggtcagtggaggattctaacatcaataattgaattacaaaaatattttcacattgcccttttatccccaagtaatgctctccttcttagaagccatgtgaatgtctgaatagatgcttctctaaaacaaaccagttcgataacagacattttttaacttgttttattttaatatagtcaacagctgctcagtatcaggaaggatttacaataaaggaatcacaagtttaaataatgataagccctcttttagttatttttacaaagacattaaaaagactaaaagcacaatattcttacacatacatgcatatagacacaaatacaagaaaaattggggaaatctgaacaaaatcactggattatgttaatgtcaatatcctagtagtaataagtaccgtagttttgaaaaatgctacctttggaggaaactgggtaaatggtccacagaatgtctctgtat

SEQ ID NO: 122083 - DNA, 1035 bp, Homo sapiens
agattaaatgtatagactaatatgaatagcttctcatcattccacatgtaccactagcagttgccccctttgctagtgtgtggtgtggtgtattattgtcattgaaaaccaggcctctatctttaggctgttctttggagaaaataaatttttggcaagaaaaactatctccttaccattattgattttaaatttgaaagactacatgagattcactctttaaattcagctgctaatgttcttaatacagtgaattatatgagtatttgctctcatagtaagtatactgagtttttatctttgttttaatgctagctaccaattttatgtagctagccctgctgccctaacaaaactgattatttggccctttttaggaagtaatgtacagtaaatgctatgatcagatttgttccctgcaatccaactgtgatttattttctggtttctatgttgatgaatagtaatttagagatacaatgcttggtttctttgttttttgttaaagctaacatcagaatcccagtggagggggcaagtaccatgatataattcttgtaacatgtgcattttccctgttcaggcaatgctggacgtggctgcaaaccagggctggctggtgactgtcctgaatatcaccaacctgattcagatggtgatccagggtcggtggttaaaggactcttctcttcttacactaccaaacatagaaaaccatcatcttcaccttttcaagtaattgttttacttttcaatgtaattgttttgttttgatttcaaaaaaatattttttatatatgtagtcactgaaattttatgttatggagaatactgattattgacatggaaaatactcctgtttcccagagtgagacatggccaagtgacgtaacattcttgtttggaatttgatcatcagtcccaagctgaactacagtttaaacttctcctatctaaatcattttccatttgaagcattggaaacatttttatgttaatgtgtttattcttttataatatcaatcttcatttaag

SEQ ID NO: 122084 - DNA, 1055 bp, Homo sapiens
agatatgtatgggccaagtgcagtatctcatgccagtgatcccaacaggggggagctgaggcaggaggatcacttgaggccaggaattcgagaacagcctgggcaacaacaaagtgagaccccatatctaccaaaaaaaaaaaaattagctgggcatggtggcactcacctgtagacccagctgcttgggaggctaaggaggatcattagagcccaggagtttgaggctgtggtgagccatgattcatgctgcagcactccagcctgggtgacagagcgagatgccatcttaaaaaaaacaacaaaaaaaaaaacaaagaagatgtgtgtgtatatctatggatacacacagtagagtctgagaataggaaagaataagggaagaaaaagaagatataacgatgtgggtatttttcattaaaaattattttaagtgaaagatattatgactgtaagctggttctatattttcattaacaaatgattctcatttgtagtagattaaaaagcataggaatattttatgatgccaggaggtagaattgccatggagcagagtgtttacgtatagatgcactaagctcaggctcagtgggttggtgatgtattaaagaatgtcagtgtcatttaagagttttagaattgcagagtttaaatacatttagcagtgaaaatagtccaggtattgctgagcttaacaatagaagtacttggtgaaacccttaatgcaatacctgtacgaaatgttttgatatagcaaatggtagataaagtcttgtgtattactgtagaatcttttcaaatttttaaatgcttataattagaccaagaaaacgttctctttaaatagacagtactgcgcaagaagcttcagaaagcttcttctaatcattttgagaaaaagatgggtagattataagtaaataatttatggatatgtttcaaggaactatgagcattaatactataagcatacattggggtcttttgtatcatctaaagtatgctggaaacttatcaactataacaacaccgactgttaaggtgacttgagt

SEQ ID NO: 122085 - DNA, 1114 bp, Homo sapiens
gtctcaaccctcagtctgaattgtgagaattgatctttagttcagtccagccagcagaaattgtgcaattttctgttgtatttattgtacagactatgtacgttctagaagattcctttagtgctacactgttgtactttttgtcccagcagtttgagggcgtgcaaattccacaaagtcatcaataagaacaggccatgctccttcatcataattagacacgtgatttgcaatcactgtactgaagtctaaaagaagattccaagtgtcttttggtattgattgtttgtgatgttccacaaaaatttattccataagtctaagaatttaaatcttctattaagcactaagttccagtaggcaatggccatttctagatctaatcctttttgtcttggattctttgcaaaattaaaagtaaactggtaaaaatccttaaattgtcctggttctttcaattcttgttacatcttgggtatctgggcctttagtttttctatgctgtcacatcctaattctgtcatgccatccatgaactcctgtttggagaactcacactgtattgctgctctgaacatccatgcaataatcaacacactaatgctggctggattgagtgccaggccatcacagaactgctatataccatctattccaattttattctcattttgaggatctttgtctctattgtacagttgttctaacttcttcctttccagtgatccttttacactctctcatatataaagttcaggattttggaaaaaattatctgttgcaacatctaacttccagtcattttgagatagacaacttactgcggtttttttcactagattgtgtgaagatcataaactgacaaactttatccttctgcgatgatttcaacttgttcatgttggtgtcctccaggcctctcccctcctcctgtggctctgagcgaatgagcagcaatattcttaaagactacaagaaaaatgatgttaattcatgaaaggaaaacacatctcacacacatgcacatagagaaatgtgacagtgtacactgattagaaagatttctagaaacctatgcttgcaaatttaaattggaattaatgtatgttaaata

SEQ ID NO: 122086 - DNA, 1345 bp, Homo sapiens
gagatgtgttttcctttcatgaattaacatcatttttcttgtagtctttaagaatattgctgctcattcgctcagagccacaggaggaggggagaggcctggaggacaccaacatgaacaagttgaaatcatcgcagaaggataaagtttgtcagtttatgatcttcacacaatctagtgaaaaaaaccgcagtaagttgtctatctcaaaatgactggaagttagatgttgcaacagataattttttccaaaatcctgaactttatatatgagagagtgtaaaaggatcactggaaaggaagaagttagaacaactgtacaatagagacaaagatcctcaaaatgagaataaaattggaatagatggtatatagcagttctgtgatggcctggcactcaatccagccagcattagtgtgttgattattgcatggatgttcagagcagcaatacagtgtgagttctccaaacaggagttcatggatggcatgacagaattaggatgtgacagcatagaaaaactaaaggcccagatacccaagatgtaacaagaattgaaagaaccaggacaatttaaggatttttaccagtttacttttaattttgcaaagaatccaagacaaaaaggattagatctagaaatggccattgcctactggaacttagtgcttaatagaagatttaaattcttagacttatggaataaatttttgtggaacatcacaaacaatcaataccaaaagacacttggaatcttcttttagacttcagtacagtgattgcaaatcacgtgtctaattatgatgaaggagcatggcctgttcttattgatgactttgtggaatttgcacgccctcaaactgctgggacaaaaagtacaacagtgtagcactaaaggaatcttctagaacgtacatagtctgtacaataaatacaacagaaaattgcacaatttctgctggctggactgaactaaagatcaattctcacaattcagactgagggttgagacaaaactttaaggatacatcttggaccatattgtatttcattcttctaatggtggtttgggcttgtcttctagtctgggctgctctaaacatttataattccaacattgtggatttcatcttacatctgtggaccatcctactttattctcccataagtcctagaagctttatggtgattattttgaggtttccattcttgcataaagcacaatgctgtcttcatcagaaaacagttggcataagaattaaacatatgaacatcacaaagccatttataagaacttcttaaactacgctttgggctagttgcaaagactatgttaacagcact

SEQ ID NO: 122087 - DNA, 1890 bp, Homo sapiens
ctcatactatgttttctgaaaacttttgttgttactaccaaataaaatacatggaaatggtctttattacagtagtattattcacacatctgtattttattttaacattatattctcctgaaaaaggattccacttatttcacaatgttttccaactgacagtccaatggaatataagcttatctcagaaatttgattatttcagaaagttagagctcattgtgctttaaaaagaaattgaggtgtaagaaggacttcacaaatatcatcctccttggatacataaaatgttatgctttcttatgttctattcgttgttttgtgtgtaactcagaaaaataatgcaatttgccagaagcactgtaatctcagttttcaagtatttctgttggtaagagagaattattcttctatgtacacttgcttcaacttttagatttaggtcttttatatcatctttttaagtattttctgttatttattaaacagtataataaatttgtaagatgaatgccaaacaggtgtcatcttttttctgatagatcaacaaatgaacagctcagaatcagtgactgagctgacagtattactttgctgaactaaaagcatagaaagtgttgtgacctggaactacttttacttttttaaccagtgaagaaggaaggaatgagagagaaagaatcaattaagacctcaaaataacctgtgaatgcagctaaaatcagggaaaaaacaaaggataaataaattgtcatttgagacccgcaccaaagtgacgtgggtgataccagactgaaacttaaaagcagggttttgtttttttttataaatcatggactgggaatatgatgtgatagttatttaaaatatttttgttaatgaagtttctacgtatatatggatttcagaattcaaggaattttaacacaatacatttagaacagtgttaaaatatatatgtatgtgcatttatgtatttctttgatgaatcagaagacccctaaggctctttaaaagtcctgaggctatcattataaacatcagcacattatggatatattaacgtgctagagagcttattaatatggagctgatagagtcctgttaaatacaattttgctatttgtagaccaagcaatggttttttttttttttctttttggagaagacaaaaatctacagatatccaccacatcaatgtatcagtaaagttaagccactgagtcttattttataaaacaagtggttggttgctatatttgagaatttggaaatgcatatatacctgatgtatcctcatatcacaccctagaagtttaatgtctggtgaatcagccccatatatgcataccaaacttaagagctgtactttataccccctcaacatatatgtactttgttttccaatgttaaaagcaccaaggaaatgcaaactaaattgaggaactgggttaatttagcctacagtatgtgcttgcctgttatgtgtgcgtgtgtgtgtgtgtgtgtgtgtgtgtgtgtgtgtgtgtgtgtgttcctctaagatgtttggggtttgactatgactttagccataagaatgcatgtttgctttctcttgattcacacagagcagatggatgcttgactgcctcctaatccacagctggaatggtttcagcagttgccacgttgccaggttagagtggcttttctagtggactgagagggcagcaaaagagggatatcattattcatcagtatcccagtgggagtgctgccagcagagattaattttttctgttatgcttgtaaaacaagctcaggtggagtctctaatcctcagggcacgggtggcagatcaaggaagatgctacaaagctagttaattttctgattctgggggaaaca

SEQ ID NO: 122088 - DNA, 1093 bp, Homo sapiens
ttgaaatcatgaatagaggccctctttggatcttgaaaacagtaactttttcacagttagtaggaggttccatctgatttattacttcagttgacagatataatataggccaaaaatttatagattcaaaaagagatgggataaatttattaaaagttactaaagaactaaaatagaaaatggaattgtgcttgtcatatttggtgtgataggtgattttttttacaacgtagggatcaggattggacctgcctggcatttgcatgaatttttttctgttggagctctggatactttaggaatatttttattcttcagagtattgtgggcttttttttttttaatgtggcagtctgttaatacttgcagatactaattcctgttgattattattccattatatgaaactactccagtcaacagtgagaaggaaaatacacttccactcattttttttttctcctgtgacatctcttttgagactgctatttttatttattcttctttccttgaagctgagctgtttctggcttatgtttttagatattgtcatccttaaatgatagtaaaatactctagtctgggtggaaagcaaagattctatcgaaactttctcttcactaatctccttctacaatagaaacccatttattttaatcccatcttttccatacagcgattaaaaaataataattactttttactgagaacccactacatgctaggcagtttatatacattatttataagcatcaaataacccttcaagttaagtgttaatatataaataacgaaattgaattttaatctcattaagttgttacaggttctatagaaggtagctccttagaacttttttttataccctatttccttttcgacatattctatctttatcctattatttcattccagctgtaaaaaaattttaaagcattgacatgtaagaaatatacttttaaaaaataaagaaccagagttacttttaaaattatgtatgaccttgtaactagaattataagtattaaatacagagcttaagtactaacaaaataattatttcagcatttttttattgaagacattattttaa

SEQ ID NO: 122089 - DNA, 1015 bp, Homo sapiens
agataatgtggtacatatacaccatggaaaactatgcagccataaaaaaaagaatgaaatcatattctttgcagaaacatggatggagttggaggccataatcctacgtgaaacacagggatagaaaaccaaataccacatattctcacttataaatgggagctaaacattgagaatacatggacacgaagaagggaacaacagacacaagggcctacttgaatgtgtaggctgggaggagggagaggatcaaaaaactacctattgagtactatgattactacctgggtgacaaaataatctgtaccccaaaccaccacaacacacaatttacctgtgtaacagacttggtcatgtacccctgaacctaaaattaaagtttaattaattacttaattgattagcagaagattgtcagaattggtaaaaattctatatgttatgcctgtttataccttatcctctgaattctcgccttttatgttctttttctttatatgtggaatgattggggtcagcctggtagttttcagaatgatattatattgacaatatcaccctttgaccaaagaatggagacaacagacagtttctgagtttgcagatgaaactgaattcttccaaatagtatagagctaagctaaaggaaattgtctaaagaaatattttaagaatatattgcagtgtgcctgtcttggatagcttatctttaagtattactctccattttttcatactcaatttcgttgctcactattctacccacagactatatactgattcatcaaaaaatatatttattgtgtgtctacaatgtgtaaggcactttctaagggcaagatacagaagaatgaacattagtgacaaacttcctatgtgtatgtgtgagagagtgtgtgtgtgtgtgtgggtgggtgggtgtgtgtgtgttcacacacagataaattatgggcaatggtagtaaaccatgaaagacacttgcactttggtgttgctgctgacggaagtcatcagc

SEQ ID NO: 122090 - DNA, 1055 bp, Homo sapiens
attgagaagtccctgattgaattggaactttcctactgtattgaaattggagaggtatgacttagtcatatgcattctaattgaaaagattgcccagctttttgacaggtcttttgcttttaatactatcaaaattttttaaaaaattgtttcaaaagcacctgtctgaattattaattttataaagatatgtactttcatcgtactcttcatttgttattcttttgaaataggataatcgcagcattgaacctctaacttatggccgaattgcctcctattactatttgaagcatcaaacagttaaaatgttcaaggaccgcttgaagcctgaatgcagtactgaagaactgctttcaattctaagtgtgagtttttcatatatttcatatcttctcttttaatttagggcttaaagttttgccacctagtttgtcttgaaatttaacagaaaccatttgtaaagccctttcctctgtcaaacaaggtcactacaaagcaacacatctagactaagatacccatagataaggtgaccacataatttatgatccaaacttggatccttctgagtgtggaatgaggtcctattaatatttaagccaggatagtagatgtaaactggactgtcctgagcaaggcaagtcatcaccctatccttaaatataatagcctctttgaattatgattgaaagcttttcttattacttttttggatagttcctgttgaatacttagctgtgatgctactgaagtttctttcataagcatccacacaattaagttcttagaattaatgtcaggacagctgtttatcccccatccccacaaacacccttaccaaaaaaatgaccacagatatatcacatggtaaaaaactatactgtgttcatttttcctttttttgccaaatagctaagaaattaatattagaagcatcttgtccacctttccttctacataatgtccccttctggctttttttccctttgttgattttaagtgtaataatttaccacaaaactttgttaacacattagttaggatattcatat

SEQ ID NO: 122091 - DNA, 1479 bp, Homo sapiens
aaatgaaatagcatgctgacaaaaaggtaggctgtccgtttatggcaaagagaagataatgacttgatgattcaatgcagtgaacataaaactacgttttatcctttacccataattaaacagttgtgaaatgtttgtgtttaaataaccagtaaattacaaattttgtactgtggagagtgcaacatgaaaacagacctttttacttagctgttgcatgctttttcaagttagtaaagtgattattaaaattaatgatatgtaatgttttaagctaaatgcttataattgttcaggctagaagatgcacagtaactaaaaaaagttcacctcatagaagtaaaggctgtattatgctactaatcgagagcatataaatctgtactctattccttattcacagaaaaattcaaaatatattaactcccaaaattttatgtaacctaaaaaacttcatttacatttaaattattttatagtgtctcacaaattgtatatctaattaagatgtaacaatatcttacttttataaggatttgaaaatattttaaatgactttagaatctcagtccaaatattgaccaagaatagtatttggtaaagatcagtgaagttcaatttacttgaattgaattttgtatttcttctgttatgcaagtcaataagaatgttggtgaccacatttagaaaaaaaaactgtgttaagaaaaaataacagtgaaacatttatgttttctgcatgaagaaatgtgaacttttagcaagttagattatgaataatattttagtggtgtcatcatataatttattgtaatctcagaaacatcatttaggttgatttttttttttttttggtgacttactttaaatgtttaagatatatttaccctgactatattttatctggatgaaaaccacagatttgtctttaaaaagtcccaataggcttaaataaacagactttagaagggatattaatccattgaaatataccttgtaaatacagtaaacaaaataaagcaaatacagtaaataaaataagataaatatttaaaagaacctgtaattttttcaaggaaagttttttttcattgatagttttaaatattatttgtaagtgtaccaaatttattcattaaagcataaaaatggtaaagttgacatcccagttatatataggacaacggctgatggtaatccgtaacaggatccattagttttcaaacgacctagtaaatggatagataaaaatagtattttaatttttttgtatttcacagtaatattttcaaaatatcttctttctgtaatgtcagttgcataaagaattgtttgttccaagatcaaggcagacagatttggtttaaaaaaagaatagtttgattcttactctacaaatcctactacttagtatcctgggcacattttgactagtgttttgaatttagaaataactttatcagctatgtattagtcctg

SEQ ID NO: 122092 - DNA, 1049 bp, Homo sapiens
ctgcatgtgtgtataacaaagagactgaggtttacttaacaatagaaaagaaagaccatttttataatatagttatatataggtaaagaaatacaacctcatattccagctcccttcagctaatcatactactatgaagtcctcgccacagcacaccaaaagtaaaacttgtgttgacaaagatttcaaccactgttcctgagttggtcactatatgtctatttatattcttgtgtgtgtctgtgtgtgtatattatgtatatatgcatataaagataattatgtttagatatgtaaacacatatatatacatataacatacacacacacattaacttgtgcaaatgaatataaacacatgtactggtgctttcataaaatataatatattccaaattgagttctggattcaatttgtatgttcagttttactctgttttcccctgagaaagcttttaaatatatctgaggcaaaaatgtggtagtttcagctgttcctgcaaccactttcgctatttgtgtcattgttattgctgcataatctgaacataaaaaaaatggtgctgtaacaaatgacttcccactactgacagttatagcagcagcatttcaatactgatgaaaaatttcccagcaagatatctgaacaggtttacataaaccaaacaggaaatggctgccactattcacattaaatccaaaccgtttggtgtaactttatctatgttttacattaatataaaacctctttcattctcaactggtgaaatttcatcagtattaagatttgaaaaagtaacttgagatttcatatgtagtattcttgtttgtcctttgataagatcttttaaagataatttttgaaaaactttttagtttttgattctttaaattttacgaactttgtaaatttttatgatagggagaggtttgttatgactttttcccaatggactgctaatagaagttagcttgtgtagcccatgtgctggatgctgtcagtatcaaactgcctttgactttcacacctctcaggggactagtaattg

SEQ ID NO: 122093 - DNA, 1417 bp, Homo sapiens
aataaatataaaaagtgtttagctgtactattgatcgaagataagaagtaaacaaaaatacaccagtttgattttttaaataatattcagagttttgagaacatagtaacattgagatgctaatatgtttatagctgtgtgcctctctggaaaacaatttttgaataggtatatgtatccttttatcattactaaatttacatataggatgaataatagtatttactattacagggctttagggaaaattaaatgcatatataagattactgttattatttcaaatttacagttaaagaaacaggcttagtgaggttgtgtgacttgttcagggccaataagttctgtaagaaagcataaattggaacaatttctttctgtctgcaaggattatggctgattttttttttccactattttttggtctgtatttttaaaatttttggcactgaacttcaaaaacagtgttttttataacaagagatgaacagagacactgaaatattgcatcctttttaatggttgttactcattaaagaacatatcatttatctacagattttttttcttgatgcataaaaataagatggataacatttaaactttagtgtgtttagagtatatattctcaccaagtagatattcttttcagttagttgaactttaatcataactgtatataggacttatattttatgtccatataataacataaagacaaaattaatgttttttgaaacatgaaaaattaatgaaaattttaaagttatgcatctacatcttgtaattttgtttttacttgcagatggagaacatcattgcaacagtaagagattccaacctcaagctgacccttgctttcgggataggaatgcatcatgctggactacatgagagggaccgaaaaacagtagaggaactatttgtaaactgtaaagttcaggtacttttttttctccagtgaacacatatttaaatgtaacttaaaagttatattttacttagatataagatattttattttgctttttaggttcttattgctacaagcacattagcctggggtgtaaactttccagctcatttagtaattattaagggaacagaatactatgatggaaaaacaagacgttatgtggattttcccattacaggtaattttcttaaattcacagaaatacatgaagctctattttaccctgagtaaatttgaatttgaataattaatttgaatttccaccaattaaacttctgagaattggtcacatttaaacagatgataagcaattatagactttttgttttcagttaaaatattatacaaaatattgctgctgtatttacttttacttacacaaaagtaagaaaataataagtggcttaaagtacttgttattaagccatccaaagttggttt

SEQ ID NO: 122094 - DNA, 1109 bp, Homo sapiens
gatttagctgttattgtttgtatttcatttgtacatttaatttatatttcacttatatatttacttcacatgtaatttaatcacatataaatatatttatattttgaaagtatgataaatcattttgaggtgtgcttgtctttgagcgtcagaaagagcaacgaagtataaattttgggagtattgatacagtttagaaactattctttttaattcatttatttcttgaattcttttttattagtgtatcagtagaatgctgtaaaatgtttcattgtttttcttccttcagtgtatggggtttatcatacagacttgtattaaaagaaattaacatttggtgattataaggaaatgttttagtgtcatttaatatctgtaccagatatgatagatttaattatttttatttaaaaataaaacttcagaacttttatgattcttctgtggtacatcttttattgagcatttcagacaattgataagcattattcagtggcatatggtctgagtctgacatgctttgaaaagagtatagagttctgataatgaggattctgtgaaaatgagaaaaccagcacaacagatatgctttgagaaagtatgggtttttagcatcttgaaacaatatatcacattcaaaaggacagaattgggctgcacaatctgttagctcattcttgttcaatctggtctcctccttttggtgccaacgttgtcatcaactcactgaattatattcgactggaatgtatttcaggcacagagtaatgtatctacttaaatggaatctatatttctacaaaagctttttgagtataataaatataaaatgtaaaaaagttctattaagttaaagtaaatggttcaacagtttacatatgtgcctcctccccccaaccttaagaaaaagatcactacctagaataacatagatctgtttttctgttacgtataatattgaataatttttttaacaatcaggtggtcagacatatttcaaaggctatttattggaaagacacctatacattacaacaaataatttgttgaacaaaaatgaactatggaagtaaaacttcttctatcagtgtttcatttatcatggt

SEQ ID NO: 122095 - DNA, 1848 bp, Homo sapiens
ctttcgcttcctacttccccaaaatatccataaaaatagcagtcctctaattcaaagccataggcagcccttctcagaatctgtaaagtattcatttttaaaagaagaagttatattttggacatgttagtttgtatatctaagactttcaagtggagatttcaaggcaattagatacaagtctgtaaaacccacagagactgtgaaatgaacatatgaacatggatgcatcagcatggcggcaacccttaaaccaaggtaagcacatgagactctcagacagagtgtggagaaacagagggcaggccctgagggattctcttagtgcgagctgagatagaaaatgaggaactggcacaggtcactgagaatgtgatgccagtatagtaagacagtgtcctaaaacactgtagaagagagggttctgtgaaggaaggagtgcttggctatatcaaatgtaaatgggagttgagtggaggagagcacaggaaacacccatggggtttatcatttgaaggtcctggatgaacttggcagtcagtgacatgtgaacagaagcagtttggaatagactgaggagcaaatgaggggggcaaggaggtgaaaatagaagcaaatagcatatacaacttctagaagttttactgtgtaatttaattaatattataatttaacatctagcaagtatgatctgtcagcttccacccaatattctgcagtctggtcccatatttcaaggaaaatagtgctacgatctggatagttgccaaccagcactaacagataaaagaacagagggaaggccttttcttctgagtgagtctatggattgaaagctcagaatactgggccaggcacggtggctcacgcctgtaatcccagcactttgggaggccgaggcaggcagatcatttgaggtcaggagttcaaggtcagcctggccaacatggtgaaaccccatctctactaaaaaaaatacaaaaattagctgagcatggtggcatgtgcctgtaatcccagctactcgggaggctgaggcatgataattgtttgaacccaggaggcagagattgcagtgagccaagatcgcgccactgcactccagcctgggtgacagagcaagactctgtctcaacaacaacaacaacaacaacaacaacaacgacaacaacaaaaagttcagaatactgcccttagatgagattccttttctggggtgggaaagcaggatgctggctgaagattagacttcattctttagtattgcttacattatttccctcaacacctctgtgtttcttgccagttaacagcagggcggcccctttcttctgccacactgttaaataagatccaggtagctaaaagaagaatacaacaacaagaactcgctattcacttttgtccttacaagtagaaattaattaggattctgcaaggccttttgccatgaatgttttaagttgtgctctaaagtctacaacatcatccaaaggtaggtgggggaaaaaatctgaagcaggaaaggtaagagccttctgactggagcaaaccatggaaaaattccaggtagaggtaatacgaaattagaagggtatgggagataagagttccctggaacaaggaacagcagtatagttaatccttgttaattcaaattaattggctggaagtctcttctaaattatacagaacattattttttgaatgtgccaattataattttacatggtgcttcaaagtgaatttatgaaaactgtaatgcaggtgcataggaagaatactttcatgaaaagtaagattgatagtgttttcacatgcttaatactaaagtgtttttagatgcta

SEQ ID NO: 122096 - DNA, 1032 bp, Homo sapiens
caagcgattctcctgcctcagcctcccgagtagctgggattacaggcgcccaccaccacgcccagttaatttttgtatttttagtagagatggggttttgccatgttggccaggctgttctcgaactcctgacctcaggtgatccatccgcttcggcctcccaaagtgctaggattacaggcttgagccaccgctcccggcctcaattttcagtgcttcagaaaatttaagaaacctacagtctggtgtagaaagtatgtcgttagccctcagttacctatgtaattaactgaatagagcagtggggaaaggataattttttaaattaattttttgacttttaaagacattttttaagaagaaaatttgccatactttcattttgaaacagtaccatgaacatctaactcaaggtacagaatactatgttaccttatggattatttcttcttgttcaaatttcaaatgactggatttatctttcatgaaataatcttgagagtaaagtggccttctggttttctaactgatacctttctggattatggaaaatataaggtctgttgaattcaagggtgtataactgtttctctaaattattttgtttctaattccctaggcctcccatccacataataagaaacaactaaatctagtttctttctaggttttctcagggcaggttttgtttactcagtcatgctttgctttaaaactcccacccaattttctacctggaattaccctaaattcattttactttccattgacaacaatagttaactcaactgctcttgcttggtcagtgtctaacagaacaaaagtaattcgttgttagtaatcatttcagtgttgaagtctgcaaatggttttaatttttttaccacttgagacagatttaggttttgttctataacatgcatatacttgttattcaaatgactttcctgattggaaaaagaaggatatggcattatagttggcttatagggcactcccccagaaaagcatccagtatgtcaatatggtaaa

SEQ ID NO: 122097 - DNA, 1034 bp, Homo sapiens
aaagaaggtattgtgaatttccacattaatcaaaataaaaattttaccgtatttataaatctttttcatttatctaaaatcaagcgaaaatctctttatattcaagtgagtctgtttatagtagtttaaacactatcaagtctcagtaattttaagcaccctattaatagctaaagaaaccttgatactgactttaaaaactgtgaattgctaattcaagttaactattacaaaatattcaaacatgccaggtcaagaatgtcagctattctacatagcaaatcataaaacaagcaataaaatcaccttctctgaaatcccatttacaagtcagattatattgcttttttctgcctggacacatttcttctatgtgatatttttcttgcaggtcacattttacatcatgtgaatattggactgaaggtcaaacaatgtgttcatcagattccttctgttatgatggaagcatccattcagcctatcacaaggactgtcctccgagtgacactcagcatctatgctgatttcacttggaatgatcaggtagaagtggaaaacggctatatctgtgttaaacaaaaatatctgtactacagactcaactacatctgttcctaaggcatatagaaaatcctctaaaaagaatatatattgaggatttattttaaaaattatagcaattagccgggcatggtggtgggcacctgtagtcccagctactcgggaggctgaggcaggagaatggcatgaacccgggaggcctgagcttgcagtgagccaagactgtgccactgcactccagcctgggcgacagagcgagactctgtctcaaaaaaataataataataatagtaaaaaattatagcaatatttattctcatcctcaagaaaaccatggtatattagtaatatgtcaacgagtgagattccttcaaaacatttaggaaacctaaatttcaacaatgaacaacagtttagtggatttaactccatagagattttgctatattagttctatcttcttttatttt

SEQ ID NO: 122098 - DNA, 1850 bp, Homo sapiens
attatgtaaaaatcaaaacaaattccatcatgctaacttaaataatgaaactttccattggccctttgcctataaagtttatattctccagatataataagcatctctaattctcagtactagtgtttctgctatatcaaatttgcctcgcatgacttttatttgtgaattatttgagtgcttctttctttactccgcttcccactttcaactgagatgtaattccaaaggaatataaaagctagagtcgaaggagacattttaattaggagcacaagaattaaagatatttctccttcatctttaccactaaagatagtactactaaagaaatatttcaggtgttttttaagtacaagaaaatctaaaggaatcattttctaaacgtctacttttaaaaaagtgaaaagctctgttgagtcttctgtcaaattgaaattcccctatccatattgcacaggcaaaaaaaaaaaatacttcttggtaatgttgagttttctattttacttttaagttaatattacaagtatttgcttagaattttaaaactttcctatatataagataaaaatttcattaatatatttgtatataactaatatataaaaacaatagttgatacttgatgtactttttcattaacagtggcccttttatagagagaagaggataagacattgaggttatacatttatccatttattcattcctttgttaacagtcatttgttatagacattctatgggtaaggtgtttggaagagttggaagtgcattatcatcctatatgggccaaatgccagatagttgaaagttaacatcaacatttggttaaagtaaaggccagaagaaaatatcaccatcatagaaggaatttctagtagaatataatgaaaatttatcaaagagaatttaattataattataaatttagtagttagattttaaaaattggacattgtaattcaaaagcaataatttcttagcaccgtaagctgctagagtaatcttgtcattaatatactgcatattggggatactaataaatgctcattttcagctgagaccagtagaagagcaagacttattttactgtcaccaaattattaagctattctttctctctgataataagttacttaagtaagtatttgtctcttctctcctaatcttgaagatttggtcattgctaaatggtactgttttatttaagcaaacttacaaactgaagctttgtacagtgtttaaatatagtgttttccaaatatttttagaaaggggttgaaaattattgtcctcttacgtttttaaatttctattatttttgtgtttactttttattctacacaattatttgaaaaagcagctgctcttgaacagttcatttagaagtatcagtggagaatggaactgattttcaagatgacagaaaacatttatgatatttagaaaaaaaaatccagatggcatgtcttgtttatattatgctattagactggtcaaaaactatggtaataaacattatcacatgatcattggtcatgcctaattcaagaacaggaaaaatcatgttgacctaggcattctgctgttcacacttccaaaaccaaagccaaaggtgattagcacatttttaactaaatatcaaggaaaattcaaagcttgatacaccctcaataaaaggttgtttttacaaaaagataaaattccctgataataagagctcacaattgtgaataaaataatcaatagattaggtggaggttgtagaagtggaaatacttgcaaaatgctgattttaccttttacctatctccttactctttttgacacaaaactctgtttttcttt

SEQ ID NO: 122099 - DNA, 1010 bp, Homo sapiens
aatacagtgtacagcagtaagaaatatgcagtctattctaatctaagtaaactaattgaatttttcctgctactacctcatgctgcctgccccttcttccccacaatcagttaaaaaaaagtgaatactcttcggaatttgcttttttcttgccttcaagttgttcagtatcttggatttctccctggtttggtttccttaagtactttggttttatcagagaagctacgtttcaaaccattagtgagaagactgaaatacatgtccattcgaaaacaaaagaactatgactctcaggcaactaaacactttttaggcaaaaaattaacagttttatcttaaataaacaaatgaattcaatttgtttctccttatttggattaaaacaaatttcttgttcaaaaaccatgctgatgttctctgatcatactattccatgggttttagtgatctaaacttgcgtgctcgtgtacttaatagattttatgtgcaactttgccttaaaagtgttaaaaacagtaggaggcagttgtgttccactcaggcatgtgtgatgacagatggagaaaatcttttcatgttgacttttcaacagtcctactctgcaagacttcaagctcttcttggctattgggaaatcaaaagttggcgattcagcctttaattttgatccatctgctcaaactaatgagacgtctcatttgtaagcttctctttgtgttaccaaatgcaagtacagctttatcattccggctaataattcccctcctcctgtgtaacttgcagaatgggaaaataattaatgccttaactctattgagatttttcttgttatacaaactttgttacagttataggaaaagaaattagaaacttcctcagagattatggcatatttagtaagttaatttaggttcttttccatattgtcaaaaaagttaaattctttgcagcttcttactgaaaatctaccttcagttttaaggaataaaaggccttgtgatactaaa

SEQ ID NO: 122100 - DNA, 1050 bp, Homo sapiens
cagtttctgtttttgaatgattagtgatgacattcgttttccgtaagagtgggacttcaggttttgtagaaatacctacatatctcctatactgtttgttagctataaaaataaaatgacaatattaaaattgtttatagttttctattattttaccattttaacattgtaattgcagttttatacattttccattagtcttttatccattcacacatgtgccttttaattttgctccttcaaacttaatattaattattagttatactgcattactaaattataattataccatatatacagttttatattcactttttcttaatgaataataaacattttttaatgtttctacatggtcttcacaattttaatgtttgcaagagagaaaaaggaatctttattcaggttctaattttcagataccatataagtctctttggacttttaaccttcccagtcctctgacataacatgattatttctctttgttaaagggagaaatgaacctaaggcatgttaagcagcttcccaaggtcacagagctagttaagagaggcaccagtacttaaatgcaggtgtttgtgttgataaaacccataatgtcttcagaacttgacactgtccctttgaaattaagctgatattggttattattggttattcctccattattaagtacgttaaatgtttgcagttttctgttattaaagattatgctactgtagtgattatctttctacctgttatttttgtttaaatatttactttaaataaatttcctaaaatggacttttggcagaaatggccacattgtgtggtcttgccgtatgaccataatgtatacccaatgaattaaaacattttgttgtcacaggagacctacataggattttataaacataggccatttcttctgaatactgttatcaatctagtgctatgtaaggttatgatctaatgtatgtttgccattttggattttttttttttttcggtcttaaggcatagaaaacagagtgatgtcataccagtgaagttttttcttaa

SEQ ID NO: 122101 - DNA, 1987 bp, Homo sapiens
aagacataacattccagattatttctatttcaaataaagtatttctcacatagatttaactatattaaataactgtattataattatacttttagatttaaaaatgttgttttaaagtggatttttagcagaaaaatgtctggtgtttgccagagtattgtgtctttaacatcaaacaaccttaaaaatatattctgtaactattgtgtcttaaaaaatgattttaaaaccaaatatcactttcatttctttccaaatcaccactagtactacatagaactgtgggataattaatcgttctaattactgtatgttgtgaaagagatttctttaaaaataggtctggtgattatttccccttatttagggttccttgcttttgatgggatttggtttggggttttgccaatatctataagatttcttcagtgaaaacaaatttataataagatactatatatgtattggtactttaatttttacccatctctacttttttgatccctcccttgttatgtttctgcaagtagtctctgcatgtgtggatctatgtcttattcagcactgcatccctagtgcctacagattaggtcctaacccagtgttgatggatggatgactctgaaagtattaatattattcacattgaactactttgcttatacctattgagtctcctagactgagtaaaattattaacagcttactcagaaaatcatactgatatattttaattaacaaatgaatggaagtttttggccatcccttggttttatctttttaggtatgttacatcataatcagataatatggcctatatgatttttagtttttggaatttactgagttttttgtgacctaaaaatacatttagttgtcacaaagttcttaattcacatttttatttttatttttattcatgtatttatttttgaaacagagttttactctgtcaccgatgttggagctcagtgacatgatcatatgggctcaagtgatcctcccacctcagcctcctgagtcgttgggactacaaatgtgtgccaccacaccagttaatatttttttttcttttggtagagatggggttttgccatgttgcctaggcttgtctcaaactcctgggctcaagcaagccgcccaccttgcctcccaaagtgctgggattacaggtgtgagccaacacactcacccctcatgtgtatttttaattatagtgggtatggaattctactatgtatctgttaaatcaagcttgtgaattatgggctacaatgtctgacatgataggaccctcaattgacctctacactcatctctgtctagagtttttagaagtcctattaataggacaaattataatgttttttggttaaattaatttaaataacccatatttaattaaaataatccatataggtggaatccacacagagtatgataaggattctcggactgtctgcaactttacctaactacctcgatgttgccacatttttacatgttaatccatacattggacttttcttctttgatggccgttttcgaccagtacctcttggacagacatttttggggattaaatgtgcaaataaggtaaatactcattttaattcttatctaaaaatatttttgttgacttattattgaatacttgtttggagttagagactccaaaagaccatttcagccttttgtggtgtccactgaaatggccttttgcagaacattgaatcacattacagatgtgatatcctagacaaaatcaagcatacttcctcaactatttgtagtagagtaagtcctcctatagaaagtagcttgtcatagtttgcattggtgttttccatgtatgttacgtattttcagctattaaaagttttacgttattttgacgtgaaatgattgaagggcattgtggaataataaaaactccaattaaacaagtaatatatattgtgatgatattcatttaatagaaataata

SEQ ID NO: 122102 - DNA, 1053 bp, Homo sapiens
aatatataattttttatttaaaatataaattaattgtaaatagtatagtttctatataaaatctataaatgttataaactatatcaaactatatattataggtttattatgtattatatgcaatatattattatataaatatatagtgtatcaatatataagtgtatatcatatatattatatatgtataataatttcatcttcacattgtcatctgtatattgtaatcaaattctaattatatcgttttgtactactttgcccataaacctttgctgacttgctgtttgttatcttaagaaaaatggtcaaattgtttagctggacgttaaagactactaatattaaagcgctgtctgtctaattttaacttctacatcttcatcagctaccagaggttccagccacacaaaactatttgatctttcccctacctccttttaaatatcattgaccctctttcaaaaacgaaactaatctaacttgaggcagaatgtgttgttggttgtgagataaggattgtaaatgccaaattatgtaatgccttctttttttgtaactccacccatccatctatggaaaatttactgttcttttgaatccatcaaatgccacttctatgatgtgtttcctagttactgaatcagaatgaattacaccttttctgtgttttctttgcactccctttttttacatagttttaacgcttatgatgatcttccttataatttcacaacttactatagtgaattctgtcttcatctaaatgcctcactagaattcagcttccttgacagatgtgtctgtgtgaatcttttcatattttcgaagtattagtacagtgctcatagttatttttattacaaaacaaagctcttatttttatttgttccttgtgattaccaaatgttcccagtagatggcacatcacatcacacttcaacatttgtaactaatgtagaagtgccttccaaagctattggaaggcaatgtagattttgttcaggttctgaacttacatgatgatattaggcactaaattcataatacact

SEQ ID NO: 122103 - DNA, 1015 bp, Homo sapiens
ataaagagggttgtctgagtgtctagttgttgagagaagctacggtagttccttaaatcttctaaaatatgctgaagcacaaagaagtaaagataacaattgtttagggaattggagagaaccagaaattgcttttgagcttaaacttgaatggtaatgaagagtcaatgagaagtcttggaacattttgtaagctggaatgtgacatgatcagatttgtagtttaggaatagtatactctgtttcttgtcataagtctataaaaactggaaatagctgcattcattcatagcactattttaggaaacctcgtataaaaatgaaatgatatatgatagtaataataatagctaccattaatttatttcaacatatttaacaagtaccatctctgtgtatggtttatagtatatgatttataaatattatctaattaaagactcagcttttgaagttatatgacttcaaatactagctctaccatttatagttgtgtgaacttaaacaagctttctcaagtttcagtttcctcatctataaaatattctggtatggctatagaaataattaggatattttatgtaaaggactcctgtgcttagcccatagtaagcactccataattgttagctattttaaaattaatttttgtaacttccttgtgttaaaaagataacacctttaccttgcaatattaccttgcagatgaggaaattgaatttagagatcttaagttacctgcgggtcatacttgcagtattaccttgcagaggagaaaataaaatttagagatcttaggtttcttaaaagttatattgcaagtagtggcaaagccagtattttaacttgggtctctgactgtaagcccagtatcctgaaaaatgtgctgtactgtccttccgaggctaagtgatcaggagaaattggtgaagaaagtatcagtggtactctcagatgtttaattggcctgcctaagagcttctaggcctaagagatactactgtgatctcttctg

SEQ ID NO: 122104 - DNA, 1033 bp, Homo sapiens
actaccctaaagaaaatcttttggattaagtttttgaagtgagttctgatattaatagttcttgttaagatggaaaagatgttaataaaaacacacttgagaaatatgtaaagtgggatctgaaaggctagcatattggagatgtattgaagtatacatatctcagtattatttcaatattacatgctatttgcaaagctattaatgctgatgtagatactgatagagttattgtataatcagtttttagaaaaagagagttttgagttttattgatacaaccgtagtttgcttttgtgcagatgggctgcttctttatagcatttgtgatttgacatttgccgttagtattatctcttgactctatgcagatggcgttacttgacccatgcaagttcatttctgaacctccagatatgtgtctgatgtcaagcagtgtgagttatttggttagattgtcttctgagggaagactgtgtattttttggaacttatttgcattggaaatgattctatcatcctttgaaaatttggtggagaataattagcttgctttaatacagtgattctcgttttttgttctcaaaactcttttgcacttttaaaaattactcagaacctcataatttttctttatgttattgaactctattgatatttgtcatatttgaaattaaaattgaatttttactatattaatttaataaatgtctattaaatcatttgttttttagtctttcttattattctttcagagacagagtctcattctgtcacccaggctggagtgtagtggcatgatcatagtttactataacctgtaactcctgggctcaagcaatcctcttgcctcagactccctagtagctaggactacaaggatgcctcaccacacacaactaattttttaaagaatgttttgtagagacagggttctgtgatgttgtcctgactggtcatgaattcctggcctcaagtgatcctctcaccacggcctcctgaagtgcagggattgcaggcatgagccactgca

SEQ ID NO: 122105 - DNA, 1866 bp, Homo sapiens
tgcaggagagttagtaattagggtagagtattaacatttatgaaacaccacaacccagcaaggtttaaatttttttaagtatttgtgatttttgaaattatagatttaagttaatggttattaaaaatttgacactccaaaaaagttgatctttgttgatgtttctgtgagtctacaattattttctcttcaaacatgggcttatagcttttttacccactattaatggactttttaaaggcaagatatataaatctgctgcactatatttagtgaatgtatatggctatatcagaattcaaccagtaacctaataatggatatttaagttaattacacttttacattagataataaggctgttcttccactatttgatttcttaaggtgacctatttatttttaaaatttattttgtaaacaagaattagaaataagtctactgtctaggaatttacagggaatcagtgtgacataggggaaataacttgtttaggagttagaagactaatgttaatcttgtttaatgatgtaatagctgtttgatctttccctaattactcaaattctgtttccatttaacatctataaaatggagatacttttgttaggacaaagtgagataattatgtgaaagtttttagtaaattattatttttaaaaaaatcccaagatgcaaagtgttagcaatactatctttacaaaaaatgtgtatttacaatggtagataatgtttgtaaatgtgaattccatttttgctcagactttagtatcagttctatcaacccctttaaattatctgtagaagtaccataatccccaaattatccaaatcctgttttacaagttataagtaaaatgtatagaatgaataaataaatgtatataaatgctattgaattaatttaaaagcactatttatagattttcatatattttcttaaatactaaaagaataattgtatgtcagataattgtgtaaattataacagtaaaagtagacttcatacttgaacaaattggaaatatacattgtaaaattgcttattttcctacctataaactgttaatcttctacacatgattgaatagcagataaagtaaaaagtgactcaggcagtttgatgtagtataaaaatactaatctggtgtcagtgaggcctgggtctagtttaaatcaactaatctttgtggagctacctatttggggctaagtacagtgaggaatactacagtggtattgtcatcaataccattgtatttgtacaatgtactcaacgttgtactcatcttgaaagaggtagttgagctatattctgaaacatgggtaggatttgaacaatcagaggccttgaagaagaatcagtatgatatagaaataggcatagagtggggtagaacgtggtttttggtgaagaaattctttttggctggagcaggaaatatataatagccaataagactggaaaataaaatgctggggtcagcttctggcagtgtaggagcttggatcaagctatagtaagctgtggaagatttgtgaataatgatactggagtcatgtttccttcttttttttttttttttttttttgatagagtctcaattctgtcacccaggctggagtacagcgatgctatctctgctcactgcaacctccgcctcctaggttcaagcggtcctcctgcctcagcctctcgagtagctgggattacaggtgtgtggcaccacacccagctaatttttgtatttttagtaaagacgggatttcaccatgttggccaggctgttctcgaactgctgacctcaggtgatccacccacctcggcctcccaaagtgctgggattacaggcgggagcaactgc

SEQ ID NO: 122106 - DNA, 1206 bp, Homo sapiens
aaaatgaggaatcaaaatctagggtggaaagccatttataaagcaatgactggaataggaagtataaaaagatagtagcagaatctggcaattttgtgtgtggacataatggtagatatttagaattctaaaggcctgttaaagggatatagcagtatttgtgacagttattttgaaaattgcagattgcaaaagagttcaaagagttttacttcccacaaagtggcagacagggtaatgtggaacaaccctctacagagaatacctagaaaaactgcaaaatacaaaatttgtttgactatatcagagaagttatcaaagcagtgaagatttttggggccaagatgtggaagcagaaattaacccagaaaatgtgatcctggcatttgggctactttttcctagaagtgaattgtccattccagaagaggaggctggatggaaaagaggaggatgagaagatgagcagagcttctgacagattcagaggactaagatgacaaaaatgactaaaatggacaaaagaagaaatagaaaatctgaatatttgactattaaaggaatttaatctgtaattaaaaaccttaagtacaaagaaatctatatgctatgatggctttaatggagaatgtcataatgtcatttaaaaaggtatgagagtactattgtagattaaaagaggttaaaggcatataataatcaaaatgtaatgtatgatccttgattgactcttgaatcagaaaaaaattacgtatttttggggccgttggagaaatctgaatatgggctggacatcattaggtaatattagatctcaggtgtgataatgttgtggctatgtaagaggatatcctaaatctcaggagaagcatactgcagtatatatagtggtatctcatgaagattaaaatgtactgtcaaatgtgtcagcaaaagaaatacacatgatgtgtgtgtgtgatcaagtgtttataatgagtggattaataaatatgagaagatagggtgatttgttgtaaagtaataaaggtttaaaaattacatgattcagtagagaaaaagcattttatgaatatctaacattacttatgataaaaaatctcagcaaactaggaatagaaggggattttgttaatctgataagctgtagctataaaaaacttggagaaaacatacttaatgctacaaagttagaagcttccctga

SEQ ID NO: 122107 - DNA, 1100 bp, Homo sapiens
tagtttcactcaaagattgataccgggaaggagttttgtaacaggtttgtgatagatttttttttctctaatgatacaaaatttggttagatacaaaacagttaaccttcttttcaatagtagctgttttacattgttcacagcagttaaaacaagagtatattaatattgctatcttaaacctgaattatttcctctcttcacctccccaaggccctttgcaagttactctgtattagagatataacagaagattttaaaatttaaaagtgtgtaagtactacaagcttatcccatcttattaattcctataaacttttaaacatttttttcttccctgaggaaggaaagtggtataatgatgagcttcattttaatataactttttatgtcagaagctgttcaacatatacaaaagtaaagagacaaataagataaaccttaatatgcttacgactccattgtaacaacttaattcattttatggccaatcttatttcatctctacctttgcccattctcctccccctaaactcagattgactagtcacatttgaaattaaaaaatggaggcagggaagtaatggtgaattatgtattttcatcattctaaccaatagcaaaattactgctttctacctgacccactactttttcatttggtttgaaagcttcatgagttttctctatggatcaaagccagaggtctgaaataaaatttttattgtgttctgtggtcagttcttgagagtggaaagatttgtagtctcaaatatacaaaagcctcagaagaacccaaacctgccaacaccttgatcttgaacttgtagctccagaactgtgagaaaataaatttctcttgtttaagccacctaatagaaaagagtgtgtatagaaaagaatcttccaaatgcctcacctggtctaggatcatggttaagaaagtaatgctgacttgaatatatttgaacctgtcatgggagtctaattttccataaatgcgtttcattaaaaagcatgacataaagctcttatttatatacactatagtctaagctatattaaaaacaagcagttagaaaaatggcaagatgtgtgat

SEQ ID NO: 122108 - DNA, 1046 bp, Homo sapiens
ctcttgggctctatatttgggagaagccttcatcattggaaggagttacatcttggcctgctcagaaaaaaggaagtagtttcaatgttagtgcagcaaaaatgcctaaaggtgactgtgctagtctgttctcatgctgctaataaagacatacctaagactgggtaatttataaaggaaagcggtttaattgactcacagttccacatggctagggaggcctcacaatcatggcggaagttgaaggaggagcaaagctactggcagcaggcacgagaatgtgtgcaggggaactgccctttatgaaatcatcagatctcatgagacttattcactatcatgagaattgcatgggaaaaacatgccaccatgattcaatcacctcccaccaggtccctcccacaacatgtggggattaggggagctacaattcaagatgagatttggttggggacacagccaaaccatatcagtgacttacatgtatgtaagaaggtgaagttccatgtggcttgtgggcatcattcccatcttctaatggagcctatacaacctcagcacaaatgttttcagtcccatttgaataagatagagattctagaaattctaggtgttgctgctctgtgccctcctaaacatgcctcctctagtcaatcagatttgtctttaacacatttaggctgcctttaagttctgcattttctactttgcctgcacacagatataatcacagtggaatcctaaatcttaatcactccacctccccctaaaaggatgtgggcgtagaattacttaaatattgccgtatgttagcctttgagaggcttttgcaagttatgagaacccaaccagttgctaataacctactattgcttctggcaatagtaggatctgatctagaaaaggcacggaaaatgtggtcagaaagattgggattctaggagaaattccaccacttacaaagtgtgtaaccttagtcaagttactcaacatttgaatgtcacttttcttatttgagaaataaagtccttgcatgtagaaaacat

SEQ ID NO: 122109 - DNA, 1013 bp, Homo sapiens
aacagacttaaataaacgctagtatagtttctgtcagctcagggcagtgttcctaggatgacaacttcagcccctgaaaatccctgcctgagaaagcttgatgctacaaaagaatttatgctttgttccagccaaaacctgactatagttctctgactacccttttcttggaagctttacttttttttttatgtgcaaatgtgcaaatgtaaatctgttctctgtcccttttagaagtatcttctacaactcagcaatgtccttctcaagaacttgggagccatccttttgaaaagtactcagcaagaaagataagtcccttatctcctagtttccttggttggataggagtctaactttaaaagttagcaaatgtagatgacctaatgacattaatcaacctctctccccttcccactcttaatgtgctcatggactctacttttagcacactctgcatttaaaaagtctctttcattttgtttccatggaattgaattcagtttatacaaaaatctgtctctgctattctgaagtctgaataaaatctgtcttaccatttttaatgtgtctagtgaataatctttcacaatggcagcaccattctttcagccactggaccaaaacccctggaatcatctttgattcctctctatctcagcattacatagattcaccagaaaatcctgtcagttttaccactcttgatcattctttactttcttgggctaagccacctttcactattatctggactactgggctagcctctcagtctttctccttgcacaatgcctccctcagtgggttaagaaaataatagccagagtgattctaataagacatagtcacactatgtctctattttgcttaaagcccactggtgacttcccatcttattacaagtgaaattgaaagcccttagactgaaatagaaagtcctgtaatacctgcccctctcttacccacaataattatcttgctgatttcatctgcttgcctctgttacagct

SEQ ID NO: 122110 - DNA, 1071 bp, Homo sapiens
ctatctggtatagtgtcaacaggtttgcctacttcttttgttgttttaaaaatggtgttaatggggaaaatattgaattaaaataccttgaaacaatgacttgccttctagtacccacagccctcaatatgcagaagattcacaaatttcttttattagtttcagaaatcatttcaatttggtctcttctttagtataattttactatatagttttaagtaaatctaccattttaccaaatatttttaaatgctcacaaatagttcaggcatagagaaagtaaataaccttatcttaatacacttttttcaatgtcttgggtttctaactgtatgttctggctgtgttttatgagtcaactttcatttagaacttggcatagctatgttactgaaagttctttaataataagaatattcttagttataagaattatattacactacatattatattttatattacattatattcttagtaataagaatataaatactaacagaagataccactatggaactactataatggccaaaatccaaaacactgacaacactaaatgctggcaaggatatggagcaacaggaattctcattcaatgctgggaatgcaaaatggtacagccattttggaagaaaatgtggaagtttcttacaaaactaaacatattcttactacacaacccagaaatcttactttctggtatttattcaaaggtgttgaaaacttattttcatgtaaaaatgtggtgtttatagaaactttattcataattgccaaaacttagaaataaccaagatgcccttttgtaggtaaatggataaataaatggtggtatatccagacaatgtaatattattcagtgctaaaaatacacgagctatcaagccatggaggaatcttaagtgcccattactaaatgaaagaagccaatctgaaaagccaacatacagtatgattccaattatatgacatttctgaagaagcaaaacttgagagagaagaaagatcagtggttgtcacagcttgaaaaaataaaggaataaataggccatgcctagaagattttta

SEQ ID NO: 122111 - DNA, 1040 bp, Homo sapiens
tcagtaccttgggaatgagaattccaaacattaattataccgtaaaaatagaacacgctgttcctattcatttctgaaaatataaaatagcaacttaaaaatcacattttaatatgtttgtgcgtgtgctgtttttcatttcggttttattgggaacataatgatagaaatattttcccttaatctgggaattgctactctctttagcccatctacgagtttatacaagagtgctgtgatatttttagttctcttcccctcctaccactattgatgtatagtggggtatggatctggttcaaacttggctaaacaaagcttttttctctctcttttttttaactttggacactggaagcacacacaccagtaagttcctcttattttgtattgagaattgcaaaaattgaaacacgcaggatgttgacaacaatattttttggttgatagagtaatacactttgtaaccataaaatatagccaacatacaggcaggaaaaagcatagatggttagctggggtttgggttgagatggggggcgtgaaagagagagattatgagaaacaaaccttgtattggaaatccattgaatcttggctctccacatgactttatcattcctagtattaaatgagacaacttagtatcatcccacgtttctcattttgcccaaggtatttagaccttaatttcttgtatctttaataaccaagagctctaattaatactgatgatttttgtagctttttggattttctttataatcattatcactttgaattttaagtgattttaaacttgatgattttaagtttgattgcagcataattaacatgagaatgtttcttctcttctcgttatttttctcattcttcctctttgccactcagtaacccagttatttgtgataggaaataagaattatttagagacaggaagaaggtaggagatttgaccagtgtcattggttaaatccacctaatgacaacctaacaatggagacatgtgaggagcatacaaagatactcttggctgaagt

SEQ ID NO: 122112 - DNA, 1085 bp, Homo sapiens
atttcagaaaggtaaactccaaagattaaaaaaggcaaattttcatattattggaagtaatggttcattgtaattgtagctgtctgccagagtagcactgcatctcaggggtcgaaaagatgagctccatattcaaccctatagccatgagaaaaccccacgagagccacaggcatcttcaaattcccaggaggctgttttccttgtcacttcagctaaggagtcctatatccatgtgagttcatttttccatttgaagtctttacagctgtttctctttctctctccttagacgctaaaagatggagtgctttatggagaaccctactggcaatgtgctaagtaagccctgaggaaggaatttctaggaaggagaaatgaggtaggtcttacaaagacaagagtgctggttgtctttgtcccatgttagcaaagcctcagaacccatgagtgctgctgatgggctgcagtacctgcactgtagttgtgtaagtatagggagggtgggaggaagttttctgtccagttcggggtccatcacagaatgatggcttccaggtgcctctgcactgttaagtgatatactccaattatgtctgcactgcagacagcaaggtagggggtcaggtgagacttatcactattcccaaacagacaaaccacaatagcaacaacaacaaaatcacactcacaatttgttgaagaagtttacatagcagaaattaaaatatgaaacaatctctaacctccattctattctcgaaagggtaaaaattacctttcaaagggctaagtaacttctcctttaaatgaatcataaaactttcttatgttctttgaaaattctctatttaacccatctgtgaccttctcagaggagacatagcacagaatacatgttattttacctggaacctcacagcaaaggacattatctaaagcaaaagctgaagacatgatgaagcacctaaataaacctttaaatgtgtgcccattcactcatggctcctctaatattgcaaaatttttgaagtatttttctcaccgagttttaataattccatctcaaaagacgttttacatta

SEQ ID NO: 122113 - DNA, 1049 bp, Homo sapiens
tagaatgattttagaagtctatgaaagagaagaaagtaacaaattatcttgaagagtgggagattaattgacatgggaaatatgagtgccagacctcatactgatcatgaatctaagattagacaatcagtatgtatctgtgtttgttttgtttttcagccatgttcagttacaagaatgtatgcctgccataggagaaaatttgattttaaccgaggttgtgttttagtcaagagaagagcttgaagcaagggaagtgggaatataatcaaagaagtaaatgtagtactaaattatgaaatttatgattaataataggaaagagagaaagtaatgtctaaagtcataagatcagtgaattttgcatttacttggtcagaggtttattggatttgggctaggagagggaaggaactggaaagacagaacagggtggtcagaagaacgggatgcttcactgtgagattttagaggggatatagttatttttaatgacaaggtctagaacatggcatgaaagtgagcagctgatgacaggattgcagaagcagagaagtttaaggaacaagaggctaggggattggaataagaatctacattgattttgaaatctccaaaaataaagatctagcctgtgttagagttgtgctaagtcatgaaccaaaatcattaagaaacgaagacaagtgactaaaatgggaaaggaggcaggtcaggataagtagatgacttatgacaaggcaggatagtaataacgtttcatgacaagagcatcatgcagctggcttttagagataagacagggagaattactggaagttggaaagaggaacaagaaaaagaccttcccatctccaagcccaaaggtccaagagatgcagcaaagaacatacaccacttagaagtgatgcaaagaagccaggcgtggtggctcacgcctgtaatcccagcactttgggaggctgaggcgggtggattatgaagtcaggagttcaagaccagcctggccgagatgatgaaaccccgtctctactaaaaatacaagaaaa

SEQ ID NO: 122114 - DNA, 1003 bp, Homo sapiens
ctttgtaatgctttttatttctgtaagattgatagtgatctttctttttttcctgattttggtaatttgagtctttttctttgtcagtctacacaaaattacagtagtaatttatctataggacttttatgtgtagagtttgctttaatacaggaattaaacaaaaattcctgaaggcatttcttctcatttcttggtcttcccaggatgtaacctccccgttttctctctaccatgctcataaggattgcttactccttccttttatcccccagttatgccatcctcttctttgtccttcaggacacaattttgatctcatattccaacatctaatcaaatcaaggggtccagtgaagtacatttcaatgtctgtgtgtgtttctttggtgtctttgcccaatctcgtgtagcactactgactccagcctttttattttaaattatcacaattcagaaattcactttacttcatagacgtattctaagtttcatgcttgggaagtctattttgttcatgccatttgaattcaaagtttaacaacaaacttgctgcatcatatttagacacccaggattttgtttctggaaggattttagagattatccaggattaagcagcagccactcagtaccagtcagttgttgccagatgggaatgagaacctactgtggctggatcttctcattaaaacaaacaaacaaacataaatctggatattcgtgggaaacctccaaatttttaaatgaaagcaatgaattaaaaactcttaaaactgtgctaacgtcaaggaccctgttcttttagtttatttgtatcctgttttgtcctcagcacgcaatggattggtaatgttcttgaagagtttagtttaaggaattctaggagattataggtcttgctgtatcttaagaatgacataaacaaaaaaaagttattatcttccgccctttaatataaatataggctatttggaaccagatgggtattaagaagctatgt

SEQ ID NO: 122115 - DNA, 1028 bp, Homo sapiens
cataattaattttatccaagattgtattaaggcaaaatctgattctacattccacctctgctatgtaactgtcttgttaaaagggtgttttctcctaatttctgatatattatatgaggtcatccagctggtgtgttcttttgcatgtaaactgccatttatattttagaaaactattgtatagaatggatttagattgtctataaagccacaaatacgtattttgccacagtgtattctatattgcaatgatttttttagcattttaatattttaatatatattgtaaaatttagactgatgatactaacagttgatgaaatgacatataatttatatatgaaagcttacgctatattgtatgaattatttgcatctttcagtggccagttttccatatgtatatattatggtctcaatgtttttcttacgcctcattttaatttataatgaaggtaaaattaaaatgtattttaccacgtttcttttcattacttttatctgtgagctctgacacatctgaaaaagtaatctgatgtgcaaattataatttaaatatgttaatttttttgcttcttaaatttgcttttcatcattaaaatgtcaagttcaagtgatatgtgcctaatatcacttggatgttggtgggtttttgaatttttgggtggttaatcagttttattttgaaaagacgtacttgaatagttacagcatatgtttgaacaggaagtaggaacatgcatacacgaagaaatgctaacggaaggatttgttatgtttaggatcttcccttggaaactaaaaatagaatattaatgacattactgtttgtagaatgacatatgcagattttctcataagcagtcattgtgtttgccagtaatgtttgagagacatgtaagttgaaagttttgctaaattataaagctcctttaattcgttggttttgattctcttattctcttgtcttttctaaatgttaacaaaatatatcttaacagattacatgaaatttaggaattatttaa

SEQ ID NO: 122116 - DNA, 1044 bp, Homo sapiens
gactgtttaggctatttgaggttcaactttttttttcagtgacctaaactatgctttatgttataaatcatatttttaagaaagtattttaaattttattcagatgtttgcaagtatgtatttagtaacctatacattaaacgttcctttgtcatttttctaatttatccaaaaagcactacagcacctcattttaaaagcaatagaattttttttttgtatcagtttaatcatgatatgatacacgggcaaactttagaagaaatattaattttctttttgatgtgtatagaacttgagaagttgtaattacatcctctacagccatgtacccaagattaaattttctactgatgtgttatgcattatatgttagccttcctgtggcctcattatgttagatgatgtttgaaaaatatatttgatattctgaatatcaaatcaaagaggaacataaagaatttttcagtttttccactataaaaaacaaaacaaatctttagggcctagatatttttcacaaacaaggaaatcatttggattacatgtcagagcatttattgcttgaattagtcaatcgaatattaatctattcaacaaacatttaatgaatgtctactccaggcattttgctagccccagggatatagatgtaaatatgacttgtttgggccctcaaatcagccccacttcaatagagagccacatgaaagcaaataattgtaaatgtagcatactaaatgcaatattgaggtatgtgctgtggccagttgcaagcatagtatagcttatggaaatgtggaggggtgtctccatggaagcttgctaactaatcacaaagcaacttacagtaatgaattggagttttgtagactaaaaagtgtcgtgttgtcattgtcctagagttggatatattcctaccctaacttagaacttgaaatttatctgtcacaaatatctttctttcatgattacaatgtattaagatataaactcttagttccagggtcccacatggtgggtttgctaatatcatgggtggaa

SEQ ID NO: 122117 - DNA, 1028 bp, Homo sapiens
atatgtaagccattcggggtttgaaggagaaaaaaatgacctaccttttttttttccaaacacctctagttaagttagcctttttttttttttttcaatttttgtgtgtgtatttttatgctaagaatacatttcagtgtgagtatacttaagataattggcatttttgaagtttataataacttcctgaatagttatttcaaagaaagattacattgtaacaatgtgaaagaaacacagaattaatttaacagactttcaaattcaggaatccatttaaaatatgctgtgtgtaggattgtattatattttgcagtttttcagaatatctgtagagggcagtattttaccattaaatagataagggaaggcaaaaccagactataactgctgtatgtttgcattttttaggtattcctgtaaattaccaagatgtggcatccattgatccagaatatgcgaaaaatttgcaatggattttagataatgatataagtgatctgggtctagaactaactttttctgttgagactgatgtgtttggagcaatggaagaggtgcctttgaaacctgggggtgggagtattcttgtgacacaaaataataaagtgagtatttcagtttttaccttaaccattgtttgtaacttggccctgatagtttgctagttactctaaattcttctggcacttgtagaaaaacttttactattacagtatcatagcagataaaacgtttaagttaataaaacaatcaaatgttaaattttgaattagaaaggattattttgataattgtgctagctgtgctgagttggttcctaaaaaatcgagagcacttcagctgatagtataaattgggcatatgcattttgagaaatttgattagaaatataagcttaaatgaagatatttgcaaaaattgctctttcatgtttttaaagtgtaatattaaagaattctaatagagaaaagaaatgccagtgtttaagctttccacatacttttgggatccagtaagtttgttcg

SEQ ID NO: 122118 - DNA, 1225 bp, Homo sapiens
aggttattcccataggcttgcaaatttataccttatatctaaataaactagtcagcaggttaacctggtgtcagcaccgagaaatcaaagaccagtgaaacacagagtgaattattgtcaaaatgactaaagatttcactttccaatacatttctaccttttgtttttctttgatgctatttcattaggtttatccgttgtttcttttagcccaggcatttacaatagtagtatatagcatgagctcattatgtgtttgttgaatggatgagtaaatttgtaatatgaattagtgaccatcacagaaaaataggaaaaataggaaaagaaagttatttaaagttgaggttttggcattaggttttaacttttaactagtagtattttttttttgagactttttttttacggtggtgaaatacacatataaatttaccatttatattattgaaagtgtacaattcagtggcatttaagtacattcacagtgttgtgcaaccatcggccactatctattttcagagctttttcatcaccccaagcagaaattctgtacccgttaagcaatatctcccatatcccctttcctcagccttaggtaactactaatctactttacctatctataaatttgcctattctagatattttataaaagtggattcatattccattgcactggattttcatagtaattggtaacttattgcccttgccatttttactttcacctcagaggtaattgtttaaacttaattgtttgccattagaaagacttggttaccttgtggactgaggtgattttctaatcattgttaacaggcatcaagttcattgactaggcctgtcacttaagagcagttgtacatttacagtttttagttattctcatagtgttctactcctgaagcagcaaaaactagcaaatacttactgcactggcacatacagatgaatgggataatgtctgtcctagcgaacagcctattgccatactgcctaggaaactgtgtatatgtgcgtgtgtgtgtgtgtatgtgtatgtgtatatgatcctctgctgtattatttccagagtgtctctgatgatcttccaactaatttcagtcaaaagtactctaaaattttctctctgccatagattactgtgacaaatatgtatgaataaatgattatcatctatacttccaattctacttaccacttgttatattttccacaaaga

SEQ ID NO: 122119 - DNA, 1084 bp, Homo sapiens
agttttaaaatatattggttaggaaaacccaagtctagaaatcatgatataaaatttcaactcttaatctatttatgtatactaactttattttcagtcattttgagagatcaagacctggctactataaagctcttattgaaccatataaaacagataattaactctccttgttgaaatggtgcttgtgccctatagagtcgtaatttgctgttgtagactaaatggaattagttatcacctcatttgtgtgaggcatatttgagagctctctaacttaataaagacatattccaagtgaaggtgggatttcagttttcaaatgctttgcacagtcgcttgtttttcctaaaaatcttttctctccccaaatgtttacattcttttatcaggagagaatgcttcattaattgtagcttctgattgcttccaaccaaactagcagcaaatccctatttgatcagaaggatgattttaggggaggcaagtgggagtaggctgcagtagagctaggcagctgcaggcattcatccctgtgatgggtttcgtggatacactttgagtatttgaaattatgtaggaacatggaactgcctgctttaactctgtaacctttaattctttgctctgaggtgaatttggtgtctttgtgaatgacgagttcagtgaagtcatgagtttaattatttaggcctaatctttgaagctagatctagcattatattttagacttatttcttctctttatatcctttattctaagtctacttagcttaatatctgaaaaacagatttggtgtggaatcattagttgaggtacttccttaatgttacagatttatagcagagcaaatgttgaagtacatagacccataaagttttttgtttttttttttctttgagacagagtctcgctctgtcacccaggctagagggcagtggcgcaatcttggatcactgcagccttgacctcccgggctcaagggaccctccacctcagcctcccgagtagctggtatggctgaggtgggaggatcacttgagctgggagaccagccatggcgcctggctagtttttgtattt

SEQ ID NO: 122120 - DNA, 1057 bp, Homo sapiens
ttgtctcaaaatgacaacaacaactacaacaataaaccaaaataaataaataagattaggtgtaagagattattttcatgaaaaattaaatggaacacgcaacgtaatttttctgggtgtgaaaattcattgtaataaggcttggatttaaaagaattgagaataaatatattcaattacatgtctgatattaagttctgagacataaccaaatttatcaagtcttttgtgttgaaaatgtaggaatttaaaaaaatacatttctctaggtagtcaaactatttcagctaagttctgtctttttgtaaatagttattgaaatgttcaaacattatccagtaactccttattgtaaataaagatctaagaatgattatttgtagaaaaggcatttagcaagctagtaaatctgataattagatgactgatacactgctaacatattttactcttattttttgagctagccttttaaagatcgctgtgaatggttctatgaacatttgcattcaggacagccagattcagatatggtgcacaggccagtgaatgaaaatgatatcctgctggttcacagaggtatgcttaacaaagaaactgatatatgtgtgaagcacaaagtgctttttattataaattttaatatgtaaaattaaccaatgctacatatttagattctatttttaggagtagctgtgaagttgtgtcaaaagcaaattgtgcaaagctaaagcaagggattgctgtacggttccatggagaagaaggcatggtgggtataaaagaagatgatgtagaaatcactgtatgtaaagaaagattgaaatgccttttgaataaagtttaatatttagttgataaaggaagaaactttatatttaaattttgttatttagaaaaaaatttcccaatataacatatttctgttgatgcttaattttatttcttgaattcagggtcaaggtgttgtgcgtgagtggtttgatattctgtccaatgagatagtcaatcctgattatgcattgtttacccagtcagctgatggtaagttgtacag

SEQ ID NO: 122121 - DNA, 1037 bp, Homo sapiens
ttaagagatgtttatctagtgccttgggaaatttggagcatttgaaggagaagatcatttttatttttgaagcacagtgaacatggggaagacaatttaggcttcctgagtcttgctgtgttctttttttgtgaatagtaagctgtgactattaatggtttcatagacttacaatttggaaattttggtaaccaagaaagattgtgaaacttttaacttcaagatcttatcttgtgggttgtggcatttgacattaggttaagaatagtcagactaacaggatatcaatgtactatgaatgaacattaagttaataatacttttctgccaaattcattcctcatttcagcacttcttgaaattttaaaaaatcgttcagtaagctcgagattgtatattttgaaatatgacttaaaatgcttataaatcatgtatgattggcatatcattgttactatatgtagaatataattcttcagtaaggatcactcaataataatgaatgaagcagtattttcacagtaccaagaaacctgctaatattttcagtagtaattaactcattgttcggtaacaaatggtatgtatggtgtttcttatttaatgtattttattatttatgaatatagaaagtatcagatatagtatgcaatggtttatttttaattttaaaatttatttgaatcctttttgttggtggctgctaccatagttagaaattaaagttattttcatagtattcttttttgtgattgaagaatgaattttctgaatagatcttcaaagagaaaacttcctaggtaaactcacctcaaggttgggatttagttttaatgtatgtatgattgaagaaataaaaggtaagaaaagagagaaaagtaaagaaaggtccaatgtggtttattacttatcttattttttttctcattcttctaattatttgctgtgttcctttattaaaaactctggcttttcgacatctttgttgtcacttttacacatatccatttttttctttggtgttatttctgcaccac

SEQ ID NO: 122122 - DNA, 1045 bp, Homo sapiens
atatacttctgaaagtaaaaatttaggagttgccttgaagttgttgccacaagaaaccaactattctaaaggagtgattttcttcatgttttatgctttgatcattggttatattctgggtgcttaagaaatagtaatttatttatatgcaagttaaataatgtaacttcctgttaaactgttctatctcctatcatgataggaaaggaattgtactccagttacattataatatgaaacagatggtcagtgggatgaaaatgttttaaaataagtattttaatatgtaatttgttttactctaatctcatattttaatttttattttcagcctctctagcaattatgatgctcaaatgaagagccttttaaggattgtgagaatgttttgtcacgtctttcgaattggtccatcctcccccagtaatggaattgatatgggctacaatgggaataaaactccaagaagccaggtgttcaaggtgagaaaagtatatggcattgttaggaagatagacgtaaaagagatgaatttgacaaagcatgcattcattaatcagaaagctcatgaacaggttgtaagtttggtttatacccatatcactttcaaaattaggcacacctttctcctctcaactctgtctaatcaacagcaagttggtgagctttctgtatttttcttacaaataaaattttttattccattggtgttttattctaagggtagagatatttagtgtttaaaattaattttattaaattataggtttttaatgtaatatgcagccaccatgcttttgaaagaaatgtatttcttattagtaaggaaataaaatgcacagtttttatttagattttaatatgatatgtgtgttagatgtgtgtctgtatgtgttttcaaagtaaggtactttcatttactgggtttgctgacagttaattcctgagataactgcaaggaagagttgttgagatattttcttaaaatattttgtattgcttcagctgcctttctaagcacatatggatgaagtccttggaagat

SEQ ID NO: 122123 - DNA, 1039 bp, Homo sapiens
tccctaaataaattaagctcaagttagttgcttttcacttggcctctatttttaggcgtgttaaagaatggaacagtgtaaatgaaacattaaccactgttagctattgtttataacatcttgaccaacactttgagcttaatgacaagtgatgcttgatgaggacttcttgcttgatgccggtaaagctgattattgttgctttcaaagggattgctaatttattttttgatttttctagaataaattagatattattcttaagttagggcttattggtattaaggaagataatcagtataataataaagtatcaagagagtgatagacctataataacgttgcagagttttctggcactagattcgtagtaggatactattaagttttttttaaaaaaactttaattccaattggttttaaattattcttcatacagtgccgttttgtgaaagagaatgaatagtgttttgttttttaagtttctgagaaatctgtgtagtgtttttctttgtgaaatgacatgcctctttaggtaatgttattgtggaaagagtataggtctagaagcccaggtacctgagttctagtttcacctgtgcttagattacttgcttttctcatctacagagttctttttggattcatgctcttccaaactgtacaacttatttgggcatttcttttcttctcttttctttctttctttcttttttttttttttcgagacggggttttgctcttgttacccaggctggagtgcagtggggcattcttggctcactgcaacttctgcctcccgggttcaagtgattctcctgccttagcctcccaagtagctgggattacaggcaccggctaccatgcccagctaattttgtatttttaatagagacagggtttcaccatgttggccaggctggtctggaactcctgacctcaggtgatccacctaccccggcctctcaaagtgctgggattacaggtgtgagccaccatgcctggccctgggcatttcttaagaatcagctgttaacat

SEQ ID NO: 122124 - DNA, 1369 bp, Homo sapiens
gagaccaattcagatcatctatttaacaaccctgtattagaattcaggggcttctgggtttctagacttccagatctttctgattccagccattttcttgcattatatttatgatttggttgcttggctagaaaaccagttctttccatagtgtcctgaatttatgaataatatcatcatttgattccctgtaatcatgttgtatcttgaagggttatctttagatcagaccttttttgaacctccagatttgaatgtccatctgcctgtttaacatcatcacttagaagtaccacagaatctcacatattaacatgtcaaaatacagcttcagattttcttcctcaaacctttcccccagtttttcctcatcttaatcaatagaaaccttattgtctcagttgtttaaattagaaataattaggttattttttatttctctctctctctctttgtgaacttggaatttattagtaagttctgtaaattctaccttcagaatatgttcggaatctgaacttctaactcaaccaaaaccaccttaatgttgttaccttttgcctagagtactgcagtaatctcttcactggtctccctgattcctatgttgtttccctccaatctcttctttcctcagcaaagtgatcttaaaaaaaaaaaaaaaaaagaatctgctcttgttactttgtgtttaagccttgtatataaaacttttcagtgcctcgttgttacattttaaatataattcaagttctaccttggcctgtgagacctccatgatttcactcctgtttagctcactgtacttgaaccacagtgattctctttgcgttccttaaatgcaaccaactctttcagcaggcttttctacatggtatttgttttgcctgaaatgttcttccttaggctttttacagggctatttcttattcatgttactgcttaattaagtaactttttaggaaggcagttcctgaccaatctaagcaggtcgttccccagatttttgatcgcagtatcacagtcatttccttcatagcacttcctattctgtagttgtttatttactttcttatagtctgtctcccctacatgcctaaaaattcagtgaaagcaagaatagtgtttattttaccactttatgtccaaagtgtagtacagtgttttgcacttagatgcatagtagatgtttttgaatgaatgcatcactatgaaaaatatcttataaaaaacaatgccatttataatagttaaaatagagacatgttagtgttgtgcagaactgggatatccctatggttagtctgagcttagggatatggcagaaggatttttaagaaatactttctcctagtactgtattcccatc

SEQ ID NO: 122125 - DNA, 1098 bp, Homo sapiens
gtcacgtgcccactcagttcctatgtaaagcttcaagttgtgggaagaacttcccttatatggattaaaattgtggtaattgtatcttttgtttgattcctctggctttacttttaattattttttccccctcagacagtgcagtgcttgctagacagtggtgctgatattaacaggccaaatgtatcaggagcaactccattgtactttgcttgcaggtatgatattttatatttccagatgctatatatgctcatatatatatatatatatatatatatgtataaataaagaaatatatatatttccagatgtatataatactctatttctagacacacacgtttctgtgtattttctaaagctctcttgttttcccacaaatatgctgtcttttaagaggaagtacaatctcttttttaagatgaagtgttatggttctattacttaactgtatgaggaaaagtattttctgttatatttaattgccattgcttttatgttacatgtggagcttttgatttgcttgattacttcaattttagactaagtacttattaacaaaagataaatcagtaatctggtaattcccatcgtttactgtgttatgtaaccaggtcatttccagtgggataagctgttggaatatatcttgatccagagccatgtcttttctttctctgtatctataaccaaaaaaaaatcttgagtcagtcttgttagatattgttatacattaagttatttttgtatttctttattggttcattttcttgacgtgtacattttgttcacttattcatgtattcggcaaatgtttagttaacgctcactgtgtcatgcattgttgtaggtgtgtaatacagtaataaataaactctattccctaaggagctatcagtataattatacacatgccgtcacacccacacccacacacatatgtaaaaatatatacacacctacatattatgtattatgtaaatgtagttatagaatactatagtaattcttctttttgatttaaattatatgaattgtaatatttatttaggccttcatattccgatatagagctctccagaaagctcctctctt

SEQ ID NO: 122126 - DNA, 1012 bp, Homo sapiens
tgtagaattcctgaacattttctttttaaacttctgttgaatttttatttattgcattgtatttttgatttctcatttcctaaatattttctacccaacatccttttatcattccatggtataatttcttttctgttcgaggttatcagttacttttctaatttttgttgttttctttggttccctttactgtctttgttattctgagtttcatttttcagttgtaatttttgtttttcaggttagaggcctgcttcagttgtatttttaatattgtctgttcattcatgtgtaatggtgaggcactcaaatgttggctggaagcgttgtgtacatgagttgagtttgttgactacttggtttgactgtacaccaatgtttcttggtctcaacactgttgatattttggatctgataattctttgttgtgggggctgtcatctgaattttaggatatttagctgcatccctgacctctacccactagctgccaatagcattttcccttccctggtcatgaaaataaaaaagttgcctcatgttcccaggggaaaatttaaccttggttggggatgactgctatagacccattgtcccgaattgggctgtttctttatttttaatttttgtttctttttagagatagggtcttgctttacagatagcgtcttgcatgcagcaccatgcatggctaattttaaaattttgttgtggaaatgggatctctctaaattgcctaggctggtcttgaactcctggccttaaatgatctttccaccttggttttccaaagtcttagaattacaggcatgagccaccatgtctggatgaactgagctgtttcactggggactttctaatgccaatatctgtaagattcttttctgatgcaagtcttgagaggaagcttttaattccttctacttgagatttttaagcctgcctgctggatttctgggagcctagttggaacatggaggctggaggttttcacttaatttgttgttttcac

SEQ ID NO: 122127 - DNA, 1060 bp, Homo sapiens
aatgatcagatgaaaggaatcataacaacttcttaataattttatttttatataacttttcttagatcaactgttaaactccattcttagctgtatcataccagaattctggtatgtctttggatactgatttcaaaaaatcatttcaaagtttggttattcaactggagatataattttactggtgatataattaaggaaaatgtgaacactttggaaggcatttaacagcaataatacctactgctattatgattgttattaatatgtgtgatgtgattctgtaaaagtacacagatcagtgtctagaccctttatttatttatgcttatacaagaagctgggcccagtgtgttgttttttaatttcagttttagcaagttgagtaaaacctaacactattctctgtaggtataatttattaacgctttttggaccataaattaaacctagtttttggtaactttttctttaagatttataaatgtgttgaattgccaaaaatgttaattacagtcttctcagaataacgtggatttagaaaccgtagagaactgtcaaatagttcagtctaaatttctgtaagttagattacatggcaggattagttagggactaatttgtaatttatttaaaaataaatttcacttttatcagaataaaccttattaagtttatgtaactaaatacaaagcttcacaaacaacataaaatgatagttgaacccttagtataatagactatattagacagaactgactgcatttttttactaaaatcatagacttgttaaggaacagtgctcaactatgttcagtcagctctcttggtatctttagccagcttccaagtttttcatccagttacggacagccatgtaaacttaattgaaaacattttccagacattaattagattcagccttgaggcacaaaggtaggtagactaacatttcagagtatattcctagggtcagagtaattgtatttattctaatgctagaattctcctttaatcatttctaagaagttgaaacaaatagtagaaagttctcttacca

SEQ ID NO: 122128 - DNA, 1009 bp, Homo sapiens
gctctgtcacccaggctggagtgcagtggcataatctcagcttactgcaacctctgcctcccaggtttaagtgatccttgtgcctcagcctcctaagtagctgggattacaggtgtgtgccaccacacccagctactttttgtatttttagtagagatggggttttgccatggtggccaggctgatcttgaattcctggtctcaagtgatctgcctgcctcagcctcccaaagtgctgggattacaggtgtgagccaccgtgcctggctattttctttcttactctaggtttctaaaatcatgcatttgttttatgacaatgctttcctgttattcctgtgtccagacatttggcttttgaaattgctatttctctctcattaagagactttactgccttatataaagatggagggcttaagattttagattgaatttctgctttgctgtaattttctaccttgtttatgtttttaagttttttctttttttaacatttaacattattggtaatagaatgtacaggtgtgtgccagtagtctcagctgtttgggaggctgaggtggagaggtcaagattaggtggagagatccctttgcccaggagttgtgggttgtagtgcactatgctgcttggatgtccacactaagtttggcatgaatatggtgacctctcaggatgccagatagcttaaggagaggtgaaccagaacaggtcagaaacagcaagtcacaacccccatgctggtctgtttgtgggatcatgctagtgaattaccactgcacctcgtctcttcaaaaaaaaaaaaaaaaagaatgtaatttattttcttgctgaccataataacaacaacaaaaccaactcaaagtcagtaccattaactacaaggatacaaagtttgtttatttttttggttacaaactttctgagtcttatctcttgttgggagaagggagaattcctagtggaatctggatttttatctcttcaaacactttttccttaacct

SEQ ID NO: 122129 - DNA, 1470 bp, Homo sapiens
ttagaaattaagataattgtagattcacatgcagtgctaagaaataatagagagagagagttgccctgcactttttgccgagtttcctccagtggtaacattttgcaaaactatactataatattacagtaaggacatggacattgatacaatctgtcttactgagatttcctcagttttattttattttatttttttgagacagagtctcgctctgttgcccaggctagagtgcagtagtgcaatctcagctcactgcaacctccgcctcctgggttcaagcaattctcctgcctcagtctcccgagtagctgggaccacaggtgtgcgtcaccatgcccagctaatttttgcatttttagtagagatggggtttcacgatgttggccaggctggtcttgagctcctgacctcaggtgatctacccgccttggccttccaaaatgctgggattacaggtgtgagccaccatgcctggccttcctcagttttaattgtatgtgtgtgtgtatgtttatgtattttaagttctattcatttttattacttgtgtaggttacctgtgtagttttattacctgtgtacatggtaggttttcaccaccatagtcaatattctgaacatttctaacaccacagagatatgtcatgttgcccttttataaccatacctttccctttgtccttcacatcccatggctaacctatagcaaccattaatttgttctccattagtcatttcaagaatgttacagagatagaactatattgtatggaacctttggggattggctttttttgtttgtcacattccttggagacttatctaggttatacttatcaatagtttgttcctttataatgctgaatagtattccatccagtagtggatataccaccatttgttggactgttcacctgttaaaagacatttggttcacttctggtttgaggctattatgagtaaagctgttaaaaacagcagggtacacattgggataaatgtccaggaatgcagttgttttccgtagtggctatactaattcacattcccaccaacaacatatgatagttcctgtttcttgacatccttgccagcatttcttattgcttgtcttttggatataagccattttaataggggtgagatgatacctcattgtagttttggtttgcatttctttgatgatcagtgatgttgagcacctttttatatacctgttttccagttgtatgtctacttttgagaagtgtctactcagatctttcattctttttttaatcaaaattttttttttttttttttttttttttactatggagttgtttgagttccttatatattctggttattaatcccttgtcagatggatagtttgcagttattttctcccattctatgggttgtttctttactttgttgattttttcctttcctgtgcaaaagtgttttaacttgaagtgatcctat

SEQ ID NO: 122130 - DNA, 1034 bp, Homo sapiens
gtagaagtcatagtagagttcttcccattttgttggtcagtctgcgttttggggccagctttttgttttgttccctcagctgtcatcagatggctgctatatttctcttggcttgctttagcatttttctctttgccattagtgctgtattggattgtcctcctttccaaaagaagccccattaagcttccacagagcacttgggtgactggtccctgtgtaatttgggttgccataagctccctataattggtgcaatatctgagcaggaatatagttgcttccttgtacagggggattcagcattgctcatgcttatatgagaatgttaaaaggagaggctttaaaattattgtgtgttcttaggttgtgttttggtcagttttgaaagaagagtttttctttattttttaggtgattatgagctcataaagggtagggcccatgtgttacataatattttagttctgttagcaaaatagctacttatttattgggttgatttgacttattcagaccctggaaaatagtaataatggttgttcaatagaaagataggatatatttctctcctacattccctgtaccttttgcaattcatttttggaaggggaagcattatagattactgcttttcttcaacaacccctaccataaacacttttttgggcctatttccctggctcattcctacctaatgatttattttgccattattggcttaggccagtggtccataataggcttctgaaaggttttagaaatccacccatataggtatagacacacgatcacacatttaaacaatgtatttattttaatgggactatctggtttgtggtctcatgattattgaatatttatttcttaaggttttcctaacagtgtgttagataaaggaactttgtaaatgttttatcttaaaagtttacccagagttggctgggtgtggtggcttaagcctgtaatcccagcactttgggaggccgaggtgggcagattatgaggttaggagatcgagaccatcctggcta

SEQ ID NO: 122131 - DNA, 1052 bp, Homo sapiens
ctaacatactaagagaatagtgcagtattttgtggtgggtgtgggacaaaacctgaagaatcagaagaatagctaggccgggtggggtggctcacgcctgtaatcccagcacttcgggaggccgaggcaggcagatcacgaggtcaagagattgagatcatcttggccaacttggtgaaaccccctctctactaaaaatacaaaaattagccgggtgtagtggcatgcgcctgtagtcctggctactcgggaggctgaggcaggagaattgcttgaaccagggaggtggaggttgcagtgagccaagatctcgccactgtactccagcctggtgacagagcaagactcttgtctcaacaaacaaacaaacaaacagagcagctaaagagttgttaacttgatttattatgtttttaaaaactttttttacacttgattcctcatttttattttggcataggtctgtttctgaactactatcaaattcaaaatttgatgtcaattatgcattcggacgtgtgaaaagaagcttgcttcacattgcagcaaagtaagactaaagatattttgagttaaactctgatctagggcaaggatcagtaagctttgaacagcattatcacacaatatttctggggagagatgagaacagacagctgagtagttctttatcctgtttgagcgcgtggtgtgctatccgttctgtctctaaactgttaactttgggattgtatgtaaatctcatgtccctcttgtctttgttttatatcagatgagagtaggttagacatggagattgtctttcctggatgtacttactggtacagttcaccaaaattttctttttatcccagcaatatgagattttatatgctgtctgcagatgaagtcattggctttatattttttacataggtggagaatgatttttatctacagtctcctggtatgtaatcaatcagttaactaattggtacctatcctcttttcaggatttaggtagatgtgttgaaattaatttttcatgaataatttggcttacgaaaggccag

SEQ ID NO: 122132 - DNA, 1018 bp, Homo sapiens
ctaatttcttttgtaataatattgacaagaagccagtattgtgtatatttaaggttttaaaattattttagcatatatatatttaatatccatatatatttaaaattcccccaaactacatgtaagtatgataaaacatgatgcctataaatacctctttggaagtaaaagaaatttcaattgttaaagctacagaaaggtttttggatgatgatgcgcgggctaccatactacacttagagaattgttttttggtggataatgggacaaaaccttctgaagaatcagtctttaattgtccttttacatccagaagctaagctcttttgtaatgatgtaaaagggataagcagtggaggggatgaaagattcttcactatcgtaaattctgaaatacctctggtattctgcattattctttcctccttcttcctctccttttcgctttttgtatagagttaggaaaattctaaactaatcttaagtatcaccccttgcacaaagtaggggataaatgaactctttgtttttttttactcagataatgaaactgctgtttatacattaatgccaatggttatggctgatcaacacaggtgagtgcttgttccaaaaatttttgctttttaagaagcatacattgttctaaatgtgtactgcatgcccgtgcacgcgcacgcgcgcacacacacacacacacacacacacacacagacagtttggacatagatgttctggggcaagttatttaacttttctgttataattttgtgtgtgtgaaataaggaataagattttccaagatctatatgagctgtaacattttatgatagattttcttaatgaatattgaaatactaagtatttggttggtcactcacatagaaaaatacattgtcatgatttcttttagaggtcactactgatctttatagtaaaagattatggctgagggacaacttatttcccttatgtgctacttatttttgtgttccttttattgatgtagtgttgacat

SEQ ID NO: 122133 - DNA, 1629 bp, Homo sapiens
taaaaaagttttatttgacttttccattttacaagtaggatcagctaatctttgctttacaatataaggtcataaaaatttaaggaattggatcgggttgtaatgcatattggtttttggtaactttataggtgcttctcaatagatctggaactaaatgattcaataattatattctcattaatccttgtcagactgtatggtgtcttactatgtatgttctctgctagacttcagaaacaataaaaagtttgttgtgaaattagtcaagatttaaatttaaaaatcgctaggttgtgaggcgaggtatgtcaatcttatactttgtaagggaagcaaatcgagatttaaaatagtagtgctcaaagttagtcttcagaataacttgtttttaagtttattgcacatataaatcccaaaatacggtgaatttaagtttggctttttttttccggtttactctgaagaaagagaagattaaatagatcttacctgcctaaaagtttgataatgcttggtatctgatctggtaacatgattagggttttgtgacacactgctgtcataatttacaaatcatgattaaaggaagaaaataagttattaaataaaacatgtatgaataacagtcttcaggtgtgagtgatgtctctttaaaaataattgaagcgctaggcacagctaccaaatttggggactgtattagcaagttcaggtcaggaaatgatctataaacatttatcttaatccaaagttgcattgatttaaaaaatgaaacatgggcatacagggatgaatcaatttagaagtaattaaattattgattatgaaagtggcgttacaaatttttggacaactaaagcgttttcttattaggtattttttaatagaatttaattttcttttaaaattctcagatactcagttttttttgtttaaatacttttgaacctgtaccttatttccttgacttttaaagggactgtattttctttacaaataactactgtttttgatgaaccacaaagtaaagtatttctagcttgccaagaagaacaatggaaattctttacattcaaatacttcaggttgatttatatgaataagtcttcgaatatatgaaatacagaatctcattgttttgagaaacttgcccaccatgtacttgtatacatgtacattattgtgttggatttctctgacacaatgatgctcgacaaagtcgctggccacagtgctgaatcaagacagccatattggtccctgctaaatctgactgaaaactgtacagtacacagaaattgtgtagggattcaagtagcatcatgactataggaaatatatgcatatatatttcataaattttttttttgcttttcacctagttgaattggaatcatcagaaattgtgatagagaaatgttatccctgaagtatattaatttactgtgtaacattgattttgaataatgtcagtaaaatcaataggatcaatgctagaggttttctctttctttgaaagctgccacttgcagatgatgacaagattttaaaaacccgtttaagcaactagttatttaactcaaaaactgtacagttttagttgacactactggtaagatagagtat

SEQ ID NO: 122134 - DNA, 1054 bp, Homo sapiens
ttaactaaaatattctagactgtataggttaaaaaatagacattttgtggatttaacattttagaaaaaatctgtaaattatgtgttatcttttgtattagtctgttataatctcctctgttagttaaaatcctattatttttatttgctattacatttattacatcagtaagtcacccagtgttgtaaggatgagtaacttgtaaagtgtctctttatctttattaaaatgttaattgaaaatatttagaatacacaaagttctcatttacttgttaatctctggtgatgatataaattttgaaccattaataatgttgtatattaaaacttaaaatgtatgtcaataaaatttccttgttattattgtaattaaaagaagtgttcagttttacctagaatcatttttgtttactgtatcaaaaagccactttaaagttttgtcttaaagttatggtgggccttcaaagtatatgtgattaccttttttaaggcaggaattttgccattattttgatctttttgatttgaaaccactatcgctttcttttacttttcttcaacgtgatctaacagtgactgggctgtgagctcgattacataaagttattatttcatatgttggaaaatacaaacacattagcaaaactaactgtgctgtggctcaactgtgttatagcttacatttaagctaaagaattgtgtttgccagctgctatctgtgccataatattgcctttaaacaattttgaaaatatgccagtcatcttaaattattactcatttgtttttattttccaaaataaattcttcttattacagtatttgaagagaatgatagaggtgtccatatcttatatgaaacaaataaaatttctatttgtaatatggttgagaaaattaaatttatctctgtgattcagcagtgccaaaaatactaccctctgatttaaggttgagtgtttcatatgatatattctaaattaaattatatactttataaatataagaaataatgcaactttgagattttttcctaatataaaattttctg

SEQ ID NO: 122135 - DNA, 1012 bp, Homo sapiens
ggcaatttttgagtgaattacaatatataattcataatagcagtcattttcctttacatttagttacaacagtggattttaacaatgaacaatatataatgtatttgtgaagaatattgttatatattttagtagaaagtgtgaaatctaagaatgtttgtgatggatactctttataagttaggcactcctatagcagtaaatcatatatttaaattaaaataattggaattattttgtatatatgtattttatatttgtaatatatgtattttatatttataagagattaattgcctatccaattattttttatgaaaagatggtttaacaaaacattttgcgtactttttttttttttttttataaaagccaacctaggaataatcaacctcggtacaggaattcgttgtcattggttcaaaaaatataatgaatacaaaataatgccagaattataataatgagctaaatatacacagtctctctaatcacagagcatagagttcagttgggagagagaacattttcatggactgttataataaaccacagtacactattacatggtagagacattgtattcagtatggaacagtatgaaaaagagctctaagtagagatctaaatgatgaatggagattattctcgtgtaggggcaaagaagtgtattttgggatttcataggtttaggtttttgttttctaagaaaacgtaatgaactctgttaaataaaatattttaacaaaatgtattaaatacaaggcctggcacggtggctcatgcctgtaatcccagcactttgggaggccgaggcgggtggatcacaaggtcaggagttcgaggccagcctggccaacatagtgaaaccccatctctactaaaaatagaaaaattagccaggcatggtcgcacatgcctgtaatcccagctactcgggaggccgaggcaggagaatcgcttaaacccaggaggcagaggttgcagtgagcctagattgcaccattgcact

SEQ ID NO: 122136 - DNA, 1035 bp, Homo sapiens
attatttagctaactttcttacattatttgattttggctttattaaacctatttgtgatagtttgtccaaattatttgcaaagtttttttttttttaacaaaccctatctattgtatttacacatctttaaaatatgttggcttgaattcttctctaaatataagcagataggattaagaataggctgtggactattagaatagaaaggcagaagctacagttgtgctgaaatatttatgtacaataattaaatatactcacacataagccagatgtgcaaaataaaacttgatacaggatcaatgtaaaggaaagctctgtttcattaagtgtctgtaatgaattttgttaaagttaggatctgtcattatcttgtgtcttttggttgtaaacacaggctaagtgaaggatttaatgtacagaggttcacgtgccttttgttcacattcttcctctattcttttcaaatctaactcggtgggattgtcatcctttgtaaaaagaaccttgggtcaacattcagtagaaccctgcacttggaaaagtctccatttccttttgagaagaaaattagattgcaacttaaataatttgcacagaatggttttacttattttttgtgagttgatatagtaggtctagtgtgtaaaacttagttaaggaaagacaactctgggtgtagcaggtgagtgcatgcatgttcacaccaatctgttttgcaaaccttaataactgacccaaggataaaaacaataatttagtagtcaccaggagttcctcttccaatcactatacttgattactgtgtggcctctttattgcaagttttattgtgttgtggcatctgccaatggatgtattagaaacatcaatatttactcatatttaaaaaatgagaactgtttgctttttaaaaaacattaacccatttaaaaatataagttaaaatgcatattagatatttaaaaatatacttaatgattaaatgtattaccattaatgtaatttttcattcacttgactgcaacagcccc

SEQ ID NO: 122137 - DNA, 1106 bp, Homo sapiens
ggttttaaaatagcgatattttatattttaaaggaaataaagtctttttagttaatctataatatttattatagtattcgataagggcagaaatactgttgccagcatcttgtaatcaatcgtttgaaccagtttgaaaggtaaagggggtaggcattttgaaactgggggtcagttgaggaaggacagtaggagcttcatccgttgttacattttcgtttattcaactcttctagccattggtagtggacttttaaaatgtcagggtacaagtcaatatgatatgaatttaccttttttctcccacttgtccttctttctccaccccaccccctgcccgcgccggctttttttctctcccacctctttctttgactctgctgccgcctatcctggcggctcctcttcacctcccctgcctggcgatcccctccccctcctgccctatgtcctccagctcttggggaacaatcgccactgattgaggttcactctatgttaggctggaaaactgggctgttatttaggaagtcattaatcacatctcctcccccggaaagagatggcagagaaacctgtgaagtacaattccttaccaaccccctctaaaattttccaaaatggtttacctaaacacaatttgactatatgaaggtgaaaacgatttttctagtaggattttattttaaatttgaaaaaatttcgggcataatcaggtaatttatgtgcctctgccttttcctaggtgtatgttttcattatctaaagtttcatggggatgtaattaggtttaattagatcttttataaattatatattttcctctaagaattgaattaaatatgaaattagcgttccaagcaggtttactgccatggaatagctgaattcttaaggggaaaaaaagcgttaacatcggttgttttatttaaacgaccccctcccatgattttagtcaggcttgtgtgtaaggcacgcgtgtgcacatatatgactgcctttttttctaaatctatgattcacaaggtccctccattgtgtttaagtagaagcacgaaatcagcattctgatttatcctaaagaagcgttccaaattgtctttaag

SEQ ID NO: 122138 - DNA, 1047 bp, Homo sapiens
gaaacgtggaagttggtgtgatcgatagaacagtgtggcttccccctcccccgctttccttttaacccttttcattttaagtattttctgtggagaaaagaaatcaaaccattaaaaaaaattttttttttctgttacccttcccccccaaccccaggcaggcaattttttttttttaatctttgaatgcacattgaatgggaatacagactgacttttttgtcctgttccttctcaggcggggctagcaaaggtggtggagaagagcccgggaagctgccggagccggcagaggaggaatcccaggttttgcgcggaactggccactgtaagtggttcaatgtgcgcatgggatttggattcatctccatgataaaccgagagggaagccccttggatattccagtcgatgtatttgtacaccaagtaagccaaacttttttgtccccctcttcatctttttccatgtggaggagctgatcggtagttatgccaatagacgtacgataagatgtccttcggtatattgaaagacaaaatcttccctgaaatcactaggtagtccaacgtttagggtacgtgtatgggccttttcctgggttttctgtctaaagagaaaagaaaatatttgaaatttcactatatatattaaggttgacgttattagcatttccccctgcttcattctacagcgaaatagtgttcttgttgtttccggtattacctatacaatatactttgtcgcctgtatctggtgaatgggtagaaaaatgaagaaacatgatcattttaaggttgaaaaaacaaagcgaaacagtttgctgtggaaagaaatgtatagattgccttattttagacacctctagtcacagtagctccctttattatttcatcgctgcctgtcctgtaatcattttgtagattcagatcaaaataatttgacttcatagtaaaataaaatagaacactgttggcctaatgtggttgtaaagaaatgcgtgcaatagagggatgcttgataaacattttagaaatgtgctccgtgta

SEQ ID NO: 122139 - DNA, 1040 bp, Homo sapiens
gataatctaagttaaaaagaattgaatgaaaggctgttaatactacagattgactgacagatacatgggtgaaatatttggtatatttgcttgaaaagtatatatttgatactgtgttgcatgttcctagtaatatttatacccccttccctaaggaatatcatcttcaaattaaatatataaacaatagaaacatatgaaaccattctgttttgatctgttgtcctgtggtgcttggtagcttcctgaccttgctgtgtggtgtgtgttttcctttcctgaaggcctggccatcattattggctgtttatatgtggaaggatcagcataatctgtgaattgaaacagggtttaagtacacaaatacaagtccacatacagactactggattttatgcttcctattttatagtgcaaaatgaagctacattttctgttttttcccctctaagactggatgacaaaaatcatagacaaatccattttctctcaggctctttcttccacctttgaaccttctttaggttgttaaattgttttttatgatctcataaatttgttttatagatgaatgaaaaaaataacccttctttgtctggtcacgcctttttataatttgattttctatgtttaccttctaaaatattcatcaaatgttaagatattttattaaccaatgttaatgtttagaacaacaagacatttgtgtttatactatttaatgattatatattgataaacattcctctattcactgaattaaaacatgtagctgctgaagttttttaaatatatagctgtttctatactataaacattgatttttaaatagttgacttaatattcagttacatacagtagtatatacatacagttcatgtatatattaaaaggacagtattaaatgatgcctagttaaagaggtttcttatattgtaatatacataaattgtatataaattgtatgaataattgttttgaagaaggcaggaatcctactgatgttagctaagcaactacaagtaacagatggttgtaaa

SEQ ID NO: 122140 - DNA, 1042 bp, Homo sapiens
gtttaagaaagtacattgcaggtcagtggggtacatttaaaaatgatcttttaatgagtagtttatcaaacaagtaatgaaagtaccatgttgcattttgatacatcaggatacatctaatcatttatctcaaattggaggacagtctgattattgcttcttcttttccaatatctaaatatttgacaatttggaaatattttctaaataagatttacaaataattgatagatttagtgttataattttttctataattttctgttacctggagtaatacctaacttttaaagttgttttgaagagtagaggtaatgttatataactgcctagtaagtgtctgttgagaaaataaactaatgtaaactggtctttgccaaaagaataatggataagttattttcagtggtgtatactcatggtggataattaagctggtcttttatgtgctttctttaaaattggccaaaatgtgttgtatattaatagtttaatttccattacagttgatgttaaggcttttcattatagttttgtggcattgaatattgtttttgttatttaaaataattcttttggctgagcatggtggctcatgcctgtaatcccagcactttgggaggctgaggctggcagattgagcccaggagttttagaccagcctgggtaacatggcaaaactccgtccctaccaaaaaaattagctaggcctgatggcatgcacctgtggtcccaaatatcagggagcctgaggtaaaaggatcacttcttgagcccaggagacagaggccacaatgagctgagatcactccattgcactccagtctggacgacagagcaagatggtctctaaaattattattttttttgagatctggtctcactctgttgcctaggctagagtgcagtggcaggatcatagcttactgaagccttgacttcctgggctcaagtgatcctcctgccttggcctcccaaagtcctgggattacaggcatgagcaacagtgccaggcctagaatattgtttaaagtatcagggt

SEQ ID NO: 122141 - DNA, 1045 bp, Homo sapiens
attgaattaatttgaatgagagctataaaaagccctaaagtattttattttgatgtgcttaatttctagcatttatgcagacatttaaagcttccctgaattaataacagcacaagtttatgagctgttccaataatggtgcaaagactacatctagacccaggtttaaacaaacacaaaacactttgttcttatcttagcatcctttaaaagtatacagctctggttcaggacctcaggaccacccatcacactggacattggatactcctatttattcaagaggcttgtgaagtatctgtgtgccagtgggggatggtgtgtgtatctgtataaggaatcacagttaggtgattttacctcagtaaaagcttcaatattgtttatatactgaattttgtccctgaagaattttctagttgtaaaacctaatttacactaaatgcttgttaatttatttaagttctggctgcagtcttcgcatttttgatgttttcagaaggctaaaatgggcccctattaagattaatcttaattcagtatagttttttggctttcaggccccacccattagctttggatagctaataccaagcttttgtttcttcctgtagaaaggaaaggaaagaaaactttctcttttattgcttaagtcatgtgacttcccttttagttagtcacagatgggattgcagtgaatctcagaatgaagcataaaactttgagaaaatatttatcgatatgtgtcttgtttaatttcatatgctttaccttacattacatccatgctgttgttttttaggaagctgaaaaaaattactactaaatagatttttaaaataatacggaccttttaatctaccgtggtagtttcttagttacttatttttctatcagttatcttttagcatcatttgaggtttctaaactgtaacttgtttctcagaactcatagtgtagagaaagtaggggtggtggttgggagacattagcaagaaataattgctggcagaataaaagaaagaaatacgttataggactacat

SEQ ID NO: 122142 - DNA, 1031 bp, Homo sapiens
caatacagagaatgaaaacagaggaagcagagacagcaagtttagacaatcttttgagaagtgtttctataataaatgggaggaaagaaacaaagcagtggctaaatggaagaaattatagcatgtttatatgttcataggaatggtctagtgcaaaggaaagattgaacatgcaggagagaggagaacgattactggagtgatttccttgagtgggtgacagtattgggatttaaagcacaactgggggagctgatcatgtgagtacagaaggttcattcttacaaacctggaggaaaggcgtagcttatgggcacagatgcaggtggtagatagatatgaaggtaggataaggcgagatttctcttttttatgctggttttttttttctttgaatttgaagcacggtcatcaactgagagtgatggtagaagagtaggtttggaaatttaacaagaaagacgtataaaatagaagaatgaacacattatagaaaagaggtagaatttcaggctgtgccaaagacccacataagaatagtgggtacgaatttaaagtcagttaatgtgattgtgttttttctccagccattgttgacttcatggctacagctgtaaaacagtcattaaaatgatttaactagagttgaggtttttcctagttgagaatgacaaagggcactggagatgtatgcagggcagcaaatgtaatgatggatgatagaatataaactgtataaagagtgaagacattgaaaaggtggtaagtaaacacatggggtgtgggttgcagtggagtcaaagaattatagttggggtactgatctggcaaggtacgaggtggtggtggtcagaagtgaataactgttccaactccttactcttactgtgtgtcttattgtaattaaagctttgacacacttaatatctaataatttccaactttctattaagctaagggtgtccataatttttgtcactaggattagcaattccagttttccatgtgctgcttgtttttacaaaatggtg

SEQ ID NO: 122143 - DNA, 1027 bp, Homo sapiens
acctttaacaccaacactttgggaggccgaggccagtgaattgcttgagcccagaagtttgaacctagcctgggcaacatggagaaaccctgtcattgcaaaaagtaaaaaaattagctgggcatggtggtgcatccctgttgtcccagctacttgtactgagatgggaggatcacttgagcctgagaggtcaaagatgcagtgggtcgtgatcagtctactgcaccctagccagggtgacagcaagaccctgcctcaaaaaaaaaaaaattttttttaaccattctgttaggcgtgtggtgatatctcatcatggttttaattttcatttccttaatagctactgatattaagcaactttatatgtatttttgtgtcaccctcatatactctttgacaaactgtttcttcatatcttttgcccattttttactgggttgtgtgttttcttattgcactttaagaactctttgtgtaagttttttttgccagatacatgatttgtagatattttctccctgactgtggcttgtcgtttcaatctcttaaatatcttttctagaacaaaagtttttaatttgaatgaagatgatttatcaatctttacattttctgtttacatcaatgatccatttagagttagtttttatataaagtgtaaggcctaggtagaggttcatttctgccatgtgtaatatgaattgttcaaacatcgtttattgaaaagaatatcctttttcttgaaatgtttttagattagaaagtttagtttctgtcatttttggttaaaaattgaaatttcaaagttttgattacatggtattaatatgtttaacaaattccaaatatgatttcatcacttgagaacttatttgttcaattctaatgtttgtatataaggtagaatcatattttgtgaagagttactccctgtggcaaaaaaaatgtaaaataattttgaagattccactttaattattagtagactgtttataaaagaaaatgggattattttattctctcttaa

SEQ ID NO: 122144 - DNA, 1029 bp, Homo sapiens
tttgcctttttgagactgctcttttaaattttgtctttcccctttaaaatgttccttatatcttttacttgtatgctttttttcattgtaactccgaactatagatcagttgatatcccttcttagtttctatattttggtccctgtaagaaattccccacaactctttattttacatttgtttgtatcctggacagctgtgaatttgcatcttgtacttcctactaatgactggcagaggctcgagttgaataactaaactattgcatccaaattttcagtcatccatatggtgactaaggaaattagtaaaaccagtagaatacccaagtcttcttaattcttctgtatttttaattctatcccaagtttctttattatagcctaattttaggatggttatccaagtcctttcttcttgtgattatttggccagggatctcttaatgaggcaattatagttgtttccttcattcacattatcttagcagatgctctccctgctgtgacctctgttcagactgggcagacaatgtgccattctcatcaccctctgccagacattgtgtggagctgagcttcatttggcgctgcataggtctcccaagatgccattggaatggtcagaagccaagtggcaaataatcagaattttaggttgattttctgattgctgattataataaataataaaataatgcctacagaaaaaaagttccagaagcaactctaataatagttcaagtagaaattatggatttaagaagtaacttagctttcttgctttagactgtggccttggtgaaattagatcatatatttattgtatgatttcggtacaagggtattgtgataatttggtagtattttagaaatttgatatcctttctaaaaaggaaattaatttagcctctaatattaagtatgtagatgtttaaatgaacattatgacattgttcagagtatcacttgtaaattttaacgtcacttaaattttaaaaattatgcttaaatgtcttaaacataaat

SEQ ID NO: 122145 - DNA, 3580 bp, Homo sapiens
cctcaccagaacattttggtgatgatagtctttgaaccaacagtgtaaccagtataaacaatgataaatgcttttaagaaggcacattaaaataagcttatctcattggtagtttgtgtgttttcacattttaaaatgtgtttttggatacatgctgcctacttctaagatgttttcatcttttttccttgtagatgctacaactgtggtggccttgatcatcatgctaaggaatgtagtctacctcctcagccaaagaagtgccattactgtcagagcatcatgcacatggtggcaaactgcccacataaaaatgttgcacagccacccgcgagttctcagggaagacaggaagcagaatcccagccatgcacttcaactctccctcgagaagtgggaggcgggcatggctgtacatcaccaccgtttcctcaggaggctagggcagagatctcagaacggtcaggcaggtcacctcaagaagcttcctccacgaagtcatctatagcaccagaagagcaaagcaaaaaggggccttcagttcaaaaaaggaaaaagacataacaggtcttcttcatatgttctttcctttacccggttgcaaagtctacctcatgcaagtataggggaacagtatttcacaagcagtagctgacctgggattttaactactattggggaactgtgaattttttaaacagacaaatcactctaagcaaattacatttgagcagggtgtcatgttttatgttaattcagagaataagatactatgtctgtcaatatgtgcatgtgtgagagggagagagcctgagtctgtgtgtgtacatgaggatttttatataggaatgtagacacatatataaagaggctttgtctttatatatttgtgtatagatcaaagcacacaccctctctcatataattggatatttccaagaattgaaaacccatgtgaagcattatagatagttttaaatttaacccactggagttttcttgaaataccacttcttttatattatataaaactaaaaacacgactgttaccttttgtgtgaaccaaaggatacttcagatctcagagctgccaattatggggtactaaaggtttttaagacatccagttctcccgaatttgggattgcctctttttcttgaaatctctggagtagtaatttttttcccccttttttgaaggcagtaccttaacttcatatgcctctgactgccataagcttttttgattctgggataacataactccagaaaagacaatgaatgtgtaatttgggccgatatttcactgttttaaattctgtgtttaattgtaaaattagatgcctattaagagaaatgaaggggaggatcatcttagtggcttgttttcagtagtattttaatatcagcttcttgtaaccttttccatgttgtgagggttgtaagggattgtgtggcaacagcagcttcccttggctaactcaatcttctacccattgcttagagcagggagccctccttatttactactgaagaccttagagaactccaattgtttggcatatatttttggtggtggtttttattcctcctggagagttatctaatttgtttctaaaacaaacaagcagcaaagaaatgaattaaatactggggttgagaattaaaattaagtggatgttcacagttgcccaatatatatgacctgcaaatgatacgaaaaagtgcagcatttagtggcagttaacaagagtgacaagcctggggcagaggtaccaaacctctcccaccagagagctagaagtattttatacagtaactttgatcttatggaagtgaccttcaatgcttattctgaagtaacctatatggtggatacaggatgaacattcagtgccagggagaatcttctcaggttggttctcgttagagtgataaactggctaggggccatagtattggtcctgttaggtttcggtcatggaaaaaaaaattattttggggtcatcctggctctagatgttatgggcaaatttctgaaacatctgcaagaaggtaccagttaattatagtgcttaatattgggaataagattaagcattataattataatgtatgggcctgttggtgtaagctcagataattaaataaaaatagcatgactcaaatgagacatattctgctgaacagtttctacttcctctcccgcctgtcctgtcatgggagacgtgtatagttgctgctgtttcagcaaaccaccataagacgaaaatgcctcaggttgggttgccagtcctttacaactcagcttgaatttcacaacagtgattgtgagaatctgcgtggtatacactgaaatatcggtgtgctgtgatgcaaagcttacctttgacgatattgaatgtgatatagctgtagagaagtacttccttgccttatgtgaggatttcaaacttatttaaattatgtagacaaatcaaagtggcattgcttaatttttagcaggcataataagcaagttaacagtaaaatgcaaaacatgataagcgttgctcaatttttagcaggtataataagcaggttaacagtaaaaatgcaaaacatgatagataagtcactttgaaaattcaaaccaaagttccttcaccttatggaaataggaaattatggacttcaaaattggacacttcctgtttacaaaaagaaattcagagctaaaatcatggtaaaaaaaaatagaaacacttgagaactatggtctttatgggtgcaatttgaaatccttttcatcatcttaccagactaaactaagagcacataccaaacctatcttatggttgaaagttggggtttattttttatatgagaatattatcactattacataacatactcaggacaaagaactttgctcagggaacataccatgtaatatttttgttgtttctttacagactagtctacagtcctgcttactcaaaacaaaccaaataacttatacctttatataagtattatgtactgatgatagtaactacctctgagtttgacacagatcaaaatttttgaatatcagatatcagttatcctatttttatttcatgtgaaaactcctctaaagcagattccctcaactctgtgcatatgtgaatatcactgatgtgaacacattgttcatttacataggtaaaatattactctgtttacagcaaaaggctacctcatagttgatacatagcacacctgtatgtatgctgttccagccttacaggtggctgataattctctggtacagaacctttttatctgtattataaatagcaattcacaactgcatgtttctgacaaacacttgtgaataatgaagcatctcgttttagttagcaaagtctccaaacatttccttaaaataatcatgtatttagtttaaagaattatgggcactgttcaacttaagcaaaacagaacacggaagcagtcttagaagcaccactttgcccagaggtggaggttggaaggggtagcagggagaggggttggtgtatgcaggtattcatgctaggcaaagagtttaaaagac

SEQ ID NO: 122146 - DNA, 1355 bp, Homo sapiens
ttactagctattgagggaaaagggtctgtgtgaagcatcactttgcagggattactaatggtggggcagcaggtctgtgaattaagttatctcttgacctcaccctcatgtcaacacaaatgtaattcctaaacaagatgcattgccagtctcttagccctgtaagctgatcttttgctacatggcagactataatgaaaacatttttatacttgggtttctagtcttcactagaaggccttggatgtatttttgcagttgaaagatttagaaagatttttacctgcttataacttggaagtttagagtgcaatgtaagaaaaaagatcaagaaatgtcatgttattagcatcagtccacctccaatattgccgatactttttttattctggctcagttttattttgcaccagtgcggccccaagttactgctggttgtatttagtttgtgaataggagcccataagtgttaatagactttgtaacattcactataagatgaattatacaggacatgggaaatctcattaagtcttaaagttaatttaaattaatttatctgttttctctaagaaatgtttatcataaaatatatatgtgtatttcccctttggttataaaatttgggaaagtatgtacaagtgcagctgcactgactttaattttctagatgtcttaatgagatttatttgttttagagaagaacatcttgttaaaagcatcaaactctgtcttacatagctgtcaacagcctctttaagatgtggtggttgtatgatctgtgtcttaattgttcagttagagtgagaagttgacctatgattcatttttaaattttatatttggaacaaagctgcaagttatggtaaagtactgtactgtgagaagtattatgatatttaatgcatctgtggcttaacacttgtgagagttaccagcttgaaaatgatggtgttgactacctcttgaatcacatctatcaaccactggcacctaccaccaagctggcttcaattagtatgtgttgctttttggtattaacaactaaccgtactagagaccaaagtgaaccctgatttttatatgtctttaataatggtgttttatctagtgtttttaaattatcctgtgtagtatttagattacctcattgtccattttgactcatgttgtttacaagtgaaaataaaaacacttgaactgtatgtttttaaaagacaaaaaaggggtagatgtttggaatgcgtttcactcgcatgcagtcatctggagggactgaagcactgtttgcctttctgtacactctgggttttatattctcatttcatgcctaatgtcttattctgtcaattatg

SEQ ID NO: 122147 - DNA, 1035 bp, Homo sapiens
gctacagttctctttcccacctgaacatactgcgagtgtggcagacaccccagagcacaattgtgctccactggctgcaccttctcgatgccttggtccttatggaagtcctttgtgcagaggacttttttgccacttggtgtaatatgaaacatccctccagcaacagtaactcttgacgtaactgtttaacagtttcacacctgttaagtctgggtttcagttcagtatgatactgtttatatacttttataataaaatgtattaactggtaggtggaaggtgattatagctaacagaaaaaaaattactacagaagtcttttcctgatcacaataaatacaacaggatggagttaaccactctgcctcccaactgtaaaaatagttttaatagaaaactaagaatcaattttctgggaaatttatggatatgaaattatttgcccctctacaattggcaataaatgaaaagtaaagcattctacagagatcatgaaccttacagtaacctccttgaagaacaaaagtgatttgaaaaatcacttaactaaagataagctctatttcttcctctctcctctcatgttctcacatctctggaagatagttgggcctctgggcaaatttctgatatctatcagtacgtaaaattaatgaaaaaccaggcaaacctgtagaagttatttattaatgttcaacttgtgaaatgcaagagcattcccttgaaatataatattccctctttttcttgttcttactacaaattggttttggatgtattaggggttcaaagaaataatttccagctatatagggatggactctgaatctttccattgaaccagtaagtctcctgatgaggccagagagccccatgtctaggggccaggtgagcccctcactcctcaaagctgggctttctggtggccatgacagttgcagattccgaggcagggcaggtgatccttttgtcttcctggatgtgaatgttatacttggccctcaatggtacagaaggccaggctaactgggg

SEQ ID NO: 122148 - DNA, 1053 bp, Homo sapiens
gctaaaagccaactttagaactattatttctgtttcagaaattgaaattgttcactggttttgccatatactttgcttaaatagtggctcactggctgggcatggtggcttacgcctgtaatcccagcactttgggaggctgaggcgggcagatcagcactttgggaggctgaggcgggcggatcacgaggtcaggagatcaagaccatcctgactaatacggtgaaaccccgtctctactaaaaatacaaaaaaaattagccgggcttggtggcaggcgcctgtagtcctggctactcgggaggctgaggcaggagaatggcgtgaacctgggaggcggagcttgcagtgagttgagatcacgccactgcactccagcctgggcgacagagcgagactccgtctcaaaaataaaaaatagtggctcaccagaatactctaagagtccacatggtttgatttttttgctttggttttgtttgtttttgttgccatttggctttgttactttcatgactttagttagagtgaaagcctagacccagaaatgttttactaaatggtagacaaataaatgctgggtgttctgctgctggctggttatctcagtatgagtgccgtgagttaaaaagtgactgagaaatggattattcccaaagatgaaggagatcactcaacacccttgtgagctacctcattcacacgcctgccaagaggcacattttccggtattcttccatagtttagattgtttcaaaacattttaagtaacacaaataacccagatgttgaaaattagtaagtaaaatgagaaaaactaaattaagaattaaatactttaagaattattctaagaatgatggtataaaaactttgaacaaattcatatgaaatagcaaaaaggcagacattcttccattgcatgaattaaaaactattcatatttccaattgtattttaaaccaaattaacttttaaaaaatgcaaacacattcaacaattctttatgtaaatgatttgtaactttgtatgcctttagataaattatattag

SEQ ID NO: 122149 - DNA, 1101 bp, Homo sapiens
gtcttgaactcctgacctcaggtgatccacccacctcagcctcccaaaatgctgggattacaggcatgagccaccatgcccagccgaaacagctctcttactgctgttgtctgagtgtttatgtcctccccgaaatgtatatgttgaaatcgtaaatcccaaagtgatggaattaggaggcagggccttcaggaggcgatgggtcatgagagcggaatcctcatgaatgggactggtgcctttatattagagcccaaggagagacccccccgccccatcccttccaccatgtgaggacacaggagacggtgtcacctatgaaccaggaagcaaccctcattagacaccaaatctgccagtgccttgatcttagatgtcccagactctaggactgtgagagagcaatttctgttgttgacaacccaccagtttatggtattttcttatagcagcttaaacagactaagatacccacgagtctattaacaagataataaacaaagtataatttcaggaattaacaagaaacaggaataaaaagagctgtgaagaaacaaagtggggcaaatgaatagtccgtgagaaggaatgctatttgagtcgaggtcagggtgcctctttcaggaagcaacattcggacaaagacccgaacggaatgaggggacaaacaatgggcaacgttttgggggttggtgaggacagcagcaatgggcagagcctgaggcaggaaccagccaggcctttggaggaagagcaggaagccagtgtggggggaacagggagccaggcgaggcctggaggatacactagagatggcaggcagctcagtcaggtgaagccactgagagatgaaagccgacaacactgtgggaaactgacagcaggagagcctagggaaaagcggggtggttattcaaagagcaggttgcttagcacctttaaggaattttgggggtgggggcagcaggaacccaccatcacaaaaatcactgacatgccatatcatggatgaatctcaaaaacattataagtgaaagaagccagacacaaatgactgggtatagtctgattaagtgaaatatcctgaaaaggcagttctat

SEQ ID NO: 122150 - DNA, 1027 bp, Homo sapiens
tttatcagatgatatgataaaaattattattttatatagtatcttaaccttatataaaatagcttaaaagattacttcattattccaataatttgtacttttccaagtaagtcccatcttccaagttgtatatgtatgtgcttttaagagcactctctcattctctacgtttcaagttatggtcaaaaattagacataccattttctatcaagcatatcactgcataccaagcatattgaaagacagctatatggcttggtttttctctactggaatcatgttttccgttactatttagtacggtacataatacagttgtcattgagtataagattcaccataactcctctggaaacaaagtgtgccagtagctagtgttgcatgctgagactctgtcgtcatcaccatctactcagatactgatactagctagctttggtgtaactgctgaccagcatggcaggaaagaaagaaaatacatttgcatggtcaagccagaggcagcctctttcctagactagctgtgtggtgtgaagtacaaatagctgagttggacccactgagtccagagcattttcaaggttgcacagaatctaaccatactttctgaggtctgctttacagcagaaaatacagtgtgtagtgtgtgagcttcagatatcaggactgggttcaaatcccaaatgtcacttagcaactgatgaggaggaggaggaatacagtaatacgtttttaatgcctagcatgattggcctccagttacgagttctcttttccaacctaatttttgtgtctagattttcacaggacaactaatcccaccaactaaaggtattttggggagtagggggagctttaaacattagaaataagacttgagattgggctcctacccagaactctaagggattcttctctatttgatcccacttttctgtatcctgtgctctgccctttggctctttcttatgattactctcttctagctattttgaaatgcacagtagattattgtaaactatagac

SEQ ID NO: 122151 - DNA, 1058 bp, Homo sapiens
gccagtcatggcctaaatggtaacgcataggcacagtccatggtggtcactcacgtactagttaactgcagtcctcactgctaattaactacctaggtccctgtgccataaaactctactgttgctctccagcctcacaaaggtgtttttgccttccagatactctccattgcataatgtgaagttaccagaagcagatgacatccagtacccgtccatgctgctcctcactgctgaccatgatgaccgcgtggtcccgcttcactccctgaagttcattgccacccttcagtacatcgtgggccgcagcaggaagcaaagcaaccccctgcttatccacgtggacaccaaggcgggccacggggcggggaagcccacagccaaagtgatagaggaagtctcagacatgtttgcgttcatcgcgcggtgcctgaacgtcgactggattccataaacagttttcgtgcttcctcctgacagcgacagaaaacctcaagggctttcccacgttgacaccaagaaaccactgggcataatgcttccccacgggaacattattcctgcactcacaggctacagttgaacagaactgccgtgggaattttatcttttttaggcttctcctttttagcaaggccttggtgtttctttttccaccctgtctaggcacatgtggttttttggtgttttttttaagggcatgttgggataaatagctaaatggcaacaaacacattgtgaatattagattgctgaattaaggatcatagtcgggcatacttatctatatccataacctctatatctttaaataaatgtgagaactgttctcatggagaagacttctttgcaacaataataaatgttatttaagaatgacaggcttttacttccggtttcttcatattgaggggcaactccagaagtggagttttctgtgagaataaagcatttcacctttctgcaacaagttagttttcaagcagttaagtcatagaatgtttgttagctttgaaaataagttgttcatccactctgtctcccttgtttgtttgttt

SEQ ID NO: 122152 - DNA, 1054 bp, Homo sapiens
ctgggtgacagagtgagactctgtctcaaaaaatatgtatatatattagctttgcagttaagtattaacaggaagttatgtgtttttcactttaatcaagcaataaaagaaatgtcaagctcctattgagatgatattactcagagtgttgttgggcatacacttttttgagatggagagagagggcatggtcttcactaggcagttaatggaaggttaactgtttttactgcttctcagtgtttccaggcttatttttgtgagacacatgggtggtatcctggcagtggccaacatcagaggaggtggcgaatatggagagacgtggcataaaggtgaggtgttttctctacagaaacacaagtctgacataatcaaagctaaggttgtgctgatccttcctgtttgaatgagctgaaggggtttggagcaggaaagctttttggctagacgaatgaaaaacaaggatattatcagacacaggcaccactccccccttaaaaacaactcacttttcacattttattttcctttgttataataaatagatgaagtacatatttttcagaagcattccttgttattttggggttttttaacaactcataggttgtgtttttaattatcactgtcaggagtgaatctcggagagctttttggtatttattctgtctcttgttagccttgtttttatagttcagcattagttgactgtcttgaaacagaagtcaaggcaggtcattttctcttaagagaaaggagcaatcttggagctttctgttcccagtgtgggcatcctcctgctggttttctcagatcttcccggcattgctgaggaatctcatcctcctagcattgctgctgtgactctgtcgtgcattagttttagacacaaaaacaatcatttttctagttttattccgtctccattctgtggcctcctgaagcatgtattctagctgattgactaatacccaactttataccccaaatggtcacaatttttttgaatgatcgtctgtattttaaagctgcatctcttccatttctttct

SEQ ID NO: 122153 - DNA, 1048 bp, Homo sapiens
tttttttgaaggagaattttaagtacagaaactcagcagtatatatttaacccagtttagtggcaagttctttgacctctgccttttgccacttggcaatgcaagcctcagatttatgaccccagacattgcctccccggtgacagtgatcttagcatacccattattgtaactggtcctggtagcttcctccagcttagccagagctcatttgtcttccaagttaacctgtgtgcaggcaacactggtgcaggtctccctgtggactagatgtcccagtctggccgttcctttgatgatgtagtagggaaccccctttcatgatacagggcagatgggaagacagcctgctggaaaggatccatgtcgtgcgcagtcaccaccagttgagccaccttgttctcccacaaggtagcaacagtgtcaacccctgcaccaaggacaggtggtctccagtggggacctcccctttgctggcagctttcttctcagcccgggccagcagccatcagttcttctcttgcactgtctctggtcagtacctgtgagccagcctaggcagctgagtgctgttttgctgcccaaggcctggacgaactggttgctcatgaaggcactttcagccatgtttagaggacagccctttgtcaccgcagctggatgtagcagggtcacttgacaaagcaggtgaggtctcttggggccagatgtcctgcaagtgccaacatttctgggtctctctcaggtgattcatcaccttggctgcttgcttcttcacaacagggactggggccaccgtctccagctgcccaagatgccaacagagtctaacgtttaaagaagaagaaaatgaaattaaggaaagaagctttcttaatttagcatgtaacttcggtcagccgcgggctggctcactaatgcttagaactaactgtgagtttgaatcactgtcgtaatgtttggttttatcttctgtgtccctcatgaaggcttcatatcgatgtactctaagatagtcccgcttatgagatcttaccgatgcttccaa

SEQ ID NO: 122154 - DNA, 1053 bp, Homo sapiens
gggcagtcagttctgagatcaaaactaaaacagtagggactcattgccattttttcataggataaagtggctacttaataaatagcctagccctcgtgatcacatttggctgccagtttgaccagccttgagcaatgcccttgagaccccaccagcctggcccctgccctctccctcactcatctcctgccactctccctcacccgcctgctgcagccgctctggcctccttgctttgcttggcatacatgcatgtactcacccactccacccctcccctctgcctggactgcccctactcctggccctccatcctctactatacagagtcacttactctgcatggatcagagactccttcgctctccatcctgtgtactatagcagcccttccccactcacttacccgtatctccattgcactcatcaccagctgacattagattttcattcatgtgtctgtctgtctcccctttagaatgtggttttccccactgctgtgtccccagagtccagaacacagagtagatatgtttaagtacttgacgattgaaagtggttgtgatagatagagtctgaaatgatctggttgttgccagaaacctataaaagtgaaactttttttttttttaatatttctgtgttggaccatcttcctctcctctggtagggtaatttgtccactagaaatggacaaatgttgccagaaaagtgaatgttgtactacgagttttacttctgtgaaattttttgtgtgatctagcctttaagagttattttaggccatagtttataaccaaaacagaaaattatactatgcctcccttatagagcatcaaagtaaatttgtctattttcctagcatgcttttattgtactggagccctccaactctaggttgttgcatgtgtacacatgtttggaaatcttttagacaagttgaccagtaaaaaggcaattctactgacatgtaaattcagttgacccattccgtattgtgttttatgagaatctaggatcattagtttgtatttatttttttttcagcctctg

SEQ ID NO: 122155 - DNA, 1074 bp, Homo sapiens
gaagctaggaaaagcacccacaagaatgtggaaaccatgcaagggccagaagccaggaagtgaccgttcgagaattcgacttcagggtgtcctgcacctccccccattccctcttccccctagaacctggagtacagcagcagccagtggacagatgaggaaaatcatttcttctagatagccattcttagcccactgctgcagggcccacagttaatttcctcaaatttacactgggtacagaagttttactttggaaaatttcgtatcttaaatagtttaaatggataaagggcaatgaggagggcagtgagggtgactcacctgctcttaaaaaaagctggagtccccaaaggcctgtaaacctccttcagtgaccgcatgtgaccatttatgtcaggaacaagctcatcattacctggggaagaaagggcttattgtccaagtgtaaaatgctgggttctgtgccaaacaatgaaatattacccgtgactgtggctgtgaaatttgaaaagagaagtgtgttcctcgttctgtactgccaggcattttctgaccaagctttaattttctgaccaagctttgtctgtctccttttactagttttgcctccatttttctcttttctctgccgaatgcaatttgatttctaaaaccagagaatggggcttccggattcagatcttgtgagaccaaatgcaaaaacagccatcagataattagattagatctcatgaaagcatggattgtcagtgtgggtatatacacataggctcacaagtagtcttgcactggtgtctgaaggctagctgttcactactacagtaaagagcagaggtactcaattatatgtaaagccccagggtcacaaataactgcagctccagcttcctgctgcagacatttgataactctggcaggtgcacaccagctgactttgttttccttggaggtacatggtgaaaacacatcttgagcccaagccatttatgacttactttggcaccttgagtcacatttggaaaaaaacaggcagccatagcagcttagagcacagtgcacttattctctgtg

SEQ ID NO: 122156 - DNA, 1050 bp, Homo sapiens
gccagtggtagccccaccctcaagttgtgacagccgaaaatgtctccagacattttcagatgttgcctgggggtgaaagtgtctgtggttggaagccactgctgtagaacacaaagacttgggagggagacgacgacgacttggaatggtgtgatggcaggagaggtggagagaagtgcccagatttgaggccggctcagttagaagaggatttaccagatcttgtgggggtgatgggccgggaagagaggtccttcattcccccgtccttgctgggtttttcaggggctccttagcatttttcaatttactcacaactggttcttgctccttttcatgccctagatcttccaaatatctctgctttatgttttgaggataagaaagatccaccctcccctccctacacacaaagcaacaccatttttaaacattagagagatgatgagaatgcttggtctcttgccaggaatcctgaagtgggtaaaactgattgacaactttgaaggggaatatgactacgtgaccaatgaggggacggtgttcacattcaagacgaatcgccagtctcccaactatcgcgtgatcaacattgacttcagggatcctgaagagtctaagtggaaagtacttgttcctgagcatgagaaagatgtcttaggtgagaacacatgtgacttgaaaattgtgctcttgtttttgatgagaacatcaacaagttagtgcgtctctcattctctagtgatctgttacaaggtaaaaaaccttcaacctgtaatcatcaggaatgaagtgtctaaatagttcatccaagttttcattgtgtgatatctttgtagcttagtactatatcatgtagaaatgcaaggtcttcataaaaattgtaaagataggatttcagacttccaaagtactgctttttaaacaaatatatcagttgtctttgtatacttaatatctggtaataatcatgaacatttaatttttaaaactgtttagatttagaatccttagctttaagcttttgagtaacctttggctatttgcatt

SEQ ID NO: 122157 - DNA, 1061 bp, Homo sapiens
aactgaggctggtgaggccaactagctttcctaatgccatttaaagatttggatccatgtcagcttaactcccaagcctgtgttctaactgttaatcatgtggcagactgagacagaaggaagtcattcaggacaacagcagcccatgcgccctgcagcctcagtgcctgaccactccttgcatttgttgtcgtgacatgtccagcccttagagtttttgtaaagtataaaagcactttagctgccattattagggagcttgcacagcattttctatgacatgtagttaatatagtttagttgatgatttttcaaagaaagtaataaaagtatgactttgctctaggaaaagcataagacaatttattttaaactaatcttcactcaataaatgaatcagtccccaccaagaagcaggtttataaaaagtaattttaacatttgaatgcagagaggtttgggaattgaaatttcttttggcttcagagtgaataatgccactttatagacaaaagaacctcagagaaggtaggcaaaaaatgaaatggttaaagagttaaatcatgtttctttttaaaaagtaattttcctgttttccatttaaatcaacagtgttctaacttgtgagtagcaaaaatgaatgagccccattgttgaactgaaataccttttctcttgatttatttctctaccaaagccctgtagaacaaggtttcaggagagcaaaagaatttcaagagctctcatttaaaacatccggccctgtgagggcctatactttggactatttttccaattttatagctagacttttgtgaatccagccacattccttattctgaatgagcttatgacttgtagtatgtatttatggctaaggttaatgcttcagaatttggtggcagacaataatgtacaccgttctgttgttttttgttcattggagcttgaatgatttttttttactttttattaaattatactttcagttttagggtacatgtgcacaacgtgcaggtttgttacatattcatacatgtgccatgttggtgtgctgcacc

SEQ ID NO: 122158 - DNA, 1114 bp, Homo sapiens
gaggggaaagactttgtgaacacccagggtattcacttagacctcagagaagctatgccttagcagtggggctgtataccttacccaacaaacctttgaaaacaagtcttgaatggatcaagctgatccgccaatgaattaactgccgcaaaatgttttgcaggcagaccagaaaataaaagaaatccagacaacattcaaaagcccagaatccagttaaaaaataaatagttattaaaaaagaagcaaaaaaaatgtgactgatagccaagaggaaaaatagtcaatagaaacagatccagaaataacagagagtagaattaacatataaggacttataaaaagctatcataaaaaaatactttttagagatctttactaagtgttaatataatgaacaaagaaatagaaaatataaaaatgaaccacatactcttctagagataaaaaataaaactctgagatgaaaaattatctgtttatagcagtttagatgctataaaagaaaatgcaaaagttgaagacaggacaatcaaaactaaaccacaaagagaaactaagacaaaaatggacacatttcattgacctgtggagcagtaccaagttatgtaacagtatgtatttgaagttctagaataggggtgagaggacaaaaaatatatacatgagacacaagtggccaaaaatgttacaaatttgataaaatacagaaatcaacagattcaggaagctcaattaatctcaagcagggtactacatcaaagcctgttacagaataatcaacgttcagaaagccaaagataacaaaatactaaaagcagccagaggagaaaacacatattgcatatagggaaacaaagataagaaatgacaccaaattcccagtggaaacagtgcaagtcagaaaacagtggaaagatgccttcttaatggggtttaccttgattgccatatttaaaactacagccttggctgggcgcagtggcactttgggaggccaagatgggtggatcaccttgaggtcagaagttcaagaccagactgaccaacatggtgaaactccgtctctactaaaaatacaaaaattagctgagcatggtggaaggcatctgta

SEQ ID NO: 122159 - DNA, 1064 bp, Homo sapiens
cagaagcattccctcgagattcagacttctctgcctttccttcctccaccctttttcatcagggacctttcaagatgtctcaaggccagctgtcttcctggtagcttcctgggtacctcttgctccaggggaaggcatatccatgggttactctgttctggaggtacaggatgtgttcactgccctcctcactttcagccagggacctcgggaagcctcccacattcagtccctcctgcacatgtccaaaatgctgggctcaggaacaagagctcccttgtgcccctggggtgtaacatgaaacagctgccattgggctttgatgggcagaggtgccagttatttaatatagactgtgaggctttacttgaaggacagtttcatggcaggagagaaattgtcaggttctattggaccaaaaaaacccaaaaacccacaaagctctgttttaaagtgaattgtgagcatctggggagaaaaaaaatcctaaagaaatcaaacactttgtggcactgttcccagcagagggtgctctagaatgaagattgtgaaaatgcatcatccctttagaaaggattaaggaaaaaatgcccagcttctttgtgattatctccctaaatcctatattgagaacctaattctgttatacctaattcttgaaaagtttttttttcaaaagtaatcctgaatcttagtatctgttgtgtctccataagccatttttatatgttcacctgtgaaccctagtaattaaaaacatatgtattacacatatattaacatataaagtgtgttgcctgatgcttgacttatagtaggcatgcagtgaatgttaatttccttactcttcccatgtcccctgtggaagttcatgcacatgaagaccagcagggtctcaccttccagaacagacacagaaaagtccagtggtgttcctggtggggggtccctgcctcctctgccccttgctggttggctgtttttgacttggaccagtaattgctcagtagccctcttcccagttggcacagtccatatttattccccaagtacttagcccttgc

SEQ ID NO: 122160 - DNA, 1050 bp, Homo sapiens
gtcaatccacaaaatatgtttctgggattttgtttgggatttcattaaatctgtagacaaaaatgggaagaactgatatcttgacaatgttgagtcttcctatccatgaacatggactagctcttcatttatttagttcttctacttctttcatcagaattttgcagttttccttagatagatcttacacatattttgttagatttatacctaaatatttcatttttggaggtgctaatgtattgtttctaatttcaaaatctacttgttcgttgctggtatataggaaagtaattgatttctgtatgttaaccttgtatcctgcagccagctacttgttaaatgtgtctagcattctgcaatatgggtggaattgattttcttaaaattatcaagtacatttcagtgtacatttttaactccttcaggcacagagacatctaccaatctccaccaaaagctctactaccatgtcttgggaaccgatcagtcagaagatattttgtgtgctgagtttcctgatgaacctaaatggatgggtggagctgaggtattgtacagctgtgaaattttacccccaaagactgtgtttcatggatgtgtgtataaatattcttattatgtggtgacctttatggatggcagaagtcccatgagtgaatattcttttgttaaaaatattggtattcagattgactcttaataatggaggtgataaacctttaactgcaatctcaacctattactcttaatattaaaagtaatactttgagggtaaaaaagtaattttacttctagtaaaaactataaaagtacctagtaaggtaaaacatgaacctttcaaaactcagaatcctgcctctcagaggtgagtgtggtagccttccacaaattttctttgtacatacaagtgagagtatgggggaaagagagtgtgtctttcccttttttatacaactgtgctcttttcatgcatattgttcacttgtttttacattaaaatgagtgtcttttatacattttctcatcaatattcatatattccttggg

SEQ ID NO: 122161 - DNA, 1072 bp, Homo sapiens
tttttgtagtatatgatttttaaacatacttttcaaatcaaaatgttttatttaaatttttctgaaaattttctgatatatatatatatatatatatatatatatatatatatatatatatatatatatatatataaacaattcaaacactccagtgctatgtagaataaaaggtgaatatgtttctttttcctatcactttctagactcttttctgcatttacatacatatgagcctagatactttataggacctacaatggttaatgagtaggttctgtgaaattttaaacaaatgaaattccacgtaaaagaataggaaacctctaataatagttgagcttcttaaaattttcattacccaataacgtttagcaaacagcctaagaggaaatctctggtgtcagagtctccaataggaggtgttgtattgaatgctttacatacttcataattaaaaaagctaatatgaaacacaagtatttgccaggaaacattccatagtgattagaacattctgccagggccctaaaggactgtacatggcacgacagtctatagacatgttgcttttcctttcacaatttcttgtggaatgtgcactccgggcgccttcactgcaaaccctcaggctttatttacctaggcttgtaatggtcagacagtgtggacattgcacaggtaatgcttcaaaaatgaggctgtaacaagggattttagataatttggaatcaatctcccaaattacctaatgactacaatttagttctattatatggtatgtgtcataattcagtcattactctaaaagcagtttcctttttctccttattccctttagagtataaatgaaatatgacagaagtcccagatgagctctgcttttaactgaactgcctattgcattataaaaatttcaaaatgaaagcattttagtaggcatataatctaatatttcattttatagacaaattaagacctggagaggttaggaagcttgtctaaggttataagggtaattcctgtaaaacttgggctgagcccccgggattcctcactaccagattcctat

SEQ ID NO: 122162 - DNA, 1663 bp, Homo sapiens
tattggcagtgtgtgatctgagctacagtatagtgtgtttgttaggagcgtggatctgggagccaactctgccatctgccacttcctagctgtatgatgtcgggcaactttttaaccactccaaacctcagtttcccaatctgtaaagttggcctaataaaaggaccttctccataggattattgtgagttctaaataagttaatacttgccctgtaagcattagctgagttagtaccatgtaagcattggttgttactacatattaatcagtcacttggcaggagctgggcaggtatgaagaagagtaaggaggtgagagaggctggtaatgagagagaagaggcactggctaagagacaaagtgtgctttttctgatacatattagtggataatatttcacatggaaaattttatatttaacttgctttgtccattttaatttctccacaggcctttgtggaggcccagaataagattactgtgccatttcttgagcagtgtcccatcagaggtttatacaaagagagaatgactgaactatatgattatcccaagtatagttgccacttcaagaaaggaaaacggtgagactgcttttactgaatttcctttttattttcaaagtaaatgctttcttaaattgtaaaatacaaattccagataacttgtccttgtataagattaattcattataaggaattaatttctatgcctgaatatgagagtaatatttttgatctattaggtattgtccaaattgttaaaataatagttaagaaatttagtagggataggtcatataaagaaatctagattataggaaatcgtcgtcttatcggtagtaattggtgagataggatgattcatagacagcagtggaggtttgtttgcctccgaagttaattatctttgatgtatactacttggaaacatttaattctgtgtttttcttctgtcaaagaatggtgaaatgggtgaattcacttctcttgttcctgtcccgttaacacccacttacagatgttttcttgatcttttattaaatctctttggagccactatcacacatttactttagactttcttcagccctctgccattcttacagagatcggcaacgtacagtctgcctaccaaaccctggctgcctacctatttttataaataaggtctgattgggacacagccatgcttatcggtttacgtattgtccatagctgcttttgtgctgcagctacaggcctgagtattatagtgacagactgtatggctcacagagcttgaaatatttgcagtcttgccctttacagagaaagtgtactgaccttccaccctagcagccttgctagggaaaagaaccagaattttattttagaaaagtctgctttcttcttcatttaaaagaaaaagttactgctttatttgaatatcaatttttattttaacacataaaatggtctttatttgcctctactcggctaatgtgcaggattacaatacaggatttgaatatggaagcaattctgttaacaagctctaggtagagagaaatgatggaacctttcacccatgtccccacgtccctgcgatggccagattacagtggtacctttttaggtctttggttttgttttggtttttgcttgtgtgtgtttggttt

SEQ ID NO: 122163 - DNA, 1485 bp, Homo sapiens
ccactgtcccagcctcctaactggcctgtctgtctccacttttgctcccctatagtctgttctctgtccaaagcacggtaatctttcaaaaagtaaatctccttacccaatcatggcttatttgcacttcgatgagagatcgaaacatcatatctgcctaccaggtgccgcctgctgtagctcatgtctggtcgtctggcctcagctcattcccagcctcactcacctccttactcttcttcacacctgccaagttattccccctgccaggactcccacacctgctgtttcctctgcccaaaacattctgccccaccttgcatggttgctccctctcagtcctcaatttgaaacctcctcagaagggcttttgtgaccaccctgcttaattaggtgccctctttcccagtgattttcaagatctgcaaggaatggctggtttgtaaatttccaaaccatttgtggattgaggtttttccaaactataatgaagatgccatagtaatgtcaaattgccataaaggttttcagcactcactcttgttttctgcactcttctcattgtgggctggtagcaaacagttcaggccaacactgatctgtagttgacactttgggtatcaagcagcattgctctgctgattaccctgtgtatgtccttagaaccaaccattctgcaaccctctggctttttgtgggtgtgtccccagtagcatgagctccgtgatgacagggattttagcttggacttgtcacttatccatccacaatgccacgatcagtgtaaacacacacacaagatttgtgtttagtccacgtggatgcttcagctccctgatgttcctacccagcacagcccagttcatgcagaagaaaatcataggaggcccaggttgcgtcttccttctttcctgggtggatctgcttcatctccacatcctttttcagtctctgagtgattttgctaactcactgcatgaccttaaccaggggactttaataccacttgcctccatctccatatctgtgaagtaggcatggtgttttcttccactgtaaaatgaagtagtgcttttggacacacttggtgatctccaaaatgctcccctgggtggtttctcagataggcattgattttataactaaaaagcaaaatccaatttcctccttgatgtttttaatgagggaaagtgcagtcagcaaacttcctgtaaagggccacatagtaaatattttaaatgttgcaagccacataagtctctgttggtttttcccctctagctctttgaaaatacaaaaaccattctgatctccagagccacaggaaagcgggccagggcgaagattgccaatccctagtgatagttggaattgtatttctgtgggactcagtaaattttattttctgtttaaatgaaatcagaaatgtgacctgtaacagttttatttttcttgaactggtcctcttgcaaaaatgttaattac

SEQ ID NO: 122164 - DNA, 1859 bp, Homo sapiens
aagttgagataacttctcccttcaaatactcatctctgtccctaaaaaaggattctgattgttttgcctgggtttactactattactattttgttgactattgcctgtgggttagaattgatggaaagactttgcttatgaaaatgaacagggtttacttatataaacaacgtggaagggagttagcatagttagaatacagacagaggtgtctgtcacattatctatgacagatggaggtacaagcgagcggtaccaagaatcctcactgagaatgctcaattgcagatgatacgatctgatggagaaagagggtaaacctcaaactttctgaaggtataactgtcaccgttccagccagatgttcctcatcagtcacagtgtgatcactgcccttcggtacctggcataaccaagcatgagcactcagtctcccaagcctgcttcctgtacactcctgaattcagtagtgcaggactggaagaggctggctccctgatgggtgagtcatgccagcaagccctgagatgagccgcagcctcacctgcttgaggtcctgcccagccgtggtctgggggagggacattctgattggccagcagcggtcacaccctttccccaactatcagtgggacttcatatggcaccagaaagaaatagatgtcaactccaacagtgtttgccacatcccatgaaacttaatgtgtgatagtcttgtttttcttatttcttcgtattttctaagtaatcttgttacagtttggatttcctcattgatacagaattattcaggagagggaggatatgagtgtgtttaatgtcctcacgatcagatatttagttaggtttggatttgaggtgcaaatcacctcttcaccaggtttttggtcaggaaagtatacaccaaagaatggagcctaatggggttaaaatttcagttttccctggtcatgacgagtattgagaacaaggcttgaatatcaggtcggagtgacggtttctgcttcctccctaattgatagtaactagtcccagtgagggaacgagttgatttacccacacggggacaagcagagaggtggaaagaggcctgacaggcttctagaaggctccgcctagtctgctgatcatgtgcagcaggaagcttactatgagcccttttcacccaagagcagatggtcccagagagaagagatgggcccactctgggttttttatgttaaagttgagcccaaaagattttgggctctcactgattgaactagaatatttctccaccttgagaatgagtagggggttgcttgtgggccaggaaaagaaagcacttcatgtggtgaggttaatggcattgtggtcaaaactgtgacctgaacaagcttttctttctggggcttaagattccccctttgttgtctgatgggctgctgatttttgtaaatattgagtaagtcctggaaaattacgagcactcttttttttttttttttaatggtagagattccttggcatagatattagccttggaaagtacattattccaatcttttattgtttccatttctggacgtgtttcctgaaaagcagctgcatctaattctcttttgtgcatgacctaccttgactgtcctgccctcctggccctaagtcctacagcctcagggtgagcgcctcttggctgctttttgatggggctgtccctgtacttggagagtcatttccaaattccaaattctgctaaagtgagaggggatccaagtgtgccgcccatgcctttcacttaggctgggattatggtttttgccactttctccagaagcccctgatagttgcttaaccaagtcctatatctgttatttgta

SEQ ID NO: 122165 - DNA, 1483 bp, Homo sapiens
aaaaactgattctgggcaagttaggcaaatggggcatttatggcaaggatatgaaggcagcttggaatggaccaagggccaggctctgagcaggcaggaatgtcacttttcacccagcattgctatggcttcactgatctccagtcattcagcctgccgtctctttttcaagtgatggtatcccaacagaaggagtcttgattggccaagctgtgggtgtgtgctcgccccttggctgtattgcagcagttaagagaagagatttggtagaagccccagggaccctctttggcttctgtagtggcagcacagctacctgctccacttagaagggagggcgctacggagggagcatggatgctggctaccccaatgccacatgcctgcaggtttcattctctctcttttctccatatgtgcttcatttcctcctacttcttcacctttcctcctctctccttagtttatctaggtgcccactgtgctgagtattgggttaaataagggggatgcggtgtcataagtaagacagatgcctataccagcatggaatttgccttgtagcttgggaggaccagagattgaagatgggcatgccacttgatctctgagctgctagagattggagcagaaaggaggccaagccacatcttgtagcacaagcttgtctagcctgcggcccaccggccacatgtggcccaggatggctttgaatgtggcccaacacaaattcatagactctgaaaacattatgagatttttttttgcgactttttctttttctttctttttctttttctttttttctttttttctttttttttttttagctcatcagctatcattagtattagtgtattttatgtgtggcctgtgacaattcttcttccagtgtggcccagggaagccaaaagactggacactgctgttgtagaggcgaagactccagccccattggttcactatcagggaaagctccattttagaaaagcacactgtaaatcattgatgaattgtttcaagtacttgtatacatttaatgttactgttttctctgtaagcagttactcagctttggtttcagtcatctgcagtttttcagtgaaaaatgctggcatcagatacggtatttttgggaaaacagcagttaaaaagtgaacatctaaagaactgcgataactgatttctctcaacttcttttttattttgttttttttttgagatggaggcttgctctgtcacccaggccgcagtgcagtggcagatctccactgcaacctccacccggcaagttcaagcaattctcatgtctcagcctcctgagtagcatgagtaggtgggactacaggcatccgcctccacacctggctaatttttgtatttttagtagagacggggtttcaccatgttggccaagctggtcttaaactcttgacctcaagtgatccgcccaccttggcctcccaaagtgttgggattacag

SEQ ID NO: 122166 - DNA, 1060 bp, Homo sapiens
tcttctctttacttttctggcttggttttgcaacccaggggtccaagtagaagtaatattcttgtaatctcagtctccccatcttactccatcttattgtgtcttcacccttttagctgaatgttctagaagttgttactgagttgctgaagaagaaatacacaaaagaaaaatttacacctttcaaggggtagctgccttaactgtaactgattgtcaggtctggctttcacagaactgtcctggagcttgggcacatgagttagctaaatgtagaatatcagtggcatttatctaataacttcttattctccctgagtgccgccctgggcaaaatgagagtaacaacaactccatttccttcacagaccttgagaagagaactctaacaggattggaaaaaagtatttttatttatattcgttccttctgaaaaataagataaaataacaatttgtttcagagaggatgaaaggaatataaatgtagatttcttttctgggacatgtgagttcccactttccattctctcactgactagctggaagtgaccccgttacacctgctgattaagaggctatggcaattagaacagaaatccttcaggattgcaggataagaatcctggaaatgtcaccaccttctccgcctgtctcagtactgtttctttccttggcaggaaagatttaaaccttaaaggacttctgatcatctctaggatatttaaatcctaggatttctatgtaggtattttagtgtcacagagatcagcggagaacaaagtttgtgtaggaaaacgtctgctttcccaggtgcccttcattgtctgtcctgaagtctttttgtttgtttgtttctttgcttgcttgcttttgtttttggtctctggggttaaccttaaaagtgtgtagcatgaggagtttctgttctttctggtgtcaatttcggtgtcggtctagcctaggactgcctggatcatgtgctttccctagcccggatccagaggcagcctctggaagaactggtgctgagctaggcaagcagggactgatctgtctga

SEQ ID NO: 122167 - DNA, 1048 bp, Homo sapiens
ctgtattgtgtcattctgtgcttggctgctgacagcacgttttcaagtttctttagcacagtggcaggtctttgttttgtgttgtagggacagagcggtttcctgttctgacctttcatctttctttcctctctagctgaaacattcttttcatgaagggtggcttgacacctttgagaacctgccaactttggttcatgtggtaatttgggcagacacgttgccagtgagccaattagcatttttgtccatccctttcctatttctccattacattaaaaaaataccagttttaattggggttagagagtaattatctaatacctcattttgttttttacaggtacaggattatcatggtcataaaatttgtgacccttacgcctggcttgaagaccccgacagtgaacagactaaggtaatttggtttctaattaaagataaggcagccttagtagctagcaccaaactctaaatgtcagtaactatagcttttcctttctggtgttctcctgtgttttctgccatgggatggtgagtatacctgttgttaccactactttttgtcaaataatttatgggaaaaagacaaaagcatggcttagtcccagagaagatcacctaagtgtttcagataatgtttatggttcatagtgacactgatgagctattttaaatgaaaatatcagaaagaaaactgatttttgccaaaagaaaaaatgaaaacctagatagaaatgatgttaaaggaaaaaattgcctaaatatttttttccaaagaaaaggaaatcttgtatatgaaatgaatattaggtcatgaaaactgaacactgtccttaaattgcttattgatgtcaacacaacaacagtgaaacaaaagctaagtagtgaaggggcaggggggagcattttctgccctaaaaacataaagctttcatattcttttggagaaacagtatttcaaggatcctgctgaagtccattcagtaatgaaggtggccctaagtcctatgtcccacagacatttttccctttttggagtgcctag

SEQ ID NO: 122168 - DNA, 1136 bp, Homo sapiens
taatagctacatttctcagattacttaaaatataatcagaataagtatgtatttgtgtgatacagttttaatgtttttctgtttactttcccaatttatgccagaaagtgtttactttaaagcacgtgctacattggggtaaagggtgctgacgcttcggagtaaaggacatactgttttaaattaagacttccaagtgacactgatgcattcattcatggtttctttgaccagtggccatctggtaaccatgttttctcagtctgctcagctgcttgcttattaaatttaccctaacagctcaagaagctctattcctgtggtttaaaggttgtttcctttgaatatgggagtaaagtgatcctgctggaatggagaaagaggctggactaaatgaaaagaccagagcgctagttctggttctgtcattcactagttaggtgacttttagcagctcttttacctgttatgggccttttttctcatatgagaaatatttggactgaccatagggcttacttgcttctgcagtaggaatgttgtcattcattcattcattcatgtgacagtctagctctgcagtgttccagactagtaatgggaagccaggtgactctcttggttctggttcttgaggatcagaatataaagaattacccattctgtggtttgataagtgcagttttaagtttgtttttagagttacttgttagtttttcaccactgtgggtgcctaaatcctacagtttgtttatttatgtttgatatttcatgaaaggtttaagtgaggattttatgaagacgtctaaaagattataaacaactcggaagggtatactgtggattttaatacactccagttccttctcattaagcaactcatgctaactctaagcctcgtggccaagggaatgtagctctggcccagtctggatcttgttgtgtggctccttgatagcttacggtggagtatctttttttttgcattaaggttttggttactaagccctaggcttgacttaggtatttgcttaaatggtagcctttgatttctaggatgggtttgtttctccccagcatcagctgggcattgcggtagctctctgtctctttcacttgagcaccttcagccatat

SEQ ID NO: 122169 - DNA, 1132 bp, Homo sapiens
agaaaaagaaaaaaaaaagaagattctgttgctagaagaaccaaagccattacaatctgcttattgatggtgtgctggcagaaacactaggcttatcgtcagaaaacctgtctccgctctgcctctattttgctattacctggggcaagacagttctctaagccctagactccttagctttccagtgaagacaagaataagcacatgatcatttcactgggaccgctgtgtgaaggatacagaaacaatgcaaatgtaaggggttattattaatattatgatctctttccggtccctggacctggcttttgccagatcatctgtttacttgttcctagggcaaatttaatttgcaaggttctaaaagggaaggtgattgctcaatgttcaaattaaagagctgccttcaacctacccaggtgtgcaggcaggacatctgcctcccacctgcttcacccaagtgatgcaaagaagagtgtgttggtttcggcttcctaatcatgatcatggagacactaagaagtgtctctgtcatgcagcttcactctgaaatgttgggcttctattcgtggactcttttgaaagctgtctttgactcctgaaaaccaaagcacttgaaacattcattttttttttatctctaaaaatggaataggacgactggcacttgtcctaaagccccagccacacctgctgtttatcctgcattcacgcagtgatgactctcccctagagttcatggcatttcctttgacacatcaaagtgaaactcctagaagacagaaacaacatgtctattgttagaggaggagtaaataccccatttcaaggtgaaaaccacaccaccatgttgatttttttttgaagtcctaataccttagttggctagatttcagggttaggaaccagtgaatggacattggtgaaagtgcaagctgtcattctggtaaagtcacccccttggaaaggagtgttataaaaatatttcaaagaggagaacagaccaactaaattcacaaaatctttcccaaaggaattacttgtctccacatccaactggtcactaggttccctgaaccctggattttccattaagcgtaacctcttcttttcctccctacaaccttaattc

SEQ ID NO: 122170 - DNA, 1050 bp, Homo sapiens
ggttggccgtagaaatccagaatttgctactgggactattccttacagccgtgtcaaatcactttcccccttccctaaggaacagtatttgaaggaatccgggagactaggaaatgctttgtctctttcctgtttgtgtgtctgagtccagtgtttttggtgagggggagacacagctgtctaaaattaaatagaacaacgatgctcagtctttcttttttcccccactgctgcgtgaatggaggcagattttataaaaaataaaatttaaattctagttgtagttgaatgttaccaaaaaatttaaccccagaggtcagccttaattatacctcttcctgaaagtaatgctcttcttatagaaagtctctcaatatgtggcccttggaatgaatgtaggatttgtttgggtatatgaggtttgactatggctttaaaaagtgtagtgtgttttttccccatatcaagtttgaccaaatattcgtctgttcccaagcttcgtttgtgctgtgttgccctgtccagtcctttgggactgaagtaaaaatctccattctgtgggtcatctttgccttttaattctataatgttcttatcgtcagttcagctcttagcttaagtttttcaatttccgtcattctcctttaaaatcatagctaagtcaagtaatgctcttagatcatttagttcaaggttcagaaagacagtcacttacccaaaggcatataggtaaagccagaccggggacttgaagcaaagcttttctgacttctccaatgagtgcttctcgattatgctacactggcccctcttggtgtcactgtggttttagttatcatcttaatatatttcagaccaatccttaagctattttgtgtttttttccctctgaatgtataacttcctatttcaatatattaagcaaccaaaaaacagacaatgcctgtgttcctgaagaaggtccttcgaaactaacctaagaggtgagggttctcttatcctatttccctatcttgcatttaactgaagcgcttgaatagaggatagtat

SEQ ID NO: 122171 - DNA, 1059 bp, Homo sapiens
caaggctgggcaacatggtgagaccccttctcaacaataacaacaaaaattagctgggcgtgatggtgcatgcctgtagtcccagctactcaggaggctgaggtgggaggatctcttgatcccaggaggtcaaggctgcaatgagctaagatcaagccactgcattccagcctgagtgatagtgggagaccttgtctttaaaacacacacacacacacacacacacacgagggcctttgaccactcttgagtagaagactcgagaagaacaaagtagaaggccagagaagaacaaagttacttgaaagatctcttattaaagagaatgtacaagctatgaaaaaaaaaaaacacacacacacacacaaacctcatctggaatgaaaaaaacataatgcatttggtttctggttccttaggctgttatggaacaaccaaagaacattattttggtttctgaggtcagaactattttattcccctcaagcacactatgcttatggtttgagggagaatgagaaataggaaactaggaacaggctgaaatggtctaatcttgaccatctaattctgcagtgtcttattctcattctaaaagagaatggttatattcgctgttctagcataaaaagtaatgataaaaataaaagatcccgtattaccagacaataatcccctagactgttttaatgcttggttgagtatttgcttatgatctcagactttaaaagatggtctccccctatggtgaagcttgttaattatgtaggcatcattaatgtctgtttacttatcaaaattttatcattgttagttgtattactacttgacagtccaatttatttaattgaaaagattggttaacattttatagtcaaagtaattgtttcctgtgttttttcctgtttaggttattggagtgatgagtaaagaatacataccaaagggcacacgttttggacccctaataggtgaaatctacaccaatgacacagttcctaagaacgccaacaggaaatatttttggagggtaagtaagggaaatttcttcagacccat

SEQ ID NO: 122172 - DNA, 1001 bp, Homo sapiens
ttcattctgcgttgcctttaaggaacaacatactttcttcctgttctttttccaaaaacacacgcctatggctctgtgtgtggtgttttagccagcctcctcccagataaggggttcccttccctcctttgcattgaaaggaaagtgcaagtctggacatgtttatcaagaggaaaagtgacttctcagtaatagactgtcaaattcgggctgctgcccgagtgttcgctttgttatggcaggtgaagttcacctttgccccacccagtgtttccacaaaaaggcaaggttccaagtattcatatgaacaagtgttactttaggacttggagggttgggggtggaggatgtttgcatagttgaagccttgggcgggggtgtaggaaacggcgagtacagaggccatagaaaaagctaagactcagtttgacgtcgtcagccggcttggtcttctacccagtgactcaaagcactaaaagtcagcataatcggaactgaagtcagtagcatcgcccatttgccattcactgcagtagcaaaagtagtactctgtggtgggttaatcggtttgaggcagctccttaaatgaacatttgtgtttcatttttctgttattttcccgaacatgaaaagacgataaaactgaaatggaaaaggtaactgacaaaagtgtgccttacctgtttccgccctgatttctgctgattcaagactattctggctaaactgattggattctttttctaactaggcagtaggggatcagaaatcacacacggtaccggctgtgtttattctgagaggtgctggggagctttgggtctgacttccttttacatgcctgtcttctcttttggacagatctattccagaggggagcttcaccacttcattgacggctttaatgaagagaaaagcaactggatgcgctatgtgaatccagcacactctccccgggagcaaaacctggctgcgtgtcagaacgggatgaacatctactt

SEQ ID NO: 122173 - DNA, 1048 bp, Homo sapiens
tctactaaaaatacaaaattagctgggcgtggtggcgcacacctgtaatcccagctacttgggaggctgaggcagaagaatcgcttgaatctgggaggtggaggttgtggtgagccgagattgtgccattgcactccagactgggcaacaagagcaaaactctgtctcaaaaaagaaaaaaaaaaaaaaaacttccattttaatggagtggaaaaatactggggtggggaccctgtcataggttaataaaagtctttctgatgttcatggtttacctaaaggaaatcagcataccctgagaactaaatgtgaaagattaagactcatttcaagtaatacacagtcatcaattttcgcttctactcttgttgaatacgaatttgataaagccctgttcaaactgcctatgccaaggagcttagcgaagtgaataccaccttcctcgcgatgtgcagacagcctaagcacttcaccaaggctctgtctggtctagccaggatcccagcagtgctggcccctggagtcacaaggcgtgacagtcacctctgccaaaccacaataggtacttcctgagccagttcaattacttagcgcacccaagaaaacagaacaggctaagaggaaagcacttattcccaaagacggcacgttattacttggtaaagatactatttaggaacagcagcaatgaggacagttctagactatccctgccacagccagccctgtctcctcgctacacaataaatgatgccttcaggaaaaaacacccatctgggcagggaaaactgaaaattccctgctcagccttgcctggaaaccaaaagtaaaacatacgatgtttagtttgagctctgattattggaggacagtcactcaagccaggacacctgccctaggaacgcactgaaggcattggctgtcaatgtgtggagatgccttcagaggcagcaggtttgggggatcatgctgaagcctttgtgcaaatatccttcatcgtctaaaaaatgtctctgcttgaatttagttgagaaagaactccacactt

SEQ ID NO: 122174 - DNA, 1974 bp, Homo sapiens
ctttacaagtcagttaacctcctggcctcagtttccctgtctgcaaaacaagactcataatccaaacttagatgtctcagtgggccactgtgtacattaattattgtttatagcgcaagtggaagttgagctgtgttaattattattatcattcctgggtcttccagccaagtttaaaccaagccctcctcttgcttttagttcctgagatctgacagatacagccatgaggagggccatacatcaaggtgactcagcagagggtgcatgcctcacccggagaaggcaactggctccaaagccttggctctggggatgtggggcagcccaggtacctatggctttgttagaacctcatgctaacagagcaagagttctgaagctgctgccacactcctgtccctcacctctttgtgtacctgccatttaatttacccaagaagcctggagatcaataagaggaactcaccctgtcattagacagggccctaaattgcaagttgcagctggagaagcttcagaggcattgtgatcactcatgaagaaagatgactaatcgctttcttctggtcacttatttggcttatgactttggtttctctactctctaagtacaatagctatcagatttccatgtaactaggtagtgacaatcagtatgtccagtttcatttaatacacttgtttgtgggctctgctacctcacctaggccaaattgcttagttgtattgtatcctgccattttaaagcttgggagacaggcgaaggagggaaagctcacctcagttgaccaatcgccatctccatcagcatcagcatcagcatcaacatcactagtgagtgtccaggagacatcgtgtgtttaaccctttgcagtgaatttaatctctatgtatccagtgcaagttagacaaacagttccaacaggtttggatctcagccgtgtgcagaaccctatagtttagaaaaacagcaccaaaaatacaccagcattccaaagagcaggggaatttatcttctaccatggtttgaagccagctgttcagggcacagttgcaaccaatgtcctatattacttttctaggcagggaccagagcagtcagtttttacgggaatgctaagccccctgtaaggcagcatccttacccactcagaatggaagccagctctccaaaggttgaccaggtccctgcctgtgtgcctgacatcctttctcaaggaacatgcacacccatgtctattggcacggacttgtaactatctccttccgaatttggtccttgatgttaatactgactcccctccccacacaccccagccttcactttcccccagctctgcaatccccgggcagacaggcaggtcccaccgggctcttttgtctgctcagcacagcaggcagacgtcggggtggtggtgcatgctagttaactaattaatgattgtaaagcactttgaaaacataaagaaccagataaatgccaagtattattgttattaatgatgaggaggctgtttagtcatcctcagccctgaactcggctcactgctcccactgtggctgcaggctgatttgagaaccaggatgagaactcccctcctccctgcaggcgctgtttcacactgagtcagtgaccaaggtgaagggccaggaaaccttctctcctcatctcccacctgctgtcaaagcactgcctactttgtggctgtaaggctaacatttaccgaaagccagggtttgaaactgcctctctatttcccattcacctgtttagtaagttcactgatgtttacttgagtgctcgctgatggtgataagactgccatctctgtctgaggacagcatgcaacctgaaatgaagccccacttttcatttagtaaaattccatgaggatggattcacttctgcaaggatctcttttacatgttttgggggcttgatattttcttatagatgcctctatgtatatt

SEQ ID NO: 122175 - DNA, 1020 bp, Homo sapiens
aaaaatcaaaagaaggtggcttggcatggtggcttacgcctgtaatcctagcactttatgaggccaaggcaggcagattgcttgagcccaggagtttgagaccagcctgggcaacatagcaagactccttctctacaaaaattaaaacttacctcggcatggtggcacacacctgtagtcccagctacttgggagcctgaggtgggaggatcacttgagcctggaagccaaggctgcagtgagccgtgatagtaccactgcactccagcctggtgacaaagtgagaacttgtctcgaaaaaaaaaaaaaaatcagaagaaaggaaatcatatccaactggtgaaataaaaaacttcacggaagaattggtatttgacatataaagtctgagtagggttttactgagggatgaaagtaggaaaataagagcaagttaggcagtgtgctgctcgattgcacaggctgtgagacaatcgatacataagggatagtatgagttagggtgaaaacatcttctgggtccacagtgtgaaggctcttaaatcatagtgttatttggcaaggaatgaggggtcccagagagtttggaggctggggcaggatagaatcagggtgaactgaatgtgtaggatggattaaaggcaggtagaagaagaggattattcacagaccctgagagtagaataggcaaaaattaatcagcacctgcaccatggctctggcagtggggagaagaaaaggaggcaaatgttgcagtcactggggaatatagaattttgagcaacaggataaacacagcatctggcacaggcccattcattggtccagcctccccccaggcatcccattattgaagatgtgtattgtgtctgctatctccaataatctgtgccaggtactgtcaaaaaggcaaaagtcactgcattggcagaggtggaatgactgtgatacatggctaaaaactacaggatctggagggagagacatggcactgaacggcagctgcagggtcttcaggaa

SEQ ID NO: 122176 - DNA, 1069 bp, Homo sapiens
gaaaattctgttatttccacttctggccaatatgactaagcaccgaggtggaaacacagcctaaagagttgaaagagccctgttactaccctctgtagtctgatgtgagaaagaaaacataaataaatatggtggggctagatgtgtaaagggggtccctgtttccctctccatttcccccatattcaatctatcagcgaggccattttccaaatgtgtcttaactcatctatctatatgtttactagaatcgtgtaacttattcactccatcaatgtgtatgttgaaggtctacagtgttccccacattgttccagtggctgggagaaccagattgacaatgggatgtgagctgcacattctagggactcttcttgcttggaccaacataagtgccttcctactgaatgccccctgcttcctcttttcctgtctccccctattctccactttgtagcctaaagggtcttttcaaaccatcaccacttccttgttaaatggcttcccatcactccttaagcgaaatactctgcatcctcctagccctgctgggcagctgcgtgcctcctgcgtctttggcctcttttcacatcccatgttcatacctcacaagcgcctcctttcagatccttaagcatgtgcaaggttattttcttttcagagctttcaatctgcttttatttctgcctaaaacagtagatttcaaacttttgggggccataattcccattaagaaatatattttatataatgaaccagtaaatacatcaacacatacctatacataaaaggaaaaagtgttttataatacttctgatattttctattccttttttttagaaaaggtagtcatgacccactgactgcaatttggaaacactccttcctctgttctttaaaaggctggttctttctcatctttcagctttctacctaaatgtcagccacttacaggggctttctccaaccacctgatctaaaccaggcgcctgactggggttatttttattctcagccccttgtcccttctctttagggaatgtattagagttgtaatgaaatatttcat

SEQ ID NO: 122177 - DNA, 1029 bp, Homo sapiens
gtcacccttttgcttcaatcaggtttggtggaggcaacctgaccagaaacacttcgctgctgcaagccagacaggaaaaagattccatgtcagataaggcaactgggctggtcttactttgcatcacctctgctttcctccactgccatcattaaacctcagctgtgacatgaaagacttaccggaccactgaaggtcttctgtaaaatataatgaagctgaaacctttggcctaagaagaaaatggaagtatgtgccactcgatttgtatttctgattaacaaataaacaggggtatttcctaaggtgaccatggttgaactttagctcatgaaagtggaaacattggtttaattttcaagagaattaagaaagtaaaagagaaattctgttatcaataacttgcaagtaattttttgtaaaagattgaattacagtaaacccatctttccttaacgaaaatttcctatgtttacagtctgtctattggtatgcaatcttgtaactttgataatgaacagtgagagatttttaaataaagcctctaaatatgttttgtcatttaataacatacagttttgtcacttttcaagtactttctgactcacatacagtagatcactttttactctgtgttaccattttgactggtcgtcattggcatggggtggatatagggcataggattacttgtctcagaagctgtcatagaatttcttgctgccaattaaaaaacctgtgttctttacacactacacgtataaatattgtaactgttcatctttgttgttttatcactgtaagcctgtcaaatcatagtatcctaagcatctgtaaatgctaattttgcatttttggaaaaacccattccttccaagctagtgtttttcattggctccaggtctaatttttcactgtggtccctggcagccagtcttttgaagtttaaagattacctgtctcttgactgcagtaccttttctttaatttttaccaaaaatatccagaggttactggagttcttattca

SEQ ID NO: 122178 - DNA, 1107 bp, Homo sapiens
ccttagttacttaaatttagttagtgatgcttttatgttaaaaattaaaagtggccccagcttctaaaccagagaatcagtgctacttattcagggtttgggtaaggggatttattaggcttgttacacagtgtttgaatagtgcttttgtcctccagcttctgttgtacaactcataaactccagcaatccttttgtaacatggttggtcttttgcctttcagatacactgtgcatcatcagtggattgtttaccatattgtatttgctcccatgtttaaatattgctttagatacagtactttggatattgagttgtgacttgtttcttctgctgtttcatagtatacaaaggtgactggcttaaggaaaaactttagagataaggaacttttactcttacaccactattctttcattttttgactcagtgctaagtaggaggaagattctgagaatattaaaatatttcaaagaaatataagaatatgaagagaattataccggaaatgttttcaaatattctaagaaagatttaatacagtaaagctttagcaaactggaacttataagcaatgaatcattccagatagctgagggtttctccatttcaataccaatgtttaaaaaatcttcccaaagtactggtactatgctttctatagtattctgtatatagcttaatatttcattatgaaaacaaatcattatattaacactatggtcacaactgtgtcaaattatgtataggtgcaacaaagaaaaaataaagcatttttttaggttagtagtattataaagtgataccttttttcaaaattgttttaagctatggcacagtgatttgggagtttggaatgttttatttggttatctttggaattgttagtatgttaaagtttttatttttcacattcttttatcaactgtagtattttgtgtcctctgttgactgtcacctgggactgtgctgcctctaacaggaagtctaaatatttctttaaaagggtctcttgtttcaggtgccagccaagtcattatcaccatacatcatcagctcattttgcccagaccttagagcacttacagattcaaaagtcattttga

SEQ ID NO: 122179 - DNA, 1044 bp, Homo sapiens
tgacaaatattaatggaccctattacacccaactagaattactgggtcattttatgaaagcagataaaataatattgttttcaaagtttatttatgtatttattaatgaacaaggtttaatttttaacttttaccacatttttatcttattgtcaggaagcttttaatcagttttaaaatggccttacaatcacttaatttaatacactttgctttttataattacaactgatcatatgggattttttatattatttaaattttagtttatgtcctccttactaagaaatacagagattataagcaaaagtcaatgaaagaattaatatggacatgtttttaaattgtttaaaatgttaagagtcaaagctctgaaaatataataaagatataaaatgtatacatggaaagagatatgtggtatatctggtatttggtatatactatgatattgcatgttcattaagacctgtactgctaagtgagtatgcatccggaagaagttaatgtaagtatttttaaatgggtttgtatttttctgataaacagcactctccttctgtttgtgatcataggataaaagccctgtaagcttgtatatgttcatttttactgctacatcatgtagtgtgctcttaagattgagatctcattccccaggaagcatttctgtccaagattaattgcccttttaaaatcagcgtttgatgtatttctttggctatatcctggcttggtttaaccctctttgacctgacctcgctgactattacctccgtggctgagacaaaatccttcagcatgatgtatgcacttcacatttcagcctgtggtttttcatgtcgatggattcaattagttggtgttttactaatgaacatatcagaggttaaagaatttgtcagacagaacaaaattgttcaggctagtggtaatcagaaagctcgtcgctctattttttaaaacttctaggcagtattaagtatttttcagaaattttaccttcagtattacacattccaagatagcaaatcaagtcatttt

SEQ ID NO: 122180 - DNA, 1031 bp, Homo sapiens
ggtcgggtgtggtggctcacgcgtaatcctagcactttgggaggccaaggcgggtggatcacgaggtcaggagatcgagaccatcctggctaacatggtgaaaccctgtctctactaaaaaacacacaaaaaaaatcagctgggcgtggtggcggggcgcctgtagttccagctacttgggaggctgaggtaggagaatgacgtgaacccacaaggcggagcttgcagtgagccaagatcatgccactgcactccagccttggtgacagagtgagactccgtctcaaaaaaaaaaaaaaattgcagagttgtatttattatataatagaaattttttttaaaaaactttaaatccatgaaggaaacaggtaatgcattagtatatatgaaggtaatactttaacagataatgcttgtttcttacgaatgtattctgaattggaggaatgcaggattacttgcatgacatataccacacagttcatgaagcattttgcatctaaggaaatagtttgcctaagtagtagaattaggaacagtgggtttggtggtaatgttgtggtattccagcctaaatgactaagcaaagaatatggagcccaaaatatgtgtcattcagcctgagaatattgcaattttccttagtcaagtatgcttgcttatactagcattcctacatgtatgtaatgctttaaaaatgaacagaggttcattaggaaggggaagggcacctacaataatactgtcagaaccaatgccagaaaggattgaaggaagagaccactgactacccaaattattaaaactgaacaggatttaagaggttataaatacattttataaagtcttccttgaactttactagcctttatagtaaggtttctgatgatgtcttacacacatccatgtatctctagtgctagggtaaatgtttgccaaacaatccagttactgaattctttctatcattaccatgaaacatattatttacgatcattaaatcttggagcaattaacattaagttgattat

SEQ ID NO: 122181 - DNA, 1047 bp, Homo sapiens
ataatgtagaaaaaaattaattttatatttgctttatgtttatggaaagataagtttaataaaaataagaaaatatatgtgatgtcctttcagaaacttctagagggatatttaaaactttcatctcttcatgtgaggtattccattataatgttgttcatttttaataacaaataatttatatcattacagacagatttgaccagttttgggccatcaatcggaaactcatggaatatcctgcagaagaaaatggatttcgttatatcccctttagaatatatcaggtaggaaataacattttaaaaaacatccatttatgaaagcctcagacatcttaattgaagcactctagtgtagaactctttgtctgcatagtaactaaacggtatttattaggggttttccaaactgtgtctttcagtggcaatcaagtcagataccgcactgaaatatttgactcatatgcatttggtactcattatttgtagatttcatattggcagattcacatgcttactaaaatttatgtgtaaccccaaagtcagtacttggagcacttttacggtcattcagagtggtgaaaaattgattcacctgatgctcatttcccagcagaggttgatcaaagcgaggctctaccttcttgtctcagctgtcatactataaacaagccttcttgtcacagtgtatgtagtgccatgcttttacatttttgtgctttttattagtgattttgctgtttaaaacagactccaaatgtagcactgaagtgctctttttaaacagaaacacacatagaacaaggttatgtattgatcagttaatgaacatgttgtgaccgagggctcacggaaacataaccttgtattcccccaggagcgatgatttcagtgtttgtggtaaccttatagaacagaactactgcaaatcacaagaatttactaagtctgtttgttttggatggtgagtcttcagtgttgtaccacaaagtaggcaataggctcttaagtctttctcacagcatatttgcatgaggtaaagaaa

SEQ ID NO: 122182 - DNA, 1824 bp, Homo sapiens
ctttttctttctttaactaattaatttataccatcttaatgtcattggtcagtggaagaggaaaaaaaagggaaataagctccttgaataattcagtgttaataatttatatttggctaaactcgtaagattatttagagtgttttcataggctacattgtgatagattatgaattagctgcctatcaaagatgagaaatattatttggataagtatattgaatcttagtatccaggtgccacatgttgagttactctaagtgtatattatcaacaatatttatttcagcatttactcatatcgtgtattgtgatgtgttattcagttgcagaatattagcattggaaggcacttggatattacagaggtcaaaagccatgtccttatgccatacctagaatattgttttgcagatctagtgctatatttgtggtatagagaatattctgagagatccaagtggaagcatttactgtttcactggggccagagggctgtgagcatggtttgcagagtagggatttgaataagtgagagaggagcatactaggtaggggaatagtaggatacagagaaaggtgttcagggggccacttttggtagagggtttacaaaaggaagtacagtaattaaaatggaagtattggtgggattaaattgtagagaggatgaaatttagaatggggaatgggtttatagaaagattttttccccaatgtgaaagagatattttctaagatgggagagtagttttgcaggaagagaggagaaactatctggagtaggaaaaggtgaatatattggacggggcaggggtaaatgcgagaatgatcctttggagttggactgtcaggattcacagggtataggtgaagctcctctttaggtaagcagtagactcttctgggcttgaaagactgatgcagatacagtttcattttgactgtggttcagtacttaaatatgcaatgaatattactggcatatgtaattttgatctgattcctttacataagtaataattttacatttagaatttgttgtactcttttctttgaatttatactaaagattggtgatcatcgttttttttttttgaagtggataatctttatggcatggattttttaaaataatcttttgttttctagcaggttcattcatcgttgcaaggatctgactaatgctcttcattttattttcagtttggctttggttgaaataagaatttagcctgtatgtactgctttaactcctggaagaatgacagatgacaaagatgtgcttcgagatgtgtggtttggacgaattccaacttgtttcacgctatatcaggatgagataactgaaagggaagcagaaccatactatgtaagtacattgattgtggcaaatgggatatttaaccttgtccatttttgtaagaaaaagctgtaagaacttggaggccattatgtaacgttttagatacagctaattcatgcttattttggaaaaaaaattaacacagataagcataaagaaggaaataatcacctctaatgctaccactcagaggacaaaaccactgtcagcatgttgtcatgatgcgttctggactttgttttccttacatgtatgtgggtatgttaatggaatcatcagctatggtgccttcttgactttctttttcttatgcatatattcatatataataaatgtatgataatggaataataagatgtgcttttttaataggaagagatattgaaaataataggttcagattgtattcttttgtagttaggagattctaagcaactgtttgttaaaagtgtttttat

SEQ ID NO: 122183 - DNA, 1118 bp, Homo sapiens
ttcaatgaaaggtcacgtgtatacatgagaatcatcaactctaccgaactaagtgcaatcacggcctttcagcttgtgatttttagcctaacactattataataaaataaatgtttgaagtcagcctatggccagattctggttcagcagttacagctgtgagattgtggccaaactggccaacccctttgagcttccggggttttgttgttgttgttgttgttgttttgtctgtaaaactggggagaaaagagggagaggggataatgtaggcctcatagggcggctgtgaagatgacgggacatggtgtactgaaagtggctagcacagcagctggcacacagtaggggctctcttactgttactactaataatacattcatcattttcaaaagttatgaatagatttttccttaactaaaagacatacacattacaataaagaaaataaaggaagtgacccttacctttaatgtctaaaactaaatttggcttcaacttgctgtaaatcctgccatcggacttcaagctccagaactggctgtcagcattctggtccagggccaggcctagcttggagccagatgttaccaggctgcccacaatcgtcaggcagcagtcttctgctatctgctcagtggaaaagaccagatatcttaaatatgtatccagctgtaagtctcatagcaattatttctctggttacattgggctttaaaattatcttagttcctagcttcatttaccccacatgaggcagttcagctcttagccaactagaatcggacaataaatatttatgccatttatttcagatgacacgaatgatgggaaaatctcaatgtttgtgcatcgtcagagacttctgccctttgcaagactatcttactagtagggaaagcctcataacattagaactgcccatcatatttttccctgtcataagtgaccatgatcccaggcaggttctgtagctatatctccctctgacatctccacctctgcttggcctgaccttccagtatatgactgcacctctaattttgtagcactgggtggctaaagggcattttatcattttaaaactcggaattgcatttattagcatttgtctttc

SEQ ID NO: 122184 - DNA, 1028 bp, Homo sapiens
cgcagtgggaagcatggtgttgagcctgcccgctttataacagggctccctgtgccaggtggactatagcagcgtcatcacataaacatccctacttcactgtgagtaacctttctttcccccctctgtattttaactctgatccctttgtccttaacaaacaagtattctaggcctgatgtgaggctgtacatagacactgtctcattatccagttaatctctgtttgctgtcacagattcagccagcagtggcatttgcctgccttcaatttgaaacctttttttccattgtcacttacgggaattgctgaatgactcattgtgccgtggtcagccctctcgggttatttgccacaataggcctgaccagccagattaaagtgggcagtaactgtaagctgcctgtgtcatcagttcaggatctgtgtccccggtcagagctctaaattgaacattcagttcagccggttttggtttagtgccttaggaggcaggcactttgtcagtctgtggaatggatgggtatgtgcatggtacaagttagggattccaggaataaggcaaagggctgggtgagtcccactttagggtgcatacagatcactggggaagcatttttctgccccaccccctacaggttctgatgtagttgttctaacaggaggccttggactctgcattttaggcatgcattcaggtgattccttttccaggtaaacagcatcctgaaaacagcatcccaggggctttggaggagtgataggttcaggtttcatgtgggacatacaggaaacaactggtttttttttttttggagacagagtctcgctctgttgcccaggctggagtgcagtggcgcgatctcagttcactgcaacctccacctcccgggttcaagtaattctcatgcctcagcctcccgagtagctgggattacagacacacaccaccacacccagctaatttttgtatttttagtggagataggtttcaccatgttggccaggctgtctcaaactcctgacc

SEQ ID NO: 122185 - DNA, 1060 bp, Homo sapiens
agagggctgccttgcctgatgtggcaagtatctcatggatcccatggcctcaatgcttctgaggtttttctgatgctactgaaattgtttctatgaggaaatttatatggggtttctcctctcaccttctggctgttggaagtgcattttttaggggtacctagggacaagtccttgatgctttcccaaatggcacacttactcccttggagagttcccccatctgccatccccctcctgtctcaccccatcttccagttttgagtttgccatctggggcaggaagtttccgagaaacagcaactgagagcaaaattcacctcttccttttgtcttctttttgtctaaaggtagactgagtttaagtccccttcttcccctttaccccaacccaggaaatactgaacctttcacagaggtcaggggcatacctgtccaggaggtagtgctggaactgcggtcctggtgcctgtccacaggtgtgtggatttggactcagaccaggagcccttaggtcttccttggtgtttgtcacctgtcagtgtcccctcacacacctcaccctctgagatctgcagcctctgtgcctggtggaagaagaggccaagggtctaggaaaagaagtggaatagactgtgacttcccagattacatccattccatgcagtaatgacattaggagtcctgggtccttgttttggctctgctattgacagctctgaccttgcacttaccactcaatcatttgcacttcagtttcctaatctatcaaaagaggcccactcggatatgttaactctactgttttgtgattctcactgggaaaacgggaattgagggaaaacctctgcctgctgccatggctgcctagacagtgtccttctccaccagcagcttcatgctcttgcagtagtgagaggttttctgtaccgtcttccgaagcctcaagtgttagagagggtttttgcctcagcaggaaggaggacttgcctagcgtcttgtaagcagcaatattccaaggccacatccagagaggttaaggttcccgtcgtccctacgt

SEQ ID NO: 122186 - DNA, 1029 bp, Homo sapiens
atgccagtgaacttgtaaggaagcttggtgcagacgatgtaattgattacaaatctggaagtgtggaagagcagttgaaatccttaaaaccgtatgtattagaacaatgttcacactgggagtgggaacaaggacagttgattatgcaggtctgagatggcttggtggctttacaatcatgttggaatcttgagaaggatctatgaaaacattccatgtcactagaagttacttaggttggcttctgttttaattccagatgttaatacaacacagtaacagcatgtggataggcactgaggaagttattttgcttacatggtctttgctaatttttaagttagcatgctggtttgtaagaggcctgaagacaaaattggaaatgtgttcccttctgtggcatctgtcaccacaggaagaatatagagtagttcatgaaatacatgattagcccaaaacatactttcgtgttttggcttaaaaaaggcttaagagaaacagtgtaagtctaaatcttggtaatgggagcactgtggatgttcccagtgtgtctgaatgccaggctgtggtttggcctgaggtaccaagcaggaatgcattcaggaattctcttgggtcatgttgattctgactgtgactccagcttattcatctgacctttatccagccaagaccaagctgaagctgagagcagaaatgaggagtatttggaaagctattttactgcttctgtttaaaaggttttcccttttttgattagttttcagaagtcaactactcttgaccacattgagtagaagtatatttttaaagagaaagaaaaaagaaaaaaaagggagtccttatctgacaccgcccagcctttctcagccagtgccaccaacttctagcagtagtttggtggtgcacccagcagcagccagccaactcatcattccttcaactgttcagggagcttctactcttgccaggcagggttccaaacaccagctacagtggtgaaccagacaaatgcccactttcatggag

SEQ ID NO: 122187 - DNA, 1333 bp, Homo sapiens
taggtggcaaaattccctgcactttccagcagccaaggcagtagggacccacactagcagttactcaatttacggtgatgttaaataggacagatactgccaccacttagtgttcagaaaagtgttttttttgtaggccgtcataaagagaattctcatgaattctgtcaacaatatccccttagctaatacagtatcagatatcaaacaatcactttttataatgtccctcagcctcaatcagtagcatgacaccaaagtacagtacaaacaattttctgggacttgaaaccatccagtccaagtaggcagttctctgaagctctaccttaatttaagaataaaatgtaagagcatggaaagcagttttttgactggtgattctcttttggattgcacacttctttgggaaatagatgataggtctagattcctttccttgtcaataagcatatgcatcatcgcacaaattttacatgttattttaggaaattcacaatttcagagagttcataatcccttaccctacccctcaccccttcacccttgtcccgccccaccctcctgccctgactgatccaggctcagcaccctggtcttcaaggctattgtgagttaacatggtaagaacatgcagtatgaggatggttgtgctggtttgacagattcctctgctttaacaggaagccacatcgaggatgggaattgattttcatttatgaaagttgatgaacttgacatctctgaacaaaagatgtttatttcgctttggtgagaatgtagtcaggaatgtgatttttcttagagaacagctaagcataacaaattaaaaagggccccaaatctccctctcatagaggaagctctaacaattttagcctagaaaaattataaggcagatattacaaaggaccatctgagctatcttaaaccaacaaattattggtattttcggtatttgatattcttggtacagagctcatagaatgtctttattttaagcaactgcagtttcttggtgaacctaaaataaaaatccttgtgtaatatatcttgggaagctgaataactttattttcttttagaattatttatcatcttatcatcaaccagttatttgttgaaaacgtttatccagttatatctgctttagattctcgttaattgtggtttcctttgcatttcagtgttctaatcttaggcgcttcaggcggagttggtacttttgctatacaggtaaaaccattttttaatcttgtgaataggaggattttgtttgcatgaatttataaattaagatacattatttctccttaaaagctgagagaaaggt

SEQ ID NO: 122188 - DNA, 1039 bp, Homo sapiens
ctttaaactgatgacagatttaggatttttcaaattggcccaactctctgaacaagtcaaggtgtcaacccctgtcaataggatggaacacttaagggccccattcagtcatccgtgtcaccaaacaggttctcaattactaactgccagctgactacattctgggttcaggggcttgttagatagtaacagtgagccaaggctactcagttgatgtattagcattatcaggggaccaagaaaactaaaaacaaccttgggctgcaggctctgtatctcaaagaggactgaaacctttctgcagctcttaaacagcagctaaagtttgacacgactaaatgtccacttctgttgttcaaaccacatagaagtttcagtgaataattgtttaattatctttagcagtggaaaaggaatgtaaggcaggaaaagtgaagcacatgacttttgtgaatattacaagtgaagttgttttttttttccctgacagagtataatcctgactccccagatggcaaatgttgtaatgttggtataatggccatcagcttagattttctgggactttcccacctttcaaacactttatcccatgtgtcttgattttttattagtaacacaactcatgcaagctacccacctgtcagcatctctctcggtatcttctaccttccctcctgctgtatggattagctgtcactgctttcacataaggccagccctcggcttgtgtttctgatcccatccccctcacctactctgggatatcattccggcaggtgtctcctgcatcatcagtcttttcttttctactggatcatctccattagtatacagacttgctgttatttctcctttcttaagaagaaggaaaaggctgggcacagtggctcacacctgtaattccagcactttgggaggccgaggcaggtggatcacctgagatcaggagttcgagaccatcctgatcaacatggagaaaccccgtctctactaaaaattagccaggcgtggtggcgcatgcctgtaatcccagcta

SEQ ID NO: 122189 - DNA, 1050 bp, Homo sapiens
attcatagtgtctcttactcgaactccacaataggtataaagatcttatttagagagccataaaaatcctgcaatgcctcgtccagttcacttctctttttttctctctggactgcctgtgttgcagctaagctaccctctgtacagaatctgccctcagccatccttcacccatgctgggcctcaactccccctggacaggatggtttacctaacttactgccgttgtttgtacagcctgactttgaaaccaaaagttggctaaggagaagaatgtcatgtcctccacctgtcctcaagctgatcagtgcatcacccttcatccactacactaagtgtagaggtaataggttctcttgattttgaacccaagcctcactttaaaatgttatacttagccactccatctccccccacccccaccaatataacaattgaaacttctgcagactcagtaaaaggtttttgaattgtatacactataggtttctgcggcactgaaacaaggccaaattacaccaacagagctctgtcaaaaatgtctctctcttatcaagaagaccaagtttctaaatgcctacattactgtgtcagaagaggtggccttaaaacaagctgaagaatcagaaaagagatataagaatggtaaattgcttttaactatacttaattgttatatctccagagaagtttaattgtttgtagcagtctccatttggcaagtgaagctttaaacataaaccatagccttatttaaagaacttgccatgaggataataaaaatgagggtaatggctatgtgatgcttcataatgtccaactgtattaatttctgccataaatttgttttctgaagaagtatctttgccaaaaactagtagttactgtaataacatgtattcatgtatctttatattttaaactatctcctttatcactcttttggctttttaatgcaggacagtcacttggggatttagatggaattcctattgcagtaaaagacaatttcagcacttctggcattgagacaacatgtgcatcaaatat

SEQ ID NO: 122190 - DNA, 1029 bp, Homo sapiens
cttcattgcatttcatttttaaataatttgagtgtgtgctcactgattatacaaatatttagggactaacatacaatggctttagttgagtgctgctgaactaaactgttggtaatgtttatccttcagcaagatcaatcttttgaaaaaaaagaaaaaatgctaatatgtattaataagatattttaaatagtgttttcaggaatctgcaattaaaaatgtacatcagtaagtaaagttttttcaagcttgttaggtgctgattctgtttatctatcatactttgtatttggtaagaatccattgatcatattttcagttccatttgtaaagcatttcttaactacccaaagaaaagaaagtaaatatggctgttgctgtgtttatcagtctcaatttaatcaaaatgaatgtgtttctttagtaatagttttgtattttatctccccttaattatccattaaaactaagttctttcacacacattgcaatccataaatcatttatatttttttagagctatggagatgtgagttctacagattttttttcagttttcctaaaatcttattaacaagtaaaaccatttcattttatctctgtgaaattttatagcattgcattaatattaatgtgagttctgacaagttaggactgcaggattaggtgctttttttctgtcctcatcatcccacttagtgttcatctttctgaatgtgctttttagtagatggcattttgacacataattcctatggaaatgtaagttttacttttacatagccgtcagtgaatgctaataagaaaatgtatcttttaaaattgtgaaagcaacagtctgattttgtagcttaacttgacactgtaagaaaggaaatctaatttgcattttctgtagggcacaagtgccatgttattgttaggagcattgttcagtccaaagcttcactttaaatataagcaacagaagtacagaccaaaaataacttcagattgaatgtatctcaaactgtaaagtgttctgctttt

SEQ ID NO: 122191 - DNA, 1556 bp, Homo sapiens
aatgcatttttaaaaagacttgaacttaatatgccaaaatgttaacagtgttttcctctgggtattggaatattgagtacctaaagttttctgtactttatgaattctctgagatgaacatgtgttacttttgtgtaatcagaggaaaatacagtttaaaaatatacaattgaaagggtagattccaaatataattagagatatatcattcttctaaagataattccatttaaattccagggctttaggatcagatacaggaggatcgaccagaaatcctgctgcccactgtgggcttgttggtttcaaaccaagctatggcttagtttcccgtcatggtctcattcccctggtgaattcgatggatgtgccaggaatcttaaccagatgtgtggatgatgcagcaattgtgttgggtatttatataattctatatcatttgcaacagcttctctataaaacaatatatctgtcattcataagtattgctccttacaggtgcactggccggacctgaccccagggactctaccacagtacatgaacctattaataaaccattcatgcttcccagtttggcagatgtgagcaaactatgtataggaattccaaaggtaactttttcctttcattactttacagaaatactgtcaagtccaatagagagcacagacttgggaggcggattgggtgggtttgaatctctgctctgccacttttattaatcatgtgagttgagtatgtgacttaatctcttttagctcaatttccccatctgtaaaataggaataataaaaatactgacttcagagaggtttgtgaggatcaattagacagtcatgttaagtctgtaaattgtttctgtaatgggcaagatagcaaatattttagattttgtggaccatgcagtctttatcataactgcttaactgccattatagtgagaaagcagccacagacaatatgtaaatgaaaaagtgtgtctctgttccaataaaactttattttcaaaaaccagctggcttgtcacatctggcctatgggccatagtttgcccatccctaatgtaaagaaaggactttagcccaaagccacaacttgcatagtaatgcctcaaaaaatgttaacatctttactgttattattattactactgcatctattacagtagcaattgagtaatgaatacatgaatgttataatgttaaattactaaccttttaaaaatattaagcattgcaatatattaatactttaaatcttttaggaagataagttaccctgcagaataatgaagtttcacaacctcagcactgttggtgtttggggctggtaattgtttgttgtgggagactgtcctgtgcattgtaagatgtttagtagcatccctggcctctacccctacatgcaagtagtaccccaccaccaaaaccacaatcccacaaccaaaaatgtctgcagacattgtcaagtgtctcctggttagggaaaaggagacaaaagtaacccccaggtaagaccactgctatagagaaatactaccttatttaaaatct

SEQ ID NO: 122192 - DNA, 1050 bp, Homo sapiens
cgtttgatgaagcaatctcctcctcatctaagaagatttcaagaataccaaaaaaatacatacacaaagtaattctctggggcattgtataaaatagctaaatattgaaaacaatctaaatacccaaccacagaagactggtttactcaattatggtaaaaccaagtaatggagtactatacagcaataagaaatgaatgaagaaggtttctgtgaactgatacagaatgatttccaagatatattgttaagtaaacaaaacatagtacaaaagcattatatagcataatatttttggttgttttttaaaccttatcctgtattgtacttattagcactggaaagtggaagaggtctctgctaattagggtggagaattaatcacctactgggtttccttcttttcccaggattgccagcagtgagtatccctgttgcactctcaaaccaagggttgccaataggactgcagtttattggacgtgcgttttgtgaccagcagcttcttacagtagccaaatggtttgaaaaacaagtacagtttcctgttattcaacttcaagaactcatggatgattgttcagcagtccttgaaaatgaaaagttagcctctgtctctctaaaacagtaaacatatcttacaaattaaaatgacttttaggctgggtgcagtggctcacacctgtaatcccagcactttgggaggccaaggcgagcggatcatgaggtcagaagatctagaacagcctggtcaacatggtgaaaccccgtctctactaaaaatacaaaaattagccaggcttagtggcgggcatctgtagtcccagctactcaggaggctgaggcaggagaatcacttgaaccctggaggtggaggttgcagtgagccgagatcatgccactgcactgcactccagcctgggtgacaaagcaagactgtgtctcaaaataaataaataaaataaaataaaatgacgtacagagattctatattctagagagtcaaatggtcttgctcaattcttgtaattaggttcttgttaatacagt

SEQ ID NO: 122193 - DNA, 1371 bp, Homo sapiens
tgggtttttttgttttttgttttttgctttttttgagacggagtcttgctctgttgcccaggctggagtgccatggcacgatctcggctcactgcaagctccgcctcccgggttcacgccattctcctgcctcagcctcccgagtagttgggaatacaggcgcccaccaccacgcctggctaatttttttgtatttttttagtagagacgggatttcactgtgttagccaggatggtctcgatctcctgacctcgtgatccacccacctccgctcccaaagtgctgggattacaggcgtgagccaccgcgcctggcgaagatttctttagtattctgattccctctctgctagattaattatataagaatagtggccttcattgttcatttattcccttaggaatgattgcatgcatattgtatacaatgtaagaattgtgatatgaataaatgcagcaaaacttcttgtgtaatttgtacctttatgacctaatgtaatggcatagtttaattttttaatccctgaagcttaagagattcataaaaagggccgggtgtggtggctcacgcctgtagtcccagcactttgggaggccaaggcaggtgtatcacgaggtcaggtgatcgatagcatcctggctaacatagtgaaaccctgtctctactaaaaatacaaaaaattggccgggcgtggtggcaggcgcctgtggttccagctacttgggaggctgaggcaggagaatgatgtgaacccaggaggcagagcttgcagtgagctgagatcgcaccactgcactccagcctgggcaacaaagtgggactccgtctcaaaaaaaaaaaaaaaaaaggttcataaaaatgagccagcccacaggccccacccttggcattctgatcagggtgccattagagaatgttctctaaactctggcaaacaaataagggggcctctcctctcccagagtagtaactcctgctgttgttattaagccaagctccacatgtcagtcacctggaatcagatatcaaaaaaaggtgtactgatttttagctgcttcctcccccggtctggttgccctagtgcgttaagttcagagagatcagcagctgtcagattggaatctccccagcctcagtacaaactggcagagggtttcttaatggccttgccatacatgtggtgcctggtttttctctcagtgtacagagcaggtgtctgaggggaaggaagtgcccactcactttggctgttgtgaatcaccagagctgcagcctggccatgtagtctctgcactgggagtcaggtggagtaccccaggcccctgtccagaatggagcttgacatctatgctaaaacctttcttaaggct

SEQ ID NO: 122194 - DNA, 1010 bp, Homo sapiens
ggaggcggagcttgcagtgagccgagatcgtgccactgcactccagcctgggcgacagagcgagacttcgtctcaaaaaaaaaaaaaaaattctgttagaaaatatttttttgtaaaagtaagttacgtatatatatacatctggaattaaaatactgctgttactagcatttatctttaattgaagcattatgggttatgttaatttcatagtttttattttctgaatttttttaccatgagtatgtatcactttcataatggaaaaaacaatactgataataaaagttaacaaaacacaataaaaagttatgacagagacccttaaaaagtgtggaagacacaagacacgaggtattggaagacataatctaactcagtgttcagggaacaaaggttccagagaagttagacatactttggagattgttttcatttcatctttcatatttcaaaatacccctggggttggaggatccgaactacatccggttgccctaggacatgggaaattgaggctgtcggctgtcagccgtgcatttgggtgagcactgaggcttcctgcagtccttgctaactgggatcatgcaggttcttgtagctctgtgggcagaaggagggaaaactcccccaagctgtctcagcccccaagtcccagggccctggtgatgcccctgacttgaaccggcaggctgggactgtggctggctgtcagcagctattgctcagtgagctacatgcagtcataagcccttctcatctctgaatagctttttcctgctgtagcctgccctccttctaagctgcagtattccaaaaacaagatgtattcttggagtaaagaatgattactccctgaacaccctgtctctgtgctggggcctcatttacaaaccccactagactatttttcctcacacccctcccacccgcccccgttttgtgatgttgttaactacagcctaattgctgctgcttcattctgccttgggtgttctgttgtctcagct

SEQ ID NO: 122195 - DNA, 1114 bp, Homo sapiens
aacctctacttcccgggtccaagcgattctcctgccacagccttccgagtatttgggatcacaggcacccaccaccacacacagctaatttttttatttttagtagagacgggatttcaccatgttggccaggctggtctcgaactcctgacctcaggtgatccaccgagcttggcctcccaaagtgctgggattacaggcgtgagccaccgcacctgacctttcaccctccctttcacgctgaggcactgggataggtgacagtgactaaggtcagggcctttactcacctgcccctcctctgggtcatgatcatgtggtgaaaactcagagcagtaatgtttgcattggcctggatttcccgaagtgtaaccaagcctctgttttcttttaattttcaggtgaaagtgggagatacattggatcttctcattggagaggataaagaagcaggaacagagacagttatgcggattctcttgaaaaaagtgtttgaagagaagactgaaagtgaaaaatacagagtggtgttacggcggtggaaaagtttaaagttgcctaagaagagaatgtctaaataaatggattgctttttagcaatagagctgctttctagtggtaaaggaaggggtcacctgaaaaataggacatttttattaaaataaagttctcttagcgtttgtggaatctgccgagccattttgtggaaattgggatccatatctggagacacttcccaaggcctgcctcacctccaccccctgcccaccttgatccatgctcctttgacctcctcgtgtgagaacccctttgccagagtgagacgtgtgcagaatgaactaagccccagagggttttaatggcttgcctgctgtttcccacataaactacctcaggagtcactgtaaaataaactggccttgttgtcttagtgtttttatttaaaatgttccctgtccagcggggccagcttcccaggttcaggtttctttagacaaaaccaagcaaagtcaagggtaccttcagatgttaggggataacctctgggagagccctttctccccctgcccttctgaattaccagcggggggccttagtgcccttcaatttgtct

SEQ ID NO: 122196 - DNA, 1627 bp, Homo sapiens
tgtggtgacttccccagacctcagtgttagctactccaggcagtactacatcctcattcctcagggcgggcccaggtctgggcccctcttggggataccatgcattggaaggacacaggccattttagatggggtacacatgtcccttcccagggtccactcagaactttcctcttggactctctagaaggtcctgctgtcctatacctggccaccccctgccttggggggcacatgtcttcgttccctcccgactgggaatgtcaggctcctgcaggccagctgcatgctctccaggagcaccaactgggaaatcccctgacaggtaaagtcctttaaaatgatacttttacctacctaactctgggggccaaatgcttaagagggaaaggaaacagtcgaatgcaaacagtgtgtcataccagagtcctggaaaatttattgaatcacacagggtagtcatagaacccctgtgggatggcttaatattttgctactttaaaatgcagagataacagaaacaatctggattttcttcattcagctgataagaacttcagttccagtggctgtatgacataattttgcctgtacccaggagcattttttaaaatacaggattttaaaagcaatgttaagttgctgatctaactagtaaatttgctcctaagtgtcatttacagattatttctgttgaaactgcaaacagatttagaaaggcacagggactgaatgactctctgtcttacacagctactcatgcacacacgcactgcttactaaaagctgaagtgagatgaagggggcctacacgaataacaagttcaacttctttgtgcctggaaaggagggactggagcagccaggagactcactttcccccctcgcttgggcccttctctatgccttagtctctccagcacatgcacacagcatgcacacacacgcaccctacccaaagacagctgtggccctctcccaccacctcccccttcccaccgctggttgttgggggctggaggcgggaggtcccatggaatttgttctggtttctaggatgtaaacgaggactccaagccatgaattgccctgctttctagagggtggaatgttgaccctgcaactttagaagcacaatcatttattaataatttttttgaaactcccatctacccctgttagagaaatcaacaggttctaggaattaaatatgtctctttgtaacccagagcatgttcaatttttggaaaccgtatttcagtgattttcttaataccttacatgtgtagggcatcttcccccagaatcttacagtccctttctgtgaagagaagtggacacacgtgggaactctcaccatctctggactgtcgtcaggaaacgcctgcaggtccttgccctgtctgtatggtgtcctcacttctccatccatacaggtggctccagtgggcatttttttattttaaattttttacatgaagcaatagaagtacaaaatacttattttttcaaaatttaatgtgttccatgaaacctgttggcagtcgctttccttcccccacatctaaattctttggtttttagttgtttgttttttggatttttttttttttttttttggccttgt

SEQ ID NO: 122197 - DNA, 1872 bp, Homo sapiens
ggtgagcacatttaaaataggattttgtgcagaaagagatcattagaaattcatatactgtgcaacaagagtacatgttctagagggagacctgccctaattaatacccaggatagaaaaataagtacagggtctctactaaaaatacaaaaaaaattagctgaccatggtggtgtgtgcctgtggtcccaactacttgggaggctgtggtgggaggataacttgagcctggggagggtggggagtgatggcgaaggttgcagtgagccaagatcacatcactgcactccagcctgggcaacagagtgagatcctgtctcaaaaaaaaatttgatgatgatgatgaaaataataatgttgaaaatgaaagtggtataagcatcattcatgcgactgtgattccaggagggagatgccagcccaactgaccactgtttcacatggcctctctgcttccccaagccatgctgctttctgagtgttccagcgtgctgactctcagggcacttttgagccactcattcattgaactaaattcagtgaccactcttggatttggggttgcgatgaagacgtctagcacttggagcatctccagggtgtcccactccctgggatgtcactgggcatggacacctggagtctccctaaatagtctatttacccctcacttgtaacccaacatcagcttctttttgttcagtcagattctccagctgagagatttgggcattctctctgggttctacgggtgctggtggctgaatgaaacgccctgatcaagatccgggctagacgctggcattgcagagcctgagctgtacagcagagttcccatatggttggaagacgagcctcagagaattgggaatgtgtcagccagtcctacccagtgccaagtagcacagatttaaagatttcttgatactcctagacagctgagccgagattttatcatcagccacaaacgcagccagcccattgccgccttggcagcatttgtggaattaattggagcactgagctgacaggacaccagtgtgggagtatctaagaagtttctcttcagtgcttgtgttgtgttctgtgttgaattgtgtacccaaggtttctgggagtgaatattgccctctactgggacactaacatttttaattcaagcaatctagccaaaaatgtttctgttgacggcagtgtttctaacatgcttggtggaaatggaaatatttgtattaatgaggctgaatattgagagttatggggggtttcccagtttcaatgtactcttgcctcccacctgctgtaggaatgtgagggagtcaaaccttgtgtgtgttgttggtattcaaataattcaccagaaacttttccctgtactcatttctcccctgggcaagtctccctctagaacatgtactcttgttgcatgctatatacgtttctgatgatctctttcttaggaaattctattttaaatgtgctaatggaaccttattttaaagcaaagtctccttttctaaaatcactcctaatatagttatgatttgtaattgttagtactccaaacccaaatttctctctattggtaaaccttatagtaatcttatagtccatgggacctctaaaattattttagtgtaatagaactaaatggtgaataaattgccaaaaattttactttacattctacaggaattagcaagtaaggcactttgtatttgttagggcaatggttttccacagtgacccacagttataaatcaccttatagagcaatacaacttacctgtatgaatttgtaaataagtatttagacatacacatagtaatgaaacaaaactcttaacttgatttactttgtgcagtacactt

SEQ ID NO: 122198 - DNA, 1040 bp, Homo sapiens
gcaggggcattcaggtgacctgcagtgtgtttccttgagaggcctcctaccaggctgggaatccggtcttgaatttctgcctggcattgtccagcccttctagccactcagagacacccagctcagatgatggcgatccaaagtgaggtgtagttccttgaaatacagtggaaggagttgctaaaatttgactctggtaaaatagttctcggacccttgaagttgacttattatttgttttctgtcaatatcaccctgtgtgtaatgttttttcaggtaggagatggcttggtgagtaggaattattttcagtttcaaatctcattttggttttcattcctctgaaaattagcaatacagggatgaaaagaattgtgcctgtcttgcactattgtgcactgttcttgaactaaaaatagtgcttcacatcataagcactgtatgtgttgccattattagtaacctttgcagtgatgattgtgctcatggatcacccagacacactctccctcttgctgccatccccaccccattcacctgtctaaaacaggtactgtatgtcaaacacacaccattctgtggctactccttgaatggttcactgaacattttagatggcttcatgcttacagagtttctttctttttttttgagacagagtctcactctgtcacccaggctggggtatagtggtgtgatcttggctcactgcaacctctgcctcccgggttcaagcagttctcctgcctcagtctcccaagtagctgggactataggcgtgtgccaccatgcccagctaatttttgtatttttagtacagatggggtttcaccatgttggccaggctggtgttgaacttctgaccccaggtgattcgcccaccccagcctcccaaagtgctgggattacaggcacgagccaccattcccggccagaaatttcttaagagatacttcttggtcctgctctccactcatcctcaaccaaaatgagaactctgtgtttgtagtcagcttaatcagttgtggggatcacaactc

SEQ ID NO: 122199 - DNA, 1055 bp, Homo sapiens
ggcgcgatctcggctcctcacaacctccgcctcccggattcaagcgattctcctgcctcagcctcctgagtagctgggattacaggcacgcgccaccatgcccagctaattttgtatttttagtagagatggggtttctgcatgttggtcaggctggtctccaactcccatcctcaggtgatccgcccgccttggcctcccaaagtcctgggattacaggcgtgtgccaccgtgcctggcctcttttttctttttcttttttcctaggcttagctcagctgtctgagggacatagaacagacatcccttggggagaaagttgattttggggaacgtgtggatgtgttgactgtcccataatttgaggtttatggtgggaggcatgagaacattttgaaaatgagagaatgtcagaatgagaagttctccagagtccaggaggcaaagggaatgctcacagcagcctttaggaggtgggtgctgtggtggttgggtagttgtggcagcgcctacgtagcctatagtcaggtaggcgagaggaatgtctgtggcatgctaggcatctgggtgctgggtgtccacccaggaggagcagagcttgtgaccctcatctgggcaggtgaccaggaaatggaggtagcagtgtgctccccatcccctttctgcccagctgtgacattgttggtgtgctgtccctgcgccagctggggatgcagggagtggcctacacatctctcttgtagaagcttttctgtattgtggggtggagtctgtttctacgcacggagcagactgactttccagagtgctaatggaggcagaaggagatgtggtttcctggtgctgttggacagagggactcaaatttggaaacaggcccatggttcatcagaagaagcttaacaaaagaatgaagactctattatttcctccctggctggctgagggaaggcacagaaagactcgatttgaagccaggttctgccactcagtgatgtgacactggaggagttacctgtcctgggtttctctatttgttgaaattggaactaaaa

SEQ ID NO: 122200 - DNA, 1033 bp, Homo sapiens
gcactccagtctgggcgacagagcgagactccgtctcaaaaaaaaaaaaaaaaaagccctctttgaaaactgggctgggttaagggtcaggtgtggtggcttgcatctgaaatcccagcactttgggaggctgaggccggagggttgctggaagcccggagtttgagaccattttgggcaacacctggagaccctgtctctacaaaaaataaaaaattagctgggtgtggtggcgtgcacctatagtcctagctactcacaggctgagatgggagaatcatctgagcccaggagttcaaggctacagtgagctctgatcatactgctgcactctgcctgggtaacagagcaagacccccatctctggggaaaaaaaaaatgaaaaaactggattaaaagccagggtttcatgcagttccatctgactccaaagtttagtaaagaattccattttttggagggtcacctgcactaattcctgccttggtcacagactggcccatctggcttgttgacttgctcatgcacctgcacccagctcacagcttagcaggaagagggaaagaaagctgggaggtcatggcccattcctcagtcccagcttccttggaaggctggaatgaagctctcatgccgggagtctcctgaagtccttcctactccctggtctcagctgcatcccttgggcagcacaaatcaccccacccccgccccgttccctatctgcacaagaagcagtgctggtggggactgtgtgggttgacatatgtaacacttagaacatgaagcctgtgccacatgaatactaactactgtccccctcttctaggtttaatttttagaagtcaatgtcacctgtagcagagaagttccttgaaatcaaatcagacatatggcaattgtgaaaagattgaagtaaggtttaggtcttggttaaatttttaaaatccttgagtttgttttgttaatgactgagcatattctctccactttaccttttgtgtgtggcaggggccacacagccaccatccct

SEQ ID NO: 122201 - DNA, 1216 bp, Homo sapiens
attctcctgcctcagcctcccaagtaactgggattataggcgcgcgccaccatgcccggctagttttgtatttttagtagagaggggatttctgcatgttggtcaggctggtctcgaactcccgacctcaggtcattcgccagcttcggcctcccaaagtgctgggattacagacgtgtaccaccacgcccagcgtttttttttgttgttgttgataccagagatgccatcttcttgctgaagaactaatataatgggaaagttttatgtgattccgcctaccttctccatgcccagcaagacgataggctggttaggaactggcagatgagacagtcagcatcccaacaatctattaacaggtgccatattgacacattttctttacatcctctccctgtgggttctttcttggctcctaagcacccctgtgtgagcagaagcatagcagaatgtccaataattacaaagagaaaaattggagtgagccctgacacaggtttgattaggtgaaaatgtaatatcctatattaatgtctcacctgctactttttagcgctgcctagaaagtccctggaaacaatgagaaggaaaacagcatgtttatatgaattgtattgacaccatgatgaaaagtttaaagacctcaaattgtataatgtagaagcatagagtatgaaggtcgctagccaaccagcaaaaatgatttggtgtttgtatatgggaggctgggatgtagtgtttttttcctggtgcttaatttttttttttttttttttttttttgaaacggagtctcactctggtgcccaggctggagtgcagtggcgcgatctcggcccactgcaacatccatctcctgggttcaagtgattctcctgcctcagcctcccaagtaactgggattacaggtgcgtggcaccacacccatctaatttttgtatttttagtagagatggggtttcaccttattggccaggttggtcttgaactcctgacctcaagtgatccaccggcctcagcctcccaaagtgttaggattacaggtgtaagccatcgcgcctggcctggtgcttaattttggtgttaagtgataggttttggttgctaacctaattgtattgttcccatcattggctaaggtaagcttggggaattaattgtagaattactctttggaatgggaaacctattctgtatctttttaggggtgttta

SEQ ID NO: 122202 - DNA, 1047 bp, Homo sapiens
cggcggggctttggcggggcactgctcggcgtgtggaagggggtgtcggagcgggagcagggggcggggactggagggagatgccgggcggcgagcgggaggccgggggagcagccgctcggaggaacgaagcctccggaggctgcaaatggagcgaggccggcccgcggcggcggcggccgggagcggagagggatgggccccgccgccagggggcgcagcgctcccttcccggccgttccacggcggttcgcggttcccgctgcccaggagctggaggcgggcccggcgccttgggtgtgcacccgggctggcgcgaggcctggccggccggccgcaaagctgaagcctggggcgctcgccgctcctcgtgagcgctcctttccttctctatgataaacgtgatttcccacgcatgctttgcccttgcctcatccgtgagctgtgcaccaccgatttggaggcccttgtgtgcttgtttacctacgtctccctatgtagctattttaaacaaggtgtttttacagagataaaagttttattgattgctcaggtggtctttctggaagaattctgcacgtaaacgctaactcgacaagagtgccgggaggaacaaggttactcactagagttggaaatgtgcagttcatctccttaaagtaacttttgaatggttgaatacaaatagtaaacatgccacagggcagcgtggcatagtgccagaaagctacggttgcaggaaactgaggtaaggaactgagtccttcaggtagccaggtatataaacggctgggatggaggactttctcttgttacccgctccccacttccacccttgcagtccgtttttctctcttttttttttaaaccattcatccctagatattggctttatactaccatacaagagcctgtcaagctttcctcggtactgggacttgggcaagattttttatctccctcacagtttcacatccccagcctctaacccggtgtctcataacttagtaggcgttcagtgcgtatttcctaaatgaatggagagag

SEQ ID NO: 122203 - DNA, 1051 bp, Homo sapiens
gcatatgttggctccttgctgcccagtcgcggcgagggtttgaattaacgtatagtttgggtttaccgtaccctccttcagaccactccaattgggaatttagtaattatgcaagttcccccccttcgggcttgaaatcaaaaggcacagggttaagtttgaggaactacgtggaacattctcgagctgtatttggattactggtttagtgaagtcagtactaattgctatgcaaaattaagcaagcagcctgaagaaccaagccctgcatccagggggtgcttttatagaagaatctatacgtgctcagtgtcattgaaaacaggatgatgaaaagaatggggccgagatagcagcccttcaaattcaaaagacttaggtcgccctatctacatttaaaatagggcggagggaggaagggaggaggactgcttgggggagaatggttaatttatacattcgcagaagactgaggggaggcacttcgatttctgcagagaacttgacttttacacttgcacattaaataacacgtacgacacagtacatcgcttgacttagttaacagatacaccagttttattctcaccttcaatttaatgtgacagttataattagaatttttaaagtagaagttgcatttcattagttcagttttctaggatttcccagtagaagagttaggaatagttaagtagcacttaagcacattttgcatttaaatcactttgctgtggtgctttaagaatgtaaaacgaccttgttaaatttttggaaagaggactagatgaaacgtgtgtagtgaggggatatatatttaaccaatctttcacagtgacaactcaggtttttaaggagaaattaaataataagacaatagagatagaaattaacatttctctgttcatattgcttgaaacaaaagatttctgtcaaatacaataattgaactgatatagctgacttttcaaaacaactttcaggaaactcaaacggaccttgaatattattgtaaaagtatgtatcttatatttgcataaatggatctatc

SEQ ID NO: 122204 - DNA, 1039 bp, Homo sapiens
ctgtgttaaggcagtttctccttctttgcatatacaaacatgtgaccctgctctagtatattaggcattgcccctgaacagcttaaaactgggcttcttggaagccatgtgggggtataagactgtagagggcaatggtcagttactggttatgtttctgtccctatccctcttcctggcatcttcccaattccgagttaccactgtattactgagtccgagataagcagtctgagagaccagcatttgcggccagcagcagagctccagttcttggatcagggtcttcttggtttgtggctgccagtggtcacatttgtcttcgatgaaatagtcaagcaccaggctgattgccaggtttcagaagatgtgtggctcagactggaagaaggcctcaatctgttcaccacctgtctctctggccttacctgttacttctccctctaactacagtgctctctgtttttcactcagaagggctatttataggtttccaaatatggcctgcagtttcctgcctcagctgctgcccgcaattttccctgcccagagtgcccttcgcccagccttcatgggtcagaatcctgctcagcccctcctccatggaatcttcctgatctctttgagctccttgctcccccgcactctgggcctctcctttctgctttacatcacagtttccggggctcacgattgattcctcggttagatgatagttctatgaggacagggaccttgcttatccatttcttagtccccaaaggactcaaggctttcaatcagaggtgctcaattctttgtttgtttatttgtttgtttgagactgagtttcactctgtcaccaggctggagttcagggatgcgatctcggctcactgcaacttctgcctcccaggttcaaacaattctcctgcctcagcctcctgagtagctgggactacaggagcacgccaccatgcccggctaatttttgtattttcagtagagacagggtttcaccatgttggccagcatggtctcgatctcttgacctcgtgat

SEQ ID NO: 122205 - DNA, 1028 bp, Homo sapiens
acatatggtgttaaaaaaaaagttattaactaagatattagtgaagccttcctcacataagaatatcaggctgctggccaggtgcggtggctcacacctgtaatcccagcactttgggcagcctaggcaggtggatcacttgaggtcaggagttcgagaccagcctggccaacatggcaaaacgctgtctctactaaaaaatacaaaaattagatgggtgtggtggcgcatgcctgtagtcccagctatgtgggaggctgaggcaggagaattgcttaaacccaggaggcggaggttgcagtgagccgagatcgcaccactgcactccatcctgggcgacagagcgagactccatctctttaaaaaaaaaaaaaaaaaagggaagaatatcaggctgctgaattcaaaatgccagagatgtaaatgccctccgccttcttactgccatcccccagcatggcacatttcaagatattaagggatgggagtcaggaggagctgtaattaagctgattggaacctattgtgctgctctggagcacagacaccaagcagccttagggaatgagtgcctcaagatcactgggaaatgatgtcctcttttccagaaaataacgtagcagaaatactcaatctatactatttctccctttctttgttttccatctcccctccccaatttaattgtggtgcttactgtgtacctttaaaactgacttttatcatgcatttgtttcttaacagttgcgagaaagaatcaaagctggcaaaggtgtgacttcagctattgacctgtgtcgttaccatggaaacaaggcactggaggccctggagagctttcctccctcggaggccagatctgctttagaaaacattgtgtttgctgtgaccagattttcatgacatcaaattaaaaagacactattgttagttagctgaaaatcctagggaatgaggttgattgggagcgctttcacgatgcgttaatgacttttaaaacatatgcatttttccttccttttatcaca

SEQ ID NO: 122206 - DNA, 1052 bp, Homo sapiens
caagccaccaatgcgcagctaatttttgtattttttgtagagatggggttttaccacattgctcaggctggtctcgaactcctgaactcaaagcgatctgcccgcctcagcctcccagagtgctgggattccaggcatgagctacctcacccagcctttatttgatgttaatatattggaggcactatgctagtgccaagacaaccatcatgaacacgactgccagggtttgccatcacaagctcccttgactccagcttccctatctaaagtagccactccacctttgctctgtttttttctccttaacatttatcataacataaaattatcagtttgtatttaagtgcatgtttatttcttcttccactagcatgtaaaagatctaacggcaggtgcttcggtggccttgctcatggttgcatcaccctccctagcacaggcttacataggagtgcttgacaaacatgtgtgcatgagtattacattcgtgttatgttaggagacgtacaggaggttaggagaggtctgggatcgaggaccgtagactcaaattagtcattttaagaggtttttttttttttttgagatggagtttcactcttgttgcccaggctggagtgcaatggcacaatctcggctcactgcaacctctgcctcctgggttcaagcaatctcctacctcagcctcctgagtagctgggattataggcatgcgccaccacacccagctaatttttgtatttttagtagagatggggtttctccatgttggtcaggctggtctcaaactcccgacctcaggtgatctgcccacctcggcctcccaaagtgttggaattacaggcgtgagccaccacaccgggccttaagagtatattgactgtgtaatacattccatcccaaagttgcctaaggttgtcttttcaagtgcccagtaatagtatttctcatgccagtaaatagaaacccacccctccttgaatatgtagtgctattctgatatttaaagacataactcgatttaggtagttaatccagacctgtcagcc

SEQ ID NO: 122207 - DNA, 1252 bp, Homo sapiens
tccggcacattcggagcttgctgggttggcatatacggggctgtgtgatctctcccctaaagagaccctccagcttcatctcccatggtcctgcagcagcaccaagtttcataaagcatactgcttctgttctctgcgccttcactcatgctgtcccctctgcttagaatgtcctgccgtctttatctggctccctctgctcatcctatgaagcttaatttgggattgtctcctatagcaaatcctctgtggtttcccaggctggattaggtgctttcctcagttcctcaatacactgtgcatttctcagtcactgctcttactctgttatattataatgatccatttatgagactgatcctagactgtgagctcttggagggcagagacagtttcttttttctcttagtatatctggtacccaacacagtacttgacacttagtaagtgacgagtgaatgagcaagtaagcgagtgaacagaggccatgagtaagaaaatagaaaacacacgcagtaagttggggagaagcaacctgctgcaggagaaaatcgggggatagggcattggttctcaaggcagagaggaaaggaaagcgtttgacacagtttgaggatatcagcagggttaagaagattgcttaggaaggttgtagtaaactagtttgaagataaagactgggatttttactgtggtagtgacagaaagctaacatatgaataaaaagataagggaaaagagtgacaattgaacattgatgcttattttggttatttttgttttttttttttagagatagggtctcactctgtcactcaggctggagtgcagtgtcacaatcatagcttactgcagcctcccactcctgggctcaaatgatcctcttgcctcagactcccaggtaactaggactacagatatgtgtcaccacacccggctatttttttttatttgtttctttctttctttatttatttaattttaaggaacgaggtctcgctgttacccagactggtgatgctttttttatgactcaaagaatgcctctggggtttcttatcacagaagcacttgacaatggaagagatttccactggaaaatggcaaagagaaaaatatggtgcacaaataagagcacccctggaccaagcaatggctctgccaccaactcaatgcaaaatctggtaacagtcactgtgttagtcttttcttgccgtgcaataaaaaatacctggctggggccgggcacagt

SEQ ID NO: 122208 - DNA, 1051 bp, Homo sapiens
atcagcctattttgggcccctgtgagaaagttattttaataatatcttgctctggctggccgcagtgactcatgcctgtaatcccaacgctttgggaggctgaggtgggcggatcacctgaggacaggagtttgagactacctggctaacacgacaaaaccccgttatactaaaaatacaaaaattatccaggcatggtggtgggcacctataatcccagctactagggaggctgaggtaggagaatcgcctgaacctgagaggtggaggttgcagtgagccgaaatcacgctattccactccagcctggggaacagagtgagactccatctcaataataataataataatatcttgctctgctagaaatacacatgataagtggcaggtgtcagaacaaaaagggaaaagttgcagtccattctcctcgagacttatggagtttacatagttgttctctttcagcctttgaagtaaaccctgatgcacatagaagcacaaattaaaaaagacattagacataggccagaccaatgatcctcaaacaaatcagaatcacaggggtaggctatggagaatctgcatttttcgcaagctacccaggtgattccaatacatccagcccagcatttgtgagagcccagcatctgggaacttctggtctggtctggtgttctacagatcaagaaatgaaggcctatacaaaaatgtaaaaattattcaagttattaaccaatgaaggactagaaaccatattttctggctcccaacatatccatcttcccaggtcacaatgcctcttgaagtgttcacaattaagatcttaggccttttgctgtaatcagtagacaaggcctttaatccctgaaattttgaggtgtatgtcttgaaatctctctggagatctgttaacttccattctaaggtcttttcctttagacgcactgcttttaaggttgaagcacttaattacactaattcttctctgtcctagccttttgttggttaattttcatgaaatcattgaatttgttttctacagatggaagct

SEQ ID NO: 122209 - DNA, 1051 bp, Homo sapiens
aaaattaagccattaatagaaataggaaagttaagtggaaagactggtttaacttaggttcttgacatggtgagtttgaagtactccatcaaggttgatggccgttgccttgggaacttgctgctggaggaagcaactaaattctactattagcctgatttccttaatcatggcctttctgagacctgagtcgattttttttcctggtcacactgtgcaatttaaaatttcatgtttcttccagattccaagagagcagcatagcaagaaaaacaggttacaaagaaataacaagacctctgagcagagagagatttgttatgtagataatacaagtagtatctcctcgccttactctagtatatctagtatctccttgcctctctcctttctaaaattggacaccatagccttctacatctgctgttgcttctttttctccagtgaaccaaaggaacagaatatgagaaaattaattccttagacatccacgcttgcctctaaaagtcgattagctttcccagttgaaagagatggtaaaatcaggtacccaagcaaagcagtccaggtgtgaatggtgttaacttccttgcacatgccttctgcgctctcttattcatagagaatgaccaagatagcagagaaaaggcctgccctgttcctttatattctgctatctttccagctctgtaactagaaagccgagcaacacaaggcctgcttctaccaaaccaatactcagtgggctgctctaacttccgggctagcagatgtagtagatttctgatttgtgacccttctttctgttatccccatacactacacactgttttgttttgttttgttttgttttgtttgttttttttttgcagagatggccagcctgaactgtattttaaatagcattatagggctgggtgcagtggctcatgcctgtaatcccagcactttgggaggccaaggcgggaggattgcttgaggccaggagttcaagaccagctaggcaacatagcaagatcccatctctactaaaaacttttaaaagtagcca

SEQ ID NO: 122210 - DNA, 1035 bp, Homo sapiens
aaaaagcttagagcctaagtgagtatctgcgttctgaaagatttccctcctcccaacccttattgattctcaaaatgctggctgccaacttaaaattcctcatattcaccaagtagaaaactggaggatttctttctgaagaaactgtcaaactcaggagaaaaagccttgcagatgtggatatttggggcctcctcagtaaacatggcatatccctgagcagtcctcctacagcaagacccaccacttgacaagcctcagaggatctaagtgcccagaatatctgctgccttactctgaagcagaataggaaaagaggaccactgggcatttgagaaaagctgcttccacgaaacagcaagtcaaaaacaaactgataaaaagggaacttagcggaaatagagacaatgcaatcaaaggcagatgtttttcaaagcactataatcaatatacttgacaaggaaggatattaaatccatggtataataatagatgatccattaaaaaggacaattcaagaataaaaattagaattataaaatataaaaatatgattgcagaattttttaatcagaagaatggaagatacaaatgaaaaaatctcccagaaaagtggacaaaaaagatgattttttaaaaaaagaaaaaaaataagaaaactaaggactctttcaggaaaccttgtatctattaagagtcacaggccaggctgggcacagtggctcacacctgtaatcccaacactttgggaggccaaggcaagtggatcgcctgaggtcaggagttcgagaccagcctggccaacatggtgaaacgctgtctctgctaaaaatacaaaaattagctgggcgtggtggtgcacacctataaggcagaggctgcagtgagcgagattgcgccattgcactctagcctgagcgacaagagctaaactccgtccccaaaaaaaaaaaaaaaagtcacaggccaggtgtggtggctcatgtctgtaatcccagtaatctgagcacttgggaggccaagggggtggatcac

SEQ ID NO: 122211 - DNA, 1033 bp, Homo sapiens
tagagacggggtttcaccgtgttagccaggatggtctcaatctcctgacctcgtgatccacctgcctcggcctcccgaagtgttgggattacaggcgtgagccaccgcgcccgtcctgatataggtatatctaaatctcatttactctgactaacatgcattcatttcacaattctgtatatctggtatctgaaggtactgatttggatgtggttatcatactagtttcttggcattttacaatttatactaacttttcctttataatagagcatgctctcttagtatatacacggcaagctgatggaaatgagggattttgtttcattagtaaccaaactcataaaaggtaataatgtttagggaataaaatttctgattaacttaggaacagttaatttgtggtccaattaacttatggtagtagatttcaggggactataaattaatcgtttcttggttttctgaattttctattttttttccagtgatcgtgtattacttgaataatttaaaatgtagaaatgatgaataataaagtcttaatcacagtaagaaatatgtaataaacaaaactgaatctttgattttagagatctttcaattattctgaaatagaattatctatacattctatatatagatatctgtatctatatagttatatctatatattgatatatatacattctatccctggactgtgagcttcttgaggacaggctgtttattaatcttcatatctatattgctttgcagaaagcctgaaccataatagaaccttaataaatgggttttttttgcatgaataaatgaggatgatatgcaaaccacagttaattgagagtcatacattttttaaaatgttaatttaaacatttgagaccaataaatgtaaaatattatgctcattagcttttttctttcttaacagctttattgaggtatattttatgtcataaaattcacccatttcaagcctacgattcaatgatttttagtaacttttatcaagtgatacagtcattaccaa

SEQ ID NO: 122212 - DNA, 1044 bp, Homo sapiens
tttggtttttggttttttttgagacggagtctctctctgtcatccaggctggagtgcagtggcacaatctcagctcactgcaacttttgcctcctggattcaagagattctcctgcctcagcctcccaagtagctgggattacaggtgtgtaccaccatgcccggctaatttttgtatttttagtagagatggggtttcaccatgttggccaggctggtctcgaacccctaacctcaagtgatcctcccacctcagcctcccaagtgctgggattacaggcgtgagccacagtgcctggcctgtttccagttttctttactaaattaaacaatattgtgataacatcttactgtatataactttgctcaatttcatactatttgcttaaaaaaaaaaatcctgaaagtgagattcttaaatcaagaagagtattttcagtatacctctgtgcagaaaaggattactgtcctgagaaaaacctgcttataaggttgatccttggctagcatcggagaagctggattttaggagtgttcctaccatcctccaaatgataagaatggctcgcagtgcctaaactgtttacagacaatatggtttatactgaatacctgctttccttataggagtctggaattttgctacatgctaggcagaaaatgcctacatgaccagccctaataaaaaccctcaccactaagtcagtctccagtaaatctccgtggtagacaatgtttcatacatgttatcacagctcattcttggaggaattaagcacactctgcgtgactccactgagaggggattcttagaagtttacacctggtttcttccagacttcaccctatggggctgtctctttttagtggttttgcattgtatcctttcactgtaaaaaagtcattacgatgaatttgactatatgctgagtaacatctgtcatcctaacaaatcatcaaacctgggggtgatttggagatcccgaacacactcattttctgattttttattgtttattttccacccactcctgatccttcctg

SEQ ID NO: 122213 - DNA, 1038 bp, Homo sapiens
aattaaaacaacctcttatcctctggctggattcacagtctgttcaatctgcagcagctcagtagacactgggatgcttctggctagcaggtagcagtgtcacaggcaggcaggctggaggagcagctcgtgctgaggcagctgagcccatcctttccccagaggaagggtccttccgtgtcacagaggagtggaccttgagcctaagaagatgactgttggggaggtgggatgggggtatcttttatatacaagatgcataatttactgcattattagattctttattataagaagtgggatgattgcacagttggattattttgattaattttataggtctagaattaagatttttttgactcatttagcaggacatctcaagaaaggttaggtttcatttccttaaaatgcagttatttcatttcggtaggatgttagatgtgaagtaattgcttcattgaccatcaccatcatttaacatggtagatactattataaggggctcctatcttagtgtttcattattctaacttctttagcttctgtattagcaagatttcactcacttcaaattagaaaaggtatgcacatatgcacatcttaagctttttgacattttcatttgaaaaaaggaagataaattttattagaagtgaaacatagggcatgagtaacttggataagaaatttaaaatttaaaagtataacccagggactctgggtggttcagagactggttagaatatgaagaattgcactttggacatctgccaacgtttggttcaagtaaccacagttcctagtaggcacatctggcctcacctaagcagcatattggtatgcagagacctcacaggatggatgaccacagtggacctttcaaagacatgcaagttcactactatggatggaggttaatatctgattgtaaaatgggtgactactggtctagttccacttgtaaaaagttacgttgtatagatagtatgatgaagatgacaacagctaagcaaataaccctgtagtaagtgattt

SEQ ID NO: 122214 - DNA, 1483 bp, Homo sapiens
cattggaaacagatctttgcccctttattcccaccttaccttcacatttcccagcctcagacacatttgatggcctaagtgaagcctgccaaggttccctctttggtccatcactgcctcttgttatttagctggagaggtctttgcagaatgacatttccctcctacagtgcttactgtgccccatttagcatgcagccttcacatttttcctaacccctgcttgctctctaaaggagagaaaacccaaacctcagcctcttgtgaagcaattcagaactcaatgcctggcagttggcgttggtcctgtcactaaactttaataatgattgagatcccccttattttgatccagtctccagtattcataggtaaaagcctgcttgtcttcttcatctgctatcacacatcttttcttctaccccttctaaaatcaaagtatgtatgcccactccagttcaccaaatatttttagctttctcatatgctgattttgctcagcagcattttctagtttactctctgggttgtcagtggactgtcatttctcccagtccagttgtgcctgaagcagttttcatagctaaatgacaaacccttgaagaaaggggtttgtaatgaaaatggaaactccagtgtgctctttgtaatcagttctttaatcctccacctgccagaccatggatacaattcgtaattatcagagcagagaactgaactcccgtaccgcggcagaaagcatgagcactatgggagggcaagtgatagaatctgctctccagtggggagggggacagatattttggaaaactttgacacagaatgtgatgtatttgtataaccttttcatgtaaaactgtgctgcagtcagagagggggtctgggttttcttcattaaaagcttattaaagaaagaaataggacagtcgttttgcttcggtagatgggggtcagagaggcaggtctgatctcctcaggatattaatgtctgccttcagccaggggaaatgagccgtcacttgagttagaggcagctttatgtgctcatcactagggattcccatatgtccagggagctgcaacagtgaaaaatggcagagctcagtggtagagtacggagggctttcattggaattcatgtcaggaagctcagctcagtctgcccagagcaagtctgtttaatgttgatcagctgtccatctgataaaccgaattgatacgggtattccctccaagggctgccctgacagtgacagccgccgcacccagatgtcttgttaggcttttttggtagtctcaagtatttttaaccccttttgtgacatgcaaaccccaaagtacttttagaaacctagataaggatgcctagctaggctttctctctgctcctctggcagataagagccccacataactgtttctagaaaccagagattattattagttagctgcccctcctcctcctcataagcatctggttgac

SEQ ID NO: 122215 - DNA, 1030 bp, Homo sapiens
tgaacttgggaggcggaggttgcagggagccgagatcgcaccactgcactccagcctgggtggcaggagcaagactccgtctcaaaaaaaaaaaaaaattcactcccacctccaaaaatactgtttacatgttttccagatacttctgggagtattttttctaggaaaggagggatattgtatatgtaccctaagagcacttttaatagaggattatgaaaaagcaattcatatttactgaggcataaacattaaatctgagactgactgagatttgggaagcctttctgggaaacactggtcttttaattgtcactacccccatgtcatccactggttaggatggggtgtattcctttgtctatgcccatgtgagaggcccctgctgcagtgcccatctgatgttctgttaattcccttcccagatctagaccattgtaattgtttactctctatgcagtgctttgtggatggtggcagtcaagcactgaggggaaaataatttttcttgggatttccacttctcttacaacaccattaaatgtttcattttcgtatttttctctagtttcaaatttgtgatgaggtataaacatagtgttgaataacctttttttaaaccaggcattcttcaataacaatgcaaaaagtatttatggaatgtttactaagtatgcagtactctattttgggtaaaggatgaattgagttcagtgttttatttttttattttgttttattttatttatttttttgagatggagttttactcttgttgcccaggctggagtgcaatggcacaatcttggctcactgcaacctccgcctcctggattcaagtgattctcctgcctcagcctcctgagtagctgggattacaggctcctgccaccacgcccagctaattttttatatttttagtagagacgaggtttcactatattggccaggctggtctcaaactcctgacctcaggtgatccacccacctcagcctcccaaagtgctgggattacgggcgtgagccacca

SEQ ID NO: 122216 - DNA, 1312 bp, Homo sapiens
attaagtatctattattttgcaatatttatttaaatctttgtaacttattccaagatctgccttcttgatcacatctttctggttataatagttatatctgcaaattctattttattaaatattgataaatgtgggtttgctataaaaatttaaaaatgggttatccttttaagaaaataagtatttagagtaattggtaaatttatttaaaaattatatataatgacagtattaaaatgtttaaaaataagttaatgtaaacaagacattttaaagtacaggttggtacttcattaactttaattttgtgacttttgtcagttgatgtcacaaccttagtgttattttaaaaatagtttttatagggctacttaattaagtaacatggtatttgcttatttcaaacagtctgcctttgttcctgtccaagccatgctggcagggcattgcttttcttttcccttttgttaatatgctgtgttagataatggttctgtaaataatagattccaaggacctttgatccaccgttactgtaaaataaaatgcaacttaattttttcagggcataatggttttaaccttgcgtactaatttgactgtgcttgtgggggcagatccttaaatgagacgcaaatgaaggaaaaattgctaatgctgccactgtatatctaatgagcactgtgtaataaaccataacctctttgacatttctctggaaagcagcatgattattttggatagctagccctttgtggatggctcattaccgtctggcataatatgtattgatagagactgtaattgtcaactcctatttgacatgctgcctctaataaatatggcttgcatcgctggagcccactgatggttatatgggaaactgtaattaaagaaaaaaatatatttttaggttaaataagtatatatgtatataaaatgtctctatagaagattatctgcttccttactgccaccacccccagcttcttgtcatagagtatttggagcttccctgaaggattggtgctgttttatcagtataagggccaacatgtgacaagatgtgtgtgtgtgtgtgtgaatcatctccattggcaaagaattgacaatatgaaaaagctcgttctacatatataacatccataatactatagtattattttattttcttttgtttttagagacaggatctctctctgtcacccaggctagagaacagtggagcaatcatagttcactgcaaccttggactcttagatcctcctaccccagcctccctagtagctgggactacaagtgctaccttca

SEQ ID NO: 122217 - DNA, 1025 bp, Homo sapiens
tatggtgggcactcaagtgctccatgtattattgttgatttattgagacaaaattttcttagggggttgaatgtggattttggtggggctctatataatttaaaaataaaaacgtttatgtttgcaggccattatctctattactgcatgtttcctttcacacatttattctttatatgttgtgaaacacagatatttatatattttctttgacacaagaacctttttttaaaatagacttgtgccctaagcagatattctgtctaatgggctttccctatagacaaagagtaaagtgtatttcatttgtcattagtcctgaaatgtcagtgctgcaaattttgttatttttggaaaccattacattcatactcattagagacaacatttcaaggaaatacttgaatgattatgcacctacaagattttctcttgtccatgagtaatttgtatcctgtaataatatggagcttctattactctattataattacttacatatttgttgcaaataatgatgtaatggatttttttgaggctgtacgtgagaaccaacaaactgcgacgcaaaacaagtttccaccccttttttccaaagctatagttaatcacttgaacactatccaatatagtagaaagctggcagacttttctttgcagcaggctatgtaaaaatgtttataatttacagcttattatgccatgcaaacgactgtgttcccaatgaaggcgagtgagaaaatatggctgttaaattacttaactcctctttgttacttgttttctggcaacagtggaaggatactttgcacttaaaatgcatttctgtatttaattttataccattcaactcagaactttaaaaaatagggatttgcttttttatctctctctatagatagaccagaccaatttaaatttaacaaaaacagtaagctgaaaaatcagaattgtcagggaatgaaaatgtaataatacaaaattattagggtttaattcaatttagggctttaactttgcaaaac

SEQ ID NO: 122218 - DNA, 1063 bp, Homo sapiens
atagtaaaaaattttaaaatcctttccttaaagaagggctgtatgttgactggtaagtagccaaagttaaaggcactgtccagtgactaattctacattttaaacagtgcttaattttgggcattcatcatgtgatagaagttgtgcaaatcacttaaaatattaattttattggcagagtcagcttagtagcttcatgacttaatggtgatcctttgaactcatacggaaggcatctcagtggtaaacagtgtgtcataataaaggcatagatgaagggccagagatctgggttcttgtctcaattctgcaattgattagctatttgaccttaagtaagttacttaatcactctttgaaattactcatctgtacagcaggggcaatgatgggcttcaaaccaggagcttaactaacagggtacacatctagataggttcaactatcctgtggtccagaataagtcaccctgaccacctcctgtctctgcaaggcacagcactggacactgaaagacactgaatatttcttatgaataagaaatagtctttgacctcaaatgagtaggtaaggaaacaatgtatgcatctagagtcttcctgacacttgctattgatgtaatttcctttctaaaactcttttgctggaacttaactactagagctatttccacagtcaccattgggttcacaatccacccatgtccactgataaaccctttgtttaactaaaggtaggtagtctttaacacccctcacataagatgataggtgagagctgacatctgtaggtggcttagtgcctaagaaatgtcttcctcactgtgctcttggactttccttctcactcctgaaagtgggtggtgttgataatagaggcaaagagggcagattctctgattggttatctctaatcctggcatcctccctctctatagttactggaatcttaagtctcccttttctgttgttaagatttccctcattccctcctcttctcaaggtttttgttttttgttttttgagacagggtctccctctgttgcccaggctggagtgcagtg

SEQ ID NO: 122219 - DNA, 1050 bp, Homo sapiens
catggtttttgtgagaattagagcatatgcatgtaaaacagcagatgcctggcattatagtatattatagttgttgttatattgttaccatttttattactcagtgtgttaagtgccaaactagaggtttatagtaagtccatgaaagcccatggaagaagcttacaactactggccctggtttctgtgcattgtactgttgtagttctctgcctccattgtgcgtgtgtatacatacttcattatccatgtctgtggaggccttttatttgtttgtagctagaacatatttcttcatgttggttactcatctcattcctttaagtgtaggaattctccaagattcccttcccttctcttcttttcttttctctctcacctaaaagctcatctgtcagttcctacagcttcagccatcgcttctatgaagatgcttcccaactctataggcacagcatttccagctgcctgcttggcatcaccatctggaagtccttcttgcattcaaagttaacatgtccaaaactgaactcattcattcctcattagttctcctccttctttccaatctctactaacggtagcattatcacctccagcaaacaggttggaatcttacattcctttgctttctgatccctccccaatgtctccttcatccctccagttggccacactagccttttccacctccatgctactgccatcattcagcttttcttccccatccctattgccactaccctcatttaggccctcattatctcccatctggactactagaagaggctcctcctaactgatcttccttctcctttccaccgtacacaacatagcacctgccagagtaacaggattaggctcagagtaacagttttagtctttagctctaattacatttctcccttgcagacaaaccacttatgcctccagatttcctgcagaattaagtccagactctaaacctgactttcaaggcccttcactctttaggttgtctgttttcctggacttgttttaccttcacacattgcccaaatgggtagcccc

SEQ ID NO: 122220 - DNA, 1019 bp, Homo sapiens
ttcagtgtgactaaatattactttttaaatggccctattttccattagtatttttaaatctttagttaccatttcagtggggaaatctttgttgttgtttttccagtggtatatttaattccagggtgactagccacatcttgctgcaaacatgattgatcacgacattttatacttctttttaatttcagttatatttcagtatacaactagtggtcagtaaccatttctgaaaagttcctggcttgatttagtccctgctcaacaacccctgcaccctacccccattctactttctcttctctcttccttcctttccttccaggcacctgtcttctgccacatgctcatcaaacctaattgaagctttgggagggctttggtgaggcagttcttggccctgctgtccctcgaggatttaatgcaggtgggatgtgtgtgtggccctcgagccatatcaatgactgccacagctcctgtattctaaaggctggtcacctcaggccctaaagttgtttcaagtctgggacagtttagtcttagaatagatatggcagtaataatacattttgggtcattttttccatggaaattaacctccagttcttctgctaattttatataaaaatctgtgacatgcagactatttttagtctctctaaaattacaattctttaaaaaaataattttcatggagtgtttttttcttttataactgagtaatattgctgtcatcaaattgctaattatatttatgtttttaacatcatttcattgataccatttaaactttggtcctgtgtctaaatctcagagaaattaaaagtgaagtagtaggacccaaaagggtccctataccatagggctctggagttcattaaatgtcacttaattttttttcttcaagttagaaacacaactataatatactaagtcatttgtcttcttagaattctgttgtttttaaaatacagtgtttttttctccagtcttaaaaagatatctgtgctcttgtgtgc

SEQ ID NO: 122221 - DNA, 1157 bp, Homo sapiens
agttgtcaggttagatgagatggcaccttagaaagcttgaggataccatggtaaatgaaacagttgcccctgcagcttcctggcaatttggtaaatgagagatttcttcctgctaggatagagcaaatactgttctctgaggcttaattggctagaataacctgtatgtaatttattccaagtacatatcttttcattcactaggtgccattctattcaataagtgccatgtaagtgtaacttttaaaaatcaaattatatttttctatggacataaataatttgagagatgcgactattatagtaatcctctttgctagctctgctggtggccattttaaatatctgtaaggtcttaatgttaattgggtggcacatttgtgattatgagagctaaggtttgaacttaggcagccagtcatggaatcttttctctggtggaaatttttctgtggaaaatgaatacatgaaatgtgtgtcccgccatcactgtcacttccgatttcctcatgtcttggtctcctctaccttgaattcaatgttgattctggaaaaataaacgagattttcctaaaatttttgaacttctgaaccatcatgttgcaataatatagttttacattttgaatgtttttccattcatttttaaacatatttttcctactaaaaatctatgatgtatttcactttgctcttccccctcccccctaatttgcccttgaggtattatctgttactctataaagtatttcatcatttcccccaacttcctgatttttactggcttcatccatctgctgttgtattttttacatttggctttagcctcttcataatatgttatgagtaattgtcagttgaacaatcatctacctttatctctttccacttgttcaagtacaaatcttctaacttttgcacaattgatgtgattccattattagctaataggactgatactccatacactaaatattgattacttacattgaaacattctttttggtaaaaacaggcctacatactagatgagtaaaaccataaaaaattatagactattaaagtgagtagttctcttgcatttgaatggcagattctattgaaactggaactgcaagttgaggaaagcactgagtactaagggaatactcattcac

SEQ ID NO: 122222 - DNA, 1085 bp, Homo sapiens
gcatagaaagggccgggcgtgatggctcacacctgtaatcccagcactttgggaggctgaggtgggcagatcacaaggtcaagagatcgagaccatggtgaaaccctgtctctactaaaaatacaaaaattagctgggcgtggtggcgcatgcctgtagtcccagctactggggaggctgaggcaggagaattgcttgaacccaggaggcggaggttgcagtgagccgaaatcatgccatcacactccatccagcctggtgacagagtggaactgcgtctcaaaaaaaaaaatagaaaaaagtgctaaaaattagcaaatttagggatgggtgcatgaaaacaggactttataaaagggagaatgtaggacagataccatttaccaaatattattttgcaggtataataaaaatggctatttatataatttaaaatcataaatattgacccagctttttttaaggtaaggatcctcaagctagcttggaaaatagatcaaggtctctaagacgagcctgtgaaaaagactgccagttttccctggggagccccagcctactgtacagccccttctgactgactgactttcttccagatacagggtcgctgcttcacatgtgctgataatacatgcaggaattggctcttcagacttcactgccagactaatcacatttatagtttcttggcttcttttagtttttaagcaaatagtacccagcaagttaccacagttaaaacagtggaattcagagtacctgtatttctgaaagctgccgctgtgtacatggaatggagtctgatttttaaacagcaattttgccctttgctttatatcctatcatttattgtaaagaaactcttcctgtttcataatttctcatttgttctttaagaaaagatggcaaaggaatataattacagacatggtttcacttttattatttcaatctattatgttctccttgtcagattaatatttgtggttatatgccctgcatggcaagtgctgagaaaacatttgtacaaagtcttgccaaggtagactattgagtatatggagtatagtgacttcactgttcaa

SEQ ID NO: 122223 - DNA, 1011 bp, Homo sapiens
tatatctggtgtttaccttcaatatttagaattcaagaaataccacaagaacctgaatttattagtaatagatttaatatcttttatcaaattggtatgtttactttttaaaaatgagaacagtctttaaaatatgagacaccattttgttaaaattctaatttttttcacaatgaaggttttccaaataggatttgggtatttatcatatatcatgaatattataatatatgtaaattatagcattaaatgcaaaatagtttggcattgcagttttttccaactaaaaataagctgtcttctatataaatcagacttctctgtatctctaacatttgcaattaaattttcatgtaccataaaatgctgttccaattagactttgttaaaggaaatactgcccagtatgtaaattcagatttagcaaattatgtccaaatttctaatgttggagatatcactatacatagagtcaaaacaaaacagtaataacagaacttttcagcctgtaggcatccctttgtgaaaacacagaccgctctcttctttcacaatgttgaagaaacaaaagtttgttgagtatgagaaattgagaccacttggtaacttttcaagtgaaggcaaaaccaaaatgagcaacactgtcctcttagtgattatgatttcgaaattcatcagttatccagatgttttttgttggtttttaatgcagagcttgtaggcttctagaagcagagaaggttctaatggcaagcctatctcataaactatgcctctggtgggcctacttctttttaaatttgatcccaagccaactcacatttggtcactaattctcaaatattcctttccatcttttctctcttagtgcctttttctagagtacttccacagactctatgcaccacatttttaatgaggtactgctattaccaagcagttgttcagtttatacttcagcaggtgtgaaggctagagaagagagaatacacaggaagatgcatgagacag

SEQ ID NO: 122224 - DNA, 1020 bp, Homo sapiens
gaagaggaaaaaaagaaagggcaaatcctctgtggcaaataacatcaaccgtagtctctacagttattttatatatagcatttgacacacaatcagatatgagaaaggactttgcttttagccatgaggaaataacaggatctagaattgccatttctctataaacaactgaataactgggcaatgtacctgaaacaactgtcttcatatatgggataacaggtaacaacactgttgattcctgagagaaaggaaacaaaagagataactctatgattgtcttggctttctgcctggaggcaacttccagatcttggtgcagggaagggaaattcaaacagcgcctgtggtattgctgaatggtgggagacatagattaaagtttgggcaggtcttggtaactaggatgtgcaaggtgatataacagacaggagggagctatggaaaaaaaaagttctagataatctgtttaggagtccctttgagtcctatatatgggtaaggtgaaattccatggagtgtgcaaaaacaacttcttagaaaaagttattgaggagctgaacaattcccagagaacatacaggaccagaaatcatttgagttcccattagagtgaaaaacactcacagaatacgtgggttctttgggggagatattagaagggtcacacctttgtagtgggaataaattagttctagaataaagactagtctaagccaccataaatgaaactccacatagatcaaatgggttcagatgtaatttaactgtctgttagaacaaagatcaatcctctttaaacaaatatagcagaatctaacactcagcaacataaaatcaactacttggcatacagtaaaaaaattactagacatgtcaagaggcagagaaacatagctcaaaaatcaaaattaaaaccaattaatagaaacagacctgaaaacagaaataatggaatcagcagacaaacaagaatgttgaaatagctacaataaatatattcaatatattcaagtaatt

SEQ ID NO: 122225 - DNA, 1046 bp, Homo sapiens
gggtccccatcgtgcctgctgtaagttggaatactgtgcttacaaatttttttccttgaaaaaaaggattagacacatgcctgggaacagagttctgtcgttttaccataggaataaaatacattttccccaaataacagtaaatagaataaagtttcggcaaaatgtactaatacataatttgttccctgcttccctggtaagaactagcacaattctaattctataaagaaatacaaacattgccctcaggaatagctatcacatcctttaatatcccctgttacttccctctggttctaaaaagaaggtatgtaaattaaactaagaaaccagctagccaacccctgttcctttcttctgaaacaacctcctgcagagaatcgatacctgggagtacattttactaagtgaatgcagttctctgatacagtaccttttcataattccaccacttaagactgatagcagaaggaacaacctgtggcactacttccacagagtaatttggaagtcggaagcattacattttcccagttgatgcaaatctttttgaatatgactttaggtggacattgaagtagagctaaggtgtaggtgtagggatacaaaactgtagaacaacttaaatatatatccaaccttctagatggagccacaataaatgagttgttaattgccttctctatttcagacacccttttttccttctcctctacctctttttcagtgattttagttgaatctactgattctgcttggtgtcttagcaaccaaaggagacagtaatcctgatgtgagagtatctgttttttatgaacaaggatcttacacctagaagaggccttactagtacttttggtataatgctgtctgtgcctataatctgtagctggtaagtagtagaagggacctggaacttctgcattttagtgctatgattaacaaaaaaaaattttttttgttccaaattgtgttaaaatgggaggtaaaaagatattggtctatttcactatttttccacattggaaattggtttgggcatg

SEQ ID NO: 122226 - DNA, 1099 bp, Homo sapiens
gcctgccaccacacccggctaattttttttgtatttttggcagatgcggggtatcatcatgtttcccaggatggtctcgaactcctgacctcaaatgatccacctgccttggcctcccaaagtgctgggattacaggcgtgagccaccacacccaaccaaacaacacaactgtattacaagtttattaacttgtgttctggaggtcagaaatctgaaatggtcttatggggctaaaataaggctgcaggcagagctgtgttccttctggaggttctagagaggatctgttccttgcctttttcaaccactagaggctgcctgcatcctttgacttgtacctcatcactctttgctctgtcctcacatctcctctcaatctgaccctcctgccttcctcttttgagcacccctgtggttatgttgggtccatccaggataatcctcccatcttgagatctttaacttaatcatacctgcagagttcctcttatcacataaagtaacaagcactggttctggggttgaggatggggatgtctttgagggccaattattcagcctgccatactaccctaacacaatgattgtcactttgacattttccttcctagtcttttttaatatgcatatttttatttaaatataatcatggtaaatatgattttctatccttttccacttaatcttcttaactgtcattttaaattgctgtataatgttgtatctgtgattatatattttattgtcttgtattacacatacctttaccctgttgaatgtttatgttgttttggattcttattattgatcaagctgtgataggtgtatatatgtgtgtgtgtgtgtgtgtgtgtgtgtgtgtgtgtgtattattattaatttttttgaagatagggtctcactcttttgcccaggctggagtgcaatggcatgatctcagctcaactgcaacctctgcctcctgggttcaagcgattctcctgcttcagcctcctgagtagctgggactacaggctgcgccaccgtgcccagctaattttttgtatttttagtagagatggggtttcaccatgttggctagactggtctcaaattcct

SEQ ID NO: 122227 - DNA, 1007 bp, Homo sapiens
aggatggtcttgatctcctggcttcaagtgatcttcctgcctcagcttcccaaagtgctgggattacaggtatgagccactgcgtctggtctgattttctcttttatgtttctgttgcccagcatatacttgatacagaaagccttcaataagtacttatagaattgaaggaatggaataaaattttgcctaaccagagagttttgccctgtcctgacctttgccttagtcacggcattcatcttgtgtatcattcttcaaagcatagaacatcatggttgaagatagtgatcaactttttctaaaaacagagcacaaaagaatacacttaaattgtagcaagtgctgattaaaattaagtggggaagctttttgaagctataccacttgttagcaatggattactacaagatgctgttgcatccttttattttgaaatcttccatgggattgacttgcaccttaaagacagagtgaaggacaatataaaattccttatgagtctctgcagtgtactagtgagtaattggaatagttcagaaaattttgactgtatcttatatacactatgaaaatatattagttttaaacattatagatatagatagaatttcagaacaaattctaatcagctggtgcacaacctctgtaaaaaatgtgaaatttgtcaatccaaaatttgttcctctctcagaaacagctgtctctaaatagggcctcatattgttggtaaattcattataaatgctggaagcaactccagtttgatatggttgggatttgtagaaataatgtagacgtaggctatctacaaaccattttttttaaagtaacaatccaatctaaatactcatatgcattacaaatgagtgtcataaacttaaattctggaacctccaaaaatataagaaacctctggaaatataagaaagggctcatttaggatggaatgacaaacaatagggagagttctcattttggtttctgcccacctgctcccacccctt

SEQ ID NO: 122228 - DNA, 1059 bp, Homo sapiens
gtctcccttttctaaaaacaccttagaggcccattagttaccaaaaaaatccatctgtgtttgtggtttgacgaagagtttaatgaatgttttcccaaaagtagctatactagagagtaggttttaaaaatgggcacatagttaacacatcagatagttgtttctgatttaatattttttggaagttctaaatacaaatctttagtttatggagtgcagctggatttgcttttcttcctgtgactcaccaaaggctcttgaaaacctttcatttttttttcgcaatttttgtgttctgtaacttcgtttcaacaaatgttttaaaatagctttaaaaaattattctcctggagtctccttggaatattatttcatttgcttcaaagattttttttagcaaattaaaaagattttatttccagtattgtgatgctagagataggtctaatgaatactctaaaaacttagcagtcatgttttgaatttttgaaacagtgataatttgcatgatcgagctcttgacagtgtttaataattacaggggctttatgacaggagatttctgtctgttaaaatgttgatattacaaataaatgagatttatcttcagaataataataccttcacaaatctaccttctttaacatctctctctaactttaggctatgtcttttaggccactgtgtttttaaaaggaatgtcatttagtttcacaggactactactctagtatatataaagcttttgctaaaagcatttttgattattttaaaatatttattttctcacatactttttattctgtagtgaccatgattcaaatcaagtgtgactatatgacaatggagtatgcatggtacaattttatgagtacacaaaaaggaggtcattttaatcgtgtgtgtgtgtgtgtgtgtgtgtgtgtgtgtgtgtgtgtgtgtgtgtgttttgaggcagtatgttgctctgccacctaggctgcagtatggtggcatgatcatagctcactgcagtattgaactcctgttctcaagtgatcctcccacctcagcctcccg

SEQ ID NO: 122229 - DNA, 1111 bp, Homo sapiens
tgaggtcagtggagatcataaaggttaagtactagacagacctaagcagatgtgcttttttgaaagctgactttggcggctgtggtggttgtgaattgcagaaaagaaaagctagaggcaggaaagcctggcagaagactgctatggtttattcatttcttctttcagcagctagttaagtgtgttctctaatggccaagtactatgcttgttagtcagggaaacaacaccagacactgacccacatccctcctctcccttcccctccccaggatttatattcaaataagggaaatagacatgtaaaacacaaagtgcaataaattgttacatatgttaggataaaagtgtttccaaataaaatgaagacataaacaatagagtggcaaaaggtctcaacgagatgatttaaacattgaaaattgagatgttcttgcggatagaggaatgatgatggtgagttataaacttaggcagtagtgatggagatgaagtggaaagactggattcaagctacatttgtgaagtgaggttggtaattgcagacttgataattgtgagagtgaaagaacagaagaagaataagctgagcaattgagtatgttgagatactagcagaagtatgttgggtgtagagtgtagggggaaattttgtagacctgttgaacgtgaagtatttgcagcaagtggaaatgtccaaactgaagttaggaatgggttaggtcctcctacaggaggtaaacactaaggctagagttggaagtactcaatacaggtgagatttaaagccataggggtttctcatctctcagggaggaagtatagaattatctcagcattgtttagttgcaagcatagaaattgcttttgttttttgttttttgtttttttgtttttgttttgagatggagtcttgctctgttgcccaggctggagtgcagtggtgtgatctcagctcagtgcgacctctgcctcctggattcgagtgattctcctgcctcagcctcccgagtagctgggattataggcatgtgccaccatgcctggctaatttttgtatttttagtagagatagggttttaccatgttggtcaggctggtcttgaactcc

SEQ ID NO: 122230 - DNA, 1109 bp, Homo sapiens
aacaacccgcctctgtctttacggcaggccgcattccatgcctccaatatggcgtcctccacataggcagtggctgtggtttctaccccgggtggccgggggcagtgctgagctgggactgttgtttgcccagcctgggctgcagaaagcagcagttaaagttcgtttctggtcactgctccaggaagccaccttactctgagggtcaagaattgccgcttccttttagttactgtaagttcctcctctgcccctggtttgtttcccgcggcacttctggatacccccaggtcccagacccttccagactcaaaccatgaactttcggcagctgctgttgcacttgccacgttatcttggagcctcgggttccccgcgtcgcctgtggtggtccccgtccctcgacaccatctcctcggtgggctcttggcgtggtcggtcctccaagtccccggcccactggaatcaggtagtgtcagaggcggagaagatcgtggggtaccccacgtccttcatgagccttcgctgcctgctgagcgacgagctcagcaacatcgctatgcaggtgcggaagctggtgggcactcagcaccctctgcttaccacagccaggtgagctacccctctcccgctgacacactcgcactcattggaatacttttttttctggcgggcatacgcattctagctctctcagactggctcctgatttatctctttttagtccttcctttttactcactcctcctagacattccgtgttgtctcttctctagtccacttaacgttcttgctcagctgagtgcataagtggttttctttgaaacacttgtatgctttcctcgattttgcttcttaattgttgaggatgaagatgcctcagtgatttgtggagaaatcgagcggagatgtaggtttattgagtcacttcctagaaattttttttttttttaatgggatagattaattttctgtcccgcactgttcagggggtcacctccagaaagtaggcaaggagagagagagaggctgaaggtagataattctttccaacgaatgtcttggggttgaagtaggaatttatcccgttagtagtcattatcttcttg

SEQ ID NO: 122231 - DNA, 1047 bp, Homo sapiens
ctgaaccctcagttttcccaatcacttaggataaggacaggaggaattaacgatgaatggcagaaatgtgagtacttaataatgtaatgatataatctcatcatagctaatagtttttgagcatgtattatgctagtagatttatatcatttaattttcacaactctttgtggatgctattattaaccttgttttacagatgagaaaactgaggcccagaaaagttgagcaacttgcctgaggttacacagatactgagtggcagagctgatatttgaacctatacattatgtctccttagcctatatccttaaccactggattatccaaaacactatggcagtatttcagtcagttaagtatttactgaatgttccttacattgtgctagacaatacagatgtatgtcatcatccttgactaccaagaacttaatagtactgttggcatatgatcaaaacatcattctagttttaccttggaatgtatgatataattttagttgcatatggaaggtgcatggtaggactacaagggcaattaaagtggagtagcaaaaagtctataggcagataatcaagaactgttatatttatacagttgaggggaaatggcacctgaaacttaatataggctagaagatagcaattgaaaactcaaattcaaagtgataaaaaaagatccaaaatgaaacctgaaaatgttagatactatgatatgggtcctgctttattgttctctttacaattaagggttcttaaaaatgtgtaaggcacattttagtgtgttctatcatttttaatgccagatgaaatgtataatttgaatggtagcatgaggtggtgaagactgccagagcaagaaccaggagacctgggttgctaatgccagctctgccatttattggccatgtaatcttgaataaggtagtttctctaagccttagtttccttgtctgcaaaatgatgtggttagcttacatgatctgttatttccctatatttataaaatccttattttgtgacttgtatggttagttgctctcct

SEQ ID NO: 122232 - DNA, 1084 bp, Homo sapiens
gacattaaaacacacacacacacacacacacacacacacacacacacacacacacacacaaactcaatcaagtctgagaattaccaagtccagagtgctgtcggatctgaccaggtttggggtcagggaaggtctccctaggatgaggtttaagataagatacaaaggactgaattcatcagtaggactaaactggcaaaggattttagggttgtgagggaggaagcagcacatttaaaggctgagtggagggagggcctcaaggaagtgaaagaagccagaatccagaaagcagacaggtgtgaggctggcctggtcttaggagccatggagaccatgccaggagtgccactttcttcttgagggcagtggatgccactgaagagttttgagcaggtgagagcagtggtcatattggtgtttcagaagaattttctagatgcagaatggagagaaggaactacatgacagtgagttagaaggctacttgtagtttgggcaagaggtattggtggcttcactgggattgagggtaacaaactccatgaagataaggcacctagaacagtgcctcacatataagtagacttgataaatattcatcgaatgaatgaatgattgggtgtagtataaaaacttttttttttttttttttttttgtggcaaggtctcattttgttgcctaggctggagtcgagtggtgccatcacagcttaccgcagccttgacctccctgagctcaggtgatcctcccacctctgcctcctcagtatctgggactacaggcaggcacgatcatgcccagctaatttttgtatttttttgtagagatggtgtttcaccatgttgcccaggctggtctcaaactcctgggctcaagcagtccacatgctttggccccagaaagtgctgggattacaagcatgagccaccacacccagctgtgtaaaaatatttaggaggacctggtgattaatcagaatgtgggaggtgggaggtgagaggtgagagggagagaagaggcaggaaagatgctgggtttctgccatcaggtaactgggtagatgatagggccaggaactga

SEQ ID NO: 122233 - DNA, 1018 bp, Homo sapiens
gcaggtaaagtcagcagtgggaggaggaccatcacatttcactttctaccaggcgttattgggatatgtctttgaacatcttgctaaacctggaagttgcagcagtttggtgtttagccagtgactttgccagctgatcccagttgtctgttagtgtacaaacaattcctcccttctctgcagtcttcatccttccttatatatcccaaagctctgatgtgctatgccttcttgtgtgtgtgtgtgtgtgtgtgtgttttttttttttccaaatagagaaataaactagtctatcatttgttggcttctttttttttaattttaaagagtgttatctctgttacaatattatattgtcttacaataaacatgtacagctgctgcatttctgttaactgataggattttgtggtcatttcatttagggcttgggtttcctaatggattgtattagataccagtctccatcctgccatttctaagaactgcttgtaataagcccctgggtgttccgtactgaagacaatagcaaatagctacttctcctcttgtatcatttaacaaagtccttagtccttgttaattaaattgtggactttcttaatcttagaaaaagggcaaaattcttcccattcctacataacagattttttttctggctaaattctaccttttttaagttttgagaagtggatagaaaacagagtgaataatgtgtgtgtgtgcagaacagaattttgccttaggtatagtgtagacttaaaaaaacataaaattaactgtgctgtaaattatgctttatgacagcccgcttcttgctggatagcatggtgggatctaaaaatggtctctaagttgaacccaaattgcatgcataactttacaaagaaaaatcctagtagaaaaggtagctaattaggagcagtattcagctgacctctgttttgtgtctgagcaacacctgcatttgtgaatgtaaattggacagctgtgcttgtggtctctgtgcatttctctt

SEQ ID NO: 122234 - DNA, 1025 bp, Homo sapiens
ttgaggagagctagaaagtgttccaaggcagaggttctgcagacagggtgggacatagtactctagaaagccatcagaagcttggggagaggtatgtgacctcatgttcaccaaaacacttgaaaaccacttgagaaactctggtctaagggatacctggaacacagcatggggcaagtaggtttgtactgaaaggaacagcaaccacttctagtttttaatgagccacatgttgtgagactgtgaaggaaacagcaataattctaacccattagccagaatggacatcagtttctgaataacattagatattttaaattaaatgtgaagagttgatgaaaactcgaaatagcttcaagccccagtctgtgttcaacatttttcagtgagcggaaggaagagagggagtttttcataaatcagaatccggtcacctggggatcaatacacagtgctattgacatatatgctggaatgttaattttcagacatagtacatctctggccatccttctggtgaaggctaatgctgttcacttaaatcaagttttttctcatcggaactgccggtaattatccaatccatctaaaaggcacgctcccttttaacattaaccacagtgtcagattgcatcagccacattgtgttctggtgactgcttctgcagagtgatgaatgtgcgtgtttggagttcatagtccgactgtctgtttgggcagtgggcagttcagtgaaacaaatgatcaggaagggatctatttatttgggacgaacattctccttattgatccagtcacttacatttccaactctctcaccttgccactaacagtgttcagctttatctgaagaatgagcgtttaaagaattatcttacaggtcattttgatgtgattctctgatcataagctgcattcagcacaaagttactctttgtgcctgacttaaaaaggaaggtgttgtgagactttattaataaaaaacagaggagggagaaggttctgagagtgcttggtgaactgtc

SEQ ID NO: 122235 - DNA, 1073 bp, Homo sapiens
aagagagaaggaagagcttattgggctgaggacaccacagtgtgatttctaattttggcattgatatgcgctttctttgctaatttcatgttctttatgaaggaatggcgctttacccacaaacaagagaacaattgaacaaacaaatattccctggaatgataaccccatttatccatttgtttgcaaattcattcattcattcattcattcattctaccaatccttggggattagttgcttgcctgctggcctctgcctgctctgacttttcgatcagcttcatggactatagagttagcacattaatactaaatcatttcggagagtatgcagcttgtaactcttgaaggtagaagcattttataaatacatcataatactgtaataatcacaatgataactgtaagagcttaagtgttcttaactatcaaatgtactagaaaagcaacaatgacagcagagaaaagattgggcaaaaatgcactgatttgagagaggagaatagtgtaattactgtctgatgaatgtggttgaaagataaatgagataagtcactttttgcggggaagagccacagaaagggcagatactcaccctcatccccactaggtgtggtgaagagatatagttttgttatatatagagagaactatatagttacgttaacgttaatacaagggcagacagaaactttgggtaatgatgaattccaggacagagaactgctgattgacactcaggtccctaggcaagacaatcgtgataaaacggaaagagaacagcatgtttgctggcacggcaacagagggtgattcttgtggtgcaatggtgtggcgggaaggaagggattctcctccctttctttgtattctttgtttcagcctcgcatgtaattttagtacctaaagtcatgatgacaactctatagaaatgtagtgacaaataaataggcaggtaagtaattcagattttatcttcctgggtcttacctgggtgatgtggacatggatattgctaatgagaggtatctgaatctctcttcagatgccagatgggagagatgaccctta

SEQ ID NO: 122236 - DNA, 1081 bp, Homo sapiens
agaaacaggcatgaaataagaaaaagaggagatattgagaattaccacgttcgcctagtcctgtcaagaataaatggatccacagtcagaggatccttaatctcctgatcatccatccacatggctttatcagggaatcatgggttacacaaaacgtttgcagattaactaatcagtcttcctaaatttgtcatggttggagtaattatcttgttctcagtcacagtggtaattgtcatatgaaacctcttattttgtgttgtgtgagagaatatggatttgtatgaaatttgggtgacatatagatctgattagtttctttaatacacatgtagtttgtaccttgtggcaaacatagactcttataatctaaagtaggaatctcagttgtcagtccctgagtgacttgcaatagaaatgtcagtttcttctcttaaaaggaactgtgttcaatgcactgcatagaactgagttatgactttattcagggggcagcagtgggggagagggtggcctgatgtcctggttgtctatcagagggagcccagaaaaagacagaaaataactaattcaaaatgaccctttcacagttaaaataatggtacgtgccttagaataaccattcttttctctcctctagtttgtctggtggtttctacttagcagcttcctgccttcaccctaccaatctgtttttaaaaaacaggatttcaggagccttacttatccttccccagcccaagaggtgttcagatatgttcatgcagctctctcctgggtctcctgtgtagatcctggtagtaaagataggagtagccctggaaggatttgagaattttcacaggggtctgttacaggactgtgtgaagccagggtgagaagtcaaccaagtgtgaatcttgaagtccacctgctccctttccagggtctcacctttgtccacccaatgacggattccttcctctctggattctctccttcaagtacctgactgtccaggcccaccctccctttccccaaaacctgacctctggagccttcctgacccctaacaggtagcatcctcttcatacacctatgg

SEQ ID NO: 122237 - DNA, 1050 bp, Homo sapiens
atcagaatgctttggggtagcttacttctttttagagaaatttgcaaaagtaacatgccatatttaatttttgtctatttgttggaaaaatgaacatgcttgagtcctggttgtggtcagtttatactggaggaagcaaaacatatatgtgaacatcgtttttagctgtctttagagaaaatagatgttttgtcattgctgtgcttaaacacattgttgtgttggcagtagttttgagcaatttggtacaatcttcgtccttccagtcactgttagaaatgctttattttggtcagtatactttcctgtgataaaagaaaaggaataaaaagaaaacataagtaagcttatttctccaaggagaaatttaatttttttcagctgtaagaaaagtgatggtgtttggctggttatgaagccctgagaagttatgcttctatatgaaagagacttgttcattcataagaaagaaataggaaatccttggagttttcttagtgcaacttagagcagatttttaaagaatctgtcagagaagattgcaagctccactccaaagtacttttttagctgaagggtggttctgccatcttcttgcatggattgctgcaagagcagtagccagtttagaaagcatgggagctctggagaaagcactgagggcacagggttcttctgggcccccagatgatcaggagcacatggctggacgactagtcctctgtgccacagacactgacagaaagtgccctggccaggtagacgggacattgccttgactttattactgactctctaatgtctctgcccgctccccacccccacatgcctgcttcttggaagagggaggaatattaagtaacttaaacaaaagcaaagcaaaatcgatgcccggaatacacaagtgtgtgtaatcagaaggcactgacaaagaaagcattggctgatagaaaaatctgctatgcaactgtagatttcctgtagggtattgatttttccatttaaatcccaaactgtgatatgtgccttcacacttaatgtacaacacag

SEQ ID NO: 122238 - DNA, 1081 bp, Homo sapiens
aagtgatgatgagaagagatgcttaggctatttttctgtgggctgatttttccatttcatttcctcgtggatgtagacaggtggattataagagttgcatgtagtccttaggcagtagaaataccccgtgctaatccagggctcaataaacatgacattattgagcatcttctatgtacaaggcattgtactagacagtgcaggtagggacacaacatagaaaaagacacagtcccttccctgaaggagcatgcaattcagtaggagaaataaggcacatacagtatcatagtcgtcaaaaatgtgggccctcaggtcttgccccagctggactttatacactgtcatcctggtggtatagctaaggatcatagacgcaaaggcttaacatttattgtaacgtatctgatatcacatcacacttttggatccctgtttcacccccttggacctctctgagcttcagatcttttgtaaaatgtgataataaaaggaaataacctcagagcatatcataaggatagaaaatgatgacatatttaaagagccaggcacatagtaagtgctcagtatatattagctgctgttattatcatcttcttatagtcatgattgttattacacagtgagctatgccccaaaagagcactagcaaagttcttggagtacagaggaggaagagattgtttctgtatgcagtcattaaaaacttaataagggaagatacctttgatccaggcctttcatgggttggatttagatagttgccaggaagtgtaagggaagggggttttcccagcagaggaaaatagcacaggcatggaggtgggaaagtatgggccaggtgcactgcacccaggttagtatataggttggccaagtgtagagtacctgaaggctaaggggtgaacagcaggcagtcccatatgcaggggtttcaataactgacactatcctatcgagtctggattttagtaattctgcttcatgggaattcctagcacttctgtggattaaaaacattattatggaaaatttctaagtatacagaattaaagtagtgggaatcatataatgaacc

SEQ ID NO: 122239 - DNA, 1106 bp, Homo sapiens
tctgggcaagtttctcactctcctgagcctcagcgtctttatcaatatgacgagaataaatacagcacctgcctacctcatggggttgtttcagcagtcaatgagatcatgtatatgaagcatttagtatacctagcacctaataaaagctcaacaaccagtagtcttattactaacaaaatggagctagaaggatgcattagtttaaacaaaatcttgaggcagatactgggagtacctgtctttattcttcaacttgagtctcctcccagtttgtttggataaaaactcaaatgtaatatttttaatttgggtaaaagaacttctgagaaagggttgaacatctatccacttgcctttttatgcctagggaactagagatacttgttggcggcatcgcaaatgttgctgacttatgaagtactgcagtatctgaatacctttttgtaggataatctaaagtttccaaaaaatagtatagtgttgtagtgaagaacttggactcttaagccagattattttgttcagattcagaaatcccctccactccacccactggctgtatagccttgcccaaatcactgaatctctgtgtgtctgcgtcctggtgtgtgaaatgaggacaatagtagctattgggtagggttggcctggggtctaagtgatgactgcctgtaaggtgtttagaacagtatttggtaaacaactggcactcaatcagtgttgctgtgattatgatgatttattccaaggttgcttgctttccagtacatcatagactactacttgaccaaatttactagcaatggagtacctgaaagttttacatgtgcacatttgcatgaaaaccccacaaaatttccctttgaacagtgaaggggacggcacaaagataattcttggcactaagcttaaaaaaaaaaaagactcaaggaaaactctctacatggtcccagacctcttcattctgcctaaccatttaatagtaaaatttttaatgttaaaatgtgcaactaagaacataaatgcaaagcaagggaaaaaggtgtaatttacacagagccatatctgccatagcaaatggatgtgcctctgataccgtgcta

SEQ ID NO: 122240 - DNA, 1028 bp, Homo sapiens
gatattggagcaggatgtgctgctatttgtttctctgtgtgaacagggaggggaaaagaaacacgtgaacatttttaaatggcaaaaccagagatgggaagggaggcaatattgaacgtgtgctaggataaggctttcatataaaaagtgttcagatattaagatatgtgaaatatttggggcccttcattagatagctatttcaatcagtgatgcttttaagttccaaattgtctggtaattatgtaaagatgctccagtgaaacaccatttttggcttagggaaatatttatatacttaccagatagtaagtatataattatgaatatgatagtaagtatatgaattttgaaaatatgcaatgttattacatagctaccatataaaatacaatatatgagggcagatttacatatcccatgtagaaatgtgggtatttatatataggaaaaggaaaataaacaagcattactgaagtatttatgagtttatggcatttaactcatctcaaacatttatgcagtgttttttctatactaatttaatgtttatatatgaatgcataaaaataaataacatggaaaaattaagttgtaatggaatttttattttcatttttccttagccttcatgcattttgatttttaaacaatgttctgactgtcatcaaatcagccaagttgaaaattgagctgcatcaatggagacagccggtcttgataattcaaaccaaaaagaccttttctcgagggatatattctccctggtttatttggtctgagttgtttctcatagctctaatttattcttttgtatacactgcatgaagacaatgtctatagagatttaaagccttaaaaaaactgggtatttaatgtcatggacacatcccaaaaagtggaattcacatgagagcaggtggttatggggtgtgtgtgtgttacccagatttttaagacatttgtctttcaatcgacatgcatttattaggtacctgctgtctccccagggctgggcttaaaagtca

SEQ ID NO: 122241 - DNA, 1049 bp, Homo sapiens
aaaaaagatttattccaggaatatgaactgatgtttacagacatgccaggactgacttttaaaacacagtggaaaactgtctcaaaagcagcttaagtacgatgtaatggaagccccccaaaaagtactttgggggcatgaaggaagcctctatgctcagagagatgtactaagctagcatatccatggcaggccccttttccctgagatgtgagataccatgaggtctcatcataagtttctgagaaagcagggctagactcagagggtgcctgtggctctcatgctttggggacctagagttccccaaatccccagcccctgcaataatgttcagaaaacgaaggggaaggaaataactttggattgaacaattggatctccatgggaaagttttcttatttcctggctgggactcagggctgtactgggggcatcctttgttggtggcattatactcacaggcagacatgggcaccttggctatcatgtgatgaccatatgtcccaagatttgcacacccttttctgtttcacctattttgtctgttttcataaatcaatggtcttcaaatgagttcaggtggcccagcatttggaaatgtgccagtcttttgagaatgctgtgaattattgacatatttaattcccattgtgtgaactgagagtaatttttgccatctttaatacagttatcaaataaaagtcataaacaagagccaacaggttcacaaatatataatcaagctgtctaagcagtatggactgtttctggtatcctattagtattcctttgccacttgcttgttggttttgtcatctgtgaatgcttgttagtggatacagcagcctcggtctgtgagataaatccttgcctagtgaatttgggtaattcttgtttatgcatgctgtggttattgtcttgtgatataatttcgtttcactgctcgtcctgttctagagacctggccactccttttatgaagagtggctcctgcccccaccccctaatccccctacaccctctatcccacctctacccctacccca

SEQ ID NO: 122242 - DNA, 1042 bp, Homo sapiens
ttattacctgcaaatatcagtggaaaaaaagcgagaaggaaaagagtggatttacacatacagacccacatctgccaagtgcgtgttcgcccatgatcacataccagcatgccaccactgtttacaatcaaggaaagctgagagttaaatgagatgagtaatcaaatgcccagcatatgttgtttttgcattgtttatgtgaccaatcattattaaaatttatcatcttttaattatatcagtttatgatagtttttttaaaaaaccaacacgcaccaacaacagaacaacagacagcctcttcaacaaaaacaggctctcatttagaacaatattggaaccagtgctttattgggggagagactcaaattcaatagactcaccattgcactgtttcacaattctttctttgctgctatatatggcttgagtgctgagaaaatggcccccccccaaaaaaaaggaaaaaaagaaaaaagattgtgtgtgtaaaactctgtcaaaaaaaagtaaggcactgaaagaactattgaaaattttgacatctgtttatctgtttatagctatggcaagatcactcatattaattcttgtttaaaatgccatatgaaggaaagacatttgtgcaaacaagagtcatatttgaattgtagatcatgtcttcaccatctgtgagagctgatggtgttgcaaaattaatgtgttaatgaaatcacaataatttctccaaagtaatgggttctgaagctgagaatgagtattttttgaactttgatgtctagtgatttccaattgggaaaagctctcagcctttaattagttctgcagcccaactttaaaataaatttggtgatgtctttcttttgccaagagtagatttgaaggggggaaaaagccataacaacttttggaaaatgttctctggtgtttgaaaagttgttaaataagactgcctgccaagaaatgtcaccaaaaattctgactactgagagagagtgggcaaacagctcaaaaaataattctagcttgctgcaacatcaca

SEQ ID NO: 122243 - DNA, 1050 bp, Homo sapiens
ttaatgtgattgggggaactcaggcatttcctgtcgtgcacagtgaaactttcaaaccttgtttttggctgctgctgattattgttgccattaacaccaggatttagatagcagggttcaaagcacaagcttccacttagtcctcccaatgggcatttgacctcctcttgctcttgctaaattcatgttataaacactccaagcaagcttccaggtctctttgtggctccatttcttcactataaaatgaggaaatggtactgtattatctctggggtcccttcaagtcctacattctatcacctctctgaagttatttgttcattgttctaagaataatctcaacagttgtaaagatgtttacaagtcctctgtcaccacctcaccttagccaaattttacccattcacatttctgacagcctcatttattggcaggaagaaaaggtgctgttttggggcatggcagaagagaggcgcctgacccactcatgtgatcaaagtgtgtcgagcgcccacagcgggccagactctgagctacgagttgggtgtagagacacgagcaaaacagacaagcccctgacctctggggctttaccatgcagttggcagacttctaagtggctgctcccagaactgactgagtggcctcaggaagctctatttcaaaccaagtgactggcggcaaatgaaagaaggctgcaggtatcaagaggcagagcctcatatctcggtgaatgttgggatgagcattccccagaaactgactttcctggtggaaaatcctgttcagagcctctgccctgggaccccaaggctcttggttgatttattttcttccagtccagtgctactgtttgttttggatgtgaagagatgtgaatggctcaccttttacaggcaagacccacacacggagaaaagcaagcatttcttccagcttagttgcctttgtgggaaacttctgaagataggtatatgtgtccatggtaattttccacttgccaaaaagtgaatctattggccctcttttcagcaaataccagagctg

SEQ ID NO: 122244 - DNA, 1013 bp, Homo sapiens
tcctgggatcaagtgattctcctatgtcagccccctccgaagtagctgggaccacgggcactaacctggctcattgtatttatttatttagagacaggggtcttgctatgttgcccaggctggcctcgaactcctaacttcaacccttggccacccaaagtattggcactataggcatgaaccaccgcacctggctgtgtgtcctttaacccattaaatttactgtctagaaacattaagtccctttgcaaccaactccaaaagacaatccatatgtattcattgtgctggaattccaaattgcatttgtttgcttgagagaggtggacaatcaaataggacatggtaattccttaactctacaaaatctaacctgtttgcctgataggtgtcaactattaagagtccagagtttttacatgcaagctaacaagttaacctgccagtgtcatggatgccgacaaaacacagaagactccaaagacacaggcacagcaggtggcatgagcttcatgttccccatctgttcctgttgtcttccaagttcccacggaggcgatgtggagtggccaggcagatgctgttcatatcacagctgaggaactccaagcttgggagacctaaccctgtcaagcctgcaagcaaccctgtcttgatcttatcctggacagcaaacaaactcaccctctttctgggagggagacactgccttccaaggctgtttgccatacagacacccttgaaaagatagtctagaacaaaagcctgtgtgcctttgatcacaggtgtgcagagacatgagagactcatggaaaactgtctctcaacagctggaattcaatacatataggacctgtatttacaaagagatattatagaacactgattttcaaagggaatgaggtctattttgtgaaaactaggaccacttaggcagtttccttgagaataatatacatttaaactccttggaaatgttttattgtcaaagatagttttattgtcaaagatag

SEQ ID NO: 122245 - DNA, 2460 bp, Homo sapiens
gttccatatttcttttattaactgtagaattttacatcacaagtctagagactgcaaaatgtctcgggtttttcttccttaaagcagaaggcttctgttaagatatgactcagtgttcttgctcaagaatcacaattattttatgccatagaaatacattcataaatagtataacatacagaatcaaaatatcaaactgtattagaaatttaactacatttacatattgttaaatttacttgttttatttctgggatgaagtgtctgttctaaatgaatgagttgaatttagaattgtgtccataaaaaactatttctttgtaattgctgtggtcaaagaaaaccttttgtttaccaagatttcttccattatttctccccaaatttctgatgtctacatttaattcttctttctagttggaagttcatgaggctaagcctgtgccagaaaatcacccacagtgggatacagcaatagagggggatgaagaccaggaggacagtgagggctttgaagatagctttgaggaagaagaggaggaagaagaagatgatgactaagcagtactctgaatggaccacagtgtttgcacatatttgcaattttttgctgttttggaagtgtatcataaaccagaaacagtacagaactgatgttgagggaggtgtagtttttttactcttgaaatgggtgcataatataactaggcagtggcggtgccttggtacaacctgaaaaatgttaaggcttattgaaacctttcaagtaggggatggtacatttatttcatctgcaaatgataataaatcctttgttattataactgtccagaagtgtgggctatgtattatctgatcagtctatggtcccagtaaaagtaaagatgcaggaaacacagtctgtaaatgagcgacttttctttgttcagctttagttttagcaaacaccacaaatatgttttaagtaacatcgctcaagtttaagtaacatcgctcaagttgataatctcttgataagctctgttgttgacattttgcagtgatacaacagctccactcatagatttaaacttttatttttacttatcttggtcataagttggcattctctcacattccacatgatatagagggctacgttttggaattttccttttcttaattgcccagagttatcagacagattataaaaatggcttttaatggcttaaaccatttctaaacctctatcttagcagatcaatgcaggatctaattcttttgataagttctagctctaaaagtgatagtgggactgtatgttttctgatactggtggcttatgttattaaaccttttttaaaaaaggttcactctaaaagctgaactacatccttagttttcagtctacttgactctatcaggagctttttaaggaaagtaagtataacatgcaaaggaagctttttttgtattcattttggactcctgtcaataaaaatagaagtttgttgactcgttttatgtttcaatggtgtgtgtctttttactatcaggacataaatagggcaatccacttctttatttttcaactaaagattgaatagtattgtacattactgctaaagtgactgctatttctgtatactgtagaaaaacccaggagtgagagggatttcccctcatagtacaactggaaggatagtgcttgtaaagagtagagatgtgtacatgatgaatcattgagggagggtggatatttttattcctagatatggaggaaacataagtctgtagtattataaaactgattgtaataattctttcctatcaaaatctccataggtcaaaatattgttggaatactaaaatttgcaaccttgtttactttaaaaggttgccactttcagtgcagaatactaccggcatcttgttactgcaatagttggaaataaaatgtgaaaattagcaaaaccatgaatggtttttttggttctaaatttaagatgtaatatttcctataaaagggtgaaagcagtttctttctctataacctcaatcaccagtttagtgagagcctttcttggcaggcaggaggcagtgtcactgaggatttttttcatttacttcattgtacaagtaggagggtgggtttaattttcaaatcaggttctgctgtgaagcaccagtgtcttgaggcagctactgattacctaagtgtggtggcagggggtaagccagctggtgtcaagtgaaaggagggattagagaaaacaggtgtggcacgaaggcaaggaaactgagcagacaagacagaacaatgtgtagaatgcatatttcctagttttcttgaaagatttcaagaaaagttgtttttttttttctagtggctactttgccttaaagaggctttataagttcattcacacagctggcttctctggttttaagattctggagaggatgataacctagtaacac

SEQ ID NO: 122246 - DNA, 1064 bp, Homo sapiens
gagtaggcagagaaagggagaaatcaaagtccaaacagggtttaggaggagtgaaatagtttggtaagttcagagaagtgtaggtagtttgaaatgactagaataaaaagcacaaggagggaggcagtgacaggagaccaaagagaggcaggctagggtcagataatgaacggctatgtagttgatactacagtggttagatttaatatatttaaaaaggcattgtaaggatgagcagggagatgatcagatttgtgagactgaacttgttctaatcctaagtagttaattagcattgtcaggaataatacctggaaatccttaaagtgataaaacacatactagattttaaatattttaatttttttgtttactaggagtggcaagaattacaacaaagcatacagcgaaaagagagagctctattggaaaccaaatcaaaaataacacatcctgtgtatagcctttactttcctgaggtgagttatatacaggctactgtgttccttattccattcactttctcctcagggatttgtcagttgacttttagccctctgtcgtgtgtattagttcatatgtgctaaatgtggtctatcctgagaggccatatttttaaaagggaatattacaataggtattatacttagtgaacgtgttgcttataaaagagattgttagcttcttaagtatttctgtggttttctttgcttctgtcttttctgtgccctgattactgagtgttatgtgtaatggtgatttctcattagcagattaggcagtcttcatcagacaaatgcatattttgcctttgaatacttaactattatgaatctctcacctctgccaagttttaaatcggatgaaaaaattcttaaattttctctctgaggatcctgctggcgacatggaaccattagaattgctctgaccctggtcattgttgtcccagtccatggaaatgtgtgagcccatggctgtgggaccaactgtgttcttggctctaataaataaagttccataagagcttgatcataactgagccccgggctcaggacaggtca

SEQ ID NO: 122247 - DNA, 1036 bp, Homo sapiens
gttgcccatgctggtttgaactcctggcctcaagcagtcttcctgcctctgccttccaaagtgctaagattacatgcatgagtcgctgtgactggccccaaaattatacttttctataaactacctgtttccttaaataaaatatgattgatgtttttgaaagcagaaccatcttagcctttgtgttattgggctttgcaaatagaaatacttttatttgacaaattatgaagaatgaataaaataactaacaatagacagactagccagatattaaactctttagtctgactcccacatctttataagtaggaatgtttataattttaaaaaattgtatatgaatagtgaaattgtcatcgagtcagtttagttaaattgacaataagttaacttcagggattcagattgatatgttctcattgagatatgcagaatctttgtgtttgcctttcccttttaggaagctgcagtaaaggaagatgaagaagaagtttcagataagggcagtgattctgaagaagaagaaaccaatagagattcccaaagtgagaaagatgatggtagtgacagagactctgatagagagcaagatgaaaaacaaaacaaagatgatgaagcagtaagccttataggtttaaataatttaaataattggaattatatctctgatgatagctttgggttttgttgttgttgttcatttgtttgcttgctcgcttgctttctttaaataatatctgtatattttataattttattactttgaagaacgtttttaaggaatggtagtcaaggttatacagaaaaatgatttctaacaaggattggaaatcctcgttttcttaaatattaaattgttaggtagagtaggacctgggtttgaggttaggtcagttggtctcataaggggattttcagtgttggggatatctctgggaatatgagtaaggaaaggtgtttgtgaaatgcatagtgcttacttggaaggctgtgtcacaagctccagttcatgtttactgtagagaaacagtac

SEQ ID NO: 122248 - DNA, 1054 bp, Homo sapiens
tattttactttatttctgaacctcagtttctttttttttttttttgagatggggtctcactcttgccctgaagtgcagtggtacgatctgggctcactgcaacctccggctcccaggttcaagctatcctccacctcagcctcccgactagctgagactacaggcgggcaccatcacgcctggctaatttttgtattttttatagagacagggttttgtcatgttgccctgctggtctcgaattcctgagctcatgccatccgcctaccttggcctcccaaagtgatgggattacaggcatgagccaccaagcctggctaaaccttagtttctgaaagtggaaatactttgtagagctattttaaggattaaatgaattaattgttaaaagcatctactggagagccttatacagagtagtcaatcagttatttttttaacaaatttaaaatataatatgcttgaaatactaaagtgccaaactaatttgggtaagctaagttttgctgtttgcattaacatagaacttgatttttattttttgctgttttttttcttccatcttaacagtgttagatgatgaagatagcaacaacatcacagtaggatccttagttacagtgttggttaagttgacaaggcaaacaatggctgtaagtagtctatctgtatttttatgctttaagagttgtgtgtcaaggcttttatatttatttccctcattgtcaaagtcaaaactgttgtaataccaagatctaattttgcaaattctgttaactcttttgaaattttaaattaattttcatgagacagttttcacatacactaaaaaaacctggaaaataatcctttgtgtgatagtttaattctctataaaacataatcataacaaagtaatgtggatatagttcttgagctgtgaagtgctatacagaagttgttactgatgagaatttcatcacctattcctttttagtcagttctatagagaattgacttttatttttcatttcaaaatctaagaattacaataaaaataacattttttttcctg

SEQ ID NO: 122249 - DNA, 1020 bp, Homo sapiens
tatcgttattttgtactttgaaatgcacattaatcaacacttttctaaaagttgctggattttgttgtggttaacatgtgagtaattttctttttatgaaaagctttgtgagttagggaattatgtattttcttttttttttttattcagtataaaattaaaactatccaggatttggtgagtttaaaagaatcagatcgtcacactctactgcacttccttgaagatgaaaaatatgaagaggttatggctgtccttgggagttttccatatgtgaccatggatataaaatcacagggtaagtgggaggtttctctgttgagcattgcttcccttttgatagattggttctcatttatttgactcaggattctcaaaacactgtacttaataacataacttgttattagactttgcagaactgtagtttacctgtcagatttactatgttggaaaatgatttatacctaatagtttgagaacactgatagagtcctacttttattatcctcataatgggatgaagtctgaacactctgttctgtagttcaacttttagcaatttcttaactttccaaagaatgatgaagacttccaggcataataaaagaatgagatatttgaagtatattattagtatgaaagaaatagctgcctagttctaaaattaaatttttaaaacccaacttatttatgttaattaaatgttgaaaattactgtgttttatgccacatttcatgtgtttttcttgccctacctctatattttctttgagggaaaaaaataaaggctatttttctacctatataattgctctgtgtttctatttcaatatctgaatggtcttagaatactgagagaattagagactatctgctccattctttcattgtggtggtggtctgagctttaacatttgctaagttactattatgagaacattcttttagttaccaagaatacagggatatattaataatggtttctgtctttattttatttatttataaataattttt

SEQ ID NO: 122250 - DNA, 1051 bp, Homo sapiens
tataaatgaaagagtctttctctttctgtaagttgccctcttcttctcttctacgtctcttatctctccccctgtatttagctgacatatttattttgacatatttagttgatctgcctgcctcagcctcccaaagtgctgggattataggcgtgagccaccatgcccagctgggagttggtttattaagcctaacattatgatattaaaaatttgtctttgaaacgtctaatctgagctagggttttatggctgatttttgacatagtgatactgaggagaaactcttccattcaatctgtaaaattctgagatcatgtgaaatatttgtggcataactttaatattagttttgggccacagtgataaagatgctttaactgtaaaattaaaatgatctgtttcaggttttttattgttttgcagatcagcaattcatgctaaaaaagtgtcctgccctacttcaagaaatggttaatgtaatctgccaactaatagtaatggcccggaaccgtgaaggtgaggaggaaatatagttaattatgttatactttttcttgcaagcatatgcagattgtacttcatattttaggatttatgggtactcagacttctgtcggccagttcagtgagcttcttcaattttactcatgtcttttcatatttctttcctatattttctattatttaaagtctatatcacagctcactgggttttttttgttcttttttttttttgagatggagtcttgctttgtcgcccaggctggagtgcagtgacaaaatcttggctctctgcaacctctgcctcctgggttcaagcgattctcctgcctcagcctcctgagcagctgggattacaggcgcgtaccaccacacctggctaatttttgtatttttggtagagacagggttttaccatgttggccaggatggtctccatctcctgacctcgtgatccacctgcctcagcctcccaaagccctggtcactgtgtttttgattttaattcttgttttttttttttttggagacagagtctcactctgtc

SEQ ID NO: 122251 - DNA, 1045 bp, Homo sapiens
tgagtagctgggattacaggtacccaccaccatgcctggctaatttttgcatttttagtagagatggggttttgccatgctggccaggctggtctcgaactctcaaactcctgacctcaagttatctgcctgcctcagcctcccaccatgttgggattacaagcatgagcactatgcctaattttaatttacaataaattgaattgtatatattccatatggtatttcaggaggaggtaggatatcagacttcaatcactgcaaccctaaaatgtcaagaattatcttactcagggatacattcctacttcaactttcttgaaaataattgtctaaaggctgtctttgaggcaataaaaacaaaatccacatagtctgtaatttgttttgaaaatggctattaagttattatctggcagattaaaattggttaccttgagggggtatacagttgctgcataagcttgtttgtcatgcttctggttagtaggaatagtcgagaaggaataagttactaccagatttaggatcaagtaataggagaaaaatcagtaggtaaaaattgctagtcagcattatgaagtgactccttgatatttagctaaaggaacctttggccaggggcttcttatctcatttgttcccagagcactaactactgagaggttgtggatatataaatacctgcctgactggaagagaaatgtaatttacaaaactgttttgctggtgttaatctgtattgtgtcagtaaataaaaaattaaaaggtaatttattatagtggatatgaacataggctctagagctgaactacttgggttcaaatcctggctgtgcaatttgctagctgtgtcctaggacaagttatgtaacccatgtgtactgcaggttttctacctacaaaaggagggtaataatggtaccttcctcttggagtttgagaataaggattaaacaagataatacatgaggaatccttttaatagtggctcccccattgtaagcctcaaaataaattcatggatgttgttttaatttacctg

SEQ ID NO: 122252 - DNA, 1048 bp, Homo sapiens
ttcaccttcccaagtagctgggactacaggtgtgcatcaccacacgagctaatttttgtattttttagtagagttggggtttcactatatgttggccaagctggtcttgaactcctgacctcaggtgatccgcccaccttggcttccaaagtgctgggattacaggctgtgcctggcctattttttgatatttaaatgtcagtattattttatgtaaatttgtcatctgttttcactttcaaattatcagtgcttagtttactatgtggcacatagtaggtgctcaataaaatacatatattggacaatataagtgtttttatttaatatatgggatgaaatttatgggaaaaatatataggatgaaaaatggattttgtctttctcaaaatactgagtagttcatattttaagttcaaaataggattgattatttctttacagaattgtgcttatttttgctaacagaaagcttgttttttttttttgtttttccccagggagccacagtagcagaaattaaaaaacaatatcgtttgctgtcacttaaatatcatccagataaaggaggtgatgaggttatgttcatgaggatagcaaaagcttatgctgcgtaagtatcaggatccattacaaatttttaagaatggtacagataagccaggtgcagtggttcatgcctgtaatcccagtactttgggaggctgaggcaggaggatcgcttgagcccaggagtttgagaccatccctggcaacataccaagaccccatctctacaaaaaataaaagaattaaccctgtgtggtggtgtgtgcctgtagtcctagctacttgggaggctgaggtgggagcgttgtttgagcctgggaggtcaaggctgcagtgagccgtgaccatgccactgcagcccaacttcgatgacagtaatactccatctctaaagaaaaaaaaaaaaaggatagttttctgttttaataaaatattaaaatagttgtcatacactttttccaagtgcttacttcatgttgagtctatcatttaggggcta

SEQ ID NO: 122253 - DNA, 2469 bp, Homo sapiens
atttacatctgtgaccgccattttagacttattctttccaaattatttgaagtgaaatggtttgatagaaaaacggtatgtatttctttagggcttttaataccttactgccagatattactttagagtgtatagtgtatgagagtttctctttttctttaacctctccagtgctggtaatgttaatcttttacataattttactcactagaacacattggagggagcagaaattagtttattttcaaatgatatgttcttttatacctttattttaaccgattatgaacatccttctataactatttattggctacaaaatgttgcattgtgtggctgtatcatggtttatttaattatttctttgtaaatagtttatttaatcagttcctgtgagccgtaatttaggttgtttccaaagttttactactataaacaaggctatgtatttatttttgcacaattgaccaattgtttttcctagtttatcttaataaaagtgtaattgctgggtcagagcaattcttttttacattaaatggtttacttagtatttatttattttgatctaatttaatgcgtccagtaagttaataagttgaattcacttctgtatttaaaattgtgcaaatagtaactgagaaaatctatgaatagtagacactgtactagattataaagaatgcagaggtaaaaaagacactgtcgttgctgtaacaggagtttgtaacccagtgattgtagaatttgagtcagtagcatagtgatatggtactactgtagagtttttgccttgaccttgccataatgtctttagactctatgcagatgtatttgtttatgattcacttacctttttcctaaacaggaaaatagttctgcttgcaggatgggcattgttcttattccttgcatataaagtttccaaaacagaccgagaataccaagaatacaatccttatgaagtattaaatttggatcctgtaagtagtatttttatataatgcatattagtttaatggtcccatgaaaatgctataggtcctcattctaaaagaaattgtctattcctatagaaatcagactttggtcagtttgtttattaaaataagatgtctaatcctctgttattataatttaagctataactgttgattgttatgttattaataattggttttcaattgctaaaatataagaatatttgaagatgagaggagaggttaacatttttttttacagagtctcactctgtagcccaggctggagtgtagtggtgtgatctcggctcactgcaagctccgcctcctgggttcacgccattctcctacctcagcctcccaggtaggcgcccgccatcacgcctgtctaattttttgtatttttagtagaaacggggtttcaccatgttagccaggatggtctcgatctcctgaccttgtgatctgcccacctcggcctcccaaagtgctaggattacaggcgtgagccaccgcgcccggccggttaacattttttaaaggctttttttttttttgagacggagttttgctctgttgcccaggctggagtgcagtggcacgacgtcggctcactgcaaactctgcctcctgggttcatgccattctcctgcctcagcctcccaagtagctgggactacaggcacctgccatcacgcctggctaattttttgtatttttagtagagatggggtttcaccatgttagccaggatggtctcaatctcctgacctcatgatccacccgccttggcctcccaaagtgctgggattacaggcgtgagccaccgtgcccagcctaaaggcatatttttaagagagatctgtaatattggttaatgcaaagttaaaactgggaggataatttgtgttagttgaatgataaaaatcttatgaccttgtattcattgacacttaagcaatgtaaaatctaggttgggggtcttagaaagaactaatatcagccaggaacggtggcttacacctgtaatcctagcactttgggaagctaaggtgggaggatcgcttgaggtcaggagtttgggcaacatagtgacacccaggctgtatcaaaaaaaaaaaaaaaaaattacctgggtgtgatagcaacacacctatagtcctagctacttgggaggccaaagtgagaggatagtttgagccaagaaggttgagatgagtgagccatgatccgcaccattgcactctagcctgggcagcagagtgagaccctgtctcttaaaactaaagtgaaactagtatcattaatgtcattgtcatggaaatttaggttaaccttgagtgtgccccttaggtgattttttgattaaacctgattaatgggttctaaatagaaaactagtcttttggccagccgcagtggctcgtgcctataatatcagtactttgggaggctgaggtaggaggattgcttgaggccaagagtttga

SEQ ID NO: 122254 - DNA, 1185 bp, Homo sapiens
aaacctacttaatgcttactctttgctaggtcatacaacatatacgtgtaatgatgaataagtcattgtgtctgtaaagaaattgtaatctatagtaagggtaagataggagaaaatgtgggaacagtctgaacagattggtttagaagttcaaaggaaggggagtatactgttgctggaggtcgggggtagaaagagataagtcatatcttgagggaccttgtgcaccttgtgccaagatttgaattttatcttaaagactatgggggaatctttaaaagatttcagaagtggagaggtgacatgaacaagttagcatttcatggtgataattaaagtttattgagcacatactgtatgctagaatctgtgctagggctttatatgttatctaatttaattctgtattaacttcaaagtagatggttttgcattttctcagatgaggaaacaaaggctaagaatgatgacataacttgaccaaagtcatgtagttagaagtgttggatcagggacctaatcaccctttattttaaacaggccattaacatgtttagttacagcagaccagtttaatcctgtgaggctatggggtgtactggttaaacacaaggctttggacatttatcctgcgtcatcagtttagaggtaatagatgaaactgacaggaggtgagagagttaccattattggactactatgtcttgtgaattacctacatttatccagtagattggaagagaagatgtagcaaaagaaattagtgagagtagaaacagttatttagaaatcttggtttaaatgatagttttttttcagcataatttcagggcgtttagtttttctttgtaaggttttactttacctaatttagtttatttttcttttcttttttttttttttgagacagagtcttgctctgttgcccaggctggagtgcagtggcactatcttggctcactgcagcctcagcctccttgggctcaggcatcctcccacctcagcctcctgagtaggtgggagtacaggtgcatgccactacacctggttaacttttttttttgtattttttatagggatggggtttcaccatgttccccaggctggtctcgaactcttgggctcaagtggtctgcctgcctcggcctccaaaagtggtaggatcacaggcgtgagccaccttgc

SEQ ID NO: 122255 - DNA, 4175 bp, Homo sapiens
gacttgaggtcattcatacagagattttgaatgtgtaccacgaatatttagttttgctggaaatctaactgctactatgttaatgtgtaaactgtggcctgtggtacttactgattgattgaaatagtctcctaaaaggttaagatttaatttttaggttggaagagtggggcatacaaggtccatgcacacattgtgtggcccccaagaataaggggctgaaaaccatatgtactttctcttggccaggaacagtagaacatcatacctttgaatagatcaaactgcctgcttcataaagagacttcagcattgttcttataaaacctcatcaaatgtttccttgattttatacttgaaagtgggatactgtagaggcttaatttaataaaatacatatttaaaaatcactagtggtattttcaaaagtgttctctaaaccatgaaaatcagaaaattaacattaccgccatctcatcgtctgactccatttgggttttgtcactttctcagtgatgttctttatagcaaaatatccaatttagaatcacataacatttaattgatgtgtttctttattttattttattttattttattttttttaattgatcattcttgggtgtttctcgcagagggggagttggcagggtcataggacaatagtggagggaaggtcagcagataaacaagtgaacaaaggtctctggttttcctaggcagaggaccctgcggccttccgcagtgtttgtgtccctgggtacttgagattagggagtgtgatgactcttaacgagcatgctgccttcaagcatctgtttaacaaagcacatcttgcaccacccttaatccatttaaccctgagtggacacagcacatgtttcagagagcacagggttgggggtaaggtcaccgatcaacaggatcccaaggcagaagaatttttcttagtacagaacaaaatgaaaagtctcccatgtctacttctttctacacagacacggcaaccatccgatttcccaatcttttccccacctttcccccctttctattccacaaaaccgccattgtcatcccggcccgttctcagtgagctgttgggcacacctcccagacggggtggtggccgggcagaggggctcctcacttcccagtaggggcggccgggcagaggcgcccctcatctcccagacgggcggctggccgggcggggggctgacccccccacctccctcccggacggggcagctggctgggcggggggctgacccccccacctccctcccggacggggcagctggccaggcagaggggctcctcacttcccagtaggggcggctgggcagaggcgcccctcacctcccggacggggtggctggccgggcggggggctgacccccccacctccctgccggacggggcggctggccgggcagggggctgacccccccacctccctcctggacggggtggctggcctggcggggggctgacccccacctccctcccggacggggcagctggctgggcggggggctgacccccccacctccctcccagacggggcagctggccaggcagaggggctcctcacttcccagtaggggcggctgggcagaggcgcccctcacctcccggacggggtggctggccgggcggggggctgaccccccccacctccctgccggacggggcggctggccgggcagggggctgacccccccacctccctcctggacggggtggctggcctggcggggggctgacccccacctccctcccggacggggtggctgccgggcggagacgctcctcacttcccagacggggtggctgccaggcgtaggggctcctcacttctcagacggggcggctgccgggcggaggggctcctcacttctcagatggagcggccgggcagagacgctcctcacctcccagacggggtcgcggccgggcactctcacatcccagacggggccgcggggcacagacgcttcccacatctcaggcgatgggcggccgggcagagacgctcctcacttcctagatgggatgacggccgggaagaggcgctcctcacttcctagatgggatggcggccgggcagagacgctcctcacttcctagacgggatggcggctgggaagaggcgctcctcactttccagactgggcagccaggcagaggggctcctcacgtcccagacgatgggtggccaggcagagacgctcctcacttcccagacggggtggcggcggggcagaggctgcaatctcggcactttgggaggccaaggcaggcggctgggaggtggaggttgtagcgagccaagatcacgccactgcactccagcctgggcaccattgagcactgagtgaaccagactccgtctgcaaacccggcacctcgggaggccgaggctggcggatcactcgcggttaggagctggagaccagcccggccaacacagcgaaaccccgtctccaccaaaaaagtacgaaaaccagtcaggcgtggcggcgcgcgcctgcaatcgcaggcactcggcaggctgaggcaggagaatcaggcagggaggttgcagtgagccaagatggcagcagtacagtccagcttcggctagacatcagagggagaccgtggaaagagagggagagggagaccgtgggccgtggggagagggagaggcaggggcaggggcaggggcaggggcaggggcagaggcagaggcaggtgtttctttagtctcctttagtctgaagtagttattcacttttccctctgctttaaagattagagaccagttatttagtaaaatggatttgaatttgggttgtacagtgttttctcattattagagtcaggttgtgtatcttgggcaggaatttcacaaaactgattctgtgttcttgtatgctgtcaggtggcatatgattttaggttgtctttttttctggcgatgctcaccgatcacttgattgaggtggtgtctgtttaggtgttttatatttgtttcctgttgctgctgtaacaaattactacaaactcattggtttaaaacagcacaaatttgttctcttaataattctggaggccagaagtccaaaatcagtttctttgggccaaagtcatgatgttggcagggctacttccttctggaggctctagggtagaatctgttttcttgccttttccagcttctgtagatagcctgtatttttttagcttgtggcccttccttcatctttaaaaagggcattagtccagcatctgcttccgttgtcacattaccatctgtctttgacccttctgcctccctgttaaaagtacccctgtgattatggtccttctatgataatcttcctatttcaagatccttaacttagtcatatctgtaaagtcccttttgtcattcgagatagtatatttactggttccaggtattaagatgtggacatcttgggggacagttattcagcctaccccactgcaaagtcattcgtttcccctttgtaattagtattttgtgggaggatacttggattcctggttcctgttagtggagaatggtatttagaagccaagatctgcatgctagatgtgctcattgctactaggatttttctgctcctaggcccacttagtagatagagctagggagtatgtatatatgtatttagaactgcatttgtatttctttattaaaagacattcattcgtagtgatatttttaattccagtccaacagtacagggttcattcttgttttctattttttcactcctttttcttgacagtggaaaactgactccaggtatctttaatatattaacttattcagtcagttcctctgcatattatcagtctccttttctgctaccatactctcccctacatggatctctccctcttcctgatacttggtttcggtacttcttgctgggtagtcctcccatgtggatgacttcatctaagcatggtggtaacaaggtagttggacttcttacctggtggttttggaaccttctatatgccaagtccttttacttacctgttacctcatttaagaactgcagttttgtagatttttttttaatatggtaaaaaaaaattataattagccagctggactcattttagatcatctcaattgtgttggcagcattcaaaac

SEQ ID NO: 122256 - DNA, 1538 bp, Homo sapiens
ctgagccccaacatggaggtacaaaccaaggaactaaaattgaccaacagccttcgtaatttaccctccaagcctttcccggaaagttgcaagccttcagtagactccagagttacatctagactcagctctgttgctgttcagtgagtgagtgctagctagcctgaaggtgggtagtgcggaatgcactcacggtagcactttgagctagattcatgtattatctcattttattcatgagaaaactgcgtcctagaggaggttaccaactttcctaaagtcatacagctaccaggtggaagactgtttgttggactcaactctgtcttatgccagagcatctcttgttagccactactctctgctgcctcctgtaattaagtaaatataacacattacgatatgtgttaaaatggctagtggaaggtgctttgggagcacataggaaggagtaaataattatattttgggatttggggaagtgtttcatgcagaggaggtgacacgagataggtcttaaaaggtaagtgggagaagggcattccatatataggggaaagtatatgcaaaagcatggaggtgtttagtaaatggtaaagatttgaatgtgattggcacttacgaccaactcaggtattttaagagggttatactttatcctgtaagttatttggtaaacaatggaggttttaaagtatggtaataaaacatggtcagtttggcttttgtggaatattgtgtggagaatggtttggtgggtggagggggaggttggtgatggctgggtgggaaactagatggagggggtgtccatttcagaggctctttccagtgacaggtggtcagattagaaagagaattctaagaaagcttggactgtttattgaatataagtactgaggagagaatgagagtggagtgcagattttgaattttcactcatttctaggattacttatttcttgtcctcttgaaagcttttggtgattggcccaatgatcagtttggggatttaagtgcagggaaaagaatggggatgaatttttttttgagactggatctcatgttgttacccaggttggagtgcagtggcaccatcactgctccactgcaacctcaatctcctgggctgagccatccttctgcctcagcctcccgagtagctagaactgcacgtgcacaccgtcactccctatagagttgtaattacagtaggatgggttatctcagtctcctgttgagtggtttggtttttttgttcttttttttgacaataacttcttgtccgatagtgagtgtttttgttttttgttttgttttgtttttgagacagggtctcactctgtcacccaggctggagtgcagtagcacaatcttggctcactgcaacctctgcctcccaggctcaagtgatcctcccaccacagcctccaagtagctgggactacaggtgcgccatcatacccagctagtttttataatttttgtagagatagggtttcaccaggtcaccaaggctgtgttttttaacattagaa

SEQ ID NO: 122257 - DNA, 1367 bp, Homo sapiens
ctccaattgagctttccaccgcctacccccgtcacttcctcccgttgctttttcatttgttcactcactgtgggggttggaagcaatgccgttattcctcttagcaaaaataggcttttttctatttccttttcttcggagtttcctgtttgtgacggaaaaagtgcaagtatgaaggattaagtctcgtttaattaatcttgtagggaattttgaggtagtgggtcgatttacttttggttctaagtcttttcacattaaacaacatcgaattaaagcacagaataacagattcttttcatatttcacttgatgtttgggtaatgtttgcatccatttgttgcactctactaggacatatggcagatggtattcttaaagctgatgtaactgcgagggcctaatgggttatttatggtagtgttaacagtaaggagtgggttttgagtattaacaacttagggaaagctttctattgcacaagagctgtgctaacttgcttaaatatcttctcttcaattgggtgtgctggaggtctaggttgtccaggttatatactctacttggagaagttgttaacagtgaagccttgaatcagctcagaacttgttatactttcagatggattcagtgtcctgtaacattctttttcccccccgccccatgtgatctgcaggaaactaacattcttgacttggaatagaactaaaataaatttaggataaatagtaacaaaggattgcatcattttgtacgtttgacaataagtttaaaaatccattagatgcaaaaatctgtccaaagttactagtcttaatactttttttactcaatgggtagtttatgaaatttggatcttggactgttgtgccttatttcctaagtgcatttaaattgtgtaggttcttcctcgatgttgaaaaaggaaaaaaaattgggtaggttctttgggcagtgattgtgtataagtgaagtcttaatgctgtaatggcttttcttatctgcaaacctaggccattcttgtggttgttgtatttcaagttaaaagggtacacttttcagtagtttattttcacctaacagccattatgtgtgcaattggtagtgtagaaaacaaaaaggtattgggagagtagtcggtgggtttggccagaatgtgttttgatcaggcagaacaaaggtataaaaaaaagtgttttgagaaactgccctgatttcagaaattagccatcattttttaatctacattggatttttaaagttgttctttttttctttttaaagcggggagagtctcatttacccaggctggtcttgaacttgcttcaagtcatcctcccgcttcagccccccgagtagctggcctt

SEQ ID NO: 122258 - DNA, 2024 bp, Homo sapiens
gctgcttcctcgtttataactacagagcccttttgggtgacaccatttctcctccaggtctgtccaggtttctgtcatctcttgccttaccatagatattttcagtccttaatggtcacctacaaaatattcattgatgtggccaggtgcggtggctcacacctgtaatcccagcactttgggaggccaaggtgggcggatcacgaagtcaggagatcaagaccatcctggcagtggcgggcgcctgtagtcccagctactcgggaggctgaggcaggagaatggcgtgaacctgggaggcaaagcttgcagtgaaccgagattgcaccactgcactccagcctgggctacagagtgagactccatctcaaaaaaaaaaaaaaaaatcattgatgaaaagtggctgtgctctaccggcgggatttgactgcgtgatgtctcacagaaagttttctgctcccagacatgggtccctcggcttcctgcctcagaagcgcagcagcaggcatcgtgggaaggtgaagagcttccctaaggatgatccgtccaagccggtccacctcacagccttcctgggatacaaagctggcatgacccacatcatgagggaagtcgacagcccagcatccaaggtgaacaagaagcaggtggtggaggctgtgaccattgtggagacgccacccatggtggttgtgggcattgtgggctatgtggaaaccccttgaggcctccggaccttcaagactgtcttcgctgagcacatcagtaatgaatgcaagaggcgtttctataagaactggcataaatctaaaaagaaggcctttacgaagtactgcaagaaatggcaggatgaggatgtcaagaagcagctggagaaggacttcagcagcatgaagaaatactgccacgtcatccgcgtcattgcccacacccagatgcgcctgcttcctctgcgccagaagaaggcccacctgatggagatccaggtgaacggaggcaccgtggctgagaagctggactgggtctgcgagaggctcgagcagcaggtaaatgtgaaccaagtgtttgggcaggatgagatgatcgacgtcattggggtgaccaagggcaaaggctacaaaggggtcaccagtcgttggcacaccaagaagctgccctgcaagacccaccgaggcctgtgcaaggtggcctgtattggggcatggcatcctgctcgtgtggccttctctgtggcacgtgctggggagaaaggctaccgtcaccgcactgagatcaacaagaagatctataagattggccagggctaccttatcaaggatggcaagctgatcaagaacaatgcctccactgactctgacctgtctgacaagagcaccaatcctctgggtggctttgtccactatggtgaagtgaccaatgaccttgtcatgctgaaaggctgtgtggtgggaaccaagaagcgggtgctcaccctccacgagtccttgctggtgcagatgaaacggcaggctctggagaagattgaccttaagttcattgacaccacctccaagtttggccatggctgcttccagaccatggagcagaagaaagcattcatgggaccactcaagaaagacggaattgcaaaggaagaaggagcttaatgccaggaacagatttcgcagctggtgtggtctcaataaaagttattttccactgggaaaaaaaaagaaaagtggctgtgtcttccaagcgatgtgactccacaatacatgggcagcagtgaacattggttttcccgtggcgccagactcttcctctgcctcagggaagcagctctgcttgaagcccctgtggatatggtttccatgatttttcttccagatatcactacttggaaaattgtggttttattcctactcattaagtcttataaacattatgatttgacatgtcacattccccagtgaatttccgctttgtaaactctgggctgtttagtcagttgcagaaactaggtagggaggctgggggtggcagga

SEQ ID NO: 122259 - DNA, 1180 bp, Homo sapiens
taattaggttttaattcttataaggctggaactgttaggattcaaacatagaattaatagataaatactatagattacataaaaatagtaaataatcatgtttgataattaaatttaaattaaaatataattcttttgatttatctagccaaacgtctcaagtccagtaccagttttgcaaatattcaggaaaattcaaactgagacctacaaaatggagaattgacatatcacgtgaatgaatggtggaagacacaacttggtttcagaaagaagataaactgtgatttgacaagtcaagctcttaagaaatacaaggacttcagatccatttttaaataagaattttcgatttttctttccttttccacttctttctaacagatttggatatttttaatttccaggcatagcaatgttatctattttaatgtgtatttgtcacaataacagaacatgcaagaacaatcattattttattttataggcatttgattactattctagacttctggtatcttcttactaacataaatatctcaagtagaaaagtttttgaaaactaacatttaaaaattaatcagttacagtaaagactttgaaaaagaaatgtacttgttaggaagtagcttaattaccccccattgcagtattattgttatatatatagttaatatgttgtacatcacaataatatataattcagtctctagtttccctagagtcatttttgaaaccactgattgcaaacctccctgacaatttttaaaagtagtaagccacattacatttatctttgtaaaaagatttatggtaactggtttcttacttgacttttataaatagtattttacatcttatttttgcctttatttcataagtaatttaaaaatcactggattgctttattatattcagggcaatatggattatttttataccaaggatttgcatcgtgaattacattaagttatttggcaatttataatttattactactttaaatcaaatgtagcattatcacactgtatttaaattgtcattttttaaaggaatattttcttcttaagatatatagaggattttggagaagagagacaggaggggtaaaaccagcttaaggttcagcgagcagaaagggacctgagaggatgctcactgtaagactgttggacagtgg

SEQ ID NO: 122260 - DNA, 1091 bp, Homo sapiens
aaaagtacttaaaatgaaatgtacagtgtggctttttgtttgtttttactgctccattcctattgcctaaaacagtacctggtttctagtaggctctcaataaataataaatattttgtaaatgaataaaacagggcctaactatattcctcttcatataagttctttgtttgaatgtacaaatggttgacattctagaatactttggtcagtattatggacttagaatatgaaatttctgtatggatataaatttctacaatgactgtattttgaaccaggtttttttcctggcagaagaagttgtcctcaactatcagtaggtttttagaggtatgtattgagtctaaattctagattcctgtttagttattagcaaaataattataagaaattgaagacaagttaaatataaaatagaaagatattgtttgctcttgttccagatgaacatcactcgaaaactatggagtcgaactttcaactgttcagtcccttgcagtgacacagtgcctgtaattgctgtttctgtgttcattctctttctacctgttgtcttctaccttagtagctttcttcactcagagcaaaagaaacgcaaactcattctgcgtaagttttttacaattatttattttatagataaaagcctgtattttaaaaatttaggcctgttttagaaatgatagctactctgagaactcaaagtagattagcctaaaaggactctctgctttaagttttacaatcatgcttactagtgaaagagatctgtgaaaattttataagtgtggacaataaaaagttaaaacagggctaggtgcagtggctcatgcctgtaatcccagcactttgggaggatgaggtgggcggatcacgaggtcaggagatcgagaccatcctggctaacacggtgaaaccccatctctactaaaaatgcaaaaaattagccgggcatgatggcgcatgcctgtagttccagctactcgggaggctgaggcaggagaatcatttgaacttgggaggcggaggttgcagtgaaccgagatcgcaccactgcacgccagcctgggagacagagtgagactgtc

SEQ ID NO: 122261 - DNA, 1050 bp, Homo sapiens
acagtctcactctgtctcccaggctggcgtgcagtggtgcgatctcggttcactgcaacctccgcctcccaagttcaaatgattctcctgcctcagcctcccgagtagctggaactacaggcatgcgccatcatgcccggctaattttttgcatttttagtagagatggggtttcaccgtgttagccaggatggtctcgatctcctgacctcgtgatccgcccacctcatcctcccaaagtgctgggattacaggcatgagccactgcacctagccctgttttaactttttattgtccacacttataaaattttcacagatctctttcactagtaagcatgattgtaaaacttaaagcagagagtccttttaggctaatctactttgagttctcagagtagctatcatttctaaaacaggcctaaatttttaaaatacaggcttttatctataaaataaataattgtaaaaaacttacgcagaatgagtttgcgtttcttttgctctgagtgaagaaagctactaaggtagaagacaacaggtagaaagagaatgaacacagaaacagcaattacaggcactgtgtcactgcaagggactgaacagttgaaagttcgactccatagttttcgagtgatgttcatctggaacaagagcaaacaatatctttctattttatatttaacttgtcttcaatttcttataattattttgctaataactaaacaggaatctagaatttagactcaatacatacctctaaaaacctactgatagttgaggacaacttcttctgccaggaaaaaaacctggttcaaaatacagtcattgtagaaatttatatccatacagaaatttcatattctaagtccataatactgaccaaagtattctagaatgtcaaccatttgtacattcaaacaaagaacttatatgaagaggaatatagttaggccctgttttattcatttacaaaatatttattatttattgagagcctactagaaaccaggtactgttttaggcaataggaatggagcagtaaaaaca

SEQ ID NO: 122262 - DNA, 1016 bp, Homo sapiens
ctatttctgtggcttagtttcctaatttgtagtgatccctcagattttttaaataagggtgagaagttagaatgagattcatgttctggagaagataaagcttcagagaatgtagagtatgtgagttcagagaggggacaactcctgaaataggtttaccaagaggatcctgtgtacaatgggtgcagaaggagccctgcacaagggggctgtacaaggaggtgaatggggctgaattccagcttagcttctggaggcaggaatgaccttttgtaatttatctacccagagggaatatctttttctgatttgcacaaaggagctttactgtgctgtctgcccctgtctaccaggtttaggtttcatctcagttgctaactctgatcagttggtggggactgcctgaatccctgtatggtgtaagatatctatgggtagtggagggagtaggcagtggcatgtatttgtagattccgagtcttgaacttttaatggtttagaatgtagatataaatatgtttattttgcagtgtttgagagtgcaggctcaagaatcagactgagtacagagtctagctttttacttaccagttttatgtccttgggcaacttccttaatttatctaaacctatctctgttccttatttataaaatggagataatgataatttttccctcatggaatcactgcaagaattaaatgggcaaatgtgtttaaagtgcagtgtaagcatagttcttagaacatagcaagtatttagtaagtgttaactttcgttgtagtaattgttgtctgtcagagtacatggatgtcccttagtgtgtcatatcctagtgtctacctagtccgtctctcttttctccacaaattctacttgccttgctgcctttctcctgggtaattgcaatagctttgcatgttgtctttccacttccagttgagagagatcctatctgatggccctgaatttctaaataaggtgggcataatacaaagccatctgttgaaattaag

SEQ ID NO: 122263 - DNA, 1012 bp, Homo sapiens
attggatgggtattatcttcattttaccaagagaggaaatgggacagagtttaatttgtccaaggtcacacagccagtaaaaagtacaattgggatttaaacccaagtctttgtgattctaaaacctgcacctgtgcgatggatgctgcctccaagctggaccgtgtgcagcttggccaaggcccatgccgaacactcgccctgacagctgctgcctgcagactcctggactctacacccgtcgtgctcacacagttgccttggtgccagtgttatcaaagaggccaacacgagcagaggctcacgttgagctaaagaaaaattaaacatttaagagaattcagttataaagctggaatggccgttcctgcttgacagatgtaaacactgcagctttgtcattacttagctagttgtctcagcacatgtcctttcctttctagctagattatactttaatccagttgttttcatgttcactaaatccaaaccatgtttaaccggtttattcattggagagtctctgaggtgaagaaagttttgtcctttcaacttcactggggatttgctgtcttctttctgcaaagggattttcctgaatctgtaatctgaacactttgacctgtgagggtttttcccccaactaggagcaaatctgtgaggcttgaccctttgtgtgctgtggagcagagacaatgcccttctgtgaatgtcttctcctcttgaggacagtagtaattggcgacaggaatgttaatcatttggcaagcgcttcttcatggccttgctgccctttgccactgcagccagctccctgcttgcctctactccctcgagaatggagccgccattttgtagcagctttctagagaagtttttttcaagagcactttgagagttgacagtctgacttaaactgaggtaagtgaataccagttcactctcagaccacagtctgtgttgatgatacaacaggtcctcacacacattgtctggtgggaggataaattgg

SEQ ID NO: 122264 - DNA, 1273 bp, Homo sapiens
ctgtgcaacagagcaagactccatctcaaaaaaaaaaaaattatacatgcttctcaactttaaaatatgtgttttgaactcccccaccttgtataaaatattggactaaatttatattttttattctcagggtcgctggtcatcctctggcacagaacgaacgttgtcttcacatgtttttacaagatgaaataatagataaaagctatactccatctaaaataagacatgcctgaaatttggcaagaaggggcaaaaacgtgactattaatgattgataagcaccagtgaagaagttctaacttttagcatgctgcacagaaactggtataacatgccttcagtatactaacactcatatgctcagttttgttttgttttggcagttgacaagaagttaatttgctttagtaaaaatccctcattccagcctttctatataaatagctctttcttgctgttttaatgtggtgcacactatagcctcacaaacctgttattccagtgtaatctgcagtgtcgtaactaaagttactggcttggtcttatttgcacagtttttgcgtcttgtttgcttcttgcatctgattaactagaatatttctctttcccccttttaatttgtgatgtcacttgaccccatttatgtgtaggagcactacaccattggtttccaatactgcacacataagatacatacttgtgtgcagaaagtatcttcctccaggcttgtaatacccttcacatggaagattaatgagggaaatctttatattctgtataaaaacaaaagcaaatttatatactaaaatcatttgtctaaaaatttaagttgttttcaaataaaaattaaaatgcatttctgatatgcactgattgtgttgcctccagctttttttgctctctatgagtgactacttaagtcacttgttgagagggattatttactaattatatacttctcattcctgtaactccattccctttaaacagtggtgatatcaaatatacttccatccattgaatggggtatttttaacaacaacaaaagtgatatactaaaaaatgtattgcttaaggcttattgaatcattttgaagcactttgtgtatttgaaaactgctttataatctcatttattaaaaggactttcaaagataaaataccatttctcctatttttcagaagttttttcctagtcaactgagtgacttgtttaaacaaacttagcaagggtgtaataactcttcttagtcagcaggtttgtgctttc

SEQ ID NO: 122265 - DNA, 1023 bp, Homo sapiens
acaaagtgcttcaaaatgattcaataagccttaagcaatacattttttagtatatcacttttgttgttgttaaaaataccccattcaatggatggaagtatatttgatatcaccactgtttaaagggaatggagttacaggaatgagaagtatataattagtaaataatccctctcaacaagtgacttaagtagtcactcatagagagcaaaaaaagctggaggcaacacaatcagtgcatatcagaaatgcattttaatttttatttgaaaacaacttaaatttttagacaaatgattttagtatataaatttgcttttgtttttatacagaatataaagatttccctcattaatcttccatgtgaagggtattacaagcctggaggaagatactttctgcacacaagtatgtatcttatgtgtgcagtattggaaaccaatggtgtagtgctcctacacataaatggggtcaagtgacatcacaaattaaaagggggaaagagaaatattctagttaatcagatgcaagaagcaaacaagacgcaaaaactgtgcaaataagaccaagccagtaactttagttacgacactgcagattacactggaataacaggtttgtgaggctatagtgtgcaccacattaaaacagcaagaaagagctatttatatagaaaggctggaatgagggatttttactaaagcaaattaacttcttgtcaactgccaaaacaaaacaaaactgagcatatgagtgttagtatactgaaggcatgttataccagtttctgtgcagcatgctaaaagttagaacttcttcactggtgcttatcaatcattaatagtcacgtttttgccccttcttgccaaatttcaggcatgtcttattttagatggagtatagcttttatctattatttcatcttgtaaaaacatgtgaagacaacgttcgttctgtgccagaggatgaccagcgaccctgagaataaaaaatataaatttagtccaatattttatacaaggt

SEQ ID NO: 122266 - DNA, 1033 bp, Homo sapiens
ctagcaaagttttattttgttatgggtaaaaggtcatattaaaaacatcatgatttcggccgggtgccgtggctcatgcctgtaatcccagcactttgggaggccgaggcgggcggatcacctgaggtcaggagttcaagaccagcctgggcaacatggtaaaaccccatctctacaaaaatacaaaaattagctgggcatgatggtgggtgcctgtaatcccagctacttgggaggctgaggcggaaaaatcatttgaacctgggaggtggagtttgcagtgagccgagatcgtgccattgcactccagcctaggcaacaaagggagattctgtctcaaaaaaagaaaaagaaagtcatgatttcttttgttttgccatacccgtccccccatttttttgaagtttccttaatgtgcttcaatttaggactaactttttttgtttcagacaaatcttcctattttcaagctgaaagaatctactgttagaagaagatacagtgactttgaatggctgcgaagtgaattagaaagagagagcaaggtaagaatgatttatgatgcaactttaaagcaaaacattccaagttttaatgtttaatatttctcaggaaaatgatattgaataaaatgggtaaaagcaaatatgatttctttttttcaaatagttcagtgtcattttatagaggtagagtctgtgtaaattttccttagaactctttctcttgtctgctttggcccagttgaggtctttgctgactcacacttcaataacacttcttagaaccttgttgctattacttccttcctttccctcatcgtcctattccatcttcccctctccacacacttaagccaagtttctcttcctcaatacattttataaatgtcagtgtatttccaattttgttttagtgacatataagtttttttcatcacatatatgttcatgtaacagaagtttcataaagcagtaatgacctcactctgtgtgatatgtgctgatattcttcagattagcgtttttaaatg

SEQ ID NO: 122267 - DNA, 1055 bp, Homo sapiens
aatgtaaaatctcacctgcagaaaacactcaactctgtaaaggcctttttatctttaaggcatttacaaagacttaatattttaatgcggaagggtgaacttggttaaaaagccaataggtgaaattagagagaaataatccagtgctttctttctgggaattattctactctccaggggacctaattttattccctgtggggaatgagaataccctctgtacaacaagccagcatctttaaatataagcttgacttttagtataataagagtcttgttaggtgcaattttttccttagtcatttatacaatgaacaaatgttgtggttacctgggaaagaaaattcaagtgcttttaaatctcttgtgagatttggtttcatgcttgaaacctatacactgttatgcccaatagcatctgttgaaaattctgagctgtaaggtatacaacatagagaagttaatacacttaggaaaaaattgagaccactacaaaatggatttaagggcctgaattaaaagcttttcttgtgctgagtgacagctacttaccagtagcattaagcttaacaaataagtagaactttcttaggagtgaatattacaagatgatgtccctgtatacacagtaggaagccagtctttccttcaggtggcacttaacttttttcttccaattgtaaaacactttttagttctatgcaaattctgtgctaattagttcaaagtctgaattaacggacagaatataatctaagagaatatatagtgttgagtagtatttttggtagggtatggcattagttattatgttaagtcatttctgtctcctacaaactttgtgataatttgcacattttaaaatctttttggctgggcacggtggctcatgcctgtaatcccagcactttgggagtccaatacagatggattgcgtgtactcaggagttcaagaccagcctgagcaacatggtgaaaccctgtctcaccaaaagtacaaaaattagccagatgtgatggcatgcgcctatagtctgagctacacagggggttga

SEQ ID NO: 122268 - DNA, 1106 bp, Homo sapiens
ggaagacaccagaaaatagttttgcattttaaagattgtccaaaaaaggtgttagactattaatagacagttttatttcagcataagcctgtaggattatgtaaatcttcatgaattgttatgaatgaattttcctttaaaatagaattattaatgcacagtttcattagagattactcattgaaaaccttgtgtgagctctccaatgagtcttgttgctaattcacaaatgaagaatatggacaatgtaggaaaagtatctggaattccttggtttatgcatttaagctagtctagataatttattctctactgttttggaaattataccataaaggatacttcttttaaaataaggaggaattgtatcactggaaggcatgtccttattttttaaagaaagaaactaaatacgttggcttagtgacaatctacatttcaaaggttctctggactaaaagcttattcttcatttaaatgacttcttctcagccttattaagagttcatctaggttataaaccatatctccagttattcatgctgttccagattgggtaaaacaggtatcaaaagtactgaagggtgaagcaatagcttaagcacttctcagtttatcttttatctctagatgtagatatttggagaaatgcagctgtttaatgagaactgtagtggggcatccatttacatctcttaggattggttgaatagagtatggcctattgaatatacttttgatgttgttgccagtctcttttcaaatgtacacgtgacactatctgaagaaatactagaaacacctagtaaacatttttctaatatctattgttaagctatattcaggtgatcacattttgaggcttggttttctgcttggctatcagtgataatcaggtaacatatagggtatctgtgagctgctgactttaataggtcagcctgtgtaagtgtataagacctacctttttggagaccaataatgtggtagtttcctgtgcttagacttgaagggagcacttgttttagacctctataccatggtttgagaaatcttttccttagtatgtaatatccatttgcattcctgatgatcttaccctgtgt

SEQ ID NO: 122269 - DNA, 1044 bp, Homo sapiens
acattttagataatacgttgtagagactctgagttagattgcctcctgcccctccccaaaggggaggtggtggttgctatttattttttttagggacttgcccacattaagtctgtagtatgaggtggtgatagcacggatcaattttttttttttaagccaggttttctaagggtcaccctgagtcagtttgtcagcttatctcagtggtcagaaatgactggtcaaaggttatgcgtagctacttgagccagtgaggcttcagcctttttctttttttaagagacaggatcttgttctgttggccaggttggtcttgaactcctggcctcaagcagtcctcccaccttggcctcccaaagtactaggattacagacgtgagccactgcacctgaccagcttctgctttttgccagtgcaggttggggaacaagtcaaagttcaggcagtttacaagttcgccccagcttttacttcgtgccgtcttctcatgtccatggctctcccttgtctgtgaaaggtctcattcagccatggatgtttagataactagggttctctccagctgagcatgcatacagctttgtgtaagcacacatacttttttttttttttttttttttttttgagacggagtcttgctctatcgctcaggctcgagtgcagtggcgcgcaatcgtggttcactgcaacctccacctcccaggttcaagtgattctcttgtctcagactcccaagtagctgggattacaggcatgtacccctatgcccagctaattttttgtatttttagtagagacagggtttcaccgtgttggccagggtggtctcgaactcctgacctcgtgatccacccgcctcagcctcccaaagtgctaggattataggcgtgagccactgcgcccgacatcacacagattttcagacctccacagatacttgggagttaatcaaggccccaccatggctatgtaattcttctggtaagtctgctggttcattgcttgcccccagtattgcaaccttgggttgccgcaatatt

SEQ ID NO: 122270 - DNA, 1005 bp, Homo sapiens
taccactgcactccagcctgggtgacagagtgagaccccgtctcaaaaaaaaaagaaaggaaggaattaagttgaaaattgagaaactgtgataccagctctaaatgggacaacatagtgaattgatagaatttttgtcttagtttagaaggccagattatgttgatatgcttaagttgggataaattgcagttttagagcgtttttgtttagacctcagcatgattcttatctataattgatatttgttcagttttcttccctcaaaacatccgatcaattgtttttttctaactaaatttcttttttagagttgttaactttaacttgagtagctcctgtgggtcagttgatttattgagtacttgcaatgctaagtttaataacacatgttactgcattcagtaagttcacagcagcctgaaacagggctagatttctctgataagttttccccagaactgtccaataaatgaacatttatgaactgtctgttatattccagacattgctagatgcttgtttaaaagatgaataagatatgcctagcctttggaagcttccaaactggtggtaaggagagtggggagaggtaaattcataaaatatgcataatctgtagtgggaacccaggtctgccctgaggggccaggagtgtgtgtgggcagaaagtgagccagtagtctagctagggggagcacctgtctcttttgtgcttcactgccagcatctgacatcaatgacatgccagaatcacacagtaataatactggagtgattccttgttactctctgacacaaacatttttctcgatttttatttataattttatatataatgtataatttggttttaaaattgttattttaatttttattttttaataaatagtgacagggtcttgctgtgttgcccaggctggttttgaactcctgagctcaagcaatcctcctgcctctgcctcccaaagtgctgggattacaggcatgagccaccacacccgg

SEQ ID NO: 122271 - DNA, 1047 bp, Homo sapiens
agaatctatgtagctctatcaattggccaatgagatgttgtctgttacacatgttgctgccagctacggctgacttttccaggatctccatcaaggagaagcatgctattagcagtgaagattctgtccttatctaatccatccccagaatggagagtgggggaggaagacagtggctattttaaagtagtcctgttatattgagtttttagggattctgttctgttaagggatgtatcatttgagtatcttttatgtgcaaagcactgtgctctatctataaaatttaatcttgaggtaaccaagcagagtagataatattcctgtagaagctgatcaactgatcctcatctcttgtcctttcctcattttaactccagtcctgaactggtatctcccaattaagctgagttcttttgtatccaggccttttgcacacacttcctcctctgttaagaacaggcttcctttaagagcctcatctggttactatcacttatcctgcaggactcagccttaatgtcccctttttaaagattttgctgatcccttgactctggaccagatttccttcctgtgtgccctggtagctttgttaggaataaatttgtttgcttgtctttggcttcctgtaagttcctgtgtcacccattataagctcttagaggacagggactgtcataatcacccttactcaatatccaacactgcttggcacatagtggacacttacaaataaatgaagtttaagaaagttaacttccccagggtcacagctattaaatggtaaaactgggatttgaacctagattttcggaccttcagagcccgtacttttgtttgagacagggtctcactctgttgcccaagctagagtgcacggtggtgcaatctgggctcattgtagcctcgacctcctgggctcaggcaaccctcccaaccttcgcctcctgagtaattggggctacaggagcacgccactatgcctggctaatttttttgtatttgtagagacagggtttctccatgttgcccaggcttgtctca

SEQ ID NO: 122272 - DNA, 1047 bp, Homo sapiens
aactcgaggactcaagtattccccccgcctcagcctcccaagtagctggactacagggtactactatacctggctaattttttattttttgtcagatgagacttgctatgttgcccatgatggtcttgaactcctggcctcaagtggccctccccctctcagtctcccaaagtgttggaattacaggcatgagccacctcacccagccctgcaattttatttattattttctaaatgttgctgctctcccgaacccctactgactaccttttgctgttgaatttgctatgtggaaaaccattttatgttccagaatttgggcttttaaactatcttacagttactgtctcattctggtcttgagaaaaatttacagttttacaggatctgattgaaattactctaattcacagggcaattttatatggatggtggcacttagaatgcaagtttcccaatctccatttatcttttggtttgaggatagtgtttaagactattaggatcacttgattagtatctctgggcttttgaaaataattacacagtgttatgtttttaaaaattgttctaatgggtaggtacagcagagagcaccataaatgattaaaggtttaggaaagttcaaggtctggaattatttaggcatattcaagagaaggctgaaagcaaaattcagtcactgtttatgaagtttgtgctgtaatataactttaatattctggagatttttaagttaatcaagatctattttacctggagaccactgttttgaacaggaatggaattagaatctttcttgagctctgacatagtcctcagttcaaagaatagatttaacatttcctagctgggtaagatacaaaatcaaagctccacttcccctctgtgaaataggtgtgctaataatagtacctacctcttaggactaaatgggataaggcacatgaatctttctagcacagtgcctggcacataataagcacgcaaaatttagctctttctaaagatagacattttctaaattaaacgtcagtgatcaactac

SEQ ID NO: 122273 - DNA, 1082 bp, Homo sapiens
aaagccgtttccggcgctctaccccgccgcaggccgaggctggcgcagagagacaggaagcgccagctctgggcgtctgggtcctcgcctcctcggccgcagccccgcggcggcgcgctcgcggtgcattgtgggcgctgtagtccggccggaacctgtttgcgaccccgagtcccatgacaccgcttctcctcacaccccagtccgcagtgcccctccccagcctcggccgggcctcccgggagccgggcgtggcgttccagctagtgagccgtttctcccctgggctcggaggcggaagcttgaggggcgcggggaggagcttcgcgtgcggggtgaacgcccgctctacgtgctcgttctcttcgcgaccgctgcgcgcgagccccgtgtccccacggcgggcagcagcggcggcggcggcggctgaacgcggagggggcggagggagcccgcggcggcggcagcagctacagcgaaatggcggagaccgtggctgacacccggcggctgatcaccaagccgcagaacctgaatgacgcctacggaccccccagcaacttcctcgagatcgatgtgagcaacccgcaaacggtgggggtcggccggggccgcttcaccacttacgaaatcagggtcaaggtgaggccgtctctcccctctcccaagaaacccctcccgctggctctggtcacccccactcgacccgggagtggacccccgcgggcagccacagcctcccaggccgggagcccccttgcagaggcgggccggggtcgtgagccagggcccctcttcctgtagggctggtgtggggggctgcagagcgagcccggcgcgctggcacttggagaaggtgctcgaagaggagggcgtgggttgagcgccgcttgcccctccagcagctgatcagggaatgacatttgagttggaaaggggtagatctttcgagaacacatcccttcgctgggaagggaaagagatgttgacagagaaaaggggcttgcgcaaagttaaagccttttcccagttttctcttcctggagacttcccagaggtagcaagccaacccggctgctcca

SEQ ID NO: 122274 - DNA, 1061 bp, Homo sapiens
cctgagtgactttcattttgagggtcagaggttgactcagagtttgttccttccgggacgtttagagagctgaacctagtgggagtgcctggcttgaagagatgcaggtgtggggttggggcctggggacccctaccctctgcgttttccaagctctcggggctggtgactgacgggcactggaggaagagccgcgcctgggacctctgcaggccctgatgtctctcgtgattctaggaaggaaggtccacacacattctcagattgagggatcgattcttggtgttcttttcaagtcactaggggcttcagtggaattattttgtcaccgggctttctttctccctggcttccttcattcagttatatgttcatgaatgaatgaatgaatgtatattctgagtaaccaagagtgccagttttactgctctattcatgtattcgcactaaactgcacgattttcaaaggcaaggacattgtgtcattgtttcctaagcacttagcgcaatgattggtacttgacgtgcaaatatgatttttgagtgaatgaatgaatgaaattattctccttgtctccctcatccacatactcgttttcctttttctcaaatccaagcaacccctgtaatataccttaatagattgatagaccttaataaggtatataccttaatagattatttattaatttagctaaaaatatgacaatctttgacccttatcatcaatgcagttgaaattaatactagaactttgattaggtcaccttacgtctttctgcaaagattagcataatgcatttagtataatggaataggctccacacactgcctgggggtagccctgatctgctggagtagtcgttaaaagtaaataaataaataaagatataatggaatattctggtagtgtaagctgtggattataatataaattttatttttcatttttggtagtcaataaaagcaaatgctataaatttcaacaggtgcaagaaagaatatggcaaaatgtaaggcttttttctatccctatcccttagctgcttagtttttctcct

SEQ ID NO: 122275 - DNA, 1050 bp, Homo sapiens
gtcactctgtcacccaggctggagtacagtggcacaatctctgctcacttcatcccctgcctcccaggttcaagcaattcgtgcctcagccccccaggtagctgggattacaagcatgcaccaccatgcccagctaatttttgtgtttttagtagagatgtggtttcaccatttggccaggatgatcttgaactcctgacctcaagtgatctgcctgccttggtctcccaaagtgctggaattacaggcgtgagccaccatgcctggctgaaaatgtattttatattatttttatcaaaatgacatttacaaaaactgctccaatagatatacttgtaactagttaaaagtttgaatttgacccttaagaaatgtgtagagcactgtgaaaatgtatttaagaaagtctaaaattttatgtttttgtttatagcctatacggttcagacatccgagagcatgaccccaactgccacttcagagacttatttgaaagctttggccgtttgccatggacctctggaccactatgattttctgatcaaagctcatgagctaaaggatgatgaacatcaaagaagagtcatacagtgtttgcagaaattacacgaggaccttaaaggatacaatatagaggcagaaggccttttttcaaaggtgaggcttgtgtgatatgaaagattaaacagttaaaagtgtaagcattttctaaaatggatgcaatgcagtaggacacaatcatgaaacatcttgaaaaattttcaccagttcctttacacaaattctgttggatccccattcctggccttttgatgttccatagctttcttttgccttcaggggtttgaatagcttcatatttaggtatttaaaaaatgcagtccagtctaaataaaaacttctatggaaattaaagctttccctttcctctagctcaggcctcatccagggatcagcagtggaaaaggaggagtgatgtgttctttcccttttcttcctccttctttctctgtttgcctgacatctctagggtcagaatgagaagaatga

SEQ ID NO: 122276 - DNA, 1072 bp, Homo sapiens
gttgcccaggctggtcttgatctctgggctcaagcaatcctcccatcttggcctcacaaagtgctgggattacaggcatgagccaccgctcttggcccttatagtttcctaaacccactaaatctttattttaaataaagattttacttaaaaatgttattttttattttttttgagacagagtctcactctgtcacccaggctggagtgcaatggtgcgatcttggctcactgcaacctctgcctcctggattcaagtgattctcctgtctcggcctcccgagtagctgggattacaggcgcccaccaccacgcctggctaatttttgcatttttagtagagacggggtttcaccatgttggtcaggctgttctcgaactcctgacctcaagtgatctgcccgccttggcctcccaaagtgctgggattacagatgtgagccactgcgcctggccccactaaatctttaaaatactgaaagagatccaaacatctaacataatttgaaaaaaagtatataaaactttagtttttaaagagtgtaaagacgacacagacctattttttttctaaaaacaaacactgatatgccaattatcagaaaaggaaactttgggctattaggttttccagtgatggaaaaactccagtgatggagttctttattctggtgctatggttcgaatatttgtctctttcagaactcatgttgacatttaatccccagtgtggcagtattgaaaggtgaattctttcagaggtgactgggtcatgagatctctgctgtcatgaatggattagtccattcgtggagtaatgggttaatggattaatggattatcatggaagtgggaccggtggctttataaggggaagagagtcttgagctagcatgctcagccccctcgccatgtgatgcccctgtgtcatctggggctctgcagagagtcttcaccagcaagaaggccctcactaggtggggtccctcaaacatggacttctcagcctccatcactgtaagaaataaattccttttttattttttttttttttttgcgactgagtctcact

SEQ ID NO: 122277 - DNA, 1207 bp, Homo sapiens
aactcaatttcagatattctgttataagcgacagaaaatgaactaagacatgtgctaagtaggatttatgattttatgaactttggattttgttttcaatacagttgtttaaacttcattataggctgggtgtggtggctcatgcctgtaattccggcattttgagaggctgagatgggaggattgcttgaggccaggagtttgagaccagcctggccaacatagggagaccccatctccaccaaaaaaaaaaaattagctaggcatggtggtacatgcctgtggtccacctaattgggaggctgaggtgggaggatcacttgagcccagaaggttgaggctgcagtaagccgagatcgtgccactgcactccagcctgggcaacagagagagactatctcaaaaaacaaaacaaaacagaacaaaacaaaacacaaatagacttcattatggtggacttattttttttccctcattatactcctaagaaactttctgtaagtctatgctataatattaaaataaagtataccttcttcataagataccaaatttattaaccaaggtgataaaattggtgacaaactaccaggctgctttcacctacctatgtaacaatgttttctctagtaaattaacatttgaagatgttatgaacagatgaccatgccatatgagcaacaaactatgaagaatgaacatttataaacactttacttttgttattgaataaaatttacaaccaggttaatctgacacttttaatgtatgcataattgttattgtgctgtgaggtaattaggcataaatggtaagtagttcatgtaaatcactataattagaattacttttacacagccaaatcaagcatttccagagtcagggagggagagaattaaatagagtatggagctactctgaaaatctctatttccattaatcaggggtctataggcagccaggttttttcatctcttgggaggagacatcgtagcccaagagacctgagaattgggagccacagaactcctttcctttttctcctgccctctaccagataattttcagtttttccctaatgagaacttatttccaactccctcttatatcctaccatcttttatttggatacctcctcctcacccttccaagagcaatgcatgaggcagatggaaaagaactactcaattctaccattgcactcaga

SEQ ID NO: 122278 - DNA, 1013 bp, Homo sapiens
gctgattgaaactccagcttgagaggtttggtgactggtgtgctttaccagaaggtaatctggtagggatctaggtctttctttgggagaagcttaaccagtgtaagtgccttctggcctttttatctggagatcattcagtttctccagaaaaattcttctactctattaattgctgagaatgaacctagctgtcattgtttggggagcccatctgggaaagaagaagggaaagactacatggctggtaaatggtagaggggatgtacattcaagttgtgtgactgtgaacccctcgctgtgggctactatggttattgcctcctgtgttgaatcctaagaggggcttcacagcattttttccaatttccttttgtggtaaatacacacataagatttaccatcttaatcattttttaagagtacagttcagtggtattaaatacattcttaatgtcatgcagccatcactaccatttatctccagaactactttcatcttgtaaaactgaaactctgaacccattaaacaataattccccattccttcctccctccagcccctggcaacccctttttctacttttttttttttaaattgagatggggtcttgctctgttgtctaggctgcagtacagtggtgtgaacatggctcactgtagccttgacctcctgagttcaaacaatccttcaacttcagccccctgagtaactgggaccacaggcgcatgccaccatgcctggctaattctttttaactatttgcagagatgaggtctccctatattgcccaggctggtcttgaactcttgggctcaagtgatcctcccacctcagcctcccaaagtgctcagattataggtgtgagccacagcacctgacttctactttctgtctctttaattgttcgctgttctaagtacctcatgtaagtggaatggagaatatttgtctttttgtgactggtttatgtcacctagcataatgtccccaatgttcattcatgtatacg

SEQ ID NO: 122279 - DNA, 1043 bp, Homo sapiens
cctcggccttccaaagtgctgggattacaggcatgagccatggcgcccagccaaataagtagttttaatgccttaaagattaaactgttcctttctaaactgttccttctttttctaatttgtttactgctaccttgcattgaatgtccgttttgtatttccagatttagctaatctaataagagagaataatttagttcacaaaagtgaacattagagattgccccttaaaattcttcaggttcttgaaattacagaaaagaaggtcaaactattctttttcttagttcattggctaattggtacttttgagaccaatgtatacttacttcttattttgaaagcagttataacagacacttgatcaattttatgttcctgcacctttgggcaccattaatgattctcatcttgttgtcaggtctcattctttgcctcctgagaacatctacttccagtaccttcactttcatattaagtcatcgctaaaatcaacaactttgttcctcctgttaccttaaccacctgaccataaatggagatggttaaagaagcataactgcttccacttctgtaaaagcactttttttttaaaaaccctatgaatgttgttggattttagtttagaaaatacagccatatggtaactaattgaagggaagcatattacaagttattcatctgagtgtttgaaagcaatagaaaagatgtgatagtatgggatgttcatatagtttgggtaggtggcaacctttgtttggaaacatccttataatatagagaggggaagagaaaggaattctgaaatgggaagtgagacgaacattttggtggctataataagtttagttcagaccacttataaaatatgtaatcggccaggcatggtggctcatacctgtaatcccagcactttggtaggccgaggcgagtggattgcctaagcccaggagttcaagaccagcctgggcaacatggcaaaaccctgtctccacaaaaaatacaaaaattagcctggtgtggtggcatgtgcctatagtccc

SEQ ID NO: 122280 - DNA, 1036 bp, Homo sapiens
gcctgtgtttaatttttttgaagaactgccatactgttttccacagtgacagtaccattgttattctcaccagcaatgcacagattccaatttttatacatccttgctaacacttgttattttcttttttttttttaatagtcgttctaatgtatgtgaagtggtatcttgtagttttgatttgctttaccctaatgattagtgaatgcatttttggttagataattcatgactttattctgaatctataagtatactacactgcatgcagcagaatttgaaactttattaacttttctgggtaaatataattatttaaaatctactgctaatcactatatcaagagatactgtactgaatatttttgcaatgaatgactttccatcaaagtgacttctttattaaaaaaatgtttggtggattgttttttcatatacaaaagcactctgacattcaaatggcatgggcccagtgtcatcttgtggcttgaaggaaacccaaaagataagacttagatcttcctactttctgaagtgcctttggattctagtaattgcaaaggaattactagacaggaagtgatcttgtggtggtgggagatggggaagcagggaggatgtgagactggactagcacatgctagcctggcttactgaggaatgccaggtacaaactgagcttgggccactgacccgaatgccctaggctttctgagagggaataaggcattttatgctacctgcattaaatgctcaggctgttggatattcaattacagtagtttccccttattcacagaggatagttccagtggatgcctgaaacctcacatagtactgaaccctatgttttttttttgtttttttgttttttaagatggagtctctctcttgtcgcccaggctggagtgcagtggcacgatctcactgcaacctccgcctcccaggttcaagctattcttctgcctcagcctcctgagtagttgggattacaggcacccaccaccatgcccagctaatttttgtacttttagta

SEQ ID NO: 122281 - DNA, 1049 bp, Homo sapiens
acataggtaatagtcaaagttaatggtctctcatttcttgagagtttactttatgtctcataacaatattgcaaggtaagtattattactgctttcgttgcattgatgaggaaattgagggtcagagaggttcagtaacttgaccaaggtcacacaactggtaactaacagtttaagtccagcactaatgctcttgtttaccagtaacagctatgctatacattttccttagtatataaagtcttgtattatgtgtttaaatatacaattctagagctgggtggggttttggtagatgttttagtgatggaacctaaaaattatccttaagcctattaagcctagtacaatacttgctgatttattaaaaaagagtttttaaggcactttattcttagtgacagtatatctacaatcaccacttcacttttaaaatggaatcgtattagtagccttgatttttagctagttattattggcctttaggtagtgttaattaatataatatttattttactagggagacgaatggtaattattgctgcttaaaaacatggatatactccttttttgtgctcttgaatttaaggaattttaaagattatgttttggtaagcattcagattacacttgcagaatgctcttcattagtttggtcttccttactaagtgtagaatttcagctttttttaacttttagtttcaggggtgtgtgtgcaggtttgttatataggtaaacatgtgtcacaagagtttgctgtactgattatttcgtcacccaggtactaagtctagtagccaatagttcttttttctgctcttccccctcctcccaccctctacactcaagtaggcgcatttcagttttacctgaggtgttagatacacgattcttaccttggttgagaaatgtgtttggatagtttttttttgtttgttttttgtttttaacatgtgttttggttggtgaaataaataatagcttatcttcagagttttccttaggatcttcattatgtcctcttggaatatttatgttacatgttaaa

SEQ ID NO: 122282 - DNA, 1034 bp, Homo sapiens
gcctgtgtattttattattattattttttcatctctcttttttgagggggtgtgggaagcgggtgggaagaggaggagggtgttggtcatgttagttctaattaattagacttcctaaatgtttaggacaattatctatgctttccacctgtagttctataaaagaagttatcatagaaccatttggtaatttgtgtagaaatgataggcttgcaaaaaagaagagtcaagtttaaaagactgctatacagtgtttcatgcttttaattatctactcttttcttcatgatgataattagaatttttctcttggaatttacttccatcttaaaaaaaaagatgatccactagcaaatttgttacagcagaagtgaaattaaaataaaacaaatgtgttgttgtcaataggtcactgacattgctgatgccatgattctgaaacagctttttgaaaatctgttcaaaaacggggtcgtcgttgtggcaacatccaacaggccaccggaaggtaaaaacaaacattgtgctagtctcatccaattaggtggaaactaacaagcttttaaaaatccataattttgaactaaatgtattgtgttaataaatctgatgactttgcttattattagttttataactggcttaatctgaaaaatcagttggtatttgcatttgaaaagttttgtatccttagcaagctaaatccagttgattcccatgtttggtgcacttgctgtttttttgtttttttttttccctaaatattagatatgtcatatgtgcttagcaaaaaatgcaggccttttggactgctttttatggcccataaaagaaactcaaccaaatgaaagacgaaactcataattaaattttagaaaaagaccgaaaacttgcttgcatgaatagtttctaatacttcacttaaattatcatttctaaaaaagcacttgtggcttattaggaaagtacttaaaaattaaaatacaagtaatatttagattaaaaacaacaactttaaaatcttgcatctttca

SEQ ID NO: 122283 - DNA, 1062 bp, Homo sapiens
tcagttaaaggtctaagaaaccacaaatatttcatgagagacttaatgggaacatctttctgcctggagtgctgtttctccagatatctgcatggctaagccctcacctcctttgtctttgctcagaagttacattgccagtgaagcctagacttgtctccctgtttgaacctgcaacacatccctttcttcttggtgctgcttccctttaccctgctctctcttttacccatagcactatggacctaccatataatttacttatttattatatttatagtttattgtctgttcccttccaggatacaaaagcttcatgagggcagtgatttttatctctcctgttctcagatgtgttctcagcacctataacagtgtcttacacatagatggttctcagtaaatagtcttagaatgaacattggatgattgcatgttttaaaaagatctctctggctgcagtgttgagaatagagtgtgggtatggggtttcagggttagaagtaaggagaccttttaggagactactgcagcaatcccaaggggaggggaggtgatggagcagtaaagtggtgagaagagggcaggttctggatgtactatataggcagagtcagcaggatttactgatggaatggagctagagtatgaaaaaagagagagggatcaagagtaactcaaaggttttggcctgagcaattggaaggataaagttgctgtttactgagatggggaagactacagaaaaagcagatttggttagggaggtggaggtaggggtttctgtggtgacaagggggatacatataagagtttggacttcattggaaaagtctgggctggagatatacatttggaagttatcagtcctcaaggaggcaggaaagagcagctggtgaggtaggaggagaaccaggagagtgtcaagtgaggaaaagaaaagtagtacaaaaagaattgatgattacttctgttaagtgctgctacaagctgaaaatgaggttgagaattaaccattgcaattagtaacatggaattcattagtgagtctgaaaagagtaa

SEQ ID NO: 122284 - DNA, 1053 bp, Homo sapiens
gcatcagtattacctttagacattcagtgacaagctatgctcgtaaatagcaaagagctagaacaattttggaagccctttagcaaagactgctgaaaggataattaggctgctcagactatggcagtgtggttaactaactgaggaaggacagccaccaggagggattaaggaatgttttgcagctcctagctttgtaggagtgaacaaagctaccggtgtgtcagggtagcctgcagaaatctgagctggagccacccttctggagaagactgtaagttcaagatgcggaattgcaaaaattggacaaacttagagaaagccttttctaaatataaacagtggaaggaatgggatgcttgtcacagaccaggttttttagccacagcagacaatcatcataaataacttaatattttaaagtaatgaagatgacatgtatatgtgtgcgtgtgtgtgtgtataattttatttgtggagaaaaagactcagagagactaagcatatcaggaagaggtaaaactgtaagacgaagaatgaagcagtgattgccaaggtccagggtgaggaggtgtttgactacaaaggggcaggctcaggatgcaactgctgcatccagattgtagtggtggttacatgtgctaaaaactcatagaaccgtaggccaaaaaagttacatattataagtaaattaaaaacaaatgacatggatagtgaatgacagaacaaagactagaacttaggttttgtgactctttttacacattgttttctatctttttgccttatggtcatcactgatctctgtctatcctgtcctagagaaagaacgtccttttcttaaaacagcagctcaaagtactgtattaaaaaaaggtgggagggggagaagaaaataaagaagagtgtcctcttttccagccatcaaaatgcgttcaactttttttaggtcacaattttttttttttggagacggatccttgctctgtcgcccagactggggtgcagtgcgcgatcttggttaactgcaacctctgcctcctgggttcaagc

SEQ ID NO: 122285 - DNA, 1032 bp, Homo sapiens
tgaccaagtgctcatttcactctgtttagagatcatgaaggaatcatagtcaagaactcctgaattttaaaatagtatttagtaatgacaaatgttgatataaatgtattatgaaatctttatgtctaagaaaaataatattaaacagctaatattaaaaattttgttggctaaataacatttcaagagatggatgtattgcattgataattagcacgatatttgaattacaaaaaactcttcaatttaatgcgtatggtccattttcacttgtgttctataaaaacctaaaggttcttaagccaaatgatttctgtttagaattctgtttagaatacatttctcagagcatatagttttggatgatatatatatccttgtaaaggctgattttttaaaaagttcatcctttaaaaaattaagtctgtaagacttaaaggcattggtattctactttaactttgttgatgagtggaaatcttttaatcaagaatattacaagtgggtctttacatctctcattgtcattaatgaactaaaaggtgcatacttgttaaactacatctcagagccttatacatccataaaaaagatgttattctacaagtaggaccaaagtgttaccttaacatagatgaactttcattagtgtagtatcttagttttaattctataacattgtgctctttaataatcactaattatatgtatggcttttttcccaataaaatttttaaagggcttattgaaatatagttgacatataataggctgcacatagttaaaggatacaatttttaaaatactgacatatgtataccttcatgagaccattgccacaactaatagagtgaacatttccatcaccccaaaaagtttcctcttgcccttttctctttttcttcttctttctttctctctctgtctttcgccttccccttcccttccctccctccctcctcctttcctttccttccttttctctcttttctctttctctcttttctttcctttccccctcccctcccttcc

SEQ ID NO: 122286 - DNA, 1021 bp, Homo sapiens
ggctaatttttgtatttttgtatttctagtagagttggggtttcaccgtgttggccaggctgatctcgaactcctgacctcaagtggcctccccaaagtgctaggattacaggcatgagctactgagcccgtccaagttctttactaagaattttcattatagattgagaaaaggagagaattttttttatagtagaattctatatattcaagtattaaatgcttgatatctaatcttctcatattgggttattgattttgaattttggaagtgatactttccaaattcttttattgtctcattacagtttaaaactaatttgattgaataccttttgatcttctttctgtggctgttaatttttttcttttattaaaattataataaaatgtgtgtaggacccaaagagaaatcaattttggtctttttttctttttgctcctttatctttttttttaatcagtagaaagctttatttgccaggctaaacgataaattaacatcatgatttaggctaagcaaaaaactaatatcatttttttctttcagatctctataaaaatggactccaaagagctaactttgtaccattcatagcagtcttgaaggtaaaaacaaatcatttatttgtgtttactaagatcatacttattgataatcaagggctttagtaggattgtcttagtcttggcattcaagcagaatttattttggcatttagatagtaatagtcaggggccgggcacggtggctcatgcctttaatcccagcactttgggaggccaaggtgggcggatcacaaggtcaggagttcaagaccaacctgaccaacatggtgaaaccccgtctctattaaagatacaaaaattagctgggtgtggtggcatgcacctgtaatcccagctacttggggaggctgaggcaggagaatcatttgaaccctggaggcggaggttgcagtgagccgagatcacgccactacactctagcctgggtgacagggcgagacgccgtctcgaa

SEQ ID NO: 122287 - DNA, 1025 bp, Homo sapiens
ctattacgtaatgtctggtatcagctggttcacatgttttgtccagtgttttagttatttattacagaagggcaaaatccagttccaattactctgccttggccaaaagcataaatctctttcttagtttttagttataaaggaaaagaagatcaggttttttttcttttttctttttttttagtaatttaggaacttagagccatattttatcatagaaacaaaaaaataaataggataacaataaaaagacagttgtgggcacaggaattttgtttcagctttctctcacacatttagaggaacagttaggtaaatgatgatgcagtcacatgaggggatataacagttatacggaatatttttcaaaagctttcgataatgtagaataatgcttacagataacgtgagtggaaaagtatgatgcaagggtacatctattcctatctcaactgtggaaataatacacatgcatcaaaaaatactggaaagaaatatcccaaaatgttaatagaatatatttctggatattaagattatgagtgatttaaattttctcttttagacttttctaagatttctggaatgatcttgtattatttttataatgaaaaccatttttgaacaggtgaattttgctcactcctctttggaaatcagcagacctgactaggagaactcacaatcaaagttgagaaatcagcaaaaagcaaaatggattgaacatgggtcctatctgtagagaccattattacaaaaataaatgggatggcaggcacagggaggaaggagcaggagcggggggagaggcagagatgaactaacaagtaaaagcacgtgatagatatattttggaggaagaactacctcaggaaatgggagaatttttcaggtaaaattttctatattctaagagaaattaaagtagtcatggtactgatgacataagagattagacatgaaataattataagattagatgataagtgagctggcagagcagctctcaaataaactgagagcag

SEQ ID NO: 122288 - DNA, 1053 bp, Homo sapiens
cacaaagataaatcagaagaaaactttcatgaaagaaagttaggttgaaagtctagattcaaagtgttcattgtttatttcctattgtatgatccccccatcaagaatcatacatttttggctgggcgcagtggctcacacctgtaatcctagcactttgggaggccgaggcaggtggattacttgaggtcaggatttcgaaaccagcctggctaacatggtgaaaccccatctctactaaaaatacaaaaaaattagccagccatgaggtgggtgcctgtaatcccagctacttggaaggctaaggcaggagaatagcttgaacctggggggcagaggttgcagtgagccaagattgtgccactgcactccagcctgggcaagagcgagactctgtcttccaaaaaaaaaaagatcataaattttttgatgcacaactgaacctgaacctgaaggattataaaaagaatcttacaatcatatggaagaaaaatcattgggaaaagaagtcaagctggtctgaggcttgtaaactgcaagtagatactagaagagaagagaagagtttttactaaattcagttttttaaaaatgtgacatctggtcagctaggctgtcatgtacctctacgcccacagatatatgttttggatatatgataatttaggatttatagtccttagtgaagtttcctgaataaacaactttaagattttataccaccagtcaaaattaataatataaatggagatattgtggtaagaaaatattggtggtcattgaatctgactaaacattgtcttcttccgatctgtaagtcagacaataaaaatttttatcatattatgtgagaacttctgtaattgagttaactaaaggatgctaaaaaataaaggggccctaggaggttgaagatggccaaataggaacagatccagtctacagctcccagtgtaagcaatgcagaagacgggtgatttctgcctttccaactgaggtatcgggttcatctcactggggcttgtcagacagtgggtgcagtccttggaccag

SEQ ID NO: 122289 - DNA, 2026 bp, Homo sapiens
aattgcttaaaacgacatatgtcaatagcaccttttttttctatgaagtatgacttgttttatgtgatgaaaatcctgtgtcagcatagatttattagtaggtcttggagaaaggggcattccaagagcttgctggataaatggttgatcgaagggaggaagcttggtgagtgaaccaaaagcaaagatagtgattcggtatcaatttcagataatttagtaacttgagaaatatcagctttgttaggatcaactttcttagaaatatcttcaatttcatacatttaaaaggaataatatatcttaaatgtacattcactgaacaatatttatggagtataatctcactgcatttgtaaacattatttaaaattagtgtggttaaaaggaaaagggaaccagttgatattttgaacagaagaatagtttattaggttactttcaatttactattactagccttcttgaagattagattgcctggcaagcattgctattctcatctgatcaaggtccagcaattcatgatattttacacaaatttttccatttgggtaaaaatctgtctgtttactccatcacttacactttcataaaccatttagtttgtttcattccataatgaaccctaaaagagataaatgctattcataagttttaaggttaaaaaaattttcaatgtgaatttcattagctttctttttatgattttcttaatcagtttaacagtgtgaaataatctaaaataatctccccaggggaaatgttcctgtgcaagattgtatgtagtgtttttgcacacaatgatagatcttaatatcagtaatttagcactttgattctcattcacaatgacagcttagcatgctatcttctttcttaacttttaaatttcttcttaaaattaaatgtttgatgattagattactgaatgataactaaactggtgaaaaataaccaacaaggcattctacaatagaattttctcttgatgaatttcagatggttcgattagagaaaaataattccagcattaactcttataaatatgaattttccttttcctaataaagagttgcccatttggaaggcatcactatctgatttatttgttcggtttaaatatgtaacataaagaagtgatactttataatgtgaggtagtaacaattttgttcttattattgctacttttgtaatttgtttaatgttcaggtaatgacatcatatcttttacttggttgttcatgtttcttgactgttgtgcatcctttacataaaacttaaaaaaattaagtgatatattagtttttatgtttttatttcctgagaaaatttttccaatgataagaaaatttttcctgatagtaaactagaatattcccatggtgtgatttccagctacaaactttagaaaacttgtttgattataacccttagataaaatgcttcagtgttcagcctttgtccagccatctgcattaggatttatagacttgctaaataaatgtatatttgccatttttcctgccacagttttcatttcattggtgaaattgatttgtcagtttgttcattgtaactttcaataccagagctttcagagtgctaaataatcagaatcagcctttgaggtcagtgtcagtcagcctctatgacctctactgcgttgtcacctgagtcagccttgcagggattaaccctttgttagtgtgataatgtctttacttatgagttggctttttaatacttaagattgaaagaaacaaaagacagaacaaaagtagcagacaactcctgaattggaaagagttgttgctttcccccacaaactgtatgtggtaaaatatttctaaaattatcaagttttagtctaagtctaggaaatctacccaagatattttattaaatttatttaatttattaaattaaataaaaatatatttttattttattaaaaaataaaaatatatttaatattaaatatattaaaacatatattccatatatgtttggaaaaatttatt

SEQ ID NO: 122290 - DNA, 2478 bp, Homo sapiens
aaaatgcatcacaagttttcagttgttcgtaatgaggtagcggacctcatcagggctcagaggaagccatctttagcttttgtttaaaccttaatctcagttttttttctttctgggaaatctgttttcttaaatcaacacttcttttttcttctttgcttgcacctccaataagagatgggaatcatgcttaagaaagctaaatggaaaagttaaacaaaaattatcacataaaagatgtatgcattttttaatcccacatgaaaaagatgcttgctatattcccttttgcctttaaatcagtaacattctagtaaagttgttttataatagaaaatataagaaaacatatagggaataattttagattgtttttggaaagaacttgttttcaaattgaaattatacaaagtaaaatggtaagtaggttactgtttcacagaatttaagtttttaagtggaaatcagtttggttaaaaatattagtagctttactgcaaactttgtttatgcaagaggcatagttaaaacataggtttgagaacctgtgtccagaatagttaatttgtccgatatccactactgggaagtcaagaaattattcttgagaaagcattgcatttattctgaggcaggtggattacttgagctcaggagtttgagaaagcattgcatttattttgaaattttctgaagcactgaaacaataagtcacctaaaatgcagttatcaactttttctggcagttgaattatgttcactttgtctatccaaaatatttttttaaaattagtcctcagcaaaaaaaaaaaaaaaaaaaaaagaagaagaaatgctctatttcagaatctaaagtaaatcaagtattttgttgggggaaggaggtgctgaaataatttgtatattatcctcaatatcagaatagcatctctaagtaagttttataattctgataaatgttcaatctctttattagctactttgaaactacgtttaaaaaaatctacccttcaaatacttcagtgctcaggtttccgtctaattaatattattcttttaacgtattttaattataggactttctgcagtagtcatccatgatccattccttaatgtgtaatctgtgaagctatttttataagcattgccctgctttagagtagttttactatgacgttttgattctggatagacttctttcaagccacaatgctctgagatgcttttggctacttaacccattttgcatattgtgccatttgtagaataaagtagccttttatacttgaagttgatttgaactctgaaaggcaacacctgaacatctcacaaaactggataattatggctgattgtgtttttcaggtataggtcacaggaaattcatttggggtaaagtatgcacaaagctaagaaatatgcagattttctgttgtaggactgtgtaaaaattatttacagttaatacttgcataaaggttagaaaggttgatgaagtgatatttagttttgctttactattcactgcatgtcagaatgtaattatgactgattcatgaaactgtcttagaaacgaaccatctttattaaaatgctgatcaagataagagctgacagtaataaagaatagaacattttagtcttgttgcttttgaatgattgctaattaccccagaggtcatgtatagtgcttggtaggattcattgacattatttcttttaagtctgctgtttcaacaacatctgagcatgaagacacaaactgtgtgcacattgaacaatagtttggcttaagtttttagggcttcaagatatctaagaaatcttcttctgccatagtgaatttagtttttctgtatcaaaattatattatattaggggtgcttggtacaaaatacattgtatatttatttactattgactgtatctacacctcccatttttaagttgcgttaaatagtatatataggttattgggacagtgtcacctctaaatatatacacaagcatatacaagtaataagaacaaaatgagtactaacatttaagttagaatacataaaaggacttattaatgtgtaatcagaatatactcatcagaatatacaatttgaacactaactactgatagtttggtttttattaaatgtgaactttgtaatttgtctctaaatgtatgtggaaatccttatcatgtattccttagccaattatgattgataggattcatgtattataaatacatagttgattaactgaataaactctgacatactgtttaaaataacttaaatctttataattattaactgaaagtagaagaatgtggaatatatatgtaatatgcatgcatgtatgtgtgtgtgttagtatatgtatatatacaaactacacaatcacatcacacttttctttttttctggtttccatgatgtaacagaaaaatcaatgggatgagaaggcaatctttgtggacct

SEQ ID NO: 122291 - DNA, 1051 bp, Homo sapiens
gttgtatattagaattggatggtgataagaggtcacaggccttgtaaatatcactggaaattaggaaatttcttagagatcatgctcttttgactagattcactgtcgacttgcagcttagcttccccccgcctccacccttctgcaaagagctttgaagaatctagcgtaagtgaatgaaatctgaaaatctgaggtttatttaaaaaaaaaaaatatatatatatatatataaactgagtgttagtatttttcagacaattaagtgctaacatctaagtgctttggtaatagttcttttgctgctgattaggtattcctcagtggtgattagtgaatgtacaaatgcaatcatttcgtaggtcttaatcactcatatgatcgagaagttagttacccagaaagagaaattgaagctgtataactttcattagccttattttttaatagcaaaaaataagaaaactttttgactaaattaggaatactgagtcatataagataaattgtagtttaaaagaaatagagaacctggcaaatatatttatatgactgtattgtgacactgtatttgatgtctgtagtaaagatagcttatgaaaaattgaccattgcttaccatagtagggcaggtttttctcagggagattgagtaagacatgttccctgcataaggacatttttccttcttcttttttttttttactgggtgactgagctctcgcaattatagcaggaacaagggaaagaaagtattttttcacatttatgacatcaagaaaaacacagaacatcttgaggcaaggggagaaatatatattcatatatctcttttcttctcaagaagtaatgtagtatatatataaaacacaggacatcttgaggcaaggagagagtagaatgcatgtttttgggcaatgctgtattttcctctggtgggattggttatagggcccaggtcctaaaggagaggcctggggagttgggtttggacaacttggagtgatgagctagggatatctgtatagagactccaacaggttgctcatgc

SEQ ID NO: 122292 - DNA, 1045 bp, Homo sapiens
atcacattgtaagaagaacatgttgggatggagagattattttacaatgtacaagtcttaaaacccaccacaattacgttggttccgaaggtttgaaaaatgcagtttttgactgggcgtggtagctcatgcctgcaatcccagcactttgggaggctgaggggagcagatcacttgaggccaggagttcgagaccagcttggccaacagggagaaaccctgtctccactaaaaatacaaaaattaccggggcatggtgacacatgcctgtagtcccacctacttgggaggctgaggcatgaaaattgtttgaacctaagaggagaaggttgcagtgagccaagatcatgccactgcactccaccctgggcaacagagtaagactctgtcgaaaaaaaaaaaattgcattttttcattaataaaaatagtgatgttgttaaaatatatttttcccatgaattgccattaagacaattttcattttgaatgcaaacaaaatgtcagcctatagttgtttcttgacttgtcctgaaatcccttagtcaccattcttctactgaagtgaatatctcccatctatctatctatctatctatctatctatctatctatctatctatatctgcacaggcataccttagagatatcgagggtttggttctaggctactgcaatacaacagtattgcaataaaatgagttgcaggaagcttttggtttctcagtgcatataaaggttatatttatactatactatagtctattaagtgtgcaatggtattatgtctaaagaaaaccttaattaaaaaaatactttattgctaaaaatgccaataatcatctgaactttcagtgagtggtcatctttttgctggtcttgcctcgatgttgatggctgctgactaatcaggatggtgactgctaaaggttggagtggctgtggcagtttcttaagataatgttgaaggttgctatatagattgactcttcctttcacaaaaggtatttatggcagatatagccttacaaaatgtatttcttaaat

SEQ ID NO: 122293 - DNA, 1059 bp, Homo sapiens
tctcaaactcctggacaaacacaatctgcctgtctcagcctcccaaagtgctggaattacaggcgtgaaccaccattgtccactcccagctctcttatgctgcctctgccctcctgtggtgcttaagacccatgagttattctttctggtagcctctagtttctcactccagggtattagaaattgggctattttaaaaaaaacccagatgaagttatttggggaatttgctgacagcactttttaggcaatgtttcagaaaacatgatgcaaattttaatttttttaaactgatatttcagtggcttgatatatttaatattgcaactttagttttatgaatcttgcatgagttctgttgttttcttgtcatctcattatattagtttttgagcaaacatttgaaaaattttaaaaatgtatagtataagggaaggattgtaattctgagccactacttgtttaaaaaggcacttcatttgtttggattgtaggaatattgtaatacagtccagctagattctgggatagattaccggaaaagggaacttcctgctgcaggaaaactctactacctgtaagtgtttctaatttttaaagtttaatgtctaatcgttaatcagaaaaagaacataaaaataagcagtttaattattggaacgtgaaaggctggttctgaagcccatgatttttaaattgcaaatgttctcatgttaacttcttcaacccgtgtctttaccatccatatttgcatcatttataatgtgtgattggacaaaaccctaattagttttttggggtggaatgatgacagatggttagaatgtaatgagtatccttttataagagactctattattacgagaatatctttaatgtgtgaagtaattaattatttgtggatatcatctgacaagtgtgccatttccgttccccccaaaattgttgttttatttgtcaatctgtttgtatttatcattgttgattgacttccatatataactgatctacaatatatatacacaaatacaactggatatatttttgtcttttaaaagc

SEQ ID NO: 122294 - DNA, 1034 bp, Homo sapiens
ctcgggagggtgaggcaggagaatggcgtgaacctgggaggtggagcttgcagtgagccgagattgtaccactgcactctagcctgggcgacagagcaagactccgtctcaaaaaaagaaaaaaaaatcacaaaaggctgggtgcagtggctcatgcctataattccagcactttgagaggctgagatgggtggattgcttgagcccaggaatttgagaccaacctgggcaacatgtagagacctcatgtctacaaaggttaaaaaaaagctaactgggcttggtgttgtgtgcctgtggtcccagctgcttgagaggctgagatgggagaatcgcttgaacccaggaggtcgaggatgttgtgagccatgattgtgccactgcactccagcctgggtgacagagtgagaccttgtctcaaaaaacaaacaaaaaaaaacactcccgaatcacaaaattgtacatttggtataatttagatgtccttctaaatctttattaattaatcttgcattaactcaaaaactactgaactagaaattaatttcactatttgaaacagcacctataaagtggtacagcaacaaaagaagtccatctaatatagacttcagtaccaggttccaccagtcagtttagtatgccttttatctcctattcctttattgaatagtgtttgttttccagcaggagaaccagaatagagctggcccactaaatccagctaaacacatggacaaaatatccaattgtatggccacagtcatctagtagagtgtaaataataattgtgtatatatataatgtgtatattagtagataatatgtattcttacacgtataaaaatacggaagagggtatttagatttccttagaattttcattgcattatttcatctccaaatagatcacagttataactgaagatcaatctgctgcataagaaaagctgatctggcaaaaaccctaggtctttagttatttgctgtgttcatttttagctattaaaactccctggcctcagccgggtgca

SEQ ID NO: 122295 - DNA, 1032 bp, Homo sapiens
caggagaattgcctgaacctgcaaggcagaggttacagtgaactgagatcacgccactgcactccagcctgggtgacagagtgagactctgtcaaaaaaaaaaaaaaaaaaaaaaaaaatccctggcctctggcctctctttcccaagtggatgtgaccatctttttctcctgaagagaggttagagctttttactctccaacttcttctccctcctttttttttttttttgaaatcttcaatcattatatcctttctgaaattccattttaaaaagaagtatttttatatctaccaagttgcaattctagatgtcatggtactgatttatttggggaaaaatacaatatatagatttgatagaaattttatatgggagtttgtggctgagaagaggaggtgaaggtctggaatttgagagctaagggtgctagataccactttctgcataatgtacaggtcaagattaatggaaccaggtaagttactctccaggtgattgagaagggtgggaaatttagagactgaaatggatctctgaacagtcagttaagcctttgagtgattgagaagataaatactcagacaaaatccattctaacaactgatttcgttatgtaaaacaaacctacaggatttgaaatgcaaccaagtctgttttatattaaggcaagtataaaccaacttaattttagacctgcctccagccccagattatgtttggtataaggacaaagagctgtacagcatgaatgcgcaggcaatcagtagagtgagaaggctcactgccagggaagtttggcaaagaactctaagaggaaggggaaatttctgcgtcgaatcaactttggctctctggaatagagaacatggagagagagggactaaggaaagccaaccctattctacttgttgataccttaacaagctgttgatttttgaaaagggataaagaagcaaagtgtgggtagcattctgttcccttgagtcaatcctaatgaagtaggaggttcttgaagaaattaatttcca

SEQ ID NO: 122296 - DNA, 1050 bp, Homo sapiens
gtaagagatgaattttatagtaattatccagacaagattgagtctttgttcatgttcccatagtaactagaccaaggattctaaaagtgcaaggcagagagctgcgcctgaataaagcctgtggaaccgttgccgactgcacatttgaagagctgtgtgagagagtaagtatccaggcacgtccagactcactggccttttcacatgttaaaatacttcgtgttttcctctctgcccatttcagattttaaaataccattcacagagtcagaatcgatttaaaagtctcattaagggaaatactcatctatttttgccatgtgctttttatagatattggcacaaaatttgcacttagaggggctctaatgcaaaattagaaatgcagagagaactgtcaactgttgctagaagcaaaaataaaatcagttttggggctgttttgtaaaagtcaaacataagagattttggaaaaatatttgaggtgagagttaggaaaaaggaagatgaaataatgctatcatgatccaaggaagcatcacataaaagaatttccactccttgtactgattgcccatctgatattgccataacattggacctactagggccagggtcaaagaaggtgaatttctataactgtggcatctatattatatattaaataatatgttcaacagagaaaaaatgtttagctgtatatgcacacattcatataactgagaaagatcttgactgcagattcattatagatatgaattctgtcttttaaaaaatctggaattctaagtacttcagtggatattcaatgtatttattgattgcaaatcttgaggaaaacaaatccaaattagatataattttaagcataatttttcgattgacatgcttaatttatcattctagctggtctctgatttatcttgacttttaggtaactaaagaacagttgcttttcagtaagggaaaagacaaaatacttatacctgcggccattttatgagtgcttttcttaaaagctagtgacggccgggtgcggtggctcgcgcc

SEQ ID NO: 122297 - DNA, 1044 bp, Homo sapiens
gtgatgttattatttgttgattttttttttctccaagttggccagatcttcatttgtcagtgagtttgcatggacaggtttgccccttatctagactgtaattgtggggtgtttactacattacacaagcactgaatgacctgcaaaaggcattgacgtgataagtggggttaggtcgcagtgttaagctatgagggatctttcaggaagggctaagtttttaagtagctagtttgtttatgactattttcttgttatgatgattttgcattgctttgcaaccttgtaactgcaattcagatattgatttcttgcatgaagaggacaattgaaatccctcaacttcagatgtagcctaaaactcttaatgagttataatgatcttatgagccaggctaaataattgccaaaaaccattaagtaaagataaaaacacatccaacctaaggtaaagaagcaggcatctatctggtgtgcctgggacagtcccagctttggatcatctatcctaattttctagaaggctcttgaagcccaagacttgcccagtcacctgataccatcatgaaaaagtctttggcaaggagtagattggttaacagtccataatgactatttttgagccatggccccttccaaggaaaaaataatacagaaacttacctgtgtcttgataaggtaaaagaaggtttagattggaagcccttgacatatgccataagtaaaatgaaaaagcctgacacattctgctgtttgcacacctcttccctcactgttccaagcacagttcctcagatttagaatcctgcaggttaacatctagcttcttggtatctcctggattctctttcttcgtaaatttgtaattcagtaccgtcatgttcagcagtctgagttaggagaccctgcaacacatacataataataataatgaatatagccacacatcaggtatcattctaagcgcttttatatattaactcatttgatacttacaataggtaggcactaatattgtccccattttataggtagagaatttga

SEQ ID NO: 122298 - DNA, 1026 bp, Homo sapiens
ggaaatcatgaggggcatctttatcatctcttccttctctgaagttttatgtttctggggaaaacacaagagttggggctgggcgcagtggctcacgcctgtaatcctagcactttgggaggccgaggtgggcagggcagattgcctgagctcaggagttcgagaccagcctggccaacatggtgaaaccccatctctactgaaataccaaaaaaaaaaaaaaattagctgagtgtgatggcgcacatctataatctcagctactcgggaggctgaggcatgagaatcacttgtacccaggaggccaagattgcgccattgcactccagcctgggtgacagagcgagactctgtctccagaaacaaacaaacaaaaaaccggagttggcaattacagagtatattcagagaactacagactcagaaaggttctacttccatttatgtcagagtagctcctatttgatcaaattacctattgatcacctctgcaaactctggacaaaatctgaaaaataactatccagaaggcactgcttatcaaaagcagggagaaagtagagcacagccaacacttggaagaaaggattgatactggtgagtttctcatttttatagtttttctcctgagggcagatcacagttagtcttatacggatgtctaaaactcagtagaaacctgctgtttttagctcgaagaaccagagaagagcaaatcagtgaccataacagctggaaagtataaggagaaatctgggaaaggagagaaccacagaggaatagcctgaaatttttcctgtaaactctgcccaaatcttgggctgacctgtgaaatatacatacacagcaaatgctaaaataactgaacggagattttcgctgctacgcatcatggaggagacagagtttggagcttgaggctaaccaagttaattacctgctaacatagcaacaacaacaaaaaatcaatatacttaagaatcccaagtctccacgacataccatatacagtgtccagaatacagt

SEQ ID NO: 122299 - DNA, 1081 bp, Homo sapiens
atctcagctcactgcaacctacgcctcccaggttccagtgattctcctgcctcagcctcctgagtagctaggattacaggcgtgcaccaccctgcccagctaaattttttttgtatttttagtagagatggggtttcaccatgttggccaggctggtcttcaactcctgacctcaagtgatccacccatctcggcctcccaaagtgctgggattacaagcatgagccaccacacccagccttgtttttctaattattatatttattattttggaatctggcacataaaaatagtcttaacatcaattcgtgtgatattttcagtttgttttgaaaaggatacattcatcctaattccattcaagcattttctattaaaaggtacttctctttaagatatgaagtattgtcattgccatgtaaataaagtaagataccacgcatgtttgtttaatgaacagctatcagcgtattcctacaaagggtttataaggaggagtctatacagataaagagtaacccttaggaccgtataatctagatagagcttgaaatcataatcgtcctacttcagctgaaataatggtagcagagcagagcattagtgaggcagaggaaaaagaaactccagctgacagctcatttgggtatactgaagtggatcattgtagggcagaaggtggtctgatggtaatgctcgtgcatttcacattggtgtggcattgagaaaattcccacttctggcaccagggtcgataccaaagcagacaactggaccatttcacatataggagaaaaaagacagcaagcaagctctttatttttaagtttgttagagaaactgggctacatataatcaagctgtatactcttggtaattaaggaaaacaaatactctttgcaaagtcattatagatttaaagttctttaagttttcatcaggtttccacagaaacaaagagtttgaaacaatagtggagaatgcacaaaccatcgagtaagtggattttaattgttcctgttaagaaaattattcagataaccagccacatcaaagactattaaactttttaattgctcag

SEQ ID NO: 122300 - DNA, 1049 bp, Homo sapiens
acataaaattgaccattttaactaattttaagtgtacagttcagtgacattaagtacattcatattgttgtgcagtgatcaacactgtctacctctagaactttttcctcatcctagactgaatgtattaaacaacaattccgcattcccccaatgactgttgtcttgaaaggagaaagataactctactgagctttgttttctttatgtgaatgagcatgtaattgttttagggatatgaggggaaggaatagttgctaatgtaatggcaaatgcagaacctactgacaaaggtatgtaatttgtaaaatagctgaatgggcaaaattctgatttttcagttgccctaggcacttcagtgcacttctgataatgattttccttgggcatgtagttattctgatagaaatcacatccatgcataacgagtgagcttaattatacataactacatacataatatgaggttttacatttttttatgtatactttctggtttacaaaagatgagacactaaatcctaactgatctcaaaaaaagtagtgtaccctcagagcatgagagtcttaatgtatgagttttcctttttacaacaagacatgtattttgccctcccctctctcgctttcggggattgttttcactatttggtgattccacagtctcatctggtgcctgctgtgactcccaagacagacaagtgcacaaaggctgatttagggtcttggattcctcttgagaatgacatactcaattcatttgtactgatcccaatcatttgagctcaaaataataaaaataaaagtagccaagatggtttgaatactaatgtatgccccaggcactgtgctaaacactttgcatatattactttgtttaattctcacgattctgtcagataggaatcaaatccccattttacaaatgggaaaactaaggaacaggaagatgatgtaatttgccagtggcacccagttgataagtagcaactgaggagtcagatccaggccttccagagccctcactcccaccttctctattaacacgt

SEQ ID NO: 122301 - DNA, 1050 bp, Homo sapiens
gtctttttgtaaaaaggaaaactcatacattaggactctcatgctctgagggtacactacttttttggagctcagttaggatttagtgtctcatcttttgtaaaccggaaagtatatgtaaaaaaatgtaaaacctcatattaggtatgtagttatgtataattaagctcactcgttatgcatggatgtgatttctatcagaataactacatgctcaaggaaaatcattatcagaagtgcactgaagtgcctagggcaactgcctatgggtaacttggtcaagttacccacagctaccacctagatcacaccatgacaagaaagaggtgtttttacactaaaccactccaaaggcaaccagaattggtttatttttaagttttcttttatttcattttatcatagccacttggagccagtgactatttggaactatcaaagaattttgatacaatatttttacgaaacattccgcaatttactctggcaaacaggactcaaggtcgaagattcataactctcatcgataacttttatgatctcaaggtaaggatgtagtacattttcttaaaactaaacactttgtattgtgaagccagattgcctgggctggaaatcctgacttaacatacttctatcacttactgcacctctttgtgcctccattccctcatgtgtgaattggggatgataatattatttacttctgagggttgttgcgaggactaaaaaggcaaatccatgtaaagcatttaaaacatttggcacaagctgaatgctgtataagcactatcagtagaagcagcagtagtactatagtaaagctcccatcacaagacactctgctatatgaatgattgcatcattctaccagacagcttatgcgcttcatctatcacgttctaaaacacaatgtcttgcataaactgaatgctcagtaagtatttgttgcatgaataaatgattgcactgatagaataatgcatgagcaagccaggtgtgatggctcatgcctatcatcccagcactttgggaggccaagggaggatc

SEQ ID NO: 122302 - DNA, 1050 bp, Homo sapiens
aagtggtgaactccctccatcaaatcctgtataaaggcaccgaatcccatgcatgaaggcagagcctcatgactcaatcatatcctagaggccacacctcttaatcctgttgcattgtggagtaagtttcagcatgaattttggatgggacaaaaacattcaaaccagagcagtaatggcaaaagcattggactaagaactgaagatctgggctgacatcttgagctgagtcctctccagccctgaagtctcccaataaacctttgtgccctacttcacagggtggtatgagttgtgtggaaatattctgaaaagtactatgcagttttaaaacactgctttaaagagataaacaattagggaaaaaaaatggacgtcttaaaagcaaagatccaagctcctgtatgtgaaaaacagacttttattttgtgagatttttcttaccttcaacttgtgaaatgtaaagagtaacacatttacccattttcttctatttcaggtgcgtataatttgctctgcgtcgactcctatatcaagcttatttttgcatcaacatcatgacagtgagttggagcaaagcagaatactgatggatgatttggggctgagccaggtaggcgatattaacataatctctttttattataaaacagcttaattgtttttggtttgatgcatggctacattttgaagaagaaatgcagtgtatagttaaccattgattggcgcttcttctataagcccatgtagcaaatttatcattctcaatatcactgaatatagaaaattataaacttacagtggaaggaaccttagtggtcatgtagttcagtgctccattttgcatgtgataaaaatgaagcccacggaggtggactaaggtgcccacagtcacactgctgaataatggcaggccagagctggatgccaaaccacctgtgcccggttctgggcttgctctgctataccatgctgccctttctgggtatctttctaaatgattgctggatttgtagagtgcatgatacagtatccaagcatgtaggctgg

SEQ ID NO: 122303 - DNA, 1049 bp, Homo sapiens
ttcagccctggcttttagatcccaggcacattctccagaacccagacccactgctcatttgcatttgctctcctttagtcattggttggattggaaaacgctctccagaggtttgtccttagggcctcccccttaggcactgggaccctgtctggaggcctacaccagcctctttctagcttctcagaactactggttttttttttgccattacttatttctggtgtacacttttggagaaagttttcccttttaagttttctctctgataatttgatgtgtttactgcctatcagtttaaattggttgactctctagtctcatttaagagattgtatatggaaaaaaaaagttataaaaaaaggcataatctaaaccggtaagcctaaaaagtttttttaaacctatacttaggttctgtaaattttcatttgtgatagctttattttaatttctttgttttataaccaggattcagcagaaggactctccatgtttaccggagaagaggaaatctttgcatttcagcgcacaatttcccgactcacggaaatgcagactgaacagtactggaatgaaggagacagaaccaagaagtaactgccacttttgcataaataaaactctagacaaatggttaacgcaggcagaactccttattgtgggacttgaaggaatcattttctcatcattaattatgcactttgtcctctggaccattttaatctaaaattgctctcaaggatctagtggattagtaagttaaacacttaacattttttaggtctgctttttcttatttggccttatttctgcaccatgaaattaaaatcatctcattcctgaagatgaatgtaggaccagacattttagcttcacattaaaccacctgaatgaaccttgaatgcacaagtaaatgcaagacgtctggataccttcaagctttggctgcatggtggtggcatgttagaaatacatcttttataatgggggaagaatgccctatgtttcaattcaaaacaaagacagttttccaatctgatataaac

SEQ ID NO: 122304 - DNA, 1029 bp, Homo sapiens
tgctgcccccgcccttgccgccaactctgccgtgagatggacctaataggaaataggaaagaaagcctgacaagcctgcttcacaggaaatctgatttgtccttcactgagctcatcttttgcttctttgagtaaaacctggctttactaactattgtcacaaagtggatcttcggctgtggatgagtgtgaaaaacagaaaaaatataaaatccacaaaatcttgtgaaaattaagcatttgggggaaggtaaggcataggtgagtcagtccaatgaatacaatggtcaacataagtaagctctttgaacctatttattttctatttattattatttttattttttatatcttggccactctagccatctcctggcaggggtagtgtggcacagcatggccctatttaatttcttagtcaataatccatcacatagtctcttttagatattaacctaattaaggcaagcaggtagatggatgagtacccaagccgagagaagagtttaaatcaagccttctgtaaataaaatgtggtttaaagatatttttattgaagtgaaacacagtaatttcaaagaggttacgtaatagggagaaaggatgggaaataaccactttgtgctggattgaatgctatatatttacattagctcagttaaaaaaaatagtcttagaaagtgaatattataacccctgtttaaaaataagaaaactgagtcttgggaaagttaagtagcttgacctgagattcacagtttacaactacaaaactcatatactatattttataacacactgtctcttactcttactatttaaaaaaaagagattgttttaaaaattgattcatttaactcagtgaatgaagttgaagataaattcacaacagaaccattgatttgaactcagtgaatataaaatgtttaactttattctttagatcttagctttttacttttcacattcctttggtaattattctgtatcttaatttttaaaaaaatcatgtgaatggacagacagata

SEQ ID NO: 122305 - DNA, 1059 bp, Homo sapiens
accaaaagtctacacactagttcataaatatattttttaaaaaatccttgtaagtcaccggagatagctcagagtgtagaagcgggctcctcaacgaccccatacacaaaaaggtccagcccagcgtacgcaagagccagcccgcccagccgcctccgggctccgggctttgcgcagcgcccgtcactcaagtgacgcgcggccccgcccctgcaccaagctagttcgacgcgtacaaacagatgatgtcatcgtatccacacgcgcgtgaccccggagctctccgccgcgtcgccattcgctgcgccgcttactcgtcaaggcacgccgcgcgctgactggccgcggccaccagtctccaggccccagacgcccctctccgcccccccgcccccgccccccagcaaataataaacaatcgagtaaaattctaaggaaggagagagaggagagggaaaaagggagagggcgcactagaaaccaatccttcgcgcgctggcggtgggagggttcaaggggggacgcgagaggacagcggacgggaggaaggcagccgacttggggcggtgggtctgccagcgaagaggaggcgtcgggggaggaaagttgcagcgcactcgactgggcgcgcctggcggggtagggggcgctagggcccggagcggcggggctgggggctcgggggcggggcgcgacccgccgagggggcggggactgaatggcgccggccgacacgtgcgggaggagggcgggcgcgcgccacacacactgggccggggcgcgcggccctggtagccgcgcgcgcttgtttaccagcgcacgtgggtgttatttttaaatggaatgtggcgctggctgcgctgccgagtggcgggcgcgtggggccgcccgcgctggcggagggacgcggcggggcccgcggcgcggcctctccgggcgctgctcgcgagacagctaggctgtccccactgcgcgccgctggcatagccggcggcccgggccggggaacctgattgagagtttcgcgcgctgcccgagccgcggcggagacgacggttt

SEQ ID NO: 122306 - DNA, 1784 bp, Homo sapiens
ccccgctctctccgctcgaagtggagctggacccggagttcgagccccagagccgtccgcgatcctgtacgtggcccctgcaaaggccggagctccaagcgagccctgccaagccctcgggggagacggccgccgactccatgatccccgaggaggaggacgatgaagacgacgaggacggcgggggacgggccggctcggccatggcgatcggcggcggcggcgggagcggcacgctgggctccgggctgctccttgaggactcggcccgggtgctggcacccggagggcaagaccccgggtctgggccagccaccgcggcgggcgggctgagcgggggtacacaggcgctgctgcagcctcagcaaccgctgccaccgccgcagccgggggcggctgggggctccgggcagccgaggaaatgttcgtcgcggcggaacgcctggggaaacctgtcctacgcggacctgatcacccgcgccatcgagagctccccggacaaacggctcactctgtcccagatctacgagtggatggtgcgttgcgtgccctacttcaaggataagggcgacagcaacagctctgccggctggaaggtgcgtacccaccccgggctggcagcaggacccgccgggcctcctgcgcagcgcgagacgcgtctcggattcgtcggagtgcgcttgcgggctccagggcaaggggttggcagggggagcctccgctgcgaggctttgggggttatctttgatccccggagtcggggcacctggggacggtctcggaggggtgaatgaggctccccagaagcttggggcatggccaggtgaggagagggggcaggggacgccggcgagggaagggcgaacggacaggagtacatttgctggattctccggacagcaccgaggaggtaggtccgcagccaactttggagtagagtttaccgtagtgggggtctggtgcgggcgctgtggctggagtgagaggtgtgggggtgtttgggacgcagtgtctggaggaggggttggatgtgtggtttccagtctgtcgcaggagcatgttgcgtcgtcactagctgaatgagaaccttcgggtccaagtttcagcttgtgggtgttaacacctacaggcacatcgatccgattagaaaaagcagtggttgcaaaccttttcctggacggcttcctttccttgcctatattgataccttttcttctcggagatgtcgctccagtaaacctgcttctgactagctgcttctgaaatgttctggggcctcgaaccggccggtctggccacctcaatccagactggctgcacccgctgctcccgccgaggcctggattcaggcactgtttgagggaagggctctggtgtgggggacgcggggcctgcgcttcattcactctggcgtttgggaggaggtttgggggctgggccgggccgtaatggcttctacctgtaaatgaacccgaagagagactctctaccgttccttatcatcctcttggggcacgggacacgtggtagggagagaggtgtggaaaggcctatgatgtaatgacttcctgcagttgggtatccaaagagattaactcctctgcccctgctgggctgctgatatccagctgctttcctcttcctaggcacctccctggccccttcccccaagacagtgtgtgtcagtaccaggccaaagagtcctgtgcgattggagatatacatctcttatcagctgcccatatttgcaatttagcttagatttttttttgttttgttttatg

SEQ ID NO: 122307 - DNA, 2915 bp, Homo sapiens
aaaatcttagaaaatactgtaaattgaaattctcaaggcttaatatgcttaatacagggcacacattttatgattcttttaccttaaaattttttaccaattccatttctgagtgtcacatgacaactaatccttgacgactaaagggatataattttgttagagtttttataagatgatcttcatcaaaagatgcagccatgcaggaactttcaaatctttgatgatggagaaggccctttgaaactggagctggttttatattttgattatgactaataggcaacctttttttgtgtgtgcttgtggtttagtggaagaagagggaaaagggagagatcaggagctaattgtgacccatttccaagtgtccaagtttaggagttgattcttgtcatgattagtcattttggaagcacgcatgtgcatttaaaccacactactttcattctgagtaatgtaagaggatttttaacttccaaaaatgtctagaattcaggttaacgtctcctagtcatgtgtgcataaagggcacggtatgcagggccttacttcttttcaggctatttgggccattgcattatgagaccttgtaaccaaaattatcaccctaacatcataaaatgaaagaattagaaaagaggacttagagatcagaatctaaatcagtggttctcagccctggttgcatgtttgaattacctgggaacttctgaaaaatacaaatacccagagaatttgatataatttggcttgtgtgtggcttagcattgatggttttgtgttttgtttttttttttcaagtttcttaggtgattctaatgtatagttaggatgaagttttctgatctagttcaaccctcttattttactggtgaaaaacctgatttttggaaaagctaatgactttcttaagatcacacagctagttagtagagaggtaattagtagccacagttctagaggtttttgttttccattttcttctttaaattgatcttttttaaaaggtcatttgctaggtaatggatagtctcacataagtagcgcttgctttcctgaaaggcttatttgcctctcaatctaaaaacatcttgcttattatttcagcatcaaaaggatgggcaaatgtagatggaggctgagtgagtgtatcatgtttgcatagctgtccagtgcctgtcagtaggggtacttaggaactatgaagtgataaaagaggtaagaaggatagcattttaacaaaaagaggaagcccttggttacttacatttgtcagatactgtgtcagggagaaggatgatgactatctcacaggttcccttacctcgggcattaaagtagaaatgaacaatcagatgtggttaagaggggaaaaggttacatttcctttaattcagattaagcttgcactgcacccatgattgaacaagtgagttctctcagttcctcttgtcttggggagacctctaaggacgccagggcttacctggtaaggcctatctatcacttatttcgttatacacagcacacatctgcttttcccatgggtcagggtgtaatcaaattaggcagacttgagtttctgtagtggttcccataatttcacaagtgtgggggatactgtgttaagatttctgctgctgctgctgctgcagaagataattcttcaagagtccgagtcttctttcatgtaagaatgtgtattgttatggcttcttgccaagataaaaagatgagggctgtcctgtcacataatgcttatttgtgtcctcactgtttctgttctttagattaatacatccagttccttttcaacacactgtattaggaaaatgttattttaactgcaactctgttttaaatttttttttaatttgaaaatgactaagtcataatcattccacattggctcataattttgacctcagtcaccttttggagtaactcaccaaaaggccagttatggtcgtgtgtgaagaatctgtctgcttggcccgtgttgccaaaatgtcgttttgtaatttcctttggcaatagtgtcttcgtcagtgattctcaactaatatacttcctctttctacagccccagtacactagagggactgtttttcctctttttcaaagctgtgtcattgacctctgaagtgaagaaattggcccttttagactttgatctgtgagtcccatgtaacagagactctttaaaaaagaagctaagtgtgtgttttgatatgtttatctccttcttagaaaatgaaatgaaactacagcagacttatttttaggagattttaggagtgttctattttaagaaaatgacaccatacaagaacatcttttagttaaacttcttagtactctgcttgtgattcttacttaaaacctgcaagatacttttatttggaaaattaatgaagaggccttgtctcactaataagtcatttaatttggtctggcaaaagtttaccatccattcaaagatcttcatgaaaatgcaaagataaggctgtttaggcttgagcccaggagttcaagaccagcttgggcacatagcaaaaccccatcttattttttttttaaagactgtttaggcctgtgcattctggcaggttgccccacttacccagagcaggtgcatcagattccagattcccagggctggagagaatatggaatttattttgtttgtatacccacttattttgcctatagggacagacttgaccctattctcaactcctcatttctctccttttcctgcatcacaaattgaggggtcctgaagagccactttacctttttggtgctataaaaggagctggggatcataaatgcaaagacgagttgatatcagtggatgttacagctggtatacagtaagtgaatgaaagattggaaagagaaaacccttt

SEQ ID NO: 122308 - DNA, 1113 bp, Homo sapiens
tctctacttaccttgctaaatgccttttctttcaacgccaccttaccctgcccaccccatggctgctacctgtttattttgtcattttgctaagactgttgaatatttttaagcacagtataagaggctttaaattagggaatgtgtctgccagacaaataagtgtttctaatatttggagctgctttttggattttataatcaacccatatggatagccttagttctggggctgtgactctgaaaggggctgatgtgactcaggagtgagctggtgtcatgagtggagtcttttggatacttgcagctctgaaggtggcatcagctttagacctcctagcatcgatgttgatgtgatgtggtgtaaatgtgagatgatgctgtgctatctggggtttcttgcagtgccttgttacccaatgcataagtctctgaaaactccataagtgtccatcactacttaccacagaaactgaaggaagcctgatcttgggatgaccttgttgcattaagagaaaaaggaaatgaagtttgccatctgtatgtaaacccgctatttgtatcatcaacatgcagtgtcgagaaagtcaccatagaattgttttgcctaaagtttattttactcacttttaggaacaaagctgttatgtaaagccttagttgtttgtaatgttctgcattttggggcagaagtcccaaatgtacttcaagttttctgtccatggattgggaaatagaagtcatgtatgaaaggagaggagatagcagacagtctttgagatgaactatttcaaggaccagtctgcagttcttccaagttagagttctgaatatgtggttaggctagtgatgatgatagaacaccccagttctgactgcatcattgcccagacagacccagtatctttcaccattttattcctgaccaaacaacgttcatttcccagtatcttagtctctcctaaaggaaaaagaactacggtagctggcatccatagagtactgtgatgtaccactcttggtaaaacggaaatgtctgattggagtgtgtttcaagccaggcttttctataattcgcttgttccacttttcactcctgagtttttgaggttt

SEQ ID NO: 122309 - DNA, 1132 bp, Homo sapiens
tgctgggattacaggcatgagccattgcacccggctcccttgtgtatttttattttaaattttttatttgagacaaggccttgctctgtcacctaggctggagtgcggtggcacaatcatagctctccacagcttcaaactcctggctctctctgtagagagctatgatcctcctgcctcagctgccctagtagctgggactactaatgagcgccacgacacccagctaattttatgttttttttgtagagatatgaggtctcactttgttgccaggttggtctcaaactcctgggttcaagcgatcctcttacttgggcctcctaaagtgctgggattataaacatgagcccctgcaaccagccttccttgtatttcagatgtctagtgaagttagttaagttagcccttgaaggtattgagaatttactttaaattcagagccagcagagggagtacacaagtctttaagctgatgtcaagtatttttttctccacacagctaaaataataccttgattattttttaaagaactctgatatatagtgtttccatgtaagtttattgtcatcattagaaaaggaaaatttaggagagggggtgtggagattaaaaacttaaagcaagtgttttaaaggaaaccctggtcttctaagacccatgatttacttcccactcctagatcattaaatgagagtgcttttaactgaaaaatatcctcccctgcctttcatctttttgctactcagttcctgatactacatgttcatttatacctaacaccaaatttttacagagtagtcacgtgtctggatcagtgggatgttctgtgttttagtgctattttgattgggacttttgatattttccaaagcttcacagttgctcatgggtgagagaaatgtatgtatgtatattgctctcaggtaagagagaaaggtaaggtaaaaagtaagaacaacattatttccaattcaaaaatgaatagtcatggatctacaggagactactgtaactttgaactttttgtaattctgtaatgctatatcggtttctcacctccctccactatgccccatattttggtggtgggggtttatttttgacatggcagttggagagggttaaata

SEQ ID NO: 122310 - DNA, 1619 bp, Homo sapiens
tcaggaggctgaagcaggagaattgcttgaacccgggaggtggaggttgcagtgagccaagatcacaccattttactccagcctgggggacaagagcaagacttcatctcaaaaataaataagtaatgataataataaagacttatgatattggccgggcgcggcggctcacgcctgtaatcccagcactttgggaggccgaggcaggtggatcatgaggtcaggagttcaagaccagcctgaccaagatggtgaaatcccgtctctactaaaaatacaaaaaattagctgggcgtggtggcacatgcctgtaatcccagctactctggaggctgaggcagagaactgcttaaacctggaggggcggaggttgcagtgagctgagatcacgccactgcacttcagcctgggcgacagagcgagactctgtctcaaaaaaaaaaaaaaaaaaaagaagaattagcgcgtacctgggtctttaatgggagagtaggaatggcttgagaattctgtcagaaacctgttggtttggtgattctgcagttctctttggtcactgccaggtgtgaccatggtttactatgggtcagaggcacagtgtattatttagaagaatagagtgacgcatggtaggtagaaatcttttgggatggggccttatcgcagaaatttctgtgttgggacagtaggatatctgtgctttttataggcttcaagcacgtagatgaatgcaggcagcaacatcaagaaaagcagatttcaggaaaaaaaaacatttacaaggagttcttggcagaagttttgctgccaaatcagaaatcataatgaaagatattaaaattattttgtgaggtggtcgtctctttgcagtgcagttactgacgggtttaagagcaggctgccaagatagagacagaaaatgttgcataatgcaagttgctggccaggttagtgtttatctctactgaagagcctacttgcttttgtcttcaaggtaaaaatatgtatgaataagacctaaaatggtggttttaattggccacaggaaggcagtgccgtaagataaaatgtagttaacagaatagaatgctaattatcccattttgttctgtgtatgttggaaaaaaattacagaactctcagtttcatagtaaagataggtaagtagtgtctggataatgtccagaggatagactgaaactctgtgataaacgtgagcaggcagcaggatgctacctgataactgagtataacagcatgcaggggaggactgtgtggctggaggcagctgcagtagaagttggcagtgccactgtggacttttaaagggacaactctgggtacaagcctgaagtgtaaggaggacataaaattaaatacaattgagcttgtctccttgaaaactggttctctctttttactacattaaaaagatcaagtggacagttaagtcattaattcaggtaattccaatcacaaaactacttttttcctgaagtgtcctaatcattgatttttaaaaatgatatttctttcatcataaattatcagcataattgctttggttccatatttcatattaagcttgggctgagtgatgtttaaagcctcctgcttac

SEQ ID NO: 122311 - DNA, 1133 bp, Homo sapiens
agtttttatcttacacatagctgttctagggcttcccaccaacatttatttccaaaccaaggacttgtttatctcatccttcatacttttgcatttcagtccgaattggatacgggtttttgttgtctttgtttttgcagtagaaaaacttcagttggtaggatgaaaaggagaacaaatctttattcactttcagtatagttccattaacagtattaatgtgccatgtgtgaatatacctgtcatgcagactgaggcccacagactaataacattttgagcaagataattttaagtaaaaactgaagctctgaactcaaacattctttcaaatttctttaaaataataatgatcacttagatgaggtgcatcatttatgtaaccctgaaaagcctggaattgacttacgaaaatgtcataggcctgattattttaaagttatcttcgagctgatgctggtgtgagcatgtttgctttagaacacatggactcttaagctcatgatagataatttcctaggtgagctagtatactgtttcttgaaattagtggccttgatcagcccttctctctccaagcctgtccaataaagataagtttacagccttctttttgaatagacacatgtcctctgctgaactgaattatctaaatcagtcctatttagtctcctccccttacaagaaagatccttatttcagactgaaagactaggtgatttgggccatattttaggttttatcatacttacccttcatgtcatttgttaaggtcaagttcagcatttgactgtggacataatttttagtaggtgttccttgggaagaggcttattgggaagagaagtttattccaatagtctcataaaatcagtgaatgctttgagttaatttatcagcaacctgtgctgaataagcaaggtgccatgtgttaaattaggaaaggtaacgtgctgctagtgaaaactgtgtcttctaagttggctttaaaataaattgtttaccagattaatgtttcaatcaaaaattacaattctcatttttaagatgcagctttatccacatctaagttttctcatcagccaaaaaaaaatttaaatggatgaatctgtttagcttataatgcagtggaa

SEQ ID NO: 122312 - DNA, 1034 bp, Homo sapiens
tccactggtcaccttactccaacatcagtggttttcaaccctggctgcattttagaatcacctggagagctttcaaaaccaccagtgcctaggtaccatcctaaggcagttaggtcagaatctctaggtatggggcctgggcatctatgttttttaagcttcccacgtggtgataatgtatagccaggattgagtgcctctattttagagacattagattttggctgtggaagttatcagctattttagtactgacttttagatgcatttcagccctctcctccataggaagctccacatgacaaggagtgctgtaaagttgggattaaagagtaaggttggcttctaagggcaagagcattattatcacttaacaaactgtgtttaactggggtctcctcttctttaatataaatgcatgtgatgtctttagtttccaactcccactcatttttctagtctctactggaccctagttaagttattttgaagttttcaggaatttttaagaagagatggtgctgttttaagtcattgcataagacttgaaaactgagagatataaacttactgttcttttgtgcaacctaatctgatataccagaagattccaccatatcctgatgtttgaaggtaatggttctccaagtggtccctagctcagcagcgtcagcatcacataggaactttcaacatcacgtaggaacatcacgcagattctcaggcttaccccacacagactaaatcagaaactctttaacaagccctccaggtgattctactgcaagctgagggttcagaaccactcttttaaagtcatttgctaagtctgtggaattattctggtgataggagtaaaaaatcttaacgtcgcttgccatcttggcttcagaatcatggcaaaaatggggaaaaaatatggtggtatctgttgaaatataacaaagctctagccccttgagtattttggacttcccacagatctgtgctgctctgtagccttctgtacaaggcaaggatactcacctctcagg

SEQ ID NO: 122313 - DNA, 1006 bp, Homo sapiens
cttcttgggggagtgggtagggcaggccagtcactttcctcagattcaccaagattcctgggaagggtcaagaaggcaggttcggtgttggaacaacatcagaaggtccacatggaagggaaagctgcactgagggacttctgtctggggtcagagtttggaggaaagtccaaaatattgtgctgttaactgtgaacagcattccaaattgaactccaggagagtaccagggacttgtacacattggaagtcagatacagctggtgggcactggaagtgctggggacagtaggatcctttccagagccatcaccactcacaggtgaaatgtgtcaacacacgtcagttgctcatccattttggttttcccaaagcatgggcctctgcttgcatgttctgggggcaaggagagagggtatcttgaaaggatctggcatcaggatcactttcacagaggagtaaaacatctggtagcagtccaggaataaagcctgcccagtagcagtccagaaggcttgtctctcagcccagagaaacccccagtccttggcttctgtgtctcagacctggagataatgagggacatcacctgcttgacccctctttgaacatttccttaaggaggctatagaggaggcctctggttttgagacggtcggtgtcctgacttctgtgtgctgctgaattacagagttgaagtttgaaaactcttaattcctccctgcccaaaaggggcaaaaagggctaaatcttccttctgtgttggtgtgaatgggtgtgatgtatacagtcataaccttagatttatctatcattttcatggctgtaactaaaagctacggttaattgaacatttattagcagtgtgccagacactgttgagctttatgagtattagctcttcttcatttttttttttttttttttttttgagatggagtctcactctgttgcccaggctggagtgcagtggtgtgatctcggctcaccacaacctctgcctcct

SEQ ID NO: 122314 - DNA, 1131 bp, Homo sapiens
gtgacccagctcatctttcacagattcagaaatgagacacatagatgagtttactctaaactgcacttaaactttcctgtagtcattgctttctctccctgcccctgccccttctgtggaagttgaagcagactaattgtatatcatcttttgttgaacagcgacatcgtgcttggaagccagtgggtcatttgggtctagttttcattcttttctttggatctgcttcacagtttaaattaggcccaggacattgtatatggtggtttaagaaggtgactgtaacaggcagatgttgaaagatggaagcagtaggaggaggccaaactgtggaggacaggggtaataactggattggcaaatgggggttgaggagcatggaaggcagcccagtcagaataccttggcagaggctggagggttgtagttgtgtgattgtgatgaaatattaggggtgatggctgggtttggaagagttaagccgttacaaaatttcttcaaagaacattatcaaacaacacatatgtactgctgattaagcaatatcattaatgagcctgctttataatttaaaatgcaagcagatttactttcagtttcagtcatggaaccattgagacactttggggaggcaagtgaaccactgcagttctttctatactggaaggaaaaggaggaaagcaaagttattttgtggttttggagtagtttaaaaaaaaaagttttgtgttttgatagtgccttccaaagagttcagcattatgaatcatttcttctttgtcaaggtgagagaggcattctgtctgtgaactaaatctcccaaagtcttcagtgtttgatgggcaaaggaacgagaggaaagaaataggaaactgccatgccatctttcccccattatctccctttcatgaaaaatgatctgtggctcgctgccaagactttgtttaaaaaaacttggttgtctggtatttctcatctgcatgaaaaataaaaagtgtctccattttttttctgagataaatggtaaagataaagctttcttaatgtttaaaaatataggctgcatactctccaagaaaaaaagccctacaaacaatgtcagctatttttggaatattatataaacagttt

SEQ ID NO: 122315 - DNA, 2429 bp, Homo sapiens
ttcccctgttcatctcacctggactgcttcctgagggattttctaggggaaggactaatctgagatgcaaattaatgccaaattgatgatggaactcctgagtcctgaaacgcagtgccttggatgtcatctgacttaccctttattttctggatgaggatattaaggatcaaagatgtaaaggaggttacttgaaaccacccagtgaggtcactcttacctgtgaactgactccgtggtcaccaccattcttgctgaggaagatctgcagctgtctcatgaacatatgtaatgtgcctggatacagtcctcgcttcagactcactactttattttctagggaagaactaggctttttatttcactgtggctggtgtgggggcattcggtgaaaaggtagctatgggagacaacaggcagccaaaatgctacctaataaacctttgaaccttgaagaaggattgcccggtggtagccctattatccagagtgatggggcctgagttttctgagtggttgtaactttgatggttgtgactttgggaaagaagtatattgcatgtaatgtttccaagaattagttactgtgtgccagaggagtgggcacataagctggatcagtggctttaatgggcagcagttggctgcaagagaaatttgcagtttcaccagtcttaatgctgggcaacccatatattaaataatgtttggtacacttggatatcttttattgggaattaagcccccaaagcagctttctgtaactattaaagtctgataatgctaagctcttcttcaggcactggagaagtttggcagtctctggaataaggaatttgtttggctttggcactgatagccaaaatgccacttctagtcactttaaatgttaccaagatttcagtctcattgccgattattgaaaggtctgtggcaaataagatttcagtgctgtggtgaagcaatctgtgtgtgctttaaaggtaaataaaaatacagcacattttctgagtataattctcgtagacagagttttgttggtcacccagatggttggaagttctggtccttcagcagtatgggttggtggcagtggtgctggcttctgcagcctgtgctggtccaggcctaaactcagggaaaagtatacatgtccagggctcatgtgacttgatcatatgggggcgtgcttcataggtcacagccatggttattcatccatttagtttcattccgccggcacggtaatgcatggaataaagatggacatacaagtgggcattgcttctggtgagtctgcagtatagtgggtgatagggatatgcaaacagaaagttgtttttcttgggagatggcactaatccaccttgcctagaaagaagggaagtcttgctgaactgtgcatcctggcatgtatctctgccatcattcattattttcacctttgataatgaaatttctgacaatacagggtgttgttggagttcatttttttgttgataaaagtattactgtaatcaaagaattccttgcagaagttttgcaaccctcaaggaaaagtgataaaaaaacagaccctgcatgatggattgcaggtttcagggaggtgggagttgtccatcctttcgcgttggctttgcttttgtttgtgtaaccatgaaaggatactgagtctgctttttgtaaaggagataacttggttcatccgtaacatgcagagtgttgggtgaattaacgagtggaaggcacgtaatgatgtgtggcacttatgtagtattttgatgatttcacctagaatcttgccatctggaaacttgcatttactaggatgtagagccaattttggttgatactgagtccaatgtttatttaaaatggtttagattttcatttggctaaaatctaggaggttgtagactaatagaataacaataatgatagcctttcctaaggagctctgaatagcctcagtagtactatagtgagaggtaaaagacaagaatcttaccttatttcatagtgatgcagttgaaacatggtagcctgcacagggtggtagagctggcccgttttgaaatgagaagttgaattcctgatctatggctttggcacttgctttgccaccaagaattgctatctccaaaatcttttttttttttttttttttttttttttttgagacagagtctcgctctgttgcccaggccggactgcggactgcaatggcgcaatctcggctcactgcaagctccgcttcctgggttcacgccattctcctgcctcagcctcccgagtagctgggactacaggcgcccgccaccgcgcccggctaattttttgtatttttttagtagagacggggtttcaccccgttagccaggatggtctcgatctcctgacctcgtgatccacccgcctcggcctcccaa

SEQ ID NO: 122316 - DNA, 1646 bp, Homo sapiens
cttggagtttagattttgctgaaagcaccaaaatccaggcctgaaagatctcaaagtggatcagggcctggggaccagctgtgcattattgagattggagcccaagttggcagggaggccatggctccttaactatccaggaaggccctctgccctcttactcagcgcttcagcagaacagggctgggctcttgatcctgagacagctgggagtctgcaaggtgtgccccatgctttccttcaatgtagagatgccttttacctcccattagagtgcttcagaggctacttagggtgccttaggaaaaggtatcgttattattattccattagtctgtaaccttctagattttagctgaatgaaactctaaaccacttaaaacacactgggctcagtagcatacaaaatcgctctgtgcttagaggcgtctgcaaagtggtgggcgtgctgccccagtggctgtcactctggctgctgcccttatgtctccttcaagggtacatggaagagagatgagggacacatgcctaaggtcggcttctaccacattcctatcccactttctcagccggcttcctactttttcactgcctctgaaatagacacagacctgccagtcctggaaggcctcaagcctctggaaaagcgaagatcacttttccccaaagatgttaattccaaacttgtttatgttcctccttggaatgacagcttataaaaatatgtgcagtattaagagatgaagcctgagggtgaaggacaacatagtacttgacaggcaccagaattaggtgacacatttcactcttgagtttcatagcagctggagcaaaaagggacataagattagcttccaaacttatgttatgcctttaaatgaaaacagaagtagcgtggctttttctgttacttagaaactttttctcttgggacatcataaagagaacactgatctaataaacgacattctcctgcttgaaacttggttctctgaggtaatgagccagtccattagtttcagtgtaccttcctcagtgatgtatctatgttcatctatctggccttgtgaatatttttttgacgtaacatgagctagactgagtatgaatggctccaaacttaggagtgactaggatttacagatgaagcagtatggatcagtttctttgggaaggttcttggaggaccctatgggaggaaaccctggacaggtaggaaaactgaggaagcagaagagaagggcagaagacaaaaaccctggcataagaaattgtcaatactgagaagtggcagggacgtagcagaaggggatggttgaggggaagaccagggggctggtatgtagttggtccccaacagcagtgtattggtgtactcgaccctccagtgtgattctgggcatgagacaagactcttgttctcatgaagcagggcatcagggaatgggagttggtgaggaaattacattaacatttattgagcaccattctcactataaacctgaacgtaaatattattattattattattattattattattattattattattattattattttagtagagatgaggccttgctgtgttgcctagactggtcttgaactcctgggctcaagcaatcctctcaccttggcctctc

SEQ ID NO: 122317 - DNA, 1825 bp, Homo sapiens
aaaatcaagacttaaaaaaggtaaatggaggcagttgcacaattacatttgtttaatgagcttttacattttaaaacttttaattaatgttatactatttcagaaattcaactgtagttataaaattataaagaatgcatttgttatttaaagtgagatatgcgtgcagacacacagaccatggtcttcccttcttcctctggtctactgcttctgccttatatcccctagattccttctcactccccaaaaggcagaggttaagaagaaagttaaaatatcaagacacactaaactgtttttgtggtgagtcaagctgcagtgcctcgctgactgggaaacaatgggctgggcctcctagaatatagtaggctggagaaacagaaaatacagcttgactgggccttgccctctcactccaagcctcaacaggatgctagagctttagcatgctttctgctgtgctgggattattttctgcaactagacaaaaaacccacaaaactccacatggtttgttctcaagcaactggaatatggaaaggcttgaaggaatacttacactttttgatggaaggtaatgaccttagttcttcagtatttattaggtaagcatgggttctgcagtatagcatttaaaaattcatgttcctcagggtttcctaagacaaaatagagtgtgtttggtccagtgtgatggagaagtttgatgcaaatccgtcttaaggaggagaatggaggctgtcatggagtcctgtggactgtttcgcaagtagttgttttccatgttccagttttacttaacttcagaaaattattgtttttgaaaataaagaaaaaatctaagtggtagagagaaatataggctgtatttaaactggcctttataatttttcctgggcacacgcagcccacattttggagctctgtgacataagcaccccctgccccggagctgggagtcttgaccgggccaggccttggctgccctgggctacacagacacaagcacaacccgaatctttgtttacttcctctccaagtgctggggacattcagtactaagaaggactgtgtgcttgcacaaacactcctgccagcattctctcagccctgccattcctgactgtcttggaaagttcttcgtttaaggcaggcttttgttcttagagtgcatgcattattccccagtcaggcagccttttccgggtttccagtgcagacttgcaggtccactcccctgcagcctagcccaggggtggaaccttagctttagttgccattaagagcaggaggaggagttaggcaggggtgactggctgttcatgtgagttcctgtgactgatgtctctgaagaaaccaatgccttcttcagatccttatgggaaatttaggggacttttggattacacagtgttgccttttgctgattctaagatagagccttccaattgtaagtatgttaaaaacacacaactatttcctactgaatgttagtcaagctaaagagtgaatctgcaatttcatgaataatcaaaacaaaagcatgctgccaggatgaactgttgcaagagcaggtgctatttttttccagaaacttttttatcctcgatcacgttatgggtattaagagagttattcttaaaggatatcatgttcagtgcaatgtcttaatagaaaaaccttaaacataagtatgcaggcaaacacaggtacatagctgtataaagttaaatatgaagactggaattcattaataggatttaatttaaatctttttttttttttgagatggctttactctgtcatgcaggctggagtgcag

SEQ ID NO: 122318 - DNA, 2119 bp, Homo sapiens
tgcacgaaattatttaaaatactaaatgaaattatcttcaggctatgtgtatgaggtgtgtatgaaacataagtgaatttcctgtttaaacctgggtcgtatccctaagatattttattatgtatatgcaaatattccaaaatctgaagaaatctgaaatctgaaacacttccaggtaatttggatgagggatactcaacctgtactcaaattagaggaaagaaaagaagtaatggatagacaaaagaaaagtacttatttagagtttacaatggccaagaattaggaatgaagaattgagactgatgttcttgtcagaattttggatgccttgcttgcaaatatggttttaaaaatatgcaacttttctcattttagtattgggattgtggcgcttttttgagcctcatatgacagctttcagattggagataacgttagagctcatcctagctcagctgcctcccctgacagcagacgaaactgaggcccagcacttggtggtgggctcagagtgccaaactagttaatgaggcagagtagacaggcaacagccttctcatgtaggtaggcctcatcctttagaagatgttgctgcctgcccttgtgacttgtaaagatctgtttgaagcatgagtaaggagatgggggctcaggagtgttacagcatttcacatctcaggtgtagctgggacttatcgggtgaccttttagaaactgtttattttcatttttgtaccccacattgggataagtatggtccactgacattgagaataaccaggcctgttgtagacagccagccatcctgaaactactaggtttatacttcttacctgttagaacagagtttcccaagttgtattcccttggaaacactagcagtcgtgcatcatttgggcagttaggttacacaaaatttaaatggtctatttattttcttttccagacagaactcagggcagtcccacctcaagggaaatctcattacatccttctgatggtggggtagctgggagtcagcatgaaatccaaaattctaaatcatcgggaaaaagcagaagggttggaacccaaattaaactgaagtcctaaataaagttcacttttcggtcaggcattcaggaagcagcacgtgaaaatttgcttggatacagtttcctcatagttcttcagcagcttgaaataacatcttgagctggctgtaaacaaaacatctcaagttatcgtttttctttccatttgattgagccagttattgtatagggaggtgacacaaaacaaaacttcgtgtttctgaagccgagattttgggattgtactttatgcaaagttacttataagttctgattactttgagagaaaaatattacagtatccttaggaagttttatgtatttgttttaaagctaagcaccaccctctttttagttaaaaaaaaaaaaaagtttggaaaatagtgacatgtcagtacaaagggaatactgctctacaataagaaggaacacgccacagatacatagcatggatgaatgtcaaaaacattgtgagagaaaaatgcctgaacaggagagtaactattgtttgattccatttctgtggaattctagaaaaggcaaaactaacttatggcaacaggaagcagatcagcgattgccaggggtgatggggattggaggaggttgactgcaaaagggcagaagggaacttttcagggaaatatgaaatgttttatatcttaattgtggtggtgcttacactggtgtaaatatatttgcccaaattcgtgtaagcatatgcttaaaatgggtgcagttttttgtatgtaagttacacctcataaagttgatttgaaccgaaaaaaggggttagaaaaggctgtggttggaattttttgtgtaacttaaggccaaatagtccatttacgccagtttttacagtattgtaagctatgccctttgtgttcacatttcttcagttactcctttattcgtcatcacttaggagactttgcatctcatctgccttcctcctagctccatgatttgagcaatagaagttcttggctttcaggaacctcacagttcttgttagtcataagcaagaatgcattttaaat

SEQ ID NO: 122319 - DNA, 1091 bp, Homo sapiens
atttgtagtagagatggggtttcaccatgttggccaggttggtctctaactcctggcctcaagtgatcctcctgcctcagcctcccaaaatgctgggattacaggtgtgagccactgaacccggccgccttgctgtgtatttttcttttcttttcttcttcttttttttttttttttttttttgagatgtagtctcgccctgtcacccagtctggagtgcagtggctcaatcttggctcactgcaacctctgtctcctgggttcaagtgattctcctgcctcagcctcccgagtagctgggattacaggcatgtgccaccacaaccagctaatttttgtacctttttagtagagatggagtttcaccatcttggcagggttggtcttgaacgcctgacctcaggtgatctacccgcctcggcctcccaaagtcctggaattacaggtgtgagccaccgtgaccggcctttgctgtgtatttcttttggacatcttttggctttgtgtttgtgtaaactttgaggtttcttaaaactaccaaagcagtgaggagaagatggcagaaagctgtgtgctgatattctttttcctgtttcttgtttttccctcccccaaaagttgtggaattaattttaagtagaaggaaaagggcagcttgagatgtttaaatttgacttaagttttaactgaagtttgtttgcaaaaagatgaaaacgggttaataactttagagaaaaaaaggagagtccctgttcttctccttcctcttttagggagagttgtagaataaaaggttgatttcatactcctaaggtttggaagccaaataaagaaaacaaaactgtgaagttaacatagtagttttggtttcttatttgtagaataaaggtatgatccagccccatggaccaaggcagcaggaggagagttcccagggtttttctaaggtcagaggcatgcagcattttcttccctccttccctgcctcagccacctctccctcccacctttacctcccgctaatgcttcttttgggcttgcttgggccatgttgttttgttttgctgctttttgaactctaaaaatatagg

SEQ ID NO: 122320 - DNA, 2394 bp, Homo sapiens
atctgtggtttaaaaaaaggatctggaaaatacttaatatacactgtcaccctttagggacttcaggatgcgtaccagcagactgaagcccataagtcctgcagtaaagaaacctgttttatattgtttaatccatcatatcccaaacagttgcagctcaaagggatgctttttttttcttttttcttttttttaacagaaaacagttatcagcagaacatactttgggaaataaactgttggactaaataaactagagtcttatctaactctttagagtctgaagtgtggatggtatcttgaaccacaataagcagagaaaatcccaaaggactggagagaaaatttactctggagatggcagcagctaagtgagaacagaacttggccatacagttgtgtcttaacttgtcccaaaagggaagtgccagaatgtgggtgatgccattgggctatgttagagacacatcagctcagaggttgtataagttgtttccatggctagatgagaaagagagccagacctaagagtgtccccttgagccattagaaacagtgtcaccccagagatttactcttttcaacttctctgtccccattaaatccagaagcacaccaggctgagaatgggtaataggcttaagcacaaagaaattgcttatgattctgaatgtggaaggcatctttcttttcagctatgaggatgctcatttaagagaaattgctttcttattaaacagaatgattgtgctttttttttaattggatcagaacatccccatgctgccttgtggtatttgtacctaacaaatggataatgactatgtgaaattatggattctgttggctaaatttaagctgtcaatacagggcaaaagggtactttgattccattacacattgcgttaccagtctccagagtccatggggttaggtactccatgttttaatatgtttcaataacttttttatactgacgtctgcaggctttggtaactcatactgtagacctgtatgtggctgtgtccagctgcagcatgtgaggtagccagagagctatttcaggaacaaacagagctatttcatgtttcctctaatttgtaataagcacttaggtctgcctgactcttgagatgtatcacagagttcatcacacgccacctattgtagtactaaaaggtactaaaattagaattcatgcttttggtgttttaaaattagcgattcttttccctctgttgaagctatatatatttgttaaatagtgtcttttaaacccataaattctaagctagaattgatgaacattcagattaaagcaagcaagaaaaaacttaataaaaacaaaattcctctcacggagtttgaggttccagtgatttagtgggtcatgtgttttccattaaggatatagttcccatgcagttaataatgtacaacactgtgggttctctctgctttaatctttgccttcttcctccctactgtcccctcttccatctccctcaattggggaggggaaaatccctgtgcatctttctgttctttgtagaatttgttccttggtagtttcttcatcaacttgagtcacctcagccctagaggaggaatggattagctgaattctgctgacttgttgctacccagctctgctgatagggacatttgtagggtggggatgacaggggattaccaagcagttgctgagtgataaactgaactgaggcaaccacaagcaggatacataaaaaagaaccactggcacgcactgacccattgctctgaaccagctgtctgtgctgggccctggtgggaaatggagggaaaaaaaatctagagctttctcttgaacaaagttacgcacaacatgagtcagaaacaaaattttaaaaggtctggggctgtacagattttgttgtggggaggggagtgttacacattttatgatgattgacttactggaaattcaccatcatggaaacaaaaatttagggaagaattctgaatgtgttctgggaagcctctcattcatgacattggtttggcagacaaatggcttccaggaatgcctacccagggcattgctttgtatggcaagatgtggatggttgataactccttgacctggtggtcattggagactgcccacccagggcaggggtgtctgtatacccctcacctccttcatgctgacttagcatgatggccggcaaggagtttctctaattcttgtctgggcatattctttctctttcccttttctttttttatgcaactaataaaaagattgctaacacttattacataggaaacttgagatgtatacagagttctagaaaatgggatgagagctgtttttattcctagaccagagtaactttgtgagagcaagct

SEQ ID NO: 122321 - DNA, 1047 bp, Homo sapiens
attataggaacctattttgaagctcttagagctgagagttaagtggtcttttaatggaactgctaagacaaggtagagtaggagatacttttcttccctctttatgctgaagtgttttagtgtttctgtctgtgactaggcagtaactttgaaaggaataagatagggttaataacatatctactaaaacttggaaaatatactatattttctgagataaaaatctttggattgaaaattactttctggtggaatatggcaaactgacattcattcaatgtaagactttttttccctcactttttgtgttttcatctgtagtttttttttttcttttttacctgtggtaccatttttaaggtgaatcaggccagtttcagcaaaaaatggttgtactgttcatcacttcagtagaaggtaggatgacttcgatgaggttgtgctcagtaacttctctggtgctgaattagtgtcctgtgacaaagaaggatcccattcttacaaataaatgaataaaggagactagcagaatctggcatttctctttttaaaagtttataatcaattattcattcagtcattcaagtaccttctacatgtttgcagctaaagactaatgagtgtaattaaacaagtggatcaagtaaagcatcagccatgaaaacttttcactttctcggggatgataaaggaccctcctttttttccttgtcatattttccagtttatcatgattcttatggtattggtgattttaactttaagtgtctagaaaatttacgcacattttggcctaggaaagaaaatacagtattgaagaacaagttgaggatctccaggtattaaatataacctgatttccagaggaacttgatataaagaggataggactctgctaatggggagaggagggaatcattgttggggttttgggtagagcatcttctttgaactaatcctggacagcctttcccaaactgagggtgtgccatcatttccttgagggcagtagaaggccctgagaatctatctgacagcattattgaa

SEQ ID NO: 122322 - DNA, 2350 bp, Homo sapiens
caggaactgacaaacttttctagtccttttgccagcctgttctgcttttaccaagagtttagtgacaggactacctgttttcaatagttaaaatgtatattttgatcacctttagcacatgctaccttgcacagctctttttaaagccttatgtattctagctatttgaccactgttgtgtgtgattttcatttttgatgcctgatgtgacaggagggggtgaggatgggggtcccataaagatgcagagtaagttgaagaagacaatgcttgtcctgccaccagatgtctcttgtttttatttttgtttttgttttgttatgtgtaaaaacaaatgaacccttgggatattaggatatttcggagcaaggtgttgtcactgtttctcagacttggggaatttagaactcatagactttttaattattaacttgtatgttttgtctttcatacctgaaaggtcgtacttaggagatgaaagaatttttatcccaaattgaaatgtcttagaagaataatatttcagctgggcgcagtggctcaagcctgtaatcccagcactttggaaggccaaggagggcagatcacttgagctcaggagttcaagaccagcctgggcaacatggcaaagccccatctctactaaaacaaaaattagctgggtgtggtggcgtgcacctttggatcgcagctacttgggaggctgaggcaggagaattgcttgaacctgggaggcggaggttgcagtgagctgagatcctgccactgcactccagcctgggtgacagagcgagactatctcaaaaaaaaaaaaaaaaaagaagaaggagtttctgtactcccttcagaaacttgcttcactgatattttcttttctgatcctggaaaggttacatgttttgaaaatggaattgtaaaatgtgcttgtttctaaccctgtttttcttgctctgtttagatgtctagatgattatggatacattcttttcagtctctaaagtctgagggagtccctgtatcctaatttttctgccagctgacatgtagtagaatataagcatccttctgcctttagggacttgcagattatattctttggatggcttacttcagatgctaaggacaaaatttattcattcactcaataaatatttattgatgcttactgtgtgccagctcctgttagagggttggggaataaatacatcagtgaacaaaagataaaatccccctgcctaaaggagatcccatcctaatagaaatgtatgttctttaacagtagattattatcctggaagaactaatctttataattaccagattcttacttcagagcagtggcatttggggagttggtggcaggtctaaccttcagtcctgccctatttactgccatttccaaggaccttgggatcatataatggtagagttgaaagacaggtggaaattctagtccagttccctcattttattcatcagaagtaatgtgcaaattcatatgcatactcccagtgggccttaagatcacctcaagtttctctctgtttcaaactgaagtgtctgttctatactcagaatcatctttagaacacttgagtgagatctctagttcagccctttgaaaaactgatgcttggataaattaagtgacgctctcactttatttaaagatgattgagaattggctatcactggcctattttctggtcttacaagtagttctgccaaagaggctaatttctaactgggaattgtcttttgtccccagagggaaatggaacatgaactggattggaggcacagtcctaaagagagggatactcagagaactttgcagaactttttgggttaaaaaaaacaactactcttttctggtgctactgcagtttttctatcaaaaacaaaatccaggaacaaaaatactctggcagaaaccaggaaaccaaatatcagaaaccaaagagccaactctatggtttctgaacagagtgtaccatttaggatcctgtttagctacctttgggtttattggaaaactactccattgtggttacaagtggaaaacaatttaaaggctcttctttggctttggtacttttacagggtttcacatttctaatagtaaacgcttcagaaagtttgaagaaatatcctattctcagagagagggtaggggaaagcttaactttatttttctctatccctcccctcccagagtccagaaaacgggccctaaattcccaggacagatttgtttcaacctcaggacagttgcttaagcagttaatgctcagcagtatagaacttgtttccttttgttaacgctgaggttgctacggtacttggccag

SEQ ID NO: 122323 - DNA, 1001 bp, Homo sapiens
agccctttgtgttagcatctttcacttagtagagtgcatttgagattcatccatgccttttgtcagtggctcattcttttaattgctgagaagtatgccattgttgtatggatattctgttatagaaatataccggaatattttatccattcaccaggggatagacatttgggttgtttccagttttttacagttatgaataaaactgctattaatatctatgttcaggacttttggggatgtatttattcatgtatttgtgataaatgcctaggagtaggactgctgggtggtaagtgcagtgtatgtttaactttataagaaactgccaaactgttttccagagtgaatgtactgttttgcatttctgccagcaatgtatgagagttctagttgtttcacctcctctccaacacatgtaattgccagtatttttacttttctccattgtataatgtagtggtagatacctcattgtaattttaatttgcatttgcttaatgattaataatgttatgcatcttttcatgtgcttatttgtaaattgtatatcttctttggtgacgtgtctattgaaatcttttgccttttttttttttttaaaggattgtattcacaccatttagttaggaatttcttatgtattctgaatacatgtcttttatcagaaataagtattgccagtactttttcttgtttgtggattgcttattcattttgttaacagtgtcctaacaactaaagagctaagttttagctcttaaatttaagactttgatccatttggagataattttaatattttgtatgagtctggattcatttatccattgaacttccttgacaccttcgtgtatttctagaccctctgttctattgattgcatgttttctttcttatactaatactacattggtctttattactgtagctttattttgtcaggtagtataactcttccaatttagttctttttcaaaatcatttgtactgttctagat

SEQ ID NO: 122324 - DNA, 1043 bp, Homo sapiens
tgtaaccgtgggggcaaggcaggaagcattctgtttatgtaacacagacgtggcattctttactttctaacttaggacatttgtgatttgaagaagagacacctgaattttcaatatgttagtctttgttggaataattggctcttctcattctttagtcatcaaataatacttattaaataccaactaagtgctttgtgccctgctaggcattacttctctttattctacttcttaacagttggaatatgccaaacaaatgaaataaaaatagttttcctattctagttacaggttggattcttggatttatctcccaagctttgacattcagaaactgaaagtggaatatagtgtattctcagatgtaaagttgatctcatttcctcactggccatctgtttatttgcgtctaagaataacaaaactttcatagtcatatctgtattttttaattactaaaaataatgaatggactgaaccatgcttgccccacttttgaaacaattccttctatagactgttgcagtaggaagctaatacccctgattaagaataaagaccagacctacataagcatatgttgtattggtgtatctgaagtcatgaggatgtgattaatggtccttaagagttttaatttggcgtgtcttaatgcctaaatctcacttaagcttggttgcaaagcctggcaaatcagtcttctgtacatggcaagctaagatgtggcaccatcttcttgaggtttcatatcctaaacctgtctgtccttacaggttaaattcaaaggatagggccaagcttgatttgctgtagtcatagtgaatcatcacagatccattcttagtgcagaagagttaaataattccttggccaagagcatggtgccttccccagaccaatttctaacagtgtcctctgttagatctttaagttaataaattcttttattagatttttgggtcagaaaaacagactatgcttgtactcaggagcccagaaatacataatataattgactaattcctgtctttgaggtctta

SEQ ID NO: 122325 - DNA, 1081 bp, Homo sapiens
tgaatcagggtgggcagggagagagaagggatctgttcagacatttccttttggggtcaaatgagaggaaggagtccttgccccttggagaattactgcaaggatctggttgagttgagaatttgtttcccccaccagtattgtttttggtgtttttttgttttgttttatttgttttgttttgttttaacatctctgtttccttcccctttctgttgttgctccttcctcctcccactccaactaccacacaaatcctgacaggagcctttctgcccctctagggaaggggcccgtgtgaggaactcttactggacgcccccttccctgttgctgtgctgatcttacacatcagtttccacggatcccatgtgaatcagttgtcttcctcatttactctgagcaagggtggcagcagcaatagcagaagacgtagatgcagtgactcattttgcatgatgtctgcaagagagccgggcctcccgtgtgctgtggctctcgttcaggcattgcttcagaaacttgattcttctggaattgtgcataagagggccttttagaaaaaaaaaaaaaaaaaagctggaagagttccccttcctgagcttcagtggaagcaacaggagggtgggccacgtccaggacagtgggagagcaaggatggaccctctgtgtccacctccagtgtgtggcactgttttccatctcatcttggacatatcatggggctacagcatgcctcagaagcctgccagaacctagtgatggtttccagcatctgggtttggggaggactgtggtgatgcgctagggatagccatctggaaggggtggggcagagacagcaggagccgtagtcgtctcaggagcctactctgattagcttataagttggcctcttttcatgatttctgggtcattggtgagtggataggagttataggatcctttgtgggtgagtagaagatactgtggcagataggttttactgaacccacctgcacatgtaaatctttcctttttaatgtgtcacctcttcagtttgggtggagaagcttgccacccccaggttcatccctaagca

SEQ ID NO: 122326 - DNA, 1013 bp, Homo sapiens
tagcttttttttttaagtttaagcccatacccattctgcatatttcagagtgaaatgtcctttcgggacaatcttattaaatcactaatctgaaattttatgttccctagttggccatgccagtattttggttagggttttaggtgatttttatatccactgtaaacttggatataacttaccattaaccagatacttaaaaccagggtattttcctaaggtttaacattggaagtggtatgtgagctgagccttgaagggtgacaccaagttttttgacacgaaaaggttggatgagctagctaaagggcttgttttttatcctgtagggcaggagtggttgtagatgccctctcatgtgctgacatactgattgatggtggcttctaaggtctctcctgagtctagtaggaggcaggcttcctaactgtcatggacaccaggcaggcaggtaggggaatgaagcaagatttggcagcgcagctgctgtgagtttgctctccagtggcttggaaatgggaagttaaggattctgatcttatgtgagaccattttcagactgtcctagtctgccctcacatatccctggaatggacacatacaggctggtcagggctttcttggggcactgaggtgggagaagctggaggcctgggcagggtagtggaactgagagtgagaagccccctacacttggatctcttgcgtatcacacgagactcatttattgatgactgcctagctggctcataatactgatggctgaatgggggtatgaaaactggtcctcaagagtatccagtcttattggaggaataatgcaaaaacaaacaaacaaaaaaggataaaataaaagaaacaaaagcccaggtggtaaattttccagtcttcttggagaagtaacacagaaaaaaaggtaaaataaaagaaacaaaagcccaggtagtcattttgcagtagagctcagtgactaagggcagagtaccttgcagaggtgttcagtattttggctt

SEQ ID NO: 122327 - DNA, 1765 bp, Homo sapiens
ttattctctgccctctcatctcagcaagtggctttcatcctcagggtctcctcatggtccatccgaatggaggccaaaaggaggaaaaacagcacgaatgaagagactcatctctcacctgagtagctgcctttaaatagtcttgcatggaactcttccacttccatgtcattctattttcaaagctaagtcacatagccacatctaacttcgaagaaggctgaggaatgtagtctttttgtctgggcccagctaaaaattggcattgtgtgagtaatgaataagagaagaatggagtagtctgttctactaagtcaaaggttgtgtgcagtatcaacagatagtgataaacagtccttcaaaaactttgcacccactttaacactttcaccaaccaatccaaatttttttttcccaaatcttaattaaaaacaaaatgtcctctactgctgtatttgaattgtgttgtctttttgaagcatgagtataacttctaatagaacttaattttctattcagattttaaacttctaaatgcttctgaagtttaaggcagataacctagtttatttaagtttgatagtttattcctgtgacttcgattgctaaaggtaggttttcttggagatgggaaacctgggaaaagagaatgtgtacttctttagtgctggaagaatgtctgcttctttcctcctgcattttattgcagatgctaaccttactcagcatggtttagttcagaagagaaaataaagggagaattcatttatgctttcgagaaaatgtgttgagtcttccacatgccaggcatctccaacataaaagaaagagatgtatctcttttgctatctaactcttcccactttccttcttatgatctgatgtgacttctccatatcttatgtaccttccccccaataacaattgtaataatcatcactaagcgtagtactgcacaaaagagagctatcaggtaaaaggacagaaaaaccacgggagttttaaaatgtccaagtagtatttaaattttaaaccttacttttttctgtttttaaacctcatatatgaatttagacagacaaactaaaacctgtttactatagtaagaatacctcactgtagcttaaattggtgtttttaaaatgatggctttggccaaattctttggcagctaccctagactggaagcattaaaaattgattacttgcaagttgttgctaatagttccttatttctgcaggccttgccactcagcccaaactggggtccctgcataatgtttattgtagctggagtgctgtgctggtgtcctgctgcctaagtggagtgagttgaccctaatttactcctggatgcctgcattcttttccatgcatgtccacaaatagcatcacagcaaattaacagaattttctgattgatgtagggagaaaccaaagaaggcctgtgtttggtggccaaaacaccacacagtatgagcagagtggaactactggcccattttatagcattctaattgataattatcaaagagcacattatttgaccatgtggcaacaatccagtatcatttcagaggtactagacatgtagatgtccgtgaacaccatagtgaatataccccctccttttgccaaaattgaaataggttatccaagaggaaaggggagggaaaagaaaataccaatttcctctttacaaaactgtggcaaatgagatgtcataaaattctgtatttcatgataaagcctcctggctcatcat

SEQ ID NO: 122328 - DNA, 1052 bp, Homo sapiens
aagctagaaaattaactctttttttggaaacttggagagagtctataaatgtcatcgtatgtgtttgctgttggttcacaggcaatgcctagtccattttccttcacagagatctaaagctactaaatactgtcagaagaaagaagaaaatttatgtgggagagctaagtggaaagaggagggaatcctaggtgtctacattcacgacactttacaacagcaaagtcactgtggcgaggggagagacctggaagcacctctgccaaggtaaaattgagggcagtccatagacaagtcgaagaactgaggagaaatgtttcctggcccaggactccataatggaatctgtctggaccctgcagaaactcagtactgttaggactgccttgagatgaggcagcccagttgtcagggagatgggagtaggaatggacataaggtgtctgttcttgtattggtggaagaggaaggtaaaaagaaataaacctaaacctgctgctcacttagctctatttcccacaagcaaaccgcaacattgagtaacagctgaaaaagatggtgactaatgtagatgaaacactgaaaatgactctctgggggtcttctcacccctgctccctttgattaatggtttattgtcgtaaagccttaagggtcgttggcagagccaggtcagagcattcagagtgctggagccatgtatgtctgcctctcttgctttttgtttctcatcctattatcttgtattccttcttattttacataggagaagagaagaaagatggctagagatgatcattgcccaattttatctttcatggttaaggaaataatcagttcacaagctaaagcagtggactgtcaagaatggcaaagtggccaggcacagtggctcacacctgtaatcccagcactttggaaggctgaggtaggaggttcgcttgaggcctggagtttgagaccagcctggaaaacatagtgagaccccatctctacaaaaaaaaataaaaaattagtgaagtgtaggggcgcacacctgtgtttccagcttc

SEQ ID NO: 122329 - DNA, 1095 bp, Homo sapiens
cctgtttcagattaagcctcataatagcaagggccaggcactagcagacatttgcttgatgtttctggcttgaggatccgtaacgtggtgccagctgttttagggcctgaataggcctgccagggacagccaggtgatattggcttgacgtagtcacaggctaattctcccagaacacagaagcctccagacgtgccaccaaggaaagcctggatatgtagaagttcagtttatggctatagtaatatttgggcattccccaaaatagtgatcccagttcaggttaggacatgatagtagtgtccctttgaggtctgtctgagaaaaggtgtcatttctaaaaaattagtgttagcagatgggcagatgtggctccaacaaggcttgcttcatggcttatcatttttccacattttccatccctttcataagcctagggaccacatgctgaacatttaattgaatcacacagattttgtagtctttaaagcttcttattccttggtcacttgttagtggtgcctccctccttggtcagtttggtgacttcagaaggaaatacacagtgcagtggtgagagcttcacttttgaagttagcctcaggcttgatttctagcaccaccacccactagacaaattgcttaacctttctgcacctcagtttcctcctgacaggcttgtttagaaaataaaatgagatcaaatttgtcaagcacagagcattggccctggtaggcaccacatacatgaatttccttcagattgtaggtgaagtagacttgatttgggatttctcttgttacctaggtgcttgtgtagaggagactttagaaccagaatgtgttatttgtggttttgagtgtgcctgggactctgagccaactgaattaccaagtaatgggggccccatggcatcccatgacaggtggagagccggctcttcaccctggatggacctgaaatgcctgctaaggccttgctccaccgagtagcacacaccctatcagtttgcccttctttccatctcttattctagagaccttaaagcctacttgttggtatatattttcaggtttttggaaattgggctgttt

SEQ ID NO: 122330 - DNA, 2187 bp, Homo sapiens
aaaaataataataattaatatgaaaataaaatccaccctagaaaacccaacagaaccgtgtgtggagtatagtggtagtcatctttttcatgctatttaagagaactttcttcctatctaggatttctttttcagttgagggcaggataaattgtgtacccagccctttctccccttgggaaagcctcatatgtctcattttgtttggatagaaaattgattcattattctgatgaccagatgatgattttattctttttatgagggaccagaacctgtcgcttgcttgctgcttgaaaacttaaatgttagtttccaaaggccatctctgtgggtagagggttatcgtcagcagtttaacgggaaatcttgtttctaactggaaatttaattattcagccaagttcccaacaatgtttactttagagcatcgtctttttttttttttttaagtcccttaatggtttaaacttttaagctttaggcaagagtagagtggagctagatttacatatcaggttgtttgtgcaatcttttacatgaaagtttatgttttcttctcaatctgaaaattggttttggccattatagctggtattatatatgacgtaataactctctctgatctcagatacatttttatgctgtcatactttctgcacctgcttttgaacaacatcttagtcccaaagtagataaaatctagcagaagggagtaggcagctaaaaactagattctagcaatatctaaggaaattacaaggatcagttagtgttccattccttccttctttggctatatcaattcctagttttgtgaaagtccacatgccttctttctgtccatgcctgtgcatgctgggtggagaagcatcacagagcagaatgaggtgactgtccccaaggcagggtaaggtcaaggatctttcccctcacctcatgattttcaaaagaaaagcagatctggacctcagttacctaaaataaaataaaattaccctagctcttattctgcacataaaatcacagctttaatctctcatcccagttctcacctttatcttctcaatgatggaaacttggacttaaaggaagttactgtgctatgttaccagatctaaggagactgggaatcattagattggaatcagatcctcagtcaatggaaatataaggaggaaagaccattggttcttggccctaattgcacattagaataatctggggagctgtaaaaatgtacctatatccaggccttaccccatctattgaatcaaaacctctgagactgggatgtgagtgtttaaagtctccccaggtgattctaataggcggggtgaagaactactactgaagggaaattgagggcctcttccagagaattgcctttgaaagatcctgtcattatacaccgaaggcgcccacccgggcctgctcctgaagctagctgtttgcagtgctctcctgtggcacgcagacctctgggtctccctgtgaattggggttccattgggctgttcaaaaaacctttgtcatctgtggttcagcagacgcgtatgttagaattcaggcatttggcaacctcattctgaattgtcagtacccacaagtcaagcagtgagacccacttgaaatgctggtcctgtacacaaagtgggtgagcactgtattgaaagacagtcctttccagtgctttcccctgaaattccttgtaaggaccaggagacgcctgcagtcggcctggtgggaagtagtgggcctggctttggagttaaccataactcattttgctgctccagacagtcctcctcccaccccaccccaccccacctcaaaaaaaaaaagagagaggagggggttgtctttaaagaaaaaaaaaaagcaggggcttttaagagttaaattacacaactcgctttttatttttaaagtgagcagatttcttgttgtcgttgctgagaaagataaattgataccacatgttgcttccagacaaaaacctctctgtgttccaggggaagcacatgcagctggtgtctgggtgagtggacagtctccacaaggtaaacatggtttggaagggctgaagcggacgtagggtacaaaatttaagaaattaccagttacttctgactggcacggcacctctgaaatacttttttaaagtttgaaatcctttcctggaag

SEQ ID NO: 122331 - DNA, 1050 bp, Homo sapiens
ccatgtcacactatggtaaccagacactccaggacctgctcacttcggactcacttagccacagcgatgtcatgatgacacagtcggaccccttgatgtctcaggccagcaccgctgtgtctgcccagaattcccgccggaacgtgatgcttcgcaatgatccgatgatgtcctttgctgcccagcctaaccagggaagtttggtcaatcagaacttgctccaccaccagcaccaaacccagggcgctcttggtggcagccgtgccttgtcgaattctgtcagcaacatgggcttgagtgagtccagcagccttgggtcagccaaacaccagcagcagtctcctgtcagccagtctatgcaaaccctctcggactctctctcaggctcctccttgtactcaactagtgcaaacctgcccgtcatgggccatgagaagttccccagcgacttggacctggacatgttcaatgggagcttggaatgtgacatggagtccattatccgtagtgaactcatggatgctgatgggttggattttaactttgattccctcatctccacacagaatgttgttggtttgaacgtggggaacttcactggtgctaagcaggcctcatctcagagctgggtgccaggctgaaggatcactgaggaaggggaagtgggcaaagcaggtcagtgccgaatgctatggcataaaaataacaatatggggatgaggggggatctctgggggagcctgtcttctctttactttgaactttattccacactgaaaaccatggagcagtggtgcacataatatggctcccagccagttccatctcagggttttacctgcaaaccaaatagggctgtcaggtgccccccttcccccgcacagtttgctgatagttcagaaatctactgctcgtgaagagaacacgtacgcattcagagatcgcattctttttttgcatccagttgtcctcactggcctgtgacgcaggttgccctacttgatggatggatgagaagagaaggagagggatgggaagcttgggtcgtac

SEQ ID NO: 122332 - DNA, 1066 bp, Homo sapiens
ccacaactatgggagactgaagcaggaattgcttgaggctaggagtcagagaccagcatgggcaacatagcaagactctgtctctacagaaaacttaaaaaattagctgggtgtggtgacacatacctgtagcccctgcttctcaggagaatcccttgtgcccaggagtttgaggctgcagtgagtcatgatcgtgccactgcactccatcctgggtggtaaagcaagaacctatctcttagaaaaaaaaaaaaaaaaagccaaaaaattaatttgaaaacacaggtgtttgtatgagggagtacttactcgtgtgcttctgcttgttcaccaaactataaatgatatcagcagtttccaaacatagagtgacacaggttgtgaatggtgatggagattttttcaattgtggcattttaatgttctcagaaccacaaagatcaggcagtgtgatgtaagaaaaagcatttgattgaaatcaggaattgaggttcaggcccacttctaccactttcttgctaccactatggttgtgtcttaggtctctgagtctcaacttccagttttataaaatgaggataatagcccccattacttcacagggttattacaagaatcaaatgcactaaagcatgtgaaactgcagtaggctgaaatatgtaccatgcaactaggtatactgacaaatgggcaagcaggtagcccagagaggttaagtagtttgcccaaggttacagagctaggttgatttctttttttttctttttctttttctttttttttgagatggagtcttgctctgtctcccaggctggagtacagtggcgcgatctcggctcactgcaagctccaccttccaggttcacgccattctcctgcctcagcctcctgagtagctgggactacaggcgcccgccaccacgcctggctaatttttttttttttttaatttttagtagagatggggtttcactgtgttcaccaggatggtctcgatctcctgaccttgtgatccgcccgcctcagcctcccaaagtgctgggattacaggcgtgagccaccgtgc

SEQ ID NO: 122333 - DNA, 1051 bp, Homo sapiens
tggaaggtgaccctaatgtttacctgaaaatgctgcctgcccaccgagtaacaaaagccaaagcactccctgccccactcgtcaggttctactcagactgccctgctggctggagtggggtgccccatgggaggcagccccagccggcacttacaccaaggtgcaggtgcaggccaagctgtaagaagagggccaccggggccacacacgcagattcccctcactaccggaatctgcacacctggccagggcactcctttgtctccctcagttgtggagccaccctggagttcctctcagttcctctgtggcactggtgtgatggttgttacatggccaccatctgtgtcacctgtgtgtcctggtcataccttacaggtggtttggactatttgtagaactcaactagctgattctgtgttttcagtttcagaatcacttggaaaaattagattgtctctcagaatcctgtgtatctaaagcaggaaaagagcgctttagagatcctcccttcagtatttggtagctaaaccctgagatggactggcaattacacctgcatttccacccaccctccagggatctagggcatcccagcctgcacactcctatcattcatccctgccccgccccccacatacacacaccccagtaaatgcagtgaagagtcatacaggatagggtcacacccagcaaacataaacattgtgatatgcaggtcatgtttgatgactgaacatttcctcctgtactacaattccctattgtttttaaaaggtgaatcactttattgacagcagcttgaaacttagagtagcaagactcttaatttgggggctggtggtaaggatatctatggtgggatgtacagaaaggataggagaagataaaccttttattaaatacttgagaattagttgaatgttaaaatcgtgccttgtattgatttcatctgtaagaaataggagttttagaaattgaatgattggaaaccatccttttcacataaagtactgcaaatcctaggtcatatcccaccaggcagtaggtt

SEQ ID NO: 122334 - DNA, 1292 bp, Homo sapiens
cagctttgctgtgctagccctgggctctgaggtgggtgagggagatggaaggccttgacaggtggccctcaggtgcccactattgctgttgcagtgcccttaatgatctctggttttcttttctcctcctttagaccctcaaactgacacaagacctacagagaaaaccctttgccaaatctgctctcagcaagtggacagtgataccgtttacagcttaacacctttgtgaatcccacgccattttcctaacccagcagagactgttaatggccccttaccctgggtgaagcacttacccttggaacagaactctaaaaagtatgcaaaatcttccttgtacagggtggtgagccgcctgccagtggaggacagcacccctcagcaccacccaccctcattcagagcacaccgtgagcccccgtcggccattctgtggtgttttaatattgcgatggtttatgggacgttttaagtgttgttcttgtgtttgttttcctttgactttctgagtttttcacatgcattaacttgcggtatttttctgttaaaatgttaaccgtccttcccctagcaaatttaaaaacagaaagaaaatgttgtaccagttaccattccgggttcgagcatcacaagcttttgagcgcatggaactccataaactaacaaattacataaactaaagggggattttctttcttcttttgtttggtagaaaattatccttttctaaaaactgaacaatggcacaattgtttgctatgtgcacccgtccaggacagaaccgtgcataggcaaaaggagtggagcacagcgtccggcccagtgtgtttccggttctgagtcagggtgatctgtggacgggaccccagcaccaagtctacgggtgccagatcagtagggcctgtgatttcctgtcagtgtcctcagctaatgtgaacagtgttggtctgctggttagaaactagaatattgatattttcaggaaagaaatcagctcagctctccactcattgccaaatgtcactaaagggtttagttttaaggagaaagaaaaggaaaaaaaaaaaaaacaaaaaagtcctgttttgctttgcagaacaaatgaacttacaggtgagcattaagcttgcagtgagaaatgtgcgaagagtaaaaacccaagtcaatgctgaggcagttctaacttcactgttttcctaaatacacatccttgattattttcagccttgctatataatctgatctgctagaagtgtatgagtgagaggcaatagcatacaaactgattt

SEQ ID NO: 122335 - DNA, 3945 bp, Homo sapiens
tgtataggtgctttctgtttaacctggaaagtgtgattatattcgttaccttctttggtagacggaatagttgggaccacctttggtacataagaaattggtataacgatgctctgattagcacagtatatgcatacttctccaaagtgatatatgaagactcttttctttgcataaaaagcattaggcatataaatgtataaatatattttatcatgtacagtacaaaaatggaaccttatgcatgggccttaggaatacaggctagtatttcagcacagacttccctgcttgagttcttgctgatgcttgcaccgtgacagtgggcaccaacacagacgtgccacccaaccccctgcacacaccaccggccaccaggggcccccttgtgcgccttggctttataactcctctgggggtgatattggtggtgatcacagctcctagcataatgagagttccatttggtattgtcacacgtctcctgcctcgcttgggttgccatgtttgagcgatggccctgttgatttcaccctgccttttactgaatctgtaaattgttgtgcaattgtggttatagtagactgtagcacattgccttttctaaactgctacatgtttataatcttcatttttaaagtatgtgtaatttttttaagtatgtattctattcatatggtctgcttgtcagtgagccagacttgcttactatattcctttataataatgctagccacttcctggattctttagtaatgtgctgtatgcaagaactttccagtagcagtgaaggagggttgcctctccaagcttcctaagggatgctgccctgtgtggggatgcattgcagaggcactagtagcatgggggctagagtggggagcgagatgtaaaagggtggggggataggagaattccagagtgcttccagcattagggtcctgagaacttctgagttcagagaaacatgcaaagtgactaacaaaatagctacttacctttgcagttttacagaccctgggagctgctttgggagtgagaaaggcaaccctccaatgtgtttcaactttaaaatgttgaattcttttcagacatggtatctcatttattctccttttctagcgtttgttgaatttcaggcagaatgtcttacagaatgtcctagaaccagattatcatttaatctgaaacagctgaggaagggacagagaaggtacaagggcaaggcagcacaaaacagatcaggagaatgaagagggaatgctttggttttttgttttgttttgttttttctttttcaagtaactaaaacagcatctacatgtagagtgttgtggagagctgagaccagggtaaagtcaagtgcagcatcagtactgcgagacccaccagcccctggagagggtcagccgagaatctggtagtgaagcctgtctagggtcccggcaccctcaccctcagccacctgcagagaggccagggccccagagactagcctggttctgaagtgggcaggggtgctgccagagccctctgccccttatgttgagaccctgctttcaggacaggccagccgttggccaccatgtcacattctgagtgagtgtcacaggtccctaacaataattttctgatctggagcatatcagcagaatgcttagcctcaaggggcctggcagctgtaatgtttgatttatgatgagaactatccgaggccacccttggcctctaaataagctgctctagggagccgcctactttttgatgagaaattagaagagtacctaatgttgaaaacatgacatgcgctcttgggatctgctgttctctccagggctccagaacctgatacctgttaccaaagctaggaaagagctttatcacaagccttcactgtcctggcatgagaactggctgccaggctcagtgtaccccattaactgtgaatgaatctgagcttggtttcctttattgcttcctctgcaatatgattgctgaaacacattttaaaaattcagaagcttgtcactcctgttaatgggaggatcagtcacacatgtgtagtacaaggcggactttgtgtttgtttttggtgttaatttttagcattgtgtgtgttgcttccccaccctgaggagaggacaccatggcttactactcaggacaagtatgccccgctcagggtgtgatttcaggtggcttccaaacttgtacgcagtttaaagatggtggggacagactttgcctctacctagtgaaccccacttaaagaataaggagcatttgaatctcttggaaaaggccatgaagaataaagcagtcaaaaagaagtcctccatgttggtgccaaggacttgcgaggggaaataaaaatgttatccagcctgaccaacatggagaaaccccgtctccattaaaaatacaaaattagcctggcatggtggcgcatgcctgtaatcccagctactctggaggctgaggcaggagaatcgcttgaacccaggaggcggaggtcgcagtgagccgagatcatgccagtgcactccagcctgggtaacaagagtgaaactccgtgtcaaaaaaaaaaaaaaaatgttactcatcctctctgaaagcaaaaaggaaaccctaacagctctgaactctggttttatttttcttgctgtatttgggtgaacattgtatgattaggcataatgttaaaaaaaaaaatttttttttggtagaaatgcaatcaccagtaaagaggtacgaaaaagctagcctctctcagagaccggggaggcagagtactactagaggaagtgaagttctgatggaatcatgcctgtcaaatgaggtcttgaagcggatgcccaaataaaagagtatattttatctaaatcttaagtgggtaacattttatgcagtttaaatgaatggaatattttcctcttgtttagttgtatctgtttgtatttttctttgatgaatgattggtcatgaggcctcttgccacactccagaaatacgtgtgcggctgcttttaagaactatgtgtctggtcacttatttctctaaaattatctcattgcctggcaatcagtcttctcttgtatacttgtcctagcacattatgtacatgggaaatgtaaacaaatgtgaaggaggaccagaaaaattagttaatatttaaaaaaatgtattgtgcattttggcttcacatgtttaactttttttaagaaaaaagttgcatgaatggaaaaaaaaatctgtatacagtatctgtaaaaactatcttatctgtttcaattccttgctcatatcccatataatctagaactaaatatggtgtgtggccatatttaaacacctgagagtcaagcagttgagactttgatttgaagcacctcatccttctttcaatgcgaacactatcatatggcattcttactgaggattttgtctaaccatatgttgccatgaattaactctgccgcctttcttaaggatcaaaaccagtttgatttgggaatcttcccctttccaaatgaaatagagatgcagtacttaactttccttggtgtttgtagatattgccttgtgtattccacttaaaaccgtaatctagtttgtaaaagagatggtgacgcatgtaaataaagcatcagtgacactctatcttactccaagaagtctctttgttctccctccccctttcttgaaccctaggaataaaatggcagtttctctcaaggtcttcctgtggaattcccccacaggctgggagagccacaaagctgagagactcttatcacaaaatctttaaatgaacctagtaaacgttttctctggcccgcttctgacctccacagacaacagacaacttaataaaggaagatttatggcatagttcatggtggctgatagccacttttggtgtgttctgagtcatgttgcccaggg

SEQ ID NO: 122336 - DNA, 1070 bp, Homo sapiens
atcacctgggcatgtattaggaatgcagaatctcaggccccccccagcactaccgactcagaatctgcattttacaagatccccaggggatgcatgtgcacagtgaagtctgggaaacactgttgtggaagcttcagaaactgtaacacatggcagaatggagattccttctgttcccaggaggaaaataggaaatgggaaccttaataaatgtttaatgattaggtatttaaaataatattgtttaaaacccccagaaaataagcgggcttaagaaaacagaagaacacagcggacaccaggactctaagatagcgtcagttgtaccagtgaaggacaagaaacttctggaggtcaaactgggggagctgccaagctggatcttgatgggggacttcagccctagtggcattttcggagcgtttcaaagaggttactactggtactacaagtacatcaatgtgaagaaggggagcatctcgggggttaccatggtgctggcatgctacgtgctcttcagctactccttttcctacaagcatctcaagcacgagtggctccgcaaataccactgaagaggacacgctctgcacccccccaccccacgaccttggcccgagcccctctgtgaggaacacaatctcgatcgttgctgaattctttcatatcctaatggcaattaacctccaaataaaagatgactggtaaaaaaaaaaaaaaaaaaagaaagaaagaaaacagaagaacatttctatattgatggaaatatatattattcctaatatctggaaatatatttgaattggttgactaccttctactagattgtgagtccttgaggtcaaaaccacaatttattactctttctatatgtagtatgtaggatgtgttccatacttaataaaacttcatgaaaaaaatgaatacaactcactttccttttccccaacaaatcttacatttttagtaaaaagtggcaaaggaaaacaaaacaaaacaaaaccttgtatcagagttttcattaaaacaataagaagaaaaaacaaaaatgaaaacaaagaaaagaaaaa

SEQ ID NO: 122337 - DNA, 1018 bp, Homo sapiens
cccaggttggtttttagcagtctgagtcttacacatggccctgggagacttcaggaatgatcccaccaggagccaactcccctctccaggactgtgtatttaaagacagacagttgctgctggaggtttaggaacacccttgagaataactggaagttagatgagtgtcacctgtgctccctcctttccaccagctgggactctttcactgccgtggagaagcagctgctgcctgggtcaggttttgcagtatctgtcgattgggggagccaactctgggagtggtgggtattggggaacccactgctgtgtgatggataaagccttaggaagaatgagttaagtcccttaacaggggttctgggtttgcaagccactccccgtttccccataccatctgtaaaacaagagacagctgggaatcctgaacttttactggtctgcatttgctctcttccctcgtagtccacaggttcatgatggcgctgctggatgctcagcatcaggatatctgcttttctgcctgtggtgttctcctcaatctcactgtggataaagacaagcgtgtcatcttgaaagaaggaggtggcattaaaaagtaagtttcagggcgtagagtactgactctctcaggatttgaaggacatcattttcttgggagctttggccctttcatcattcctgtggggcaaaggtatttcaacattgggaagcccctaagctgaggctaaagagggggtttagattccactggatacttaaaatagtgcagaagtaggccaggtgtggtggctcgcacctgtaatcccagcattttgggaggccgaggtgggcagatcacttgaggccaggagttcgagagcagcctggccaacatggtgaaaccctgtctctactaaaaagacaaaaattagccaggcgttgtggcacacgcctgtaatcccagctattcaggaggctgaggcaggagaatcgcttgaatccgggatacagaggttgcagtgagtggaggttgcgg

SEQ ID NO: 122338 - DNA, 1028 bp, Homo sapiens
agctggtcacatctggggggctgagtggagagagagtgaaagacataaaggccaatgtgtaaggggaagagactattagtttttttttgttgttgtttttttttgagatgagactattagtttttaaactcactgagttataaaacacaaccttttgcatgttgcagtatgggaattgaaaaaaagattggagtgtaagtgaagctgggagttagggataaaagccagttggattgtcagccaaatgacaatgatttttaccatgctacagagctatagatatagaactgtacttgaccacatttattcacatttgttctattccctgtatttaggactattgctgggaagatcatggttattctttggtaaatcgcctttatccagatgtgggacagttgattgatgaaaaatttcacattgcttacaatcttacttataatacaatggcaatgcacaaagatgttgatacctcaatgcttagacgggcaatttggaactatattcactgcatgtttggaataaggttagtcttctttctgtgtttataaagagatgttttcctctgggccaaattattcaagtgcttggagcgcacatgcacatagacacacacataatcaaaacccatcccctccccaataacttatttttatgctatttatgcttcaaagaaccactttattgcagcttagttttttcttctctttcctagctaggcaggagggagagttagggaccttgacaagaattgaatgacagctgcctccaggaaagggaggacaagcaagctggtcctagaacaaagtttgtaactgaacacctttagtatcttttctcttcatataatctatctcttgatacacttatgtttctacctccttggaaatcagtacccttatattgcccctctggctgttcttaggctccttctgaggagtacttgctctcataatacgtaatcaaaatgcaaaactttcatgtccttgctgttaggttttcagccatgttactatgttacattgaaa

SEQ ID NO: 122339 - DNA, 1022 bp, Homo sapiens
ttaacttgcagttgttttgagtgtcaagcatttttcaaccatttgtattttcttttccttgaactgtgttgtttgctcatttttaaaatacgattgttggtcaggtgcggtggctcacacctgtaatcctagcatttgggaggccgaggtgggcgcatcacgaggtcaggagattgagaccatcctggctaacatggtgaaaccctgtctctactaaaaatacaaaaaattagccaggtgtggcggcacacgcctgtggtcctagctactcgggagacaggagaatcacttgaacccaggaggcagaggctgcagtgagccgagatcatgccactgtactccagcctgggtgacacagcgagactctgtctccaaaaaaaaaaaaaaagattgttggggattttcgtattgatttatagtaatctttctttaaaatttagccctttgttatttgagtggcaaatataattcctagctttctgtttacttttgactttgtatatatttatttttcccatgtgaaagtctttatttttatgtcattaaatttatcaatcttatattttatgacttttggcttttgtggtattcttaggcctgctgcactccatgagtgttttcttctagtactataatgttttttgctttttttctaagttttcatttttttcttacatttaactctgatttattgtggggtaaagcatgttatagtgttccagcttcactttttttctgaatggctatccagttgtcccaagatcatttgttgaataattcattttcccccatttgaaatgacaccttttcgtatactaaagtcccaagtctcttagttataaaacagtaataaacccttgaaacaggcattttcctaaaatacattttgtttaagtaagacagttttcaagattaaagaaattagaggggataaatgttaattttagccttagttttgtccaataggtattgtttcaaatgtatgtaattggatgagaaattcagcagttagaaaagctaag

SEQ ID NO: 122340 - DNA, 1054 bp, Homo sapiens
tgaaagttgcctggcataaatttaacacagagagaaggaagattatgtcattattcctgattcccttggtcattcgtcttgtggagaacaattgctacattccagtaacaagttttctgaggcttactaatagctccatgacatattaagtactgatctcatttaattataatttcagtgagattaaattattctatgtagttaaagtagaatcgagcatcctacagatgctgcactaattatagttattgatggcctactttttctgacctaaaaaggtaaatgagggagggaattgtctttgcctttgaggaattttccctctaaaatagattagttcactgtcattgctgtttattttcacctaacacttttctagaatcttcataaaactgcacagtactgaactaatcaatagaaaaggcagatgaatattctcccaaaggaaaaaaggcttggcaggtcaaatcaagcatgtcagatctctcttgccactcccaattagaaattgtaaagttttataaacaggtgctttaagcaaaagatgggatctgtggatcaggaatacatacacaagacactaattttaaaagctattacatttcttaaaatacttatctaaaaattctccttttaaattttttagaatctattctagaaaaaaaactcaacaaattatcctttgttaatgttttatttagtggtgtggctttttccacagattagattgtttactccttaatataaatgtgtgtgtgtgtgtgtgtacgtgtgtgtacacatgtgtttgtcttttttgttgtttgttattgtttattaatgtgtgattaacagaggcctagctttggtgctttcaggctgagaactaaagggatgatttgtagaaaactaaagtaggtcaaagaataccatggtgtagcaaaggggaagtccctgtgtttagtcacattgttttgcctctggtggagttcactttcattgttatagtctaggcctgtcttcctgtgagtggaagaaatcgtcaaattgcagaaaagtctcgggaatattatca

SEQ ID NO: 122341 - DNA, 1287 bp, Homo sapiens
ttctaattatagatagtatcttctattataatagagaaaaggtatagtaataatttcaatattttaaagtaatattaaagtaatttaatattttaaagaaaataatttttttgtattttaataaggggtcagtattttaagacaccaagaatattacaatcacatatgtcagaaagagaaatgtgtgatccagggtcttttctacacctgaacacacatttatcttattttttggcctgcaacctcgtccttattacaatggcccaatatcttgcttttctttgttttttcatcctctagtcatattgttacacatttgaggctatttaagaaagaaaaaggactctgcttcagagttttctccctatgtcttcatgatcaaatagaaaggaatgtgtgagagggacaatcaggtgatttttaaaaccaagtgaatttatattttagttatttcaatcacagtgaattgttacttcttttaatattggaaaaataaaaagaaacaaatctctgaaaattgaatgagtaaatgaaaacaggaaaagaagaaactaaataacaatagttattcttataaatctgagaagcatcataataatagtattaggggaaaataattttttttataaacctataagaacactgatagtgataatgattctcagacatgcctaaagttaaggaaaatatatgcttataaaggttatgataatagatgtgaaaatgggaaataataggaatagagaactgaaaagagttaatgggctattaaattcgggaacttaaggagagagggattggaaataagtgcaaaattttgcaactcaaatagcacagtttcttatgtgacaggtaacctatgttacatacttgatgaggaaaacaagaggacacagtactattcttgataacttttttaaattgtcacagtatgtaatatgaagacatttaggcaactagagggtgtagaaagtaaaacagaggactggttattgttgctgttgttgctgttttgcctctgttacatatgtagagattgctaaattgttactagtttatcaccacacagattttgccaacctgaaagtgtactctcagcgatatagacttgtttatacttcatatactctatgcttgctatccctccctccctccctcccttccttccttcatctctctccctctctctctctcccacccactctcggtctttccctttccctctcccccaccccacctctcctctcccctcccctcccctcccctcccctcccctcccctcccctc

SEQ ID NO: 122342 - DNA, 1029 bp, Homo sapiens
tagtatatatggtccattgttgaccaaaatgttattatgtgacacgtgactgtatgtcccaatactaatagcggttatctctcttggcagtggtttatgcttttcttaatttttccaagatttctataatgagttaatctattataatgagaccaaacacatgtcattaaaaagaaaataagtcaaaacaccactttctattcatagaagagtggcttttaaggtaagtagaacttcagtaaactgtactctctgaaatgtctcttctaatatggtatataccaacttttaaagctgagatttttatttagaaataactttctttcaaacaccttggctgttaatgaagaatattttttcctaatgagttttgcatttgtgggttttttcccctttgtgtttacactgaataaaaatttactcctaattctcagcttttagcttttatgagcgctagatggcactcttgctcaaccaaaatctagtttgttgcccatattttggtgctgtgggtcttaggagaagacgggtttgcaatgtcacaacacttatgtttttaaaggggggttggggaaaagagaccaaagtttccaagtttaaatagccgagcttaactgatttagtgtttccatctattgagaaaataaccatataataacaacgataacagtcattcatttcacaaatattttttgagcacctaccatctttagtactgttctaggtactcatatgcactaaagggaaaaatagataaaaatcactaccctcgtagagcttacattcaaatgcttggatttttttttgcaggtgccactttaaactctgtacatgcattcacccatttaataggaggctgagacacaaagaggttatctaatttgcccctgttcacctagctagtgcagatggcagagcaaggattcaaactcagacatttggtctccagagtttattttgttaatttcaatactatactgcctcttgaaactaaaaaaacaaacaaaaaaacactttattttttattct

SEQ ID NO: 122343 - DNA, 1058 bp, Homo sapiens
aaaccagatcccagaggggcttataggctatttaagggttgtggactttatcatagaaataatggaagccactgggggattttgagcaaggtagtatagtgattgatagtgtgtcagaaggatcactctagagaatggatttccatggtcaaaagtggatgtgtgacatcaattaggaggttgtcctactagcctatgacaaaagtgatagtggactaggatgtgaggtagggcaggagggagtggaaaaaattaaaatgggtctgatagatatcaaggagttagaaaccacaggatatagtatttagttggatttagaagatgaggaaaataacaaaattaagcatggctctaaagtttttggcttgaggtacttggtgaattgtgcaattgttttctgagacaaaagagtggcagggggtcaatttaggggaaaaatgactgctgttttagacatgttgagtttaagttgcctatgagacatccaagtagaaatagctcctaaatgaatttctgcccccgataccgctgttctagttctgtcactgctatgtcttcttctccagattaaactcaccctccacttttatatctatcctccacatagctgtagagccatttatctaaaatgaaaatctatgtaactttactggcaaaagccctttagaatagaattgaatttaaacttcttaatgtcatatagtacccagcattatctggctttcacttacctctccagcttcactgcctaccattttagcatcagcctcacatgagaaagcaaatattaattcaaatgtagcactccataatgctttctgttattcattagtaaagcagcaaaagctgtggtgcatatgcaatttctgcagctgctcctgaaagcccttaattgctataggtcagctaaaagggctgtagttggcaagggagaaacgatgacaaggtggtagaatgaattcaattccaagcagctaaatctgttaaaaaaaaaaaaaatggacacattgggagatagcatcttttgtttataccccagttctcaatttattgattcc

SEQ ID NO: 122344 - DNA, 1059 bp, Homo sapiens
acgttgcctgtgggtgcccgcgaaccaacggttagcggtggcaggggctgactgagagcgtctgcttggtaagcactgtaagctgggttgtcacctttccttgacagggtttttccttcctccatttcctctgggattttggagacaaagccatctagggtggcctcccttagtccaaggactttttccagtgacttgcgtgggaaggactagtccagctgcccaagcgcggggtgtggtgggtgaggcaaggatttgggatcctgatcccaagggtcgcagggagcggcctaagtaaggccaagaaggaaggatgctgtggaaactggagcttcgcgctgctgcctctgattccgcccttttttgtggacacacgcggggtggatttgggatctccgcgcatttgcacctttgtttgcctttgcttagggatgttctgggctttatttgctcagtcaaatgaaatcctaggcagggctttgaaagcaagttgtcaaatccatctcgtaaaagaatccccagtattcctagataggaattcttgcaggctttaaggatacagcaggaaaaagaaagcaaaaccgtaaaagtctccaaaacttagtcgactttttcaaaagattcagtcatttgcttaaaattagtttgcttttaaaaagttattatttgagaaaagtcgaggtttgaacggccatcagtggactgataatcggtgtagattttaattctttacattgcagaattgcattgcactaaattctaaaaatttcgtcttgctaggcactgagtatacaacaatgaaaaagacagtcttactagttagaggaactagttgttagacatacggttacaataatacatgatatcactgggatgtctagaaggagatgacttagcccaatcttggaaagtcagggaaatcttcatcccaggggaaatgaagaccaaaagaacagcatatgctaaggcccagagtgagagatagggtactttcaggaaacgtcagtaagccaaatcatgcatacttggcggtgtggggtgggacgggaagggtgcttt

SEQ ID NO: 122345 - DNA, 1962 bp, Homo sapiens
aattattattactgttgagtgtttttgttttttagaggcagggtctccctaggtcacccaggttggagtgcagtgttgctttcatagatcactgtaacctcaaaccccttggctcaagcagtcctgcctcagcctccgaagtagctagaactacaggcatgcacctccacgctcagcttactattgagttttaagagtgctttgtatattttggacacacaagtcctatatcagacctgcattttgtaaatattttctccaagtctgtggcttgtctgttcattctttaatagtgtcttttgcaaagcagaaatttttaattttagtgaagtccagctttcatgtatcatgcttttcgtgttgtagctaaaaagtcattgccatacccagggtcatgtagattttctcctgtcttccagaacttttacagctttgtgttttgcatataggtttatgatccattttttagttttttttttgtaaaaggtataaggtctgtgcctagatttatgtttttattaaaaagtttctgctggatctgaaattattattttgatcaataatattaaaaggtgaaaaacttttttttaaagaccattatactgaatctgtacaactatattggtgccattcttcaaaactgttccttgagagagagacctgaagtcagcctaaagatgaggccagggagaactttatctggaatgtatcaggaaaccggactaacagttccattttagttatctgttgtcagcatgtgcagttggctgagtgctgtaagtgaaaattgttaggaagactttctacaattaagaatattattctccaattgaattaccttgttacttgtctacattgctggtttttgtttttgtttttttgctacttttttgcctagtcttacaaggttgcaaaaatcaacctgtgatttttccacaatagtttgacccttctctacaatgaaacactgaagccatgtaaacttaaaatatctctttctatgataactgacttcaacttaagtttttaaaggaaattatactaattatttactgtatagtagcataagcagttttgcctctaaatgcttccttagtttttcttttggcttgttgaaaaatgtcttgtcaaccaagtactatatgtgtacttttatgtgtggggtatatgtgtattgcccaaatgaatcataaaggctcttaatttgaatctgtatattttatttttaagttttccttaacaaggtcgatttgaattccttaacaagattgatttgaatgatattcttttcagcccttcaaaaacatattttctgaaacactgtcatacatactattctcagaataccatgccccttttttctatgttattttggttccatctttcaggaataaatgagtaaaccacttaaatcaagtttactcttcagtattttctccagtttttctgtttttggtgtctccaaatttactatagtatgctttgaatgactaaatctctagtatttctgacatatattaatggatagatttttaaaaaccaataattgttgaatctattttcattttgctcttcttgaaagatttgtgagcgagctctagcaatatacgcaacatacaatatgaattttataaaccagtctcactactgattttattcttatttttctacttattttccttatccacattttacatgaatatatacatatataggggtaagatattaaaattatatgtcatttttaaaagcattacatatttcaaacaaaaaataagagtaacaaaataaatacccttttaaactaccccttggaatgaacaaatgttaacattttacctagtttgctttagtttttgtttttttttttttcaatgaaatgaaatatcacataggttgtgaaagtgctcttggcacagtcatatattgtctttgtcttttaaaaaaatgttacatagaaga

SEQ ID NO: 122346 - DNA, 1049 bp, Homo sapiens
gccaatttatcttcataattttctttgtaacatggatcgtcccctcttcccctaacttttcccctcttccggagaaaagcccatgtcctcctcagatcaaaatttttgtgttcatttactcgtttacctcattttattgagcccctgtgaacacatccgagagatacatgatgaataaaatacagttctctctcttgaagatctaatacactgatttgatggaggaggggagccacctatacaggataccccctcatatctttactcatcatgactttgcatttacctatttaatagcatcagaaaaatgctctcaatatatatttttgtaaagacttcttcattaaatctatgatgtcaaagattataagtcacagcattattttatgtatcacaaagaaaaactgctgccaaatatagtttaaatgtgaatcctgattttggagatgttaaatgtgaaaaaatgtatgtattaacatacagtagtaaatatttattaaatattagatgtattttgttgtatgtatttctattacattaattgaatttagttaccaaatgcttattaaatgactgccatgttaaaaagtccagtgtaatagaataatgaataagatgttgtccctgctcttaaggaagtataaaggaaggcaaatgggtacagacattgctagaataaagctttgtttgccatattgttaaaatccattcatctgtaaatggacacttaggttgtttgtatatatttcttggctattgtgaataatgctgcagtgaacatgggagtgcagacacccctttctgtacttattttttttttgctttgggtatatacccagcagtgggattgctggattatatggtaatgctatttttcattttctgaggaacctccatactgttttccaaaataactgtgtcaatttacaataccacctacagagtataagggtttctttttctccacatccttgccaacatttgttgtcattcatctttttgataatagccaatctgacaggtatgagctgatatctcattgtggtttt

SEQ ID NO: 122347 - DNA, 1038 bp, Homo sapiens
aaatagctaaaagagataattttaaatatctcactacaaagagatggtaaatatttgaggtgatggatatgctaattactctgatatgatcattccacaatgtatacatgtattgaaatatcaccttataccccataaatatatacaattattatttgccaattaaaataaaactaataaaaatacaaaatgtaaaactatatttgttaaagcaactaaattaatcagataaaccatgattaatacatacattaaaatatggctaaattaatgatagttgattttgtaaaagttatacattaacaacttcaaaaatcttctattgttaattttttattctttcattgttagaagttaggggtagtagtggataaaagggagaaatggtaggaaatatttatttatgggtatatatgtattttttttttaaaggagagaaaagagagaaatgacactccttcagagtgtcattttaaaggaatttcatgttgttctcagttgtagtctccacactactctatttgtagggaaaacaattctagtagttgtaatgtttgttttctttgggaaatttacaaattagattacgctcagccaaacatgtttctctgtttgtggatttatacaatggaaaaatgttaactttaagctggcatctatgtgctatcagtagttttattagttggcccacccattgtcggtgtgtgcactcagggaatgcaaacttattttaattttggcttaaataaataacgttaagaaaataaatctgttattttttttaaaaaatctgaagccaagtataaagaaaaatttgattatttatgatttatggaaagcagtacagaaatcaaaagggtccacagttagagtccggagacctgggtttgaattctggctttgctattcattttttatacatattcaattagccaagtcacccaatcttttcatctgtttcctaatgtgttaaaaagtgactgtagtaatagtaatagcattctttaaggttgttaagactaaatttagcgtgtaaaa

SEQ ID NO: 122348 - DNA, 1086 bp, Homo sapiens
ctggtggtaattggaaggccctcagcactttcagcatttggcatagtgagatgtaagttaaataagcacattggaaacggatgaaaaattgcaacattaagaggaaagtaatacatatttttgtaggtgcattttaagtaaaatgtatatagttgttgttgttgtttttgagacggagtctcactctgtcgcccaggctggagtgcagtggcacggtctcggctcactgcaacctctgcctcctgagttcaagcaattctcctgcctcagcctccttagtagctggaattacaggcgcccaccaccaactccagctaattttttgtatttttagtagagacagggtttcaccatattggccaggctgatctcaaactcctgatctcaggtagtccacctgccttggcctcccaaagaactgggattacaggcgtgagcctggccagtaaaatatatttttatcaattaacctcccacctcagctagccaggaaaatcagattttgtccttttgccttctgggctatttgacaacgtatgctgttcctcatgttaataccttaacagctgtgccaacaagtctggtttgaaaaaaaagtaaggggcttaatggtgtgtctctgcagcctatcaacatctctgtgcatcagtagattacttgagcctttcaaaacagttgttcacctcagacatgtgggtcaaacgtcactgtagttaacatactgaagcttgctaatacgaataagaattggaattatgacttctgagctctcaataccaaggaaagcaatgttatgacaaacccgtgtttgtgttgcttcgtcacagaataactcagacactacaatcagtagctagcactctctctgatctgaatggtatagacatcttccttttaccttatattgctctgacttttcggtaggttttgtcttggagctccacatagcttttaattcatttcagtttagcaagcctttattaagtattaaattaggtgctgagattgcaaagatgaataagactttgatgaatgaggcgtgcagttcagtggggaagacatgaacagattattatttcaatatat

SEQ ID NO: 122349 - DNA, 1136 bp, Homo sapiens
gttacttcactttctgcagtcttagaaaattcctatacttagacacacgcacacacacacacacacacacacacacacacacacacacacacacagtcactcactcataggcaaacatttgctctgggggtaggatagttttcctgagtgaaagaggtgctctagtggggtgtggcaaggatgagagtcagattagaatttttatatcatttgctctagacaggactgtgttgtgagaaggactcttgaggaccttcacccactaaaaacggggaagttagcagtggttgtttgtataactggtttatttgtaagttacacttttggattatgaaactccccacagtgatcagttggtgtttattttcattctgaagcaattttagtcatctagcaactcatttggatgatgtgcttgctgtacaatgaaatttgcagttttaaaagaccccagagcaactatggtgtgtaatttgtgcagtgttgtactactcttggaatagataggaaatgtatgtttgaattaagaaaagactgcttttctggaaaattacagaagttcttaaataatttttttttcactgtggcattgttaagaagggattaatttttcttaaaaagagccaggatactctggatgtaatgaaaatattaagttagtgtttggcctgtaagcaaaagagggaataccaaatgtcagactaggattgtaaatcatcatctttggcaggaacaaagtttgctgtttgtcttgttatgtctggacagttaccagggcctgtgatgaattttccaatttcattatcaaaatcccagagtgtggaagcatttacatagactctagggtacaggtattagtggtctgatctcactctttggggttcttgttttaaaatggatgagactttttatatttagaggaattataaatatggttaaatgtgatggaaagggaaacaattttataatttttaatagtgtctttgttttatagttattttgaaaacaaatcaacacctgtatgaaattataaagtacatttgagaacccgaaaataaccccactgccaaagattctgagcattcagaatatagcttggtatgcattctatctactgtatttcagtggctttaaga

SEQ ID NO: 122350 - DNA, 1640 bp, Homo sapiens
gtttttacaagatatattagagagaaaatgtgcgcctcttcaaagtgttagtcattatttttcattttttgaagaatatgcattacttgtacatttttctggctcagtaacaaaaatatactgcttatttttcttatgttactttgattgtaagtgttcagaaactttcacttaaaatatcaacaaaattttttttcaacagctcttattttagccttaaaaactcttcaggaaaaaattcatcgtttagagctggagagaacacaagctgaagataacctgaacattctttccagagaagcagcacagtataagaaggccttagagaatgaaacaaatgagagaaatctggcacaccaggagctgataaagcagaaaaaaggtaagaaatgcagtagttctcagaaaccgggggttactggagtttacagttcaaaaataataaacctagtctaagccgatgtactcagatatctttattcttatatatattcaaacttcatgactttgttctcagaccttttgatatttgtgagaaaaagatacagttttgaacttacctctatcatatcttacttatcataattcataaattctagaaattaaaggaaaaattaagattttagacaagttgtgtttaaaaattagaatattttcagaatagccaacaaactccaatttaacccgtaattgaatatttattttttattttatttatttgtatttgcagttaacactaaactttagaatttgaaatacagaacaacactagtaattaaacaatgtaaaaccaataaaaatgaatacaaaagaattttatttaatgagaggaaagcaaggttaattagaagacataggcaaatgggggaggcttctgtggaaattatgaaaaattttagaaatttagaacataagtcttttaagtaatttcacttcaaaacttaagactttctttttcctttttacactacactcatcctcataaacaaggctcaagtttgtgtttcaacttagaagtagaatgaacaaatggggagaaaaatatttctgaggtaattggacaaaagtagaagaaaggggtgaggaaagtaaagagttaaaggattagaaataggttgctttctgctgtggaattaactgttctgccagcagtcaagaacaggggaaaatgagagtggtagatgcatatacttgagtttcctgaaagagaagaaatatattgataggtaagaaactttcagcctctgtttttccagatgatgttatttccatcaacaaccaggatatttatcatcccacaagttactgacatcctcctctttcagaagtgtgccctctgaatttttaggaggagacaatattaaaccagttctgtgtaattaatgagctgtttacaaatgtattttcataactctgggagagtcaatactcagagataaaggaggccttgaacttttagctcttgatgaattcacatagtacatttcttgtgataaccaaatctctgatctatatgataatcaggtaattgactggttattattttgtctttttattttattttattttattattattatactttaagttttagggtacatgtgcacaatgtgcaggttagttacatatgtatacatgtg

SEQ ID NO: 122351 - DNA, 1067 bp, Homo sapiens
aagtcattggtagcttgatggggatggcattgaatctataaattactttgggcagtatggccattttcacgatattgattcttcctacccatgagcatggaatgttcttccatttgtttgtatcctcttttatttcattgagcagtggtttgtagttctccttgaagaggtcctttatgtcccttgtaagttggattcctaggtattttattctctttgaagcaattgtgaatgggagttcactcatgatttggctctctgtttgtctgttattggtgtataagaatgctcgtgatttttgtacattgattttgtatcctgagactttgctgaagttgcttatcagcttaaggagattttgggctgagacaatggggttttctagatatacaatcatgtcatctgcaaacagggacaatttgacttcctcttttcctaattgaataccctttatttcatagatataagtatacagttaagctcagcccagtctcgttgtactcttctagagaagcaactagaatatacaaagagaatggttctcaacgtagagcgagaaaagaacatgatcctagaacaacaggtgagcatattttctataaggaatgataatataattttgtatgtttttgaagaatattttaatttcacgggaaaattcaaaggcaaaggtggcataatgttagaatgaggtctaacttacgtgtaattggagtttcaaaaggaaaggaaaggaaaatggggaaaagcaatatttgaagagataatggctaagaatgttacaaaatgtattaaaaagtaaaattactagcctggccaacatggtgaaaccccatctctactaaaaatacaaaaattagccgggcttggtggcaggcatctgtaatctcagctactcaggaggctgaggcaggagaatcgcttgaacccgggaggcagaggttgcagtgagctgagattgtgccgttgcactgcagcctggacgacagagcaagactctgtctcaaaaaaaaaaaaaaaagtaaaatcttaaaagcatccagaaaaaaaaaattacactcaaagag

SEQ ID NO: 122352 - DNA, 1051 bp, Homo sapiens
tatatgtaatttctatgcttatttcttgtgaatttgcccaaaagtaaggattggagagttagtactttatagaccaatattttgtttagatggattgatgttttgaatgtatgctattcaagtaacccttcttaattatatataatggtatgaaaaaagtttttaatcccttttaatcttatgattgtggaattatggttttgatggccattattactatttattcagatatgaatggagtgagtgttctctgtgccatttgttgtgggggacaggagatgctatttgggaattctggccactgccatatgcttagcttgtggataaaataatggagagaacagtaaacttaactttggctactcttttattacgtaaataaaaattaatgttcaatacttgggctgtatttttcataattttttcattttaaagaattttcaaactacaataacgaacaatatttccccaatatgacttattttggctctttcctttcctaaatatttgttttgtgtcttatttgtgcaatgagattcacagctacaaagccaaatagaaaaatcactataagtaatttgccagtggaacacatactgcccagtatgtatgttttatggcatcctttctctgatgggttaatggaacttttttcagtttacctatttattataaaaatagtgaaggtacagggagaagataaaagaaatgaaggaaagaaaaggtaactactggaagagaagagagtaattaacagcagaatcattttatggaagtacttagttcaaatcccaagttcacggggtatgcaaataatgatgtctctttttaaagatggagggagtgctaaagttgctgaaagtaggatcagatttcaagaagcctctatgagagatctgcttcccatcacactgtttctccatgtcctggacatagttcattcaactcttacatcttgatgtacatagactggtatctctaggtgataaaaagataagacaggaatttgtgagaaacagataaatatataagtataaaacagtataataga

SEQ ID NO: 122353 - DNA, 1037 bp, Homo sapiens
gagttcagaaagatcatttagctttcctggtgccttctttctattttgttttagagctgtgaaatgtttttctcttttggaaaaggaaaaacttaatagttacacagttttgtgaagaagcctttaatccaagttttatgagacagtaggaacctatagctacttaatttttaggagacagtaattcagttgcagaagctttcctctgctattcccattctcttttacaaaactagttttttttaaaaaatcaatgatcaattttatcttactactttataacttttgctgacttttattctttgcattgtatgtaatgtccatcagtataaattgagactgtgaatttctaggacccacaaaagtggtattttttttttgtacaagaaagtatagaggaagaggaagctgggcattaaattacctcatccagcagaaattcacggtagtatggtatatttttattttttatattttaaaatcaataatgtcaaatgtcattgtgtatgcatgctttataataaatttacacttgatcatttttctggaagcctatgggaactagtacaactcttctgaactcttggtttctcactcaaatcctctgaggcaactggggaactagagtcatgaactgaattagaaatagaggacagagagaaaagatataatagaatggaggagctcaaatatagggtagcagtttaagagatggtgattcctaagggacagagttggaagtacatatttactgaattctttgaacccacagctgatggaatgttcaagctatagatgtgaaagaatttttaggtcaggatcttgggaagctaaggagagcaatttttaaaagacagtttttctgttttcctaggaaattcccaagaagcttgtgtaggaaaaagttggtaattatggatcttttggggaggaagagaactataattcattctaatggtgaggagagataccatgttagaataccttccatacctggaagtggggaagtgactgaagatgggcacattgatgcttga

SEQ ID NO: 122354 - DNA, 1068 bp, Homo sapiens
agtggcaccatgaaaattaaaaacctgataataccaccaatgtagtactctttaaaaacatgtcatcttactcagcaatcaacctgattgaatattttaaaatgaataagtggataaatatcttacctgaaagatagcttcattaaataaactaactcctgagaggatttctttggcctttaatatcctatttaatagatttcttataaccatatcagcaaagccactctgctctggacaatggtcagaaggtaggaagaagtgttatagggtaatgagcaataataaggccaccaaatataatcccattgtaatgggattctacccacttgtagaagtttattcaccactacaaattactaaagttaacctaaacaattaaagaaagaaatcttagtctttaagaacagaggattgtaaagtgagccagaccttccaatcagctaaaataatgtaaaataatgtacttttcaacctgacttggcttaatgtagttaagtaaattttaggataggttctaaaaaaccttgagaggcattttgttgttgttgttgttgttgttagtttgccttaaagttaaatgtacattgacctttggtatttcttagaaaaacctgttactgaacctagtacagaatgtgaatcatttcatgcctgaaatacaagattgatgtttacagggcaattgtccagaatcttgctgaattggaaagtatttcactcttcatcactgtagatccgtttaactttacaaatgtgttatttaaaacataaaccattttggtgcacaggaaacccacttaaaattaaattttaaaaagctctcgagaagtctgtggaacatttatggttttataacttacaatttctagcaaaagtatctttaatatcttacaaaatattttcagagatagcttatccaaaatatgtaatacatgtgagagaatagcactgttgaaatgcttgaacacataaaaagcattattgccttcattttccctgaaatgaaccaagctaccaatttaaagctgggaaagtcagtaccagagttaaaaacaagttacttta

SEQ ID NO: 122355 - DNA, 1048 bp, Homo sapiens
atctcagctcactgcaacctccgcctcccaggttcaagcgattcttctgcctcagcctcccaagtagctgggattacaggcatgcgtcaccacacccggctgtttttttttttcgcatttttaatagaaacggggtttcaccgtgttagccaggctggtctcgaactcctgaccttaggtgaactgcccgcctcagcctcccaaagtgctgggattacaggtgtgagccaccgcgccctgcctagagtttgattctcttaaaccgttctactaaaatactatcagtttaaactaccatctacagaaataaaaaacataaaccactaaaagattaaagcatttaggagtttatatgcaaagaagtcttgcaagggagtacaagctttaggaggacaggcttatcaaattaaaaaatgaaaaaacctacaaaattaccaaagtcaccaagtttagttattcttttcatggtggaaaacagtttcctcagataatcatcatatcagaggtcatcatgtatccttagatatcagcattgccaagaccagggatatagttattagtaatttacaggaaaggctcaaggtttcatttacatgggaaatgagaactagacagtgtggtgactgtttttgttgttaaccttacctcagtgttttatctcgggtggtccccaagaccaccttcaggatcagtgattcactggagggactcacagaactcagaaaagctgttaagttatggttatggtatattatagcaaaagaatatatattaaaatcagcagctgaaaaaaggcacatagggcaaagtctgggggacaccaggcacaagcttccagttgtccttcacctgtgaagtcatgtagacagaccataattctctcagcagacagaccataattctctcagcaacaatgtgtgacaacattcttggagaattgctaaccagggaagctccaccaagccttggtgtccagattttttcttgagggttggtcacgtaggcatagcatgactgatagcccatgtggctgaccttcagttttcag

SEQ ID NO: 122356 - DNA, 3797 bp, Homo sapiens
attgacgtttacactcacaattaactaaaagtacatagtctgaagaaattgttgcatattttagaagtgtttgatacattcccagggcacaatttatgtactaggagaatttttcccattgtttttatatttgtactagtacagtagcattgaccactttgtatccttgggtggaatgaaaaatgggatatggttgtcttcctcaattagggataaattctagctgtaaagacttgaggaaatactttatagaatttaacacatggcaaaatagaggctcaggtgcatctttaaattacaatagaggaccatgaaacttaggattgttgtttcttttgtcttatctaacaggtacaacaaataacactgtgactccaacctcacaacctgtgcgaaagtctacctttgatgcagccagtttcattggaggaattgtcctggtcttgggtgtgcaggctgtaattttctttctttataaattctgcaaatctaaagaacgaaattaccacactctgtaaacagacccattgaattaataaggactggtgattcatttgtgtaactcactgaagccaaaatactatcttttaagatgtcccacatggaagacgctattccaggatctttaaatttccatggatgcatataggatgtttgggagcatcatccgtgaagaaaaaatcaattaaatcattgtgttcaacaggaatatttaaaatattctgcatgaatcctgtggctgtcttattttaaatagctgctgctgtgggattatattttttttccttaacatgccaaatataactttctgaaagtgatggaaaatgttgtcttgtgcagacaacatcatggctcttggcagtttaaatttagtaattttaatttagtgaacagaattgagaagaacgtgccaaatgagaatcaattaggtggatttttggctgtcatttcaaaagtggaataaatttattaatttagtagtactaaatggtatccttagattaaaattttgtgcttgataacagctgttttttctacattagaaataagatgccacacaaggaactacattccagatttaaagaaatgaaaggataccattagtgtgtataacagattattgttcatacttgtaaagcatcttatgtcattgagaatataaagaacagtgccttagaagacagtgaaaggtaagctctagcttaatgtctatgatttgttctttgacattaaggaaggtaaggattggtcagaggatgtaacttgatgtgagcagtagtaaacctgttttagatatcatactgttaatattttattgaaaatttatttcagagcggagaaacttaagctaaagtctgttatacagaattgaaagccttcgtatcttgaacctcccaacatttttcttatggctgttgaaaagtatagagctaaattgatttaattacactttcctttgtactttaaaaaaaagtatgctagcactattgtaccttgaaaggatttccaccagactgtcttgagtagtgacttctttggtgaggcaagaaggatatacattattttagaatcatttactatttaaatgagacaatcatattattttagaatcatttattttaaatgagacaatcattttaagttttaagataacagaagtgaccaatgtaatttcacaacacctaaggattttttggttgatcaggttactgtagatttttactgattgtcctggatgaatagactgtgctttttctttttctctcccttccttcttggtttcccatagtataataagcatgcatactttaacttctatagttttctcctttagagggtcgtcttcagttttagaggtttacttctcccttgcctttgactcattggactagtgcagaggctttaagtagtttaaaatgggcttttgcttttctaggtcattaacgttttttatttagtttctttagccaatagtggctgagtttcgcacttgattttcaatattttatagtaagaaatgacaaactgctttgtttcatttcataaacaaactctgcatttagataactattaaaggttgttaagatgaagatttactgtttctttgttactcgttggtacagctgtttgttttacttgcacatttgtacatatacttaatgttttcaagtgccttaattgtttaaaatctctggcttcaaagtttcttggggaaaggtcggtttacctcacattttttgtttccattagtaatattctaggtacctcacaaaatgtattatggtgccatggctgttagtttttagtgagtgctgtaggattaattcgaaaataggcagaattccattcctcccaaggtggcaaaaattagctatactgatgtaattgtcatttacctgggtatgaattccctgacacacattcatgtcaacatatgtagcaaattttgtgaaaacataacaatttgaagcttctgtaattttgagcactgctctaacaacaagcataatataaaattagttagattttgcaagtctacaaatgagctcttgcaacagaactcacagcctttttacttttttcccctaactttagcaatgtagtatcttgagccattaatttttgggtttttttaaaatccagaaggtatatagaaaccttttcagatttttcatctgatttgttcttgcagatgttcttctatcaaataccttattttaccttacagatatttgttgcacaggcagatactgctgtatttagacatttctatttcagttcattaaaaactgcaaaaccaatctgtatcatgtaccaaactgacttaaaataaatctacatgtttattgaattaatagtgtgttactgcgttttgcttataaaatttaatgcttagtggatttatcttagtccgcttggggtgggctttctactcattttattgcacctctagaccagccgatagtaactaaggcacatgttcatatcaatagaaagcagagccttggaagtaataggtggagggaggacttggtacacttgtgggagtgatttgcaagttgatcttccacaaatcaatagaaattatgctgtagttttccaataatttttgagaggaatactatcttggttttataatctgaaagctagtttgtgactttctgcctttttagttcatattgcatataaagtaaaaaccaagaactatttggtataaattactatcaagccacatgctgtgactttgaagtgtggttcttgttattttgtgggcaaaattatgttctattttatatcagtggacttgaactaagaatttactcctctgtaagccttaaaacctgtaagggtggactgaataattcactttagaaatcatgaattttgggttttgtattagccttaaatatagtcacatttggtttaagtaatacaaaacttgatgctaagcttagtgactctggtaaacattagaaacaattttttttttgagatggagtctcactctgtcgcccaggctggagtgcagtggcgcgatctcagctcactgcagcctccacctcccaggttcaagcgattctcttgcctcagcctcctgggtggctgggattacaggcacccgccaccatggccagctaatttttgtaatttttaatagagatggggtttcgccatgttggccaggctggtctcgaactcctggcctcaggtgatccacatgtcttggcctcccaaagtgctgggattacaggcatgagccactgtgcctggccttgtccagtgttttttagtcattc

SEQ ID NO: 122357 - DNA, 1131 bp, Homo sapiens
aattactttaatatgtgttagataaactaataactgtcagacctgtggttttgtaatattgcttagagacaagattaatgaagatttcattagtattagaacgtttttgaaaactgatttaaaggaaaactgtatttgtactgctgcatatttgatgatgtaccagttagaattagtttcagctatgaaggacataaacccccaaattacaatggcttaagcagtggactgatttacttttctctcatgtaaaggaagtctggactagagttcagctctgcaaccattagggactgaggcttctttaggtttttactctttcacctctcaaaaatggctttgaccctactgtccaaggtgggtccttatgttccagccatcacattgattattttcctgccagcaggatgaagaagggaatgaaagaggcttgtatcttactttaaggatgcttcctagaggttatgcgtgatggcctggaagcactggagactaggaaatgtcttttcaggaggaagggaggtgttgataaaaattggtgattctatttctaaagaagagactggtatttgggggcaactgtcagtctcttccacaggtagtatttaagtgttgtaaaaattgtgaaaagtactcaaatgattgcaggtcaggaactagcgttatagattgtgatattttaaatagctttgatgtatatggtttttcttttttctttttttaatagtttccacggccactccagtgccaacagccaattctacaggtaattcaagatgactgttttcttccttttccttcagtatttttaagctttcttgatggattagttttaaataattatgtaaaagttgttagtataattttaaagatgagtaaaaacttaaaagtcttggaccacagcaattaacgttaatctctaccttttgtgacagtgacacatagctccagtgttttatagtcggtgaatgtgagcagatttgctgaggctgtgtacattgagtctataaagtactttttatagatttagtggaaatcttgggaaatatagaagcctaaagcaaattataattctcatcatccagagcaaccaaaatgttttcagtgattaatttcttctagtctttttta

SEQ ID NO: 122358 - DNA, 1925 bp, Homo sapiens
ataattaaagctcagtcgtttgttttttatgagatggagtctcctgtgttacccaggttggtcttgaaatcctaggctcaagcaatcctccaaccttggcctccctagtagccaagactacagatgcgtgcttcctcacctggctttttttaaagcctgttctaaggattgagagtactttaatacactggaattagctgtgagtgaaggttgtgttgaaaactgtgtcctgcaacatgaaatataaagagaccttatgaaactgttggatgcttaggtgtagagaagaaagaggtagggagagttgacttcctgtgcttttgttaatacaagaggtagagcgctaaagggacgtacattgaaattcaataagattcttattagaaccatattactgcatacattattttaattgttttttaatgtaaagtggttgcacttatcagtaaaacaatctagttgttttggcggttttttttttaagtaaaaacaaaccataagtttttttatttggtaaaaattttaatagttctagaaattatatcactacataaatttcaaaaagctctttaaggtattaactaaattgggccaaattaacttttttgttatagaagtgtctcttttttttaggtcataaaatgggatttaagggcgtactctttcccctttatatgggagtatgtaagagttggtgaattttggagatggaatgctctactttaagatttgttgggaaaggttctccccttactcttgttccaagtctacctatccaggaaagttgttttagaaagtatagaagactaaagcagtgagatttggaatagagtttctacagtgttatggggtgcctcatctgtttactaacctcttaatacagaccctgaccacttcaacttactgtctccgcctttttttttttccctgagacagagttctgtatttttggtagaggcagggtctcaccatattggtcaggctgatctcgaactcctgacctcaggtgatcttcccaccctggcctcccaaagtgctgagattataggcgtgagccacctgcccactttttagatgatggctgcctttcttgattgtacagtagtcttcccacaattctgagatctaagtgttgcagatttattttttcagtatattaatgtggatttttaatggataaaagttagaaggatcctgcgtaatctctaagtcagtgggaaaaggagaatgacagggtttggtctgtgggtttaactttaggtcaaaacacctaaagtggttccccctgcccacttctaaagtgtttgggtttgatttcatagagcttagtagcagagtcaaagataatacaaatgggtggttgatgctgtttgtctcttttcccctgccccccaacagatgagagctattgttcacataactcaacagttagtgattgtcaagtggggaacacgacagacttctgttccggtaagtattcatattggctgcttggaagctgaccgcagagaggtgaggaagatcattgcctcagaaagccttgtttcagtgctttgtttgaagcattgccataattctcatcttgttagaattggaatatgaatagtatattcatattgattgattaaaggatgatatttgaagcttggtttagtgatttagctatagtgtggatgctgtaagtgtggatgcgttgtctgcccccacacttttttttttttttttaaacttttctaggaattcatcacagtttagccgctatgtttgcatcttgcaggtctgggaaacctcattctggcacttttggtgttgcgatactggggattgttgattgataaatttattctgcagcatagttggtgctgtggttaaatgagcttttctatacccatccattttctgtattttaatctgagtaacttgat

SEQ ID NO: 122359 - DNA, 1871 bp, Homo sapiens
gagagccgcacaaaaccaacttccgccccagtggagttgcgtccggaaggcgcggccccggaggtcacgtgggcccgcggaattacagcctggcggggcgctcaggtggaagcagtaggccacattatgtcgactgttccatgcaagtcagggtgggggccgtccctatcgcaggcatgagacaagtccagctgcgtcgtgtctggtaatctgagggcaagaagaacgatttgcagaagctcccagttttcttggctgtggcacagtcgctttgagggccaggttccttcggcttcctcccgactcccctgcttccccccgtaggattcccgttggtatcgtccgagccccacctccctcctcttcgcccccgcacgccgaaaacaggggcctctcacgtgacccctgcgcgctcccgcgggggagcgtagtctcggaggcggcgccgcaggggattgaggggttgactgagcgttgcgagccttagctttctcccgaacgccagcgctgaggacacgatgtcgcggctctcccgctcactgctttgggccgccacctgcctgggcgtgctctgcgtgctgtccgcggacaagaacacgacccagcacccgaacgtgacgactttagcgcccatctccaacgtaacctcggcgccggtgacgtccctcccgctggtcaccactccggcaccaggtgggcgcgggccctgtgggcttcccgccctcccctgcccagccgagccgcactgcctcctcgccgtgcgggcggggcccgggttcgggccacggtcgggcgggcgggccgcgctcggggtgcggcggcgactccggcaacatggcggccagcctggagtccactcgtggccgggccgggtggggagcgcgctggggggaagcggacgcgcggttcccagtggctgcggggctggggcccccctcgaagtgttgcaagtcgaggtgccttttaaaagtgcatcgtaattcctagcctcacttggggtcggaaatggggacgtggcttccttccgcgggggcagcggtggggttgaggatggggccgggcgtcgcgcctctgaggttggcggtggggccgagctgcctctccctgccactggttgttcaccctcccggcgcctctctccggaggtagccttctccggaagtccgggaaagagaaacttaaagacggtaatgctcgttcgtgtctcagacttgagtctgagaaggtcgcttgagatttaattacattggttttgcagataggaatagaatgtagctgacgtttgagcacgtagttagtgaaaacttcacacttcaaagtatgcgaaaaggaagaaaagtacccatgtatgtaccgggtgttttgcgtacgtatcctaaggctaaactggaaggtaggtagtgaaacctaggaggtagatgcagagacggagatgagtaaactctcctgacattgtatgtttattcttttttcaattgtttttaaaattttcttaactatgtcctgtgctcagatagcgtatgtttagtaggtcgtggaacgggggtttgtgcccaggtctgtgggttttctaaaacccgatcaggagcgtgtcttttgttatgtgcagtcgcatagggctggttaaggcatacatacattttaaagcagaaattgccatataccgtgacaacacaaaagagagaaggaagataagtttgaggtaataagcgggagaaacactagaggtttaaaacctgcagtctcgtatgattggttattctagttaacattagttaaggagtaatgtttacgtagttaacattggcttcttgaccgaagaatgccgaagtgtaatgatttttatcacggcattcatattctacaaattc

SEQ ID NO: 122360 - DNA, 1013 bp, Homo sapiens
acacaggcttgattcagacatacccctgggaccctcagtcttatctgctgtgatctcatctatcttgctcagctccatgccgaatacaatcgacagaaggacatctacctagcacatcgtgtggcccaagcttgggaattggcccagttcatccagtgtgtgagcctgggcttgaaatgggaagtgggatgggacccaggggctgagggtgaacaaggccccagtcatggggaagagctggtgatggaagaactcccgcctcaccaacctggttcccccagccacacatccaagaaggcagacgtggttctgttgtgtggagacctcaacatgcacccagaagacctgggctgctgcctgctgaaggagtggacagggcttcatgatgcctatcttgaaactcgggacttcaaggtgaggacttgcctgttacttccccacctatatccccagcttctctccctccttctcccccacatcctagcatgagccaatgattcccttagggctctgaggaaggcaacacaatggtacccaagaactgctacgtcagccagcaggagctgaagccatttccctttggtgtccgcattgactacgtgctttacaaggtcaggctcctcccttcaacatgctttcatatgctgtgtctctttgtctactaacctgtgtagatcctttgctcagctagtctagtcttggaccactgatgggtggaaagtggggtagccgggagctggttctctgggaagaggccctcatatataagcttctctctggcccttacttttcctaggcagtttctgggttttacatctcctgtaagagttttgaaaccactacaggctttgaccctcacaggggcacccccctctctgatcatgaagccctgatggctactctgtttgtgaggcacagccccccacagcagaaccccagctctacccacggtgagtcacccccaccctttccttggcccttgccccgcttgaagcagcccttccactcttgac

SEQ ID NO: 122361 - DNA, 1051 bp, Homo sapiens
ttcaagaccagcctggccaacatggtgaaaccccgtctctactaaaagtacaaaaattagctgggcttgttggcgggcgcctgtaatcccagctactagggaggctgaggcaggagaatcatttgaacctgggaggcggaagttgcagtgagccaagattgtgccactgcactccagcctcggcaacaaagtgaaactctgtctcaaaaaaaaaaaaaaaaaaagttctcccctgggatttacaaggcagcaggaatcatattctgggctaaacaccttataccagccacagtagatgtgtgtcagctccatgagggcaggcatttctgtctctttgtctgttgcttgctgctaattgccagtacctggaacagtgccaaatacatagtaagcgctcggtatgtatttgctgaatgaatgaactagttgagtgcctaccatgtgctagatactgtgttgagagttaaatttgcatctcccatctaattctcatgagtaccctgataaattaggcatgttgtctctaagtgatggacaaactaaagctcttgagtttgtggcaagtatatgacagtaatgatatgggcagaacagagcctgggacacccagcagcagggtgaatgttgaagaaagggctttgagaattccaggctgctggaattctagtcccagctcagccttcaactgctgtgtagtctagggcagccccttccttctctgggccccaggatgtgcaccttctgcgcccaagggggtggcactggcccactgaccctgctctcagaggtctctgaggttctgctctgttgaccatacaggactggccagacaccaatcggctgctgggcagtgccaatgtggtgcccgaggctctgcagcgctttacccgggcagctgctgactttgccacccatggcaagctcgggaaactagagtttgcccaggatgcccatgggcagcctgatgtctctgcctttgacttcacgagcatgatgcgggcagagagttctgctcgtgtgcaagagaagcatggcgcccgcctgctgctgg

SEQ ID NO: 122362 - DNA, 1466 bp, Homo sapiens
aggctaagaattcctaccccagggcttggagatccctggacagggaggctgaactggaggctcccctggtgtcccatgtgccctctgtgcccaagactaatgtttttcacttccaaatttggcaaatttcacttggagtggactggatagcagctgtctctggagcagatgctggcaggggaatgggctgggaggagcagagccaatcactggtgaatcccgagctccctggggacaccagcctgctctcttcgcctccccttcctttttatttcttctgttctccagcctcttccccttctttttccacctctccagccactcatctctgcccagctgctgccctccccaggaggcctccatggcttcacctacctccaccaacccagcgcatgcccactttgagagcttcctgcaggcccagctgtgccaggacgtgctgagcagcttccaggagctgtgtggggccctggggctggaacccggtggggggctgccccagtaccacaagatcaaggaccagctcaactactggagcgccaagtcactgtggaccaagctggacaagcgagcaggccagcctgtctaccagcagggccgggcctgcaccagcaccaaggtggatacacggtgcctgggatggggtgtggagcatgcggggagtcagaggacggacaggatgccatgccctcactgccctgtgtgttcacagtgcctggtggtgggtgctggaccttgcgggctgcgggtcgctgtggagctggcgctgctgggggcccgagtggtgctggtggaaaagcgcaccaagttctctcgccacaacgtgctccacctctggcccttcaccatccacgacctgcgggcactcggtgctaagaagttctacgggcgcttctgcaccggcaccctggaccacatcagtgagcaccacgtggtggcctggaggggcgggtgagcttgggcctagaggcaggccagtggggaaatgctgggacagccaaatgtcgaagtggacaagatccgtatcagccaggtgaccttgaagattcaggtcccccatctataagtgggcttttgggctgagtgattgctaaggccttttccagtctgaccctgaccaggcacacactggtacatggggagcttgtgctgccctagggtccctgttcctaatgtcctctcccttccaggcatcaggcagctccagctgcttctgctgaaggtagcattgctgctgggggtggaaattcactggggtgtcactttcactggcctccagccccctcctaggaagggtaagtatttctatgctccctggaatctccccctcccccatcaagaacttggccagtgtctgaaaaaggatgggccaggagtgtccttttctgtttttgttttgagacagagtctcgttctgtcacccaggctggagtgcagtggcatgatctcggctcactgcaacctct

SEQ ID NO: 122363 - DNA, 1032 bp, Homo sapiens
cttatttttcttaggcaacacagttgttaccacaagacaagtcagggctaaatatgacagatcacaatgtatggggaatttgcccttttaataatttccagtcccctaagacaaagtaaccctcaacgttttatctttatgcagtacagtgggcttattgtgttaacacttcagaaagattcaaactcataaactcagtattttaactcaaaattcatgtaacaagatagccaaaagcataggatttcttaaaattctgaattcgtcttttctgagaaacataaatttacatatttttcaacagaaggctatcaaaattttaattaagtttaaaatacaaaattggatcaagacattcaccctaaattctgaatttttgtcagaaaagagatttgattttcatgaaggtaaagctttcttcactattctggaacataaaactttattcagtgtaatttaagtcttatatatactctactgaattctaactgatctcctgaaaatgttgatctacgtgttgtgtctgataactttctggagatggaagcttataattcatttttattgcagactagttaaatcccacaaagtgaatatcttctcctaatctttccttttttagagacagggtctcactgtatcacccaggccagagtgtagtggcacaatcattgctcactgtaacctcgaattcctgggctcaagcaaccctcccaccttagcctccctagtagctgggactacagggatgtaccaccacacccagctaatcttcatctaatcttaaaactttgagcctcagagactttgtagccagcatgtgtctgtaattgtatgatttttaaatcatcatcaaaagattaaattatgtttgggttaggttttcaagctaagcttattgaattcttttaccactttcatgtaagctggtaggggatttttgagaaaagaaggtgggcactagtatatctaaattaacaatgctgatggggagtagggggtaatctactctaaaattaatagagcctttcc

SEQ ID NO: 122364 - DNA, 1079 bp, Homo sapiens
aagtgatccaccctcccagcctcccaaagcgctgggattacaggcgtgagccactgtgcctggcctggatgttgttttttaaatacaagtttttcttcttaaattcagtaaacatctcataggatatggattttaacacatgtactgagcacttactgggaaccagacattgttttaggctttgaggatacagcagtgaatgagatggacaggcccctgccttaaggggccaacattcaatagggaagacagagtacagacaagtatataacacatttggtgttgtgagtgcgttgaagaataaaatgcaaggtaagggggcgggatgccggaaagagagttgctcttttatgcatggactggtttgggaaggtctcacagatgaggtggcatcttggatggagatgagaatgcagtgggggagtgagccagccggccattgaagatgtccaggagagagcattctaggcagggggagccctgggcacagggccctcaggcaggaataaatgtttttgacaagctggagacgtgctgggaggagcatcaaggcagccagagagctgggagtaggaagtcatagtgtaggtggatgttctcaatttagctgcatgctttttaccacctgggaagctttaaaaaaaagccttgtcccagctgccaagattctgattgacttcacctgggcagagcctgggaattggtgttttttaaagtacccctcaacagttgtagggtgcactcgggctgaagtactttgaaggccacagtaaagattggattttattctgagggagatggctttactgagatgagtgacatggcatgacttagggttgtaatagggtcactctagccaccctgtgaggtgggggcgaggccagggtggaggcagagagacccatcaggaggctgtgcagtagtggggctcggaacagcacagtagcagcagaggtggtgtcaggtggtccagttctggagatagtccagggaagaattcatgtgattcgctcatgattggatgtgggagttgaaagaggaggcaaaagccactgtgaggaggaaaagctagggaagac

SEQ ID NO: 122365 - DNA, 1023 bp, Homo sapiens
gctgagctagtgatgtctttgctttctgatggttcagtgtacacaaactttgtttcatgcacaaaattatttaagacattgtgtaaaactacctttaggctatgtctataaggtgtatatgaaacataaatgaattttatgtttagattgggtcccatccccaggatagctcattatgtatattttcaaaatctaagaaaacagaaaatctgatttacttctggttccaagcatttcagataagggacactctacctttaattagttataaaggaattaggagacacattaagaagcaaaagagccagtggacaagatgggctgtctcttgtcctgagccttcatttagaaatataattgggtagacttgctctggaggcgaagttcaggtcgttattgttctctgtgtatagaggtggattttgaggaatatttggagaggaaagggagctgtgttggcagatgacatgcaggaagtgtagttctagcttgtgagggttggccctttcccaaactaacctattctttttggcacctagcaccttcaatatgctccttagctcttgtgactcgtctgtggtcctaatatgccttgtggcccaggcctaacgcagcactaacagtcatacagcccagtgcaactaggagtttccagcagagattcagcaacctgaagttatcctgggtgaaattgcagtttgcctttacaagaaggtgcccttgcttaatatgtgatgacatagggaccttagcatcacaataagtgaccatttcataacaaagaaatgaacacataatagttgacgttaaaattggtagctaaacagaactaggtctgcatgtgtctatttagcaggggacggggagatgaaagttgttaggataatttttactcttacttgttcaagattgttagcatatatgtatgcatttattgcctgccttgttccaaaaggatttaaggaagctccctcccacccccatcacagaaagtagaataaaacaagaaccacatggtgagga

SEQ ID NO: 122366 - DNA, 1011 bp, Homo sapiens
attctagattaaaagatttaaaaagatgtaacataactttacataaagataggtagtacatgatccttgattagattctggctttatcaaatccagctatagagggtattatagggagatggggggaaaattggaatataaattgtacatatatattgtattgatgatattatgattatgtgttacgatacctgcaactcatttccagaggttcagaggaagaaagcatctatcaggagtgggggagggagaaaacaaatgcaacaaaatgttaacagttggtgagtctagatgaagggtatatgggtgttcgttgtactgttctgttgtctttgaagatttttttaaattaaaaattgggaaaaaaatcaacagtggagaaaaatttagtggagggaaactttagggaaatttttaatccccaaaatgctgaggtccattttgaagcatactattaaatgtaacaaaggctgaggatatacagtgttgatatattcaataggaaggaaataagaacgagtagaaacaaggcctttctggaagttacctcttaaaaaattggtgtgaaagtggatggtcagctgcccaccagagggcagtgcaggcagtgattccgcggtctacagtaggccagctgaaaagcaggggttttctttccctcataactggctccacatgaggtcgctattctctgcacaaaacgtttttaggattcttagactgtttgagaagagagagaatgcgggtaggtatagtgcttcccatttctttccctccactctgatctatttccagattctgtgggttttagcctttggctcctctgattcatggattctttggaaggatctagatattggaagtacagatctgccttcctaagtatgtgtttcgaagtccaataatgcatttgcccatgagcatgtcaggatttatatctgtttttaaaatcacaaactgccaaagtatcatcccattgcaattaatctttaggtttcgtaggatttatta

SEQ ID NO: 122367 - DNA, 1036 bp, Homo sapiens
ttccctctgaagatctgttaggagtgctccagttgtcctggtcccttggtggcagctgttccgcctggctgcctctagtcagccatcttgcccagcaccccttcagtatttatttaataagactaatgtgattgtgtttagtcagaacgctccaaggaactgttttaggaaagaaagaatgatgataatttcttgtagcttatctataaaaggtcatttgggaaggacaaccattttaatcatttatgggacttttgggtagattttatagttactatattaaagacatttgcagacatttatgaaaatttgtaagtagttttttgataagctgtcagtactttagtagctataattgcctaagcgttcctaattatatgttgagctttagaatttttaccagagcttcttcctggtaaagcttaaacatcagcctccaatcagttagattaatctctaaatttatgacaattaaattcatctgacctggttactgggcacatttcagacatcagactgatctttatcatgaaaccactaggaatattttaattttaaaattgaccttttggagtcagcttttctttaatctgccagttatacataacagaaatatttctttaaaaagtaacctgactttattaatgtatttaatttcaaaaactaaagtggtataaaatgtgtatagggcaaaatgctttgataaactaatgacattcctttttatttatagagatactttctagttgggagcaataatgcagaaacgaaatatcgtgtcttgaagattgatagaacagaaccaaaagatttggtcataattgatgacagggtaagtatcctccaaacctgactgcaaaaaaactttcatacctgttgtttaaaggacatgaaatatccttacagtttttagtgatatattatttttatcataaatctaaaagtttccgttatttttcttggttggctagaatttgaatctccaatctgatttctagaaatcactggtgtcaagaagtacgccagaattatactt

SEQ ID NO: 122368 - DNA, 1058 bp, Homo sapiens
aattcctgatctgttcctttgttatttgacagccagcaggaagtttgggaaaccactggatgggatcgtgagcatccatcactaagttgttttatgtggtcctagggcacatgaatggaatgacctatagttcatactactcagttctgttatcatcccagctccttttgatacacagcccttaggtacgtgtcctttttctgccactgtcgtctgtcagacgacactcttctaagcctctagtatgttgaaggggagtggcaaaataagaagtatcaatacggtacactgtgatggactaagctattgtttaaaacaatacccttacaaatagactgcagatccaagataacagtgaaaacaccaaaaaagtgtgagtctcagactagttagggggcagtatgatttggtagtagagatgtcactttggttccagagagctctgttgtacaaaggcactgggtaccttgcggggggttttgtccttctctgctggagtgctgttctcagtggaggctttcaagataatagctggctggcatggtgaccccccatacaggatattacactattccctgttagtgggctgatgagggtcctctccagccaccagaattgcatactactccattctctcatattgtcctttttaatatactttgcttggcttccctctcaagtgacacagccttttttattttggagagagaaatcacttttgcatgacgaccatcatcttgtcttctggaaagtactcagtgaaattggtctggggtcagaagtacatagaatgaagatgaagaaacttgttctggtgttcatcatgttagaaggatgaacaggctgattcttggtggatgtctatgccaagctgaagcctttaattgttgagagacatttccaattggtagtaacaaggaagtggaaaataatctcatttataatatactgaagccatttgtgctggaagaagagtgtctcttttgtgcagtatgtttactttcccttatacaaattatgaagggaagtgtagaatgatataaatagcctggtgctaa

SEQ ID NO: 122369 - DNA, 1050 bp, Homo sapiens
agagatacttagatttttatcttcagatgaaattagacctccgttcagctgtgtaccttgcctgcattcttctagtttgtaaagaatgacatttattgaattgtgccttggcatatgaaacagcattgagaaatgtgtgcttgacatcgctggagaattctcctgaggttgttctctacagcacatatctttttatgtggactcactctgaaattgtctcccagttcttgtaactgctgtagcttctccaagtagtggtttagtttttatctttcagccactgtgcatggtataattggatgtgtgttcctctttgcattatctgttagaaaatggagagccaaatgtggggaatagtacataggatcttaagatgcattcttatgtacaacttttatttttggactcatcttactatgtttttaaacattatttcctttactgtaatttcctcttcatttttataatcctttgtgtgtgtgtgtgtgtgtgtgtgtgtgtacatatatatatatatatttaattttggtaaaaaacagaatttaccgtcacaatcatttttaagtgcacagtacagcagtgttaactgtatgcatcttgtgcaacagatcttgagaattttttcatctatgcaaaactaaagctctatacccatggaacaacaactcctcttaatcttatatctatttgtgcttaaggcacctcagtcctatttgcagtgagactaagaggaatgaatgaattaaattgtttagagtaatttttttttaaaatttaagttctgggatacatgtgcagaatgtgcaggtttgttacataggtatacacacatgctgtggtggtttgctgtacctatcaacccaccatctaggttttgagccccacatgcgttaggtatttgtcctaatgctcttcctctccttgcccccacccctcgacaggccctggtgtgtgatgttcccctccctatgtctatgtgttctcattgttcagctcccacttatgagtgagaacatgcggtatttggttttctgttcctgtgtcagtttg

SEQ ID NO: 122370 - DNA, 1035 bp, Homo sapiens
tggtagcttgatgagaatagcattgaatctataaatactttgggcagtatgggcattttcacaatattgattcttcttatccatgagcatagaatgttttttcatttgtttgtgtcctctcttacttccttgagcagtggtttgtagttctcctttaagaggtctttcacgtgccttgtaagttgtattcctaggtattttattctctttgtagcaattgtgaatgggagatcactcatgatttggctctgtttagagtaatatttttaagtgaggtaaatgtcagtatagatagtcttagagaataatcctaagacacctgaaaatttgtatggctataaatcatagaaataataaagtgagaaatgtatcaaaggtctttggccttttaaataggcatctaaaagccattactaagtttataaagcatatttctctttattttttgttgcataggttttgtcaggttcttagaaggctattatattgtgttaataactaaaaggaggaagatggcggatattggaggtcatgcaatctataaggtcgaagatacaaatatgatctatatacccaatgattctgtacgggttactcatcctgatgaagctaggtatgtatggtggtaactacctttttttttttggagacaaggtcttgccctgttgcccaggctggaaggctggaatataatggcatggtcatagcttgctgtagccttggcctcccaggctcaagtacttttttttaatgtcgtagatcaggtagaaaataaaatacagtttagatattatgaatgttatgtaaaaagatcaaatgttggctcagaattttagaatttttgttaagagctgttaaagactccattatagcaattggcaagaatcaacaatggctactattaggtgagaggttgttattgaggaatagaataatcacatagtcccaacattttaaactccatggatctctttgttatttacagaggaataagtatttttatgatgaaaaaaacagcagacattcttatccaaa

SEQ ID NO: 122371 - DNA, 1012 bp, Homo sapiens
cactgcagctttgaactcctgggctcaagtggtcctcccacctcagcctccccagtagctgggactacagacacatgccaccacgcctgactaatttttgtattttcggcagaaatagggtctttctgtgttgaccaggcaggttttgaactcctgggctcaaacagttctcccacctcggcctcccaaagtcctgggattacagacatgagccacagggcctggccagtttataaatttaatgtaacattgatccagattccaagaggatgttttgagaatggaacttgacatgattttaaaagtcatatggaaaagcaaatgtctaagcatggtccagacaattgaaacaagaaaaacaagaagggataaagtcaacaagatggtaagacctataataattaagataatcaggtagtaagctatagtaaataagactgctaagtattggtggaggaattgatgggggtcaatgaacagtgttgagaaagcctagaaaaagatccattttatgtggcaaactggaatatgatagagtgagcattacaagtcattgggggaaaagatgggataaatagtgttggttttccagttggacaaaaatgaaatttgattccattctctgataatattcaggaagcaattccagaagtacaaagataattttaagaaaataaaggtaaatatttttataatcctggtatggaaaaggattttacaaacaaaatacaaaatgcataaaccataaggcaaacaatgctatatttgatactgtaaatattcaaaatgtatttataatctagacaaattttaggaaacaagcagcagtctgaaagtagatatttgtaacatataacaatgattattatttagaatgtgggaagaatttctacaaatcagtgagaaaaaaatacaacataactgagaaatgattaaaaggaacaggcagctcacagtagagattctgaaccttacctagtaatttgggaaatgcaaattaaaaaggtaccat

SEQ ID NO: 122372 - DNA, 1035 bp, Homo sapiens
ccagggacgtcccaaatattgataattgaagaacaggcaagtagattattacagcatcatgataagtattttactaccattgacgtgaccagtatgtgggcctgatagatgcaattattgtgatagatggaaaattctatcagctataatatccaaaataaaaatagaacacagtaaggacttgagtcataaagactaaaggaggacctagagcatttgtagctgttggtgttacatactactgacagggtgctttgcattaaaaattattttaaattattaatatagttaaccatttctttatgaaacaaagaaaaacatgtctactacatggggtgaattatgtctttattgatgcaaacctgaaggaagttgattattttaacagaaatggagtgaagggctcctaaagaaatagtttttacttccacacacgtttattgaatgtatattttcattgtatttttcgccatcttctagttttcagtctttatgcctaactttttagtgtttgtgaattattattgaagctcagtgctattgttagaaatggccttcttcttcatatttctcagttttgtctgtatttttatactgagttgtgatcaagtcattctataagtaaatacatgtaggttaaagtttttgtgcctcataagtaggcttttaaaaaggttataatatattcttaagactctctagaaaaaaggaattgttttaaatagaaataattgattgttaaaaatcagaaaccaacttcttaatatagcttttatccctttgagattagatgctgttaaaatgaatggatccatcaagcaaaaatgatacaattgaacttcacagatgaaacaaatcaatttcaatcaaattatatgaataaataataattaaaataatgtgtgtgactctccagacacaattgtaccattttaaaatatgactaaaatactttaaaaacaaatttgtataaaatattcaaaataccttctgaaattctgtgctaaaaatatatagctaggctcctttagagtt

SEQ ID NO: 122373 - DNA, 1053 bp, Homo sapiens
tcaaataacgtaggttactgacattgtattgtatatttccagtcatgcagatgcctagtcatgcagtgaggtttttatttccaattacatttatattttgctgtgttttacagtgcttatttgaatagcattgcttccaaataaagtaataggtgctaagtaatttagttcacagattttaattctatatgggcgccaagaccatgaaatatgctttgcttttgtaattcttattaagtttcaattctgttctcagttacagctatgatttgtcccactcacttcaatataatctcactgtcttgcgaatgcccctggagatgttaaagtcagaaatgacccagaatcgccaagagagctttgacatctttgaagatgaaggattaattacacaaggtggaagcggtaggtggtcttgatatatctaatgtatattaatgtggtatccatgaagtgatatcttattaaattcactcacatttccctcatatttgtccatccctctttgctgtttgtccttacgtggggttgttttggatatgtgaagttgatcaattcatttttatagagatattaatcaccatgtgatttcatttgtaggccaaccacaaaattgtatgctgacattttctagcaattattcacgtactttttattgaatacattcaagcctagacttttacatggtgtgcagaggtgaagtttacatggataattttttttaatattaggtaatacacactacttattttccttcacagagaccagtttgttatggtctgagttttgaaaaagagttaccatgggttgcctattatgtgctagacatttacatgtaatatctctaatcctcataaaaactctgcttagtaggtataatgctagttttatagaattaaagactaagtaggaaatggaggcctggaaatgaagatcatacagccatgtcagggaatcaatgcagcaagtcagaggtcgttattactttgatcggtcccagcttgacccatcagtcctgcataggtcttgcctctgcaggactgctgtgggacc

SEQ ID NO: 122374 - DNA, 1426 bp, Homo sapiens
tcgtgtaatgcattgaaagggcagagaaagtttagcttttatgaatcaaatctaagtgtggtatagtgtataaacaaatactcttaacagatcatgttttgagaaaaaaatggtctttattaactgctattcagaaccattacagtcttttaagctattatcttataaacatacttttaatttttcacttcatgtaagttttgtaaaactcattgctgtttaatacatttatctggatatgctaaaattatgtttgatgaaattaatttattcatagagaaaaggcctgacatcataataactgccacctattggaagtatttgtaatacactaggcttattctaggccccttacgtgccttattaattcatttcgtccttaaaacaaccacgtggtacaggtgagggagcagaggtgccgtgctccctaagtaacactcttgattgtgcctgaccctgctgatgagaggcagagccaggagttggatccaggaactttgacctcatagccctgtgctcaaccgctacttcctgccacctcttgactttatttatatatttgtaacatgtcctcaatttccttgtcattttcttttctctcaagaactctcacaagtcagaaaagggatttctttgactttttacagaatcaacacaatgttctggacatgaaaggaatgatatccactgaaaatggcaatgctattaaccaagcatgttactttgaagttaaaaacagaagttaacttaaaaatgagttgaatgtcagccaatttccatatctttctgataccaaccttttttttaattgatacaaaatattttgtgtatttatggactgatacagacttttatttttcaggggtatttgggatctgtagtgagccttatatgaaatatgtatggaatggtgaacttctggatataattaaaagtactgtgcatcgtgactggcttttgtatattattcatgggttctgtgggcagtcaagtatcctttctgaagaaaaagtaagatacatattactaaacttatgatgtatcaatttgtagacagctacatatgaattatatgattataataccactctgtgcaccccaacaggaaaacctgcccatgatactatgtagcagaaatacaaagaagaatgcagactatttgaacaggcctgttatatacacataaagatgaataaataacaaggaagaaaatgcaatgtgatataggtaataagtgtcatgcttatctgggagaaggaggagaattactgatagttggagaggatgggacaggcccatgggaatagttgaacttggcctgggccctaaacaaaagtcagtgccttagcagcgagagagatcaggccgagcagagagagagagatcacagcctgggaaacactgtgtgtgtagaggtggaaaaaca

SEQ ID NO: 122375 - DNA, 1410 bp, Homo sapiens
aggtgtatgatcttggaagactaaggaaggtgtattagtccattctcacacagctatgaagaactacctgagactgggtaatttatgaagaaaagaggtttaattgactgtaggcttaacaggaagcatgactgggaggcctcaggaaacttacaatcatggtggaaggtgaaggggaagcacgcatgtcttcacaatggcagagcagaagagagagcgagcaaagggggaagtgccacacacttgcaaacaaccagatcttgtgagaactcactgtcacaaaaacagcaagggggacgtccgcctccatgatgcaatcacctcccaccagaccctaccctgacacgtggggattacaattcgaaatgagagttggctggggacacagagcgaaaccatatcagaaggattagttgtacttgtttacatccttacttggccatagggctttccttggccagtaaccctacacctggttaccattttctctgaaatttatggaaagcactccttagtcaggttggatattgccttccctttgtagctgcactgcaattctgaagaaccattagatcaagtgctgttccattcttgggtggagcttttggtgttctttaagccattggacaagctgtatctaaatgtttatttaaggaataatgactctcttggtcttatgtgacagtcatgaatgctaaacaaccttaacttgatttccaagagctgttgatctatggacgaccagtgtatgtcactctaatagctagaagatccagtaaatttgctggcacccgttttcttaaaagaggtgcaaactgtgaggtaagatgacaaacagtatcttcactgaccttttaaccttttatatcagctttgctgatgtagaagcacagtgaaattttaagaagtggtatttcttagtttgggatattatcaagagaatacagttgccttttagtatcaacaagggattggttctaggaaccctcttcccatccaaaatccacagatgctgaagtctcttacataatatggcctagtgcttgcatataacctatgtacatccatctgtatactttaaatcatctctagattacttctaatatctaatatgatgtaaatgctatgcaaatagttctaatactgtattgttaagggaataatgacaataaaaaaggtctgcacgtattcagttcagatgcaaccatcgtaggcctaactacattttctgtctgagattggttgactctgtggagggaacccatggatgtggggggctgacaataattaatactccagtgcatctgaaacatgtgagaaatatgactaatatgcagatgttctgaaaagtcagctatcttagagttatgcagtgctttgaggaattataaaatgtctaatgttgtggag

SEQ ID NO: 122376 - DNA, 10042 bp, Homo sapiens
ttgagcatgatgcacacctgtagtcccagctacttggaggctgaagttggaggatcacttgagtccaggagttccaggatgcagtgagctatgattgcaccattgcgttccagcctgggcgacagagtgagaccctgtctctttataaaaaaagaaaaaagaaatgttatgcaaaatcacttgtgtagtagttttcctttacttgttaggggtctgtggctctaaagaggttgactaacaacccactaacactattacactatggacagacaatgcatacagcagattcttcacacagagatgatacgaaggttgctcaaacaacatttcctctccatcccacgaaatgtcagatttgatataagcatttcaaaaagattttgtttccctagttgattttaaatgcttttgagaaaaatttcagatatataatttaattttctccgatatataaataagcaaaatttattttcatcctaaactgatttaacactgttcttaattcttatctaattatttcatttgatgtattcagctgtgctcaatagctacccctttttgtttctacagtagttatctcattaaattcatgacaattgaaaagtaatctccatgattgaaaacagcacaatctaattttgatgccaacaatagtgccttaacaccatttcagtctcactattgtgaaattaattgtttttctttgtttctaagtgaaggcttgatcagggtgataatgaaaatggcaaatttttataagttacttcccatatgccagctgttctataaaaactcaccatgctctgctgctggattcggtttgccagtattttattgaggattttcgcctcgatgttcatcagggatattggcctgaaattttctttttttgttgtgtctctgccaggttttggtatcaagatgatgctggcctcataaaatgagttagggaggagtccctctttttctgttgtttggaatagtttcagaaggaatggtaccagctcctctttgtacctctggtagaatttggctgtgaatctatctggtactgggctttttttggtttgtagcctattaactattgcctcagtttcataacttgttattggtttattcagggatttgacctcttcctggtttagtcttgggagggtgtatgtgtgcaggaatttatctatttcttctagattttctagtttatttgcatagaggtgtttatagtaatctctggtggtattttgtatttctgtgggatcagtgatgatctaccctttaacattttttattgtgtctatttgattcttctctctttttttcttttttttttaagtattttttttctttttttttattattattatactttaagttttagggtacgtgtgcacaatgtgccgattagttacatatgtatacatgtgccatgctggtgtgctgcacccattaactcgtcgtttagcattaggtatatctcctaatgctatccctcccccctccccccaccccacaacagtccccagagtgtgatgttccccttcctgtgtccatgtgttctcattgttcagttcccacctatgagtgagaacatgcggtgtttggttttttgttcttgcgatagtttactgagaatgatgatttccaatttcatccatgcccctacaaaggacatgaattcatcattttttatggctgcatagtattccatggtgtatatgtgccacattttcttaatccagtctatcactgttggacatttgggttggttccaagtctttgctattgtgaatagtgccacaataaacatacgtgtgcatgtgtctttatagcagcatgatttgtagtcctttgggtatatacccagtaatgggatggctgggtcaaatggtatttctagttctagatccctgaggaatcgccacagtgacttccacaatggttgaactagtttacagtcccaccaacagtgtaaaagtgttcctatttctccacatcctctccagtacctgttgtttcctgacattttaatgatcgccattctaactggtgtgagatggtatctcattgtggttttgatttgcgtttctctgatgaccagtgatgatgagcattttttcatgtgtctgttggctgcataaatgtcttcttttgagaagtgtctgttcatatccttttcccactttttgatggggctgtttgtttttttcttgtaaatttgtttgagttcattgtagattctagatattagcccttagtcagatgagtaggttgcggagaatttctcccattttgtaggttgcctgttcactctgatggtagtttcttttgctgtgcagaagctctttagtttaattagatcccatttgtcaattttggcttttgttgccattgcttttggtgttctagacatgaagtccttgcccatgcctatgtcctgaatggtaatgcctaggttttcttctagggtttttatggttttaggtctaatgtttagtctttaatccatcttgaattaatttttgtataaggtgtaaggaagggatccattttcagctttctacatatggctagccagttttcccagcaccatttattaaatagggaatcctttccccattgcttgtttttgtcagatttgtcaaagatcagatagttgtagatatgcggtgttatttctcccatccaagtactaaccaggcccgaccctgcttagcttccgagatcagacgagatcgggcgtgttcagggtggtatggccgtagacgatgcggtgttatttctgagggctctgttctgttccattgatctatatctctgttttggtaccagtaccatgctgttttggttactgtagccttgtagtatagtttgaagtcaggtagcgtgatgcctccagctttgttcttttggcttaggattgacttggtgatgcgggctcttttttggttccatatgaactttaaagtagttttttccaattctgtgaagaaagtcattggtagcttgatggggatggcattgaatctataaattaccttgggcaatagggccattttcacaatattgattgttcctacccgtgagcatggaatgttcttccatttgtttgtatcctctttaattccgttaagcagtggtttgtagtcctccttgaagaggtccttcacatcccttgtaagttggattcctaggtattttattctctttgaagcaattgtgaatgggagttcactcatgatttggctctctgtctgttattggtgtataagaatgcttgtgatttttgtacattgattttgtatcctgagactttgctgaagttgcttatcagcttaaggagattttgagctgagacaatagggttttctagatatacaatcatgtcatctgcaaacagggacaatttgacttcctcttttccgaattgaataccctttatttccttctcctgcctgattgccctagccagaacttccaacactatgttgaataggagtggtgagagagggcatccctgtcttgtgccagttttcaaagggaatgcttccagtttttgcccattcagtatgatattggctgtgggtttgacacagatagctcttattattttgagatatgtcccatcaatacctaatttattgagagtttttagcatgaagcgttgttgaattttctcaaaggccttttctgcatctattgagataatcatgtggtttttgtctttggttctgtttatatgctggattacatttattgatttgtgtatattgaaccagccttgcatcccagggatgaagcccacttgatcatggtggataagctttttgatgtgttgctggattcagtttgccagtattttattgaggatttttgcatcagtgttcatcaaggatattgggctaaaattctcttttttggttgtgtctctgcccagctttggtatcaggatgatgctggcctcataaaatgagttagggaggattacctctttttctattgattggaatagtttcagaaggaatggtaccagttcctccttgtacctctggtagaattttgctgtgaatccatctggtcctggactctttttagttggtaagctattgattattgccacaatttcagatcctgttattggtctattcagagattcaacttcttcctggtttagtcttgggagggtgtatgtgtcgaggaatttatccatttcttctagattttctagtttatttgcgtagaggtgtttgtagtattctctgatggtagtttgtatttctgtgggatcggtggtgatatctcctttatcgttttttattgcatctatttgattcttcttttttctttattagtcttgctagcagtctatcaattttgttgatcctttcaaaaaaccagctcctggattcattaattttttgaaggatttttttttgtctctatttccttcagttctgctctgattttagttatttcttgccttcttctagcttttgaatgtgtttgctcttgcttttctagttcttttaattgtgatgttagggtgtcaattttggatctttccttctttctcttgtgggcatttagtgctataaatttcactctgcacactgctttgaatgtgtcccagagattctggtatgttgtgtctttgttctcgttggtttcaaagaacatctttatttctgccttcatttcgttatgtacccagtagtcattcaggagctggttgttcagtttccatgtagttgagcggttttgagtgagtttcttaatcctgaattctagtttgattgcactgtggtctgagagacagcttgttataatttctgttcttttacatttgctgaggagaactttgcttccacctatgtggtcaattttggaataggtgtggtgtggtgctgaaaaaaatgtatattctgttgatttggggtggagagttctgtagatgtcttttaggtccgcttggtgcagagctgagttcaattcctgggtatccttgttaactttctgtgacgttgatctgtctaatgttgacagtggggtgttgaagtttcccattattattgtgtgggagtcaaagtctctttgtaggtcactcaggacttgcttaatgaatcttggtgctcctgtattgggtgcatatatatttaggatagttagctcttcttgttgaattgatcccttaccattatgtaatggcctcctttgtctcttttgatctttgttggtttcaaatctgttttatcagagactaggattgcaacccctgcctttttttgttttccatttgcttggtagatcttcctccatccttttattttgagcctatgtgtgtctctgcacatgagatgggtctcctgaatacagcacactgatgggtctttactctttatccaatttgccagtctgtgtcttttaattggagcatttagtccatttacatttaacgttaatattgttatgtgtgaatttgatcctgtcattatgatgttagttggttattttgctcgttagttgatgcagtttcttcctagtctcaatggtctttacattttgacatgattttgcagcggctggtgccggttgttcctttccatgtttagtgcttccttcaggagctcttttagggcaggcctggtggtgacaaaatctctcagcatttgcttgtctgtaaagtattttatttctcctttacttatgaagcttagtttggctggatatgaaattctgggttgaaaattcttttctttaagaatgttgaatattggcccccactctcttctggcttgtagagtttctgccaagagatccactgttagtctgttgggcttccctttgtgggtaacctgacctttctctctggctgcccttaacattttttccttcatttcaactttggtgaatctgacaattatgtgtcttggagttgctcttctcgaggagtatctttgtggtgttctctgtatttcctgaatctgaatgttggcctgccttgctagattggggaagttctcctggataatatcctgcagagtgttttccaacttggttccattctccccgtcactttcaggtacaccaatcagagcagatttggtcttttcacatagtcccatatttcttggagtctttgttcgtttctttttattcttttttctctaaacttcccttctcgcttcatttcattcatttcatcttccatcactgataccctttcttccagttgatcacatcgtctcctgaggcttctgcattcttgacgtagttctcaagacttggctttcagctccatcagctcctttaagcacttctctgtattggttattctagttatacattcgtttaaatttttttcaaagttttcaacttctttgtgtttggtttgaatttcctcctatagcttggagtaatttgatcgtctgaagctttcctttctcaactcgtcaaagtcattctccgtccagctttgttccattgctggtgaggaactgcattcctcagatggaaatgcagaaatcacccgtcttctgcgtcgctcacgctgggagctgtagaccggagctgttcctattcggccatcttggctcctccccctctctttttttctttattagtctggctaacagtctattttgttagtcttttcaaacaaacagctcctggattcattgattttttgaagagtttttcatgtctgtatctccttcagttctgctctgatcttagttatttcttgttttctgctagcttttgaatttatttgctcttccactatgatcaagtcagcttcatccttgggatgcaaggctggttcaacatatgcgaatcaataaacgtaatccatcacataaccagaaccaatgacaaaaactacatgattatctcagcagatgcagaaaaggcctgcaataaaattgaacacccattcatgctaaaaactctcaactaggtattgatggaacatatctcaaaataataagagctatttgtaacaaacccacagccaatatcatactgaatgggcaaaagctggaagcattccctttgaaaatcaacacaagacaaggatgccctctctcaccactcctcttcaacatggtatgggaagttctggccagaacaatcaggcaagagaaagaaataaggggtattcagataggaagagaggaagtcaaattatctctgtttgcagaggacatgattgtatatttagaaaaccccatcatctcagcccaaaaactccttaagctgataagcaacttcagcaaagtctcaggatacaaaatcaatgtgcaaaaatcacaagcattcctatacaccaataatagacagagagtcaaatcatgaatgaactcccattcagaattgctacaaagagaataaaataacttaaaaatacaacttaaaagggatatgaaggacctcttcaaggagaactacaaaccactgcccagtgaaataagagagggcacaaacagatggaaaaacattccatgctcattgataggaagaatcaatattgtgaaaatggccatactgcccaaagtaatttatagattcagtgctatccccatcaagctaccattgactttcttcacagaattagaaaaaactttaaatttcatatggaaccaaaaaagagcccgtatagccaagacaatcctaagcaaaaagaacaaagctgtaggcatcatgctacctgacttcagactatactacaaggctacagtaaccaaaacagcatggtactggtaccaaaacacatacatagaccaatggaacagaacagaggcctcagaaatgacaccacacatctacaaccatctgatctttgacaaacttgacaaaagcaagtaatggggagaggattccttatttaataaatggtgctgggaaaactggctagccatatgcagaaaacagaaactggatcctttccttgcaccttatataaaaattaactccagatggattaaacacttaaatgtaagacctaaaaccaaaaaagccctagaagaaaacctaggcaatactattcaggacataggcataggcaaagacttcatgactaaaacaccaaaagcaatggcaacaaaagccaaaattgacaaataggatctgattaaactaaagagcttctgcacagtaaaagaaactatcatcagagtgaacaggcagcctacagaatgggagaaaattgttgcaatctctccatctcacaaagggctactatccagaatctacaaggaacttaaacaaacttacaagaaaataccccatcaaaaagtaggcgaaggatatgaacagacacttctcaaaaggacacatttatatgtggccaacaaacatatgaaaaaaggctcatcatcactggtcattagaaaaatgcaaatcaaaaccacaatgagataccatctcacgccagttagaatggcgattatttaagtcaggaaacaacagatgctggagaggacttggagaagtaggaacgcttttacactgttgggagtgtaaattagttcaaccattgtggaagacagtgtggtgattcctcaaggatctagaaccagaaatgccatttgacccagcaatcccattactgggtatatactcaaaggattataaatcatgctactataaagacacatgcacacatgtttattgcagcactattcacaatagcaaagacttgaaaccaacccaacggcccatcaatgatggactggataaagaaaatgtggtacatatataccatggaatactatgcagccataaaaaaggatgagttcatgtcgttgagagtgatggaactacctaatgtagatattgggctgatggatgcaggaaaccaccatggcatgtgtatacctatgtaacaaacttgcacgttctgcacatgtatcccataacttaaagtattaagaaaaaaaaagaaaaaaaactcaccatgctctgtctcatttaagtctcacattgatgttgtaaggaagatactgtttttaccctattttatagatgaaaaaatggaggcctagggaaattgagaacattgcccaaggtcacatggctagtgagtggcagagtcaccattccaaccacagaactgtacagtaaagtactagcttctcttgaatgagaggcagtgcagtgtctaactaaagagatgccccaggcaaggaggcagaaggcaaggtttagttccatgaatgcctctccacctcaattcattcaaccacagtgtaaaaagaaaaagaaatgcctgttttggttatctcacagagtatttgcaagtctaatttatgaagtcctgtgaaggctgagaagctgctttctgctgtgctagtttgggaattgttcatccagactagttgatttctttctggcctccagctggttaaagttgggggctcccttcttctggtccttgggagggatctcctctgtcagagtcaggtgtggagtgtgtgggccatggcccacgttgggtaagctgggtttctcagggtgcagggagagtaccaggaagaaacctgatctcctagaatcttcaaagttcattagctgttcactttaatacaatggagcatttatttctttgtgtttttattatttctgattattgtagctaggtttcattttagtatatttaagacttggatttttttgtcttagcttagcttaaaagtaaacatgttgagcctgttcctctgatttaaggaaattagaacactgaaaatgtttaatttttgataaaggaacgagagaaaagaaagcatgaaagaattctgagtgaagaacttgttgctgctgtgacctatctcaaccaatttttgcctcctgagcacactattgtttatattccctgggacatggccaagtataccaaaaggtgaatgatactcatctgtctggctatgatcgtttccttttcttgtgatgagaaataacaggaagctgacctctgtggtaaagtaaatgttaccctgttaatttccttcatgaacctgttgaggggctgttttgagtgcatcaagaaact

SEQ ID NO: 122377 - DNA, 1120 bp, Homo sapiens
tgctttaagaatgatatggccctaaccactgaatatttacactgtataataaggagataggtcagaaaaaagcccatattttgctaactggtaaattagcaaattgtcagctatttgttttattttgttaaactaacaaagtaaattcaaatatagaccagaagatttaacggtgctgttacagcaatgtataaccttatgcaactttaaacatgttctttattattttgactttacataaaactgaataatatttgttcaggaataatacctgcccacagactttttttgtttttgtttttgtttttgtttttgtttttgtttcttaaagaaatctaaagtagtatggaagttctttggtgatggaataatgattgaaaatcttaaggtatttctctttagactggcatccttcgaaccaactgtgtggactgtttagatcgcaccaacacagcacagtttatggtgggaaaatgtgctctggcctatcagctgtattcactgggactgattgacaaacctaatctacagtttgatacagatgcagttaggtaagtcttattttttgctatttgaatgctgataatggcagaaggcaaacctggttactaataagatttttttatgaaagcgtttctacttttagcttctcaaaaattatgttgctagaaaacattattcaaactcgttctgtttttcttatattttcttctagtagttttatagtttttggtcttatgtttaagtctttaatctgtcttgagttggtttttgtatacgttaagagacgggttcagtttcattcttcagcatatgaatatccaattttcccagcacccatttgttgaagagggtgtcctttccccagtggatgttcttggtgtcttagaataaatatttctattaaaaatttgtgtattcttgccatggtttgggctttgggtttttcttctgttgttgttgttgtttttgcttgtgttaattatgaataaacaccacattctttagataaatccaaagtacttagacaaactagtgggcattgttttaaaacaaatccagatggcattttaaaaaagagtactgtgtcttcatacatactaaaaatctaagatgtata

SEQ ID NO: 122378 - DNA, 1002 bp, Homo sapiens
tgttaggttgtttttgcgttgctataaagaaatacctgagactgagtaatttcataaagaagagaggttgaattggcccatgattttgcaggttgtacaggaaacatcgtgccattatcttctcagtttctaggtggggcctcagggaacttttaatcctggcagaagaagggggagcaggtgtctcacatggcaaggggtgaggggaaggaggtgccacacacttttaaacaaccagatctcttgagaactcactatcgcaaggagtgcatcaacccaaacaccttccgccagactccatctccaaaattgtggattacatttcaacaccagagttcggcagagacaaatatccaaacgatatcacagggtcagggtttcaaagcttatcacgtgtggaagacagtgatcccagaagatggtgctgaggtggcttcacctggcattatgatagtactctaaaggactgccagcagtttcttcccctttctgctcactgctgaaagagggacatcaaagggaacatgctgagaacattttaatttatcaagaatagtgagatagccttctgaggttatccttcaaacagcagattgtgagtgaataagctgtatttggcaatagcagaaataaaacagttggaaaaatgttttgttttaataacgtttgttttaatacccttggtaacttttgttaaagcccaactcttcacctcttctgcaaccaaagcagttgtacatggcaagagaaaagtttgtaatttattactcttaaacagactacagttctccaaaggacaacggactgtcctgtgacatttccatagtaagttcattcttcccctctccaaaatgactatttcataacttgtcctctctccttaaaactacaacacctcagtctcatctgatgaccttgcttcgtgcttcagtgagaaaataagttattgaaagggaacttcctctaattctttttttttttttttttttttttttgagacag

SEQ ID NO: 122379 - DNA, 1523 bp, Homo sapiens
aatatatattttgctttttagatgccgatagacaagattccattaatctcttcctgggagttttccatcccactgaagggaaacctcatctctgggagctcccaacagatttttatttgcatcacaaaaataccatgagacttttgccaacaagaagaaggtatttttcttcctagtctgtaatataaactcccatttggtgttattttgaatatgagatacttttcattttgagaaatcataggctaaaatagtcagttttattttattttttaaaatttttaaaattttttgtgggtacgtagtaggtgtatatttttatggggtacatgaagtgttttgatacaggcatgcaatgggaaggaagtacatcatggagaatggggtatccatcctctgatgcataaagcagtcagtctggccacatgcttgccatgagttccgtactattgatgtcctgatagtaggttggggaaaatgtggctagcaattgttgttttgtattttctctaagatatgaagtttcagaacttccttgttaaacagaagttgtagctccactaaagcaaaccaacagtatcatctttgagtgtttcctacaaacttgaaactctcaaggactctaagatgcagagagtcagtcttagatttttcaagtgtgacagctaagcagcatgtaccttgtaattccaatattctctcctccaggaaacaaccagtctcagtgacactgggaagacgggaagctagagcagtgctactagctagcgtcagataaccactttcatgtccccaccactcacatgcttgagtcacttgccagtacaggttattttgagtacagttaaattggtaatataatattctcagaagaaacaaacagtttacctgaagcagtttagtgtgatgctctgtggtgtgagcctcaggatcaggtagagttgagttggaatctctgcagttctgtgacctgggtcgagtaatttaaactctctaagccttattttccttatctgaaaatgtaaatgcctggacacacctcacagagtcattgtgaggacttaatgaggaggctttttagtgtttttaactgaggagtcatgtactataataatataatcaattttgccacatgaacaaaattttttacataccatacatgaagttagagcctagtccattgcactcaaaggcctctaatgtcaagttctcccatcgtgcttttctcttacagcatcagtttgatagagccctaattttgcgcaaagatacctaccaggccgggcgtggtggctcatgcctgtaatcccaacactttgggaggccaaggcgggaggattacctgaggtcagcagttcgagaccagcctggtcaacatggtgaaaccccatctctactaaaaaaaaaaaaaatacaaaaaatagctgggcatggtggtacgtgcctgtaatcccagctactcgggagtctgaggcaggagaaccgcttgagcccaggaggcagaggttgtcatgagccgagat

SEQ ID NO: 122380 - DNA, 1555 bp, Homo sapiens
aactgttttaactatacacacaggtgtgtactatacagcagagtagattctaactatcagataactacacgcaagggaatcctggttgtaggacttgggtcaaggtcccactactcacctggtggcagagtaagtcactgtaggcacagtccctgggagaagttaacagcagttcatagagtcagcttattaccttctaatcctttttagctaaaagtaaataatatcagagcatcttgactctcaggtgtattcatggcatttttgtagatctgcaacatagttgaaggaagaaagcagttgggaagggaattaccatgttgaagacctactgtgtcaaaagctttgcaaacatgttttaaaaagaaaaatattaactttgaagtaggaacatgttactatagaccatataaattattttatccagtaaattttagaaaaccaacatttacatttggttcatctttttttttaatttttattttatagttatacttactggtggacaccagaggtgataaagcatttaccattgccctatgatgaaggtaggtaactgtttgtgttttagtttttacactaacatattttggcattataccttaatgaacttgaagcattaaatcctttgcacatagtattttattagaaacaaatgaatggctgttcagtattatgttgctgctttaatagataggatattataacatctcttagctttttaaagggcaggaattatattatacttctttttatctatgtaggccaataccttgtattgtgtcttacaattattatgtgtctgtcaaatatttagtcagtaaaatatgatatatcggctcatcactttaaactaatacagtttatatttctacatattttgggagaatgcggaggaagtaaggacctattcacaaggagaacttaaaacttttttcctgtgctaataagcagtgaaaaaaggtacagatgcatgtataaaagtacattttagtcacatttaaattaaatttcattaatttgtcagaggggcaggaaacattctatattaaaggaaaaccttcaagtgtataatacattagaatgatgtttccaaatttaaataattgccaaattttaaataaagcttagttctggctttgttactaactcccctgaccttgagcaagctcattttccatttggtaaagggttcctagcaagatctcctgcgaatctggaatgctccaattgaggactccatctagtcatgcttcagcatcccaactttgggtggggaaggccataaagtaagattacaaagtatttttggttcttattaagttataaattcattttggaaggtatttgtaacttgaaattctgggcaaaatcattactcatattgctgaaaaggtttagttgttctgggagaaaggaaagggttttaactaacagtggctattaacagaatttgaaatataaagggaaacttagggaaaaagctgtacaatttttagctaaaacacaaagggcatttatttaagagcaaaaaggaatttaaagaacctcctct

SEQ ID NO: 122381 - DNA, 2176 bp, Homo sapiens
agacagagacatagaaaaacctgcaagggaaacagagatggctaatcagagaagtggaaagaaccccagaccatattttatcacagccttcaaaaatgctgtttatccttctttctctccccaacactattttttctttttttcctcttttttttttgtttggcatataagcccctattaatttagagaccactttgtgttgttataactatttagcatatggaactatgggctctcaaatgaattgaaatagatatgtccaaggaaggaaactatttaaatgtgctagtaaaataagagactctattaaccaaattgtattatacaaagtgattattccactaaaataatatgatacaacttaggaggagatgatgaaatgaacatagcatacaaaataaaaacaaaacatttcccccgttttcttaacattatttctgatttgatctgtaattgatcttacagttactacttgtgcattctttttcttaaaatatttagtatttgcctgtgagtcctagcacagatgaaaaccacgtggatctagaattctttaaccttttccacttaattagtaaagaatctgtcataatggtgtttttacacagcatcttcagcaagataacaaagagcttggtagctcagcattacattgtcatggcaactgcccaagaatgtttttggtgtttttggggtgtgtgtgtgtgcacgcacgtgtgcacagggacgtgctttaaattgaaactgtagtcaggttcttaaaatgtcgactattcatttttagatttctaaagctatgtccaaaccaagagaaattacatttatttgggattcttgaaattctcctcttgctatgttttattttctagtatatttaagagtcataataagttcaagttcatacacatatgcatctacccatctctggatagttcataatcttactcagtttttcttgaaatcatgaagaaaccatttttttcttttctaaatatgagatatttataacaccaaatgtaaaaaatattgacagtaaataattggcaagaagccagtggaacaggggctcttgaaatgagcgtgcagagacatgaatgggcagctggacactttcaaccacggtcttgcaggactttgcttagaagtggatgttaaaccccaaactggtcaatgtctgtactgtcagcccaggcaccctaagctgtagtttgtgtgagtgggacccctccctgtgagtcataaccactccctgagtgtaggggtggtgatcagggagaaagggcatcagccaacattgaccgaacacactgtgtgatgggcactgttctgtgtaccatagcctgttctaagttctcacaataaccctataaagtacatcttattatcatctccattttacagatggggaaactgaggcacagagaagttatgtaacttgcccaaggtgatacagctagcaagtagaggaaccaggatttaaacccacacaggatggctccagagcccatgatctccatcactaagctatcaatgcccgttgttgccagctgctttccaatcactggggtagcaatgctttattattagcattaacagacctcattttgggcatctgacatgacctggatttttagacacctctatattcagaaatattcagaaattctaatatttctgctctgtcgatcttgagttttaaaaaatacttaaggagaacatacctttattctttcctcagtacctagcatactgtccctaatgtagacacacttaagtttcctgggcaagcatactttgcttgactgatttggtaacatggcatggaggttgtttagccaccactggaacagtgttgctgacattattgtaatcttacaaggttatacatttttagagggcaacccatctttgtgtctctagaacagtaacttaaattgagtgctcagtaaatatttactgaaatgcactgactctcatcccccatcacacccatgaccatcagggcctggttgaggccccatgagcatccctagaatgctccctccatgtcccactggttttcaagggggcatccttgaacactttttagttctttctctattgtgttttttccttataaaccctttgcccctcctgcttttttgttcccctactgccttctgagagagagaaaaaa

SEQ ID NO: 122382 - DNA, 1046 bp, Homo sapiens
aaacaaaaaatgtaattttagatgtctttttgacagctctacataaaattatattgaagcttcttaagcccagtaactttgttttgcacatgcttatctgttcattattattcctattggcctaaagattttgcttttacttgttttaaacagttttaactcttcttagactttgtcatgctataacagaatcagttactggtttgtttataaatcatgtaggtgatttaatttagtttattgtttgttaggtttattgttcaacctttaattttatttttgtttatctggaaccttggatatgtttccctgcagacccataataagaaactcaatcggtgtaatctgaattattcacatacttatttattcccaaagcccctctataatgacttctagagatacaaagggataatcacacttgtgtggagaggtgcaagatggcattttcaggatgccccataatgtgcacacatgtgtgcacacacgagtgtgtgtgtgtgtgcatgtgcttgtgtagtgtattaagactatgaaatctgagaactggaagatgattagggatcatctgattccatcctctgattttataaggagtcctggagagggtcagtagttcattcaggttactttttttttttttaattatacttttaagttctgggatacatgtacagaatgcataggtttgttacataggtatacatgtgccatggtggtttgctgcacccatcaacccatcatctacattaggtatttctcttaatgctatccctcccctagttccccaacccgcaacaggccctccctgtgtccatgtgttctcattgttcaactcccacttctgagtgagaacatgcagtgtttggttttctgttcctgtgttagttgctgagaatgattgtttccagcatcatccatgtccctgcaaaggacatgaactcatcctttttatggctgcatagtattccatggtgtatttgtgccacattttctttatccagtctatcattgataggcatttggtttggttccaagtctttgct

SEQ ID NO: 122383 - DNA, 1045 bp, Homo sapiens
tgtcttctattaagccagatatagaaaagattcgcaagctgtgaaacattgcttcttttgccactaagttttttgttttaaaaattgttatttttcattaagaagttgtttatgctatcatgtgttgggtttgttattttaataattattttttaacttctgtcttaatgtcttatatggtaaatatcactagatataacccatattaaccaaagctaattggggtcttcagtaatgcttttaagagtgtgaagggattctgagactgaaaagtttgagaacttgttcgcatagggtagttgattatttatgtcaatatgcattactaaggcaaccagggacgttattatgttacagccttgctcagtatttgccagcaggatgatatctgtgactggttgaagaaatcttattttctatgatttatgattttttaaggaattcaggaagcaaatgttctctttttaaagggttctatcaaaaactgtctgaacttcttaggatgctttcagctccaaataacagaacctctaactcaactggtttaaacagtaagataatttattatcttacttccctgaaagattgcagatgggcaagctccagagctggtggattcaggggcttcgtgtgatcatgaagtgcccaggtttttccatctctctgctcccccattgtcagtattgccccatcttcagaccagtaggaagatggccacagcagttccaggtgccacagtcagacacagtagtgcccagggcagaagggaaacactgactctgtgtctcctccttaggggcaaggagtcccagaacctgctcagcaaatttctcatgtcaaatggccaggattgggtcacaggctaacccctaagtatgttactgccaggctatgtatgggctgatggtgattggcttagaatactcattcagggtgcatggatgtagggaagttgatcacagtgacttagttattaaaaacaaaatccttcgtacttttccagttaactggaaattcatttgcacaggtgcccaaaaagagaggt

SEQ ID NO: 122384 - DNA, 1035 bp, Homo sapiens
ctttccctcatttaatctttttaacattaggataaggtaggaaaaggtattatctccattttgcagaggagaactgaagtttggagaagttgtaacttggcccatgtctcacagcttctatggagtaagggctggataaggcctgaattttaatccaggtctgtctgactccacagcacatgtctgaagtcagtgttgttaccgaaagcgactatgaatttctctgacttttaaaaaagaatattctgtatgtgatttccatttaaaaaatgatactaatgtagcatttattaaaatgtattataaccccatctctactgaaaatacaataattagcccagcatggtggcccacgcctgcagtcccagctactcgggaggctgaggcaggagaatcacttgaacccaggaggtggaggttgcagtgagccaagatcgcaccactgcactccagcctgggtgacagagcgagattccatctaaaaaaaaaaaaaaaacattgtttatattactgtttccaattagactgtgaaaatcttgagctgtatcttgttcgtttttgggttcccaaccttcagtataggctgtagtttataggaggtctacacgtttgttaaaataatgaaagaatgaatgaatcagcgtcatgattatcagaattagttactgtgaggtgctaaaaatacagaagcagaaatagataaagattattgtggccaggcatggtggcacatgtctgtaatcccagcatgttggaaggctgaggctggagggtcccttgcaccaaggagtttgagaccagcctggggaagatggcaataccttgtttctacaaaaacaaaacaaaacgaattactgtgtttcaaaaagttaaatgggtagtgtttccatccttactcttgaaccttgctttctttgagaaaagttccaggtgtcatttttctttttcgctcattaatttcattcatttaactaatatttactaataattattatatgccaggcacataaggctacttatgtagtcttatgtaac

SEQ ID NO: 122385 - DNA, 1357 bp, Homo sapiens
tcttactgaagccaaacagaatgcataggacccttggaatacaaataagttttttcctccctttattcactgctgtactaagagcaaatttatgtcctccatgatttggccctagaatgcatcagtaatctctgttgcttttcaagcctgacaaccaggctctgaataaagaatgaataccagccttgaatgaacatttcaggcacttttttttagaaggctagtcatcaatacctttttctcattattgtaaggccagctgctgtgtttttcctttagaaaaaaaaaacataactgagcatgtattgaagtcatctttcgcaagatatttatagtttctttttgtatatttgtttagtggtaatgattttgaatattttatagtatctgtataaatgtaatccttgtgtatatgtatgtgttatactcaaagactttttgatagatttcttatttatcctgcctttaagctagctttttcaatactactcttctgacaccagtgtctccaggagtattaaaattccatatcttcctttctggcctggaaacaatataaaagacacaaaagccattaagtcacagtatgttttccattgtaacagcttccaatattacttaaagcgtccatttcattcttacctatgcaaaccatgaaatgttatacttctaattttaatgaaaatctataggaactgtttataccattccagataaaggagcacatctcctattattgatggtttatttaatctttttattatatatttattatatttcttttcatttattcagcagcatttgttgatgcctgcagagttttgagactgctgggtattggggccacaacagtgaatagacagagccctactttctgagtatacagataaattaacaaagaacaatgaatgttgtcaagtagctcataggaaagagaacagtcctagtctaggaagtcaggaaaggcctctaaaaggaaatgacactgaaggtttgagatcaacctagacagataaatgttgaagtgagtgtggagtctcccaggcaaaggaaacagatgcgtgtgaatgtaagcaaatgcttggtgcagagcatacaagcaatgcaatagctggaaatacattagaaagataagcaggagcaaatcatgagaggatcttaggaaacatagtaaggagtttgtattttattccatgggcaataaaactgaagaagtgagttaccagtgcagcattttggaaagatagctgatggctacaaagtggttaatggattagagagaagtcagcttggaggtcaagagaccactcaggctgttagaatgggtggacagatgatagttataatggtggcagag

SEQ ID NO: 122386 - DNA, 1010 bp, Homo sapiens
ttttgatttaaatgaatggtttggattcactgtatcaggtattcagctacgcaaagtagaagagcagcgtgaacaggaagctaagcatgaacgcattgaaaacgatgttgccaccatcctgtctcgccgtattgctgttgaatatagtgattcggaagatgattcagaatttgatgaagtagattggttggagtaagaaaaatgcattgataaatattacaaaactgaatgcaaatgtcctttgtggtgcttgttccttgaaaatgtttggtcattctagtgttttgctttcttttccttataataaatgacccttttcctccataacttttgatttctaaggaaaatattagcatacatttcaaactaaatgttttacagtggcttatcttttttttccccctgaaaagactaatttggtcaaataaaccactaagtattaagcatggacagctgttgttagagtagcagattcagttttttgatatatcttaattgtgtactttgtgaattttaatttaaagaaagcaactgaaattgaaatcttgagggcagctgtgtctactaatgagccttattccatttcctgatgttttaaaagaagaaacactgccttgattatacgaatacactcagaaagtacatttagcttgtagtgttgaattctcttaaaggaatgcttgaattttttcattattgttttattgtttttatatacttgccttatttgaatgtttagcagtatccccttcccacttatatattgtgtgatatgattttgcttgcctataggagttaaaaacttttccatgtgaaatactctgacttaaacatacatgtaacttacataactgttaagaataacagtctgatttaataaatggttcattttaaaagttcatcagtgttgctctttgaataaaatgatttatcataatttatcaaatactgtatggtaggctttaaatagtgaatgaaaatttgaaaaacacttaggctacataatttcc

SEQ ID NO: 122387 - DNA, 1059 bp, Homo sapiens
cagctcctcttcagattgcccctggagttcttcacccagctcctcctccaattgcacctcctctagtacagccctctccaccagtagctagagctgccccagtatgtgagactgtaccagttcatccactcccacaaggtgaagttcaggggctgcctccacccccaccaccgcctcctctgcctccacctggcattcgaccatcatcacctgtcacagttacagctcttgctcatcctccctctgggctacatccaactccatctactgccccaggtccccatgttccattaatgcctccatctcctccatcacaagttatacctgcttctgagccaaagcgccatccatcaaccctacctgtaatcagtgatgccaggagtgtgctactggaagcaatacgaaaaggtaattttctcagctccatgaaaagcattgctatagtagcattggaaactttctaaatatttaagacaaaaatgtgttccttatctataaaattttaggtgatcatgtttgtgtacaaatggcctttagaaagtaaagctatatccaacttatatttaaaattattttccagaaaatatatcacatttgaccattttattttcatgctttgtaggtatccttaaaatgtttattgagtgaatgagaaatttaatatatcagacttaaatgttatagaacatttaattaaaaccctttatattatgcttaatgtgtatattaactcctttaaaaatggtattttcttcaatgttaaggctgttcattttgggtatccatgacacttgctctaccagatgcctttagaggagtgagtttcctcccttagtaacaaaggaaagacttctcatattcattcatttattgtcattatttcctaagcaatgactataggccaggcactgagcatatagaatgaataatagtgcctttccctcaaatacaatggataatgaagccacagaaaatatattcaacaatgtttaatttatttgaccattgaggtgatagaagaaatgtaccacctcattaattttttagggggtggtgagc

SEQ ID NO: 122388 - DNA, 1050 bp, Homo sapiens
tagtgttgttatcaagcatatcatgtgcagtgtattaagaaaaattaaggattttttggaatgtgggtaacagtctaagaaatgggaaccaaagatgtgattattaatactaatttggtattaaggaaaatacttaaagaatttcagagaggattggcagttgcttataataatctttcagtaaagctattttgaagtttaatcttgtcagttattatccaaatgataaatttctaatagagaaatattagggaaattttctaatagagatatagagatcagctttacaattttcagttaaaaatccaattttctatcactgactcatttggtgttccatcctcaggaaaagagagagctgtaaatttctttttgtggtttgtaattagctgtcattgatttaactgaaatagcatatgatgagacttcatagtttcagtataaatatagcattgtattggccacatgtattgccacaaaattgcattatgatcaatgttgagtcattatagagactcctgtcagtatagaattgagcattttatttattaaagtaagcataaaatatctgagtggatgccaaagttgcatgagagaatgagactatttagactattacaaaccaaagcaccactcattaatttttttattgatgtgcttttagttctttttttttttctaaatactgttgaagatgttaaatttctataggagcatgttattggatccattttgatataattactgatagtcatttatagtttgtgtggttagattttctctttaggcttttctcttttaataacttgctagaatctctttgtcatttcagttctgctacaggtttgatagaaaatcgccctcagtcaccagctacaggcagaacacctgtgtttgtgagccccactcccccacctcctccaccacctcttccatctgccttgtcaacttcctcattaagagcttcaatgacttcaactcctccccctccagtacctcccccacctccacctccagccactgctttgcaagctccagcagtaccaccac

SEQ ID NO: 122389 - DNA, 1135 bp, Homo sapiens
ggcatatatatatatatatatatatatatatatatatagagagagagagagagagagagagagagagagagagagaggagagagaggagagagaggagagagagagagagagagagagagacgctgatggggctgggttccctatttgtatgaggcacagattactggtggcttcaccacatttccctagtgcacatgcaggcccttagtctgctgtgggcatgtttaagcaagccccctgtgcaagttcccttatctgcacaaagcatctggtgtaagcccttgtggggtgggtcagaggttctctggggacccttcccttactgtctgcctaaagcaagctagctaactcctttcattaacaaccactgggattctgaatacctaagggatctcttcccctggcttttctcttatggaatatagtcagttcttattgccaagattagtcttttccatctctgtatctacacctagcatttgtatccctaccaattgttgaataaatgagtaactttatacctgctttttcttccatttgggatgcttcccttatctgccagagaaactgtctctggaagtatcttgatcaccaaataacttttgacacctgaaagtgaggtgcttctatctctgctgtgttgctcttaccttatattaagagctgcctgttattgggctcctctgtatgaggtgcacttcaaggctcttttcttgcttcttttagagacagatgtttttattcctattttacagataaggaaattgataccaaggtctcacagtgaatagaacaaatattaggacttatctattaaattgctttaaatatttgcttaaatgtctggttctccctctgctcaaaattcagtaatggcagggatcttcttcaagttattttggcttactcttttcagtaataagaacttacacaactagaggaatacagtgattttagatttatgatttttttttttcagaagttgtaacaagagggtgtaaaagatctcctaaatttctgaatctatatcttgggcatccctgggacagataatcttctaggtctttgatgaatcttgggttctgctacttggcctaaaatttatttctagctaatataaatgctgattatata

SEQ ID NO: 122390 - DNA, 1033 bp, Homo sapiens
ccgtcatgtcggctgcgattgcagctctggccgcttcctatggttcgggttcagggtccgaatcggactcggacagtgagagcagtcggtgtccgctgccagccgccgactccctcatgcacttgactaaatcgccttcatcaaagccgtctctagcagtggcagtggactcggctccggaggtggcagttaaggtaagcacttttgctactaatgcagtgtgggaattgttggcttcagctccagaactgccagccgcttgttaggtaccgggttacctctttctcagtgctcagagataagttgctaacgtttgaatttcttctccttcccacatgcatcctcgggagaggcagaattggaagttcggaatagccctccgatgctctctgcccttgcctcccgccatcagaaagcaagtggaaggaggggatgaaatttgaatttgtggattagggacatagcctggaaagtgcaggtgtaatctcggaacataagtgaaattagatcaggacttcccaaactagagtattgtgtgagcagtggcctcgatttgtcttatttttgaagaactaggttctaatcctggcaccaccacttgtgtgaacttggacaagttatgcagcctcctttctttcctcacctgtacagtggagatcattttcaaaacatctgtctacatgaaaagatgagtgtgaaaattgagtgaaattacacaaataaagcatatagcacagagccaactagtgagagtgcagtaaatgttttatgattgtgtgtgttaatacagtgagaaaaaggccttggatttgagaaacagctgcatgatctcaatggaggaagctgattaataaggcaagagtttccaggcagaggtgacaggcaagcctgagaacgcaaagagcctagtgggtttgaagaactgaggaaaagctgatgtgtctggagcctgatgagagcatctaccaattggtagtgtaggcccagtagagcccgaggtaggtgatcagctcaagatgtgaagaggggaggc

SEQ ID NO: 122391 - DNA, 1019 bp, Homo sapiens
taagatcagtcttgtctaagctttaacaactgtctctttaaaccttagttttaacactgtctgttttttctttgcccccaggtactgagcaagtatatgacttctattagtttgtcctataattttcttatagaaagttcttatctgacttctgatagtaattcctataccagattcctatcaacttttgttgttgttgttcttgttttttaatctttccacatgaaatgtaaggctgtgagacctttccgttaccttccctcatttgcaaagtgcaaggaagcaaacctttcttataccttgtagtggtgttatctaacagacatacaggaggtgacacatgaattcagttttacctcaatctcataaccctgggctatcactgctggaatataatacaaatatttattttaattttcttcccatttttaaaagttgtaagattgttataatctcagtgaattatttctggaagatttatattctacaatgcagttagtttatcatagagcccacctgtagagtccttatcactgaaaatagtctcatttactgtgtcatcccgtttacttactctacagttttgcttttagcttgcatttatggtatttctcctgacttctcagcccctcagtggttgtgtgaattttgtcctgttttctgcctgctcccctgccagtcttacttggggcttctcaatgaagtttcttccttttgttcgactttcatctagaattttctctacacccacctacagaagtggaaaatagaattttaaataaatacttttagtctcacaataattattaacatgagttttaacttcaatatttgaaatcctttattaacatttttattttattttttttgagacagtctcactctcttgcccaggctggagtgcagtggcgcgatctcagctcactgcaagctccgcctcctgggttcaacgccattctcctgcctcagcctccctagtagctgggactacaggcacccgccaccacgcctggctaatt

SEQ ID NO: 122392 - DNA, 1134 bp, Homo sapiens
ctctcctctggttaagaacatattttaatgctgaaaaaaactatatgcaaatcagctaatagccaggtggttggttctgttatagcatatcatgagggtgagttcagcacttacatccttagcttgtttgaaaagcatgcttcatgatgaatctttttctgttccccaaaagaagttccctatattctgtttttttgtgtgtgtgtgtgagatggagtctcgctctgtcgcccaggctggagtgcagtggcgcgatctcagctcactgcaagctacacctccccggttcacaccattctcctgcctcagcctcccgagtagctgggactactttggatgaaaaatgaaaataataagtctatcctctaggatgtgccctttagaaaaaatgggcttagtacttttttatgtattctattatcgtacacatgagttgtaggccataaagtgatcagtgatttagcactcttgtgaatataccagactaatgttaccaaacatttactgtgctagcacacccatttgagaaaaaaactgatttgagctaacttaggtagactttctttccttaaattcccatggaccactgaagaccacatttatatgtagctacatactttataattagtttaaaaagcacattcgtatgctggtagatatccttccttctcttaaggaaatataaagaatgattgatgaaatagaaatatattaagattgggaaggaagactgtccttactgcaaatggtattttcaaaataatagctagattttatgtaatcttcttacccttttttatttaataatttacataatttgataaacttagccctgcaatatctattaccaagaagaaaaggaaaatggtttctagatttccaagtgcatcatgtacatgtattttcaagctcttagaatatttaaaactaaagtttgatgtgttggccagagaggctcttagtaatgtaatgtcagtatgcaaaattcatcctataagaaacatattatgctggagtctagcctgagctttgggttctaaatagaaaaatatagctttgggttctaaatagaaatatagctcaggggccgggagtggtggctcacacctgtaatgccagcactttgggaggcca

SEQ ID NO: 122393 - DNA, 1050 bp, Homo sapiens
ttctctcatgcttttttattaaaatacaatattgaacaattttcataaagatttccttgatattgctattaagctgccatggtagctactcttctgatactagacattcagatagtaactacaaaatcagccttctgtgacactagaattgattataaattttattgatttatgaatttatttaaaattttcaacaaattttatctctatatatatcttaaaaactactataaagtttgtaaagtaaatgctctgccgttcccttcctcacctcctaatctcactgtctccatgagccagagagtgttctaggtcccaggcatacagcagtggacaagatcaagaaaatcatgacctcatgaagcttatattctagctgttacttacatccagtaaatccatgtttatagtaatagaaataaacaggtgatatctaagatgaataaacttattctactattttttattttagattttatctgttgacttgttattatagatagagatttactactaccccatcttctgtccccagctcctcccaaaaaaattgtgtcacaaatgtatagctatcacttatatccttaggagtatgtaaaaacaattaactgaaaaacaacattatgtgctaaaattcagtttccattctgaaactagattttctgattgccttgtctttttacttgtataactagtataacatgttaaaatttatttctaggtgtcacagaaggataagttttgaaaactgattttatatagttgaaaagtattatctagtatccattatgtatttagtaccatttcataatttgtggaagaggtaatcagtctctgcttatagaagacttgagcttggccgggcctgtaagcccagcactttgggaggccgaggcgggcgcattgccagagctcaggagttcgagaccagcctgggcaacacagtaaaaccctgtctctactaaaacagaaaaaattagccaggcgtggtagtgtgcaccgagtagtcccagctactcgggaggctgaggcaggagaattgcttgaact

SEQ ID NO: 122394 - DNA, 1042 bp, Homo sapiens
catcagatatttaggtttgatgaagccatatttggttcttcaagcttcagttttatctccaaggagtctatttagtactatggtacttaaaactataataacaataatataaaaataacatttattgagtacttactctgtgccaggcatgctgctaattgctgtatatatactatgtcatttaattctcacaggtgactttattgtaaaatttgtgatgaaagtgggaaaagataaatgaaaaggaactggaagggcataagagaggaaagcaggggaaaaggatagttgatatattttgttttgttttaacttccttcttaacctgttttatttctgcttctttaccagtgactaacaaggcccaagtattatcttcccttgctataattatgccacagtgaagtctttatagatcactaagatgtgtaagtgatgaaaagaagtatagatattatctaaaggtctataatctctggatatttaggaatttcgaaatactacctctagttgtaaatgatagcagttattttaagcacttaaatcttagctgactcatgatcttgacatcattggagtgttattacctaaaccttaatatggaatgatatacctgtgaataaaatgttattttaagaatgttaggtttcatgactatgggttgtatttgtttattgattttctttgcctttttgtttcagttaaagaaatgtatgactatcaaggcaggtcctatcttcacatacctcaggatgttggtgttaatctacggtcaactatgccacctgagaagtgttatcttcccaaaaaacaaattcatgtgtggtctggacacacaaaggtaagcaagttggttgtttctgtttgctgtaatgttataataatgaagccaacgtaaagttttagctgttgatgtggaacatttagtatttctggtaaaggtacagggaagtcaaattgaatgtaagcctgagttatgctttggagatgcccacacatccatcacaagtgactaatcagtcttcaaggccatctgaattgg

SEQ ID NO: 122395 - DNA, 1087 bp, Homo sapiens
cagagagagaaaagaaaggaactacgtattagagttaaagtcagtgagatttagtaacggcatgtgaatgatcacagtgagacaggaatctagagtgactcccatgaggctggatgaacgatggtgccattcaccaagaaggaacataagatgatggtaaggttttagatacaccaaatttgagctgcctttgggatattgaggtaaaaatgttcagtaagcaattagatagccagaggtcgagctttgaagagagactgggaattgacagctaaagcataaaaaaaggatgagattgagagaactccttgaagaaagaaagaaggccaaagggaggacagctttgtgacaaaccagatttttggtagagaaaggtttattgtctttgtcagatttcatgtgaaggctagttactcattccaaatttaactgtaccacgttgaaacggtgtgactcgtagtggctctgtttttagattaaagtgggagtctgttcagcagtgctttatgattttaaggcctccctgcacaaattaatactgcctaagatgtcaccgcagcctaaaggaagacttgtggaaggctctcagctgtgtacaggggaacaaaatgtctccatcagatagagtggatttggtccgcatctgtctcccctctactggcagaccatttttctgtggaaaactgaaattttcctcctgaaggagatgatagaagctctgactgggactccagctgtagaaaaggatgcctaattaccatgacacgtacctcctgatgggagttcactggaggtgatggtttagagctgctgcatgtggttaacaatttgtgccatgctcattttgcacaattgtacgtgtcttggtcatggtggggtggcaaaaataggaacatttttgcttttgtttagccacattttatttttccctgtaacttttaaaagagttgagtgaactggcaatattcatttttaagtaaagtataataatcagcaccttaaaattagtgtattatcaaaatatcatcttaaagcaaaagaaggtagcctgggcaacatggcaaaaccctgtctctacagaaaatac

SEQ ID NO: 122396 - DNA, 1056 bp, Homo sapiens
ttaagtaattgctatggcagacttaaaagaaaagttaaaccttttcctcttggttcttaaccaagatgttatgcatcagaatcacctgaggagcttcttcaaggggaaaaaaacgcccacattctgaagcccacacataacatattctaagtcagtaaatcaggcggtggcattccagtgatcttgactcacagctgagaaccactgcttagtgctgtttgtctttatggtgttaatgttttaagagaagaagatatatgatacttcacctcattgctgtttctgttgactccacctttaggtcacagtaaggctgttagggatatctgcttcaatactgcaggaacacagttcctcagtgcagcctatgacaggtatcttaagctctgggacactgagacaggtaagagttcacttatgctaatacacattcatcttacaagttatttatatttgaaatggtgtgagtagtcttttgtggcaaaatggcaccttctctaactgctgattctcataccattcactgtcagcaaatatcacaaaatacatttgtaagtcgaaactgagcatgagtagctctttcactgtgaaacttgtttccaccagatagattttataaagcaaacgtactgacaaataagcaaagtggaaatcttgtataggccatctaattgatttttttgttcccctacatcacctagcactgtgcattgcacataacagaagtgcaataaatgtctaatgaacaaaattaaatgtatttgcgcaaattgattaaaatgtaggtctcaactttcacaggccagttggttttatatattcacagccatactaattgctgtttattaattgattcacattaatatgttgtggctagtataattttatgtaattataaaaattatcttactatcttattgtcttactgtcattacccttactgcatctgaagggtaatgataatagttaatgtttattaaacatcatttaacaggcataattgctaagcactgatattcagtgtctccttcaatcttaatttatccctatgaggta

SEQ ID NO: 122397 - DNA, 1263 bp, Homo sapiens
tttgtcatcattttcctcttcatttttcctcttcttaaacttcttataaacgaaatcataccattttttctcttttgtttctagctccagcataatatctgagattccctcatggcttgtaccagtagtttgttcttttttattgcttgcactattccattatatgaatgaagttataatttatttattctacaattggtagtaccgatttacttttgaaaaaattatttttaatcattaaaaatctgtgaaaaagaacaaatgtagtttacagtaaagagcaagcaggcagcccttcctcaaaatgtattaagcaggtgacctctagatcttaatctcacagtcatctttaagtggtcaaatttattttacctatttaatttgagtctttggttttaggacagtgtatatcaagatttacaaaccgaaaagtaccttattgtgtcaaattcaatcctgatgaagataagcaaaatctctttgtggctgggatgtctgataagaagattgtgcaagtaagtctttcacagtattttgttaagactcctaagctttatgttgtataaggggatggaataagttaataagctaatattactcatttaatgtttgctacttttagggacggctaatgcaccattcttagcagaaaaatttacatttataaaaatatcgtgttgaagatcttctccttctccactttccagaattatggtctttcataaatccactctacttctgtctttaccttttttcttgcctgatacacagtgggacattcgaagtggagaaattgtgcaggaatatgatcggcatttgggagctgtcaacaccattgtttttgtggatgagaataggagatttgtgagcacatctgatgataaaagcctaagagtttgggaatggtgagtttccatcagtagaaaatctgatttacataaagcaagcagttaaaaattatatagacaaagatgaagcctgataatatgcaaccatttgaatattttttgcaactgtgatcctggcttgccaatcaaactgttttaactatttaagtactgacaatatgcagattaaatccaaacatgctaccatttataatctttggatagtctttccaaaggatgtgtatcttgagttgtttttcttatacggatgacagatttgtattttgctgtcttacattctttattaggtaccttattcatctctgtaaaataactggcaagcagtagggggactgagcataagatcatggcccta

SEQ ID NO: 122398 - DNA, 1026 bp, Homo sapiens
tcaccctaccatggtacatttttaatttaatttttggttttatttcaacagcttttggagtaaaagtgggttttggttacatggatgaattatatagtggtgaattctgagattttagtgtatccatcaccatggtacattattaaagaactttctttcagtaacagattttttaacataaaggccaaagtttaaatgaaatagaaaacaaaatcaccaccactgttataatgatcatggaaagtgatttatgaagtacaggatttaccataagcagtacagtgtcatcttgtgatttttcttcttccagaaagtttcatgaaagatttattaaatatataatatcaagagtttgcttttatttgcatattattcctttgttccagagataattctgaaggtactttttaaaagttgcttattctgatatgctatttaaaatttttagggatatccctgtggatttcaagtacatagcagaacccagtatgcactcaatgcctgcagtgactttgtctccaaatggtgagttagtatgtagattgtatttttaaatgagcttctaagatacagtgtgatttctttattcaaaagaactttggccccttccttcttggggaagtttgtcactgtgccattatttgtataaggtaatctttacaatattagaaagaattactggttttcatatgcaagtcacctcacctacttttctgtgtctctttttaaataaaaataaaagaaacaatgatttacagctaacattgattgaacatcagatttttatttaacaatcagttttcttttcttttttcttttcccctcctctcccctcctctcctctcccctcccctcttttcttttcttttcttcttttcgagacagggtctccctttgttgcccaggctagtctcaaactcctgggctcaagtgatcttccctcctcagcctcccaaggtgctgggattacaggcctaagccactatgcccggccagagttttcttttctaattctccttccaaaca

SEQ ID NO: 122399 - DNA, 1461 bp, Homo sapiens
tcctaacaacaagggtacttctgagaaatgcagtgttaggtgattttgtcattttgtgaacatcacacagagtacttacacaaacctagatggtatagtctacttaccctaggctgtatggtatagcctgttgctcctaggctttacccctgtatggcatgttgctgttctgaataatgtagtcagtggtaagcatttgtgtatctaaacatagaaaaggtacagtaaaatctcagcatagaaaaggtacagttaaaatttagcactataatcttatgggaccactgtcatacgtgcggtccatcattgaccaaaacattgttaagtggtgcatgactatagacgctgcagtttaggctctaggggctttgatgaatcctaagtagagaaaagcattgtagccttttaaaaagttactataatttttaatatatctttttttgtatagttttatttaataaccctaggctttctcaccccttaatctttctttattctgtaattaccacagataagtctctttctcctatttcccatagttctgttgtctatacttactataaattaatttcatttcacaacttttagcttatttctttaacattaagcttggaatttctatatttccttatttttttaaaaacttttatatgagagtgctcaatgatataggatcgtatatgcaaaagccattagtttatatattaatacctcttgccagtgacatatttataacattttacaggtggtatagtaaatttattttttagtattataaagtatttgggagcaaaacttatattaatcacagtgaacatatttaaaataaaaagttttaaaaattgttttagtcttcctctaaaatacctcatttattgaatttacaggaaaatggctagcatgccaatcaatggacaaccaaatcttaatttttggagcacagaacagatttagattaaataagaaaaaaatttttaagggccatatggtagcaggctatgcttgtcaggtggacttttcaccagacatgaggtaagtttaaatcttctaatccattctcgtattcaaatatgattatataaactgttgttgtacaaataacacttgacacatcactctcacataatatgtttttatgagaactcgatgatctgtcaaaattgtcaaaatgctggatataaaggcaagaacaaattaggaaaattacattttgctttttttaggttcttgcttcagtatattcccttctattacttaggcttatgccctttagccacctaataaatccctgtctatataaccaatgccttattttctctgcttttctaagcaagactagaagtgctataatcactgtattgctatgattgaatgaacaccagaagaattaattgtgtattacagtgttgcagttacagcttcactacagcttgtctgtgctgaaacctcaaatccagcttt

SEQ ID NO: 122400 - DNA, 1021 bp, Homo sapiens
ttgatgatatatgttgtatatttttagttgtaaagcagtaatctttaactgtagcattcctctaattataaacagtgaaaaatcaaaatcagtccagagttcttttgttgacttaattcctgatcagtatagacaggactatatatatttaatcagagaattacattatatctgaagatggagctcaggagaatgcaccaagactttgaattgtatttacattcactgtcagtaaagacctggctacgctttgagaaatcaggatctcctaggtcattgcttcgcagctgtgattactgaaatcctcctcataggagataaagtacgaggggtagagtccaagatgtcaacttgtaatttctttgaagtcatatgttttatctttaaaattattcttattttacctgtgaatatatacaacagaactttttaagattaaaaaatttttaaacctctatgtctgaaaaaaaaaatgacactcctggaagatggctagggttccccagtttgagaagcagtggccatggtgaaaaatagtttttgaaaacatcagattataaaatcaagatagtccggacgcggtggcacatgcctgtaatcccagcactttgggaggctgaggcaggtgaatcacctgaggtcaggagttcaagaccagcctggccaacatagtgaaaccccgtctctactaaaaacacaaaaattagccaggcttggtggctggcgcctgtaattccagctactcagaaggctgaggcagggagaattgcttgaacccaggagtggaggttgcagtgagctgagatcatgccactgcactccagcctgggcgacagagcgagactccacctcaaaaaataaaatcaagataacctcttgaatgtaatagctcatagcactttaatttggcaagccatttttcctgttttattataaatctatattagatgtttgaatatggtttgaaatatttcactaccgtgctgaaaaaggttggttgatagcagcttggagtgctaac

SEQ ID NO: 122401 - DNA, 1018 bp, Homo sapiens
aggacagatgagctcaaggtaaggtagctttggcagcagggctgatactatgaggctgaaacaatccttgtgatgaagtagatcatgcagtgacatacaaagaccaaggattatgtatatttttatatctctgtggttttgaaactttagtacttagaattttggccttctgcactactcttttgctcttacgaacataatggactcttaagaatggaaagggatgacatttacctatgtgtgctgcctcattcctggtgaagcaactgctacttgttctctatgcctctaaaatgatgctgttttctctgctaaaggtaaaagaaaagaaaaaaatagttggaaaataagacatgcaacttgatgtgcttttgagtaaatttatgcagcagaaactatacaatgaaggaagaattctatggaaattacaaatccaaaactctatgatgatgtcttcctagggagtagagaaaggcagtgaaatggcagttagaccaacagaggcttgaaggattcaagtacaagtaatattttgtataaaacatagcagtttaggtccccataatcctcaaaaatagtcacaaatataacaaagttcattgttttagggtttttaaaaaacgtgttgtacctaaggccatacttactcttctatgctatcactgcaaaggggtgatatgtatgtattatataaaaaaaaaaacccttaatgcactgttatctcctaaatatttagtaaattaatactatttaatttttttaaagatttgtctgtgtagacactaaaagtattacacaaaatctggactgaaggtgtcctttttaacaacaatttaaagtactttttatatatgttatgtagtatatcctttctaaactgcctagtttgtatattcctataattcctatttgtgaagtgtacctgttcttgtctcttttttcagtcattttctgcacgcatccccctttatatggttatagagatgactgtagcttttcgtgctccactgcgaggttt

SEQ ID NO: 122402 - DNA, 1075 bp, Homo sapiens
ttttgatcaaaagacgtgttacttccctttgaaggaaaagtttttagtgtgtattgtacataaagtcggcttctctaaagaaccattggtttcttcacatctgggtctgcgtgagtaactttcttgcataatcaaggttactcaagtagaagcctgaaaattaatctgcttttaaaataaagagcagtgttctccattcgtatttgtattagatatagagtgactatttttaaagcatgttaaaaatttaggttttattcatgtttaaagtatgtattatgtatgcataattttgctgttgttactgaaacttaattctatcaagaatctttttcattgcactgaatgatttcttttgcccctaggagaaaacttaataattgtgcctaaaaactatgggcggatagtataagactatactagacaaagtgaatatttgcatttccattatctatgaattagtggctgagttctttcttagctgctttaaggagcccctcactccccagagtcaaaaggaaatgtaaaaacttagagctcccattgtaatgtaaggggcaagaaatttgtgttcttctgaatgctactagcagcaccagccttgttttaaatgttttcttgagctagaagaaatagctgattattgtatatgcaaattacatgcatttttaaaaactattctttctgaacttatctacctggttatgatactgtgggtccatacacaagtaaaataagattagacagaagccagtatacattttgcactattgatgtgatactgtagccagccaggaccttactgatctcagcataataatgctcactaataatgaagtctgcatagtgacactcatcaagactgaagatgaagcaggttacgtgctccattggaaggagtttctgatagtctcctgctgttttaccccttccattttttaaaataagaaattagcagccctctgcataatgtagctgcctatatgcagttttatcctgtgccctaaagcctcactgtccagagctgttggtcatcagatgcttattgcaccctcaccatgtgcctggtgccctg

SEQ ID NO: 122403 - DNA, 1646 bp, Homo sapiens
ctggagtgcaatggcgcgatcttggctcactgcaacctccgcctcctgggttcaagcaattctccctgcctcagtctcccaagtagctgggactacaggctcccgccaccacgcctggctaatttttttgtgtatttagtagagatggggtttcaccatgttggccaggctggtctcgaactcctgacctcaggtgatctgcctgccttggcttcccaaagtgctgggattacaggcatgagccaccacgctaggcctattctggtttcttttactagaaattatatttattgaaagttgaatgctttttagaaatatgttaaaatgtgttaatcagcctggtttctttgctattagaatataccatgctaaaggtgatgcaaaattgtgctcacttgacccactacaaattcatgctgccctatttcaagcccaccctgctgtttagttttctactttttcagttaactccctagcccagttgctaaataagctgttctaaaccaacttccttttctttaaacacctctagcctaagtttgctgagattatcagattcattcagaagtttgttgatgttaattaagtagctggtagctttccttctcttccctcccccacttccaccataatttctcacttgtctatttttattttactcttgcactccttttcttagaggcatttattgagtgcctactttttgccagatacaggcgaaagggagataaaggatggtcccttctgtgagagacagtaaaatgaacagtttactatacattgcaatatgtactttgatgttaccgcatttattttacacaaccaccctctgaaaataaggaagacaagatttagagaggttgtagcttcctcagcctgtcaaagctagaacttgaattctaagtcctgaggctctttccctacaaacatccctgcctagtgatatcagagctgtctggtgtgatctcactgacctctactctttggctgtacagccctgcccttgagaaagcctctgtgaaagacagactttcctttcctaagtcctatctactagtgcccttcctagcttctaaatgtcttcctacctcatagtacaatattgctatttccccttctcaagtttctctttttcacctttaaaccttcatcgtccttttcccaatttaaaatacatcttatatccatcttgtttttctttagcacttgctctattcatttccctttttgttcctctacttttagaacacatgatgttcactctttggttccacttactctaatttgttataacctggcctctaattccatccctctatcaaaagtcctctctgaaaggacacctgtgacctctactttaccaaatcaagtggcctgtattaatcaactttctcctttactgcagtaaaccatttgttcttctgacagtcctggctttgagggtgtcttctccgctggtctatatggcataccataattccatttttctgcctcccacttttgctgtgactttgccttctgttcattcttgcctcttacttctactaacctattgtttcaaggcactggcttaggacatggcttccctctaaaattacttctttaggaaattgataagttatggcctcaggatcatggatttatga

SEQ ID NO: 122404 - DNA, 1054 bp, Homo sapiens
tttcctgggaatgtatgtttgtatcaaatgtgaggaaagttgtgtcaccactaacaatatttaaataaaagtatagttgtagccattaatatcaagccggcactgttcattgtttcagaaactactccaattgatattctgattgtctctgttcctattattcaggattgtagacaattgtgtttgtctttttctctctttattggtactgataagagtcatattatgagtttcatatttttgtcccaaatgtcttggggtgggagaaagcaaatgtagtaggaagattgtgtatctttaggctgtgctactcataatgtgccaattaactgaaatatatttaaccctgtgaaaaaattgattctatagaaggaaaaagcaaatctggagtacatgttaagtatcatgaatataaattaaagcattaagtaaattctgctaaaatgcagatatttcaggagtagcttctgagtaatcatattacttatcacattatttccctgacttttgcctttaaaatacaatttaactaaaatgaaccctgggcattggtttatctatctgattttattgccgataacttaaatgtgaggcatccaactcttgccatttctactgtttctatggtaaccaaagtgtgcaaacccagcagtatcactttctttcacagctggcattttgtgttcacagtaagaagaggagttttagtaaagcatagtctgtgttacttgggatgtaactaggtcagaacaattttggtatcctttcttcatccttttaggttttttatgtgggtgaaggtgtgtatgcatgaactgtagttttcttttttttaaaaaagagcatatactttcactaaaattaatcaccattagtcttttgaaaattaagcataacatctgcaaacacaacttaatatagaatcttgaggattggatggagttgccctgagacttgacccatagccttgtatacccttgaatatttccattaagaaagatgaaatgatggatgtgaaatgctttgaaaaattaaacacactttgatggtgatt

SEQ ID NO: 122405 - DNA, 1285 bp, Homo sapiens
ttaatggcctttatttcccctatcttaaaaccccttatccctgtctcaacatattcaaatactatctgtctttcagggcccaacacaaatgttaattaaaacttaccctcatatccatgtctacttggaaccaatctcttcttgttgttggttcctgttgtactgcatctttacttctgttatggcatttatctattagtattatagcagtttagagatctcttagaacatctcgtagcctgtgaacttcttgagagagcaagatctatgtctgactctttttgtacactactgcccctgtacacaataggtgttgaggaagtatttcctcagtgaatgagtattagggagaatagtactgacattttggggatcaggcatttgaatacactatccttaatgaacattttttgttttcttgtatgtgtaaagcacagagggatgggaacaacacaaatatgaccatgtcaaacaccttcttctcaaggagccttgaagaaatatgacatacacacaaacaattatactataagatagatgagagagaatgtgattgtagctacatgagaagtacagactgaatctatgcaaggccagaagagcttctgagtaggggataagggtaagtttgaaagagcaggttgcatttgagctggactttgaaggatgactagaatttaaatagagacttgggtgatgagggtaacccaagggagttttagatgtaaaacttctgaggtaaagaagcacttggattatctcagaaaggatgtgcagttctggttggctcaaatatggataagctgaattgcagtaatgtgaggtcatgctcagaagatatgggttggagcctactagagttagagagtttttggggtctttttgtttgtttaagtactgacagtttgtgagcaacagaatgattttttcccccactagaaaagccaccactgattattattacctcatcaatggcatgaacacaatgttgaaaatgcattctgaatatggttcttacgtagtatagcactggtttatattttacccacacatttactgaatgcctccaactcctcaagtgagtaactctaataagatttgaaattttgaactgactgggcatggtggctcatgcttgtaatttcagcatgttcggaggccaaggcaggaggatcacttgagcccaggagttcaagagtagcctgagcaacatagtgagtccccatcgctacaaaaaataaaaaattaactgggtgtggtggtgcatacctgtagtttcagctac

SEQ ID NO: 122406 - DNA, 1084 bp, Homo sapiens
aatatattctaatttattctgtgccaaagatgaaacttttccaataattcaaatatacacctgatcagtgatgttacccaagtgtactaagtgctaactttttatagaaagtgaagatttacagtttttctttcttttttaaatctttcattctgtcagtagagaatataatactcttcttcagcagctgtttcaatatcagtcctttttaccttttggtcctatttaatgaaaatcttaatggtttcagtaaatttagtcattataacccctcattaacatggtcacagtcaccctcaaaatagattgttttggttgaacttattactcaaattatttttctttgtgtcattattggcctttaataagtaattttaaaatatagagcatttgttacagcattgattgtgttttattggcatagatattagcaaagactatattattatgtttttttttaatttttagcatattattaagtttcaccgtgcatcaaaagcaaataaaaagcccatgcagttgccaagatctatggttaaatccttactttaccagattcttgatggtatccattacctccatgcaaattgggtgcttcacagagacttggtaagtatttttcttttaaattcatcaatatgtttttccctactcttttaaaaaatatattttcttcttggtaccattataataaaacattaattatagaaaaacttgaaaatatacataagcaaaaaagaagataaaaatcacccataaacctataataaaaagattaacactatttaacatttggtgggtatcattccattatatttatgcatagctgtaaaatatcagtgtgattttgaacaaatgattactgtacaattttaatggagtagtcacatgtgaagcatgcacatttcaatccaatttgttcttcatattattgctcatcattagtaaaaatgtaattaatactgagttctcatttttctttcccttaagatctaaactgaaataatgacattgcatctagtaaaaagaatgttatcaatattaataaacaaatgaataaataaatctaacaggtggtatatac

SEQ ID NO: 122407 - DNA, 1008 bp, Homo sapiens
gaggggaaagattgatggtcaaatgaatcacactgttacttaaaagagatcaaaaaagaatagaaaattggatttactttgagataagtgagtaattgaagtataagaggatctttccattcagaatgcccttgaaaaaggagtcagggacccatgagggcatcatagacttggagaacagaaagtgaaaagggaagaaagatgtatacataaaaatacgaatggattctggaatttttagtctagtacagactctctaaattgagtcaggatctagagaaagtttagaattctaactgtagattattttacatttaggacagtgaaaagtggacactttaaaaatagctacttacatgctttgaaaggagctcagataaaatattggcatgttcattgaacattcttcattaggctccagtgggatcatgttactatgctgtgagtatctggcatggaagatgttatcatataatatgagacacaggaaaataatggtctacttaattgctgtttaagtatgattacacgtatttgtagttgtatgatgtcatgttgaacaaacatttgttagacaagagattaaagtccgttggtaaaatctgattttgccaagagatggggaaagtacaagtatggccatctcctttcactgtgtcccttctcagataaccatgtaaaaagaagctgagatagtatgatagtgtcttattttggtaggtggatttctggaaagttctgtcttctggtgtgtgtatgtatttgtttttaaattataagagtaatgctcattgaagaaaacttgtaaaatagaaaaaatagaaatataaattatgcataatctcacacccagaaataactattgttaatgttttggcatatttctgtttgttttttgtttttttgagacagagtctcactctggtgcccaggctgaagtgcagtggtgcgatcttggctcactgcaacctctgtctcccgggttcaagcgattgtcctgccttagtc

SEQ ID NO: 122408 - DNA, 1061 bp, Homo sapiens
aggctggtttttaatgcctgggctcaagtagtcctccttatttggcctggtaaagtgctgggactagatgtgtgaaccactgtgcctggcaggttcattttttcagtttcattcaaatcagtgtatgttgtatagctgtccttttagagttttgcctctgaattttcagaaattatgtattttctccattatcatttcaattaatagtattttttgaaattggtcatactaagaattgacatataaaaactccatttaacataaaatcattcttggttttgaaatattaattataacataattaatatatttccctaagcaccctattcaaagtactgctaacataatatcttagagcagtggttttcaaactttgagtcagcttgcctattcttggtctggctctttcttgctcataatctatgatgtgcactggtgttttcaattattttctattttagtccagttcaggttatttcacttgccgggggtagggtgggggaaatgctggtttcaactgaatagatggatttcatgattcactaatgggtcataagatgcagtttgaaaaacaataccttagagtagacttttacaaaaaataatttgaaaaatacagagcaacataaagtagcaaaccaaatttgattcaccagttaactcctgttgacatttcagaaatagaaatatatgcataataagaattcaaacaatatcacaattgctatttgttatattaatacagaaagatacaaaatgaaaaatgttaaacctttgtcttctttaacacctggtcattctgcacaaaagtagctagtaaaaatggcttcttataatgacgttttttgtgcatgtaccattacatatgtatcttttaaaaataccaaagagatagatatatatattcttttccatctttatcacttaatattatgtcttagtgatctttccatatcgacaatacagatcttatttttttaacccccaagtcaaaggtcattttttaaatttatttttatttttggtcagagtctttctctgtctcccaggctaaagtgcag

SEQ ID NO: 122409 - DNA, 1097 bp, Homo sapiens
ctcattgcttccagaattagccttggcctatgatcccacagtcctggggcacgtgtagattacctgaatctatatagttgtagaacacatgccctgaacaacttttgacttctgggttatatgagaacttaaaaagataactaaaaagatttgttgatattgactgcattcataacatggaatgactttacactttaccaaatagttaatataagtgtatgtaaaaataggttatgtataaaaaagataaataatacaagagatcatttgctgacttccaaatgagtggtatagataatccccatagggatttggaagagtgagagatcattaagagtaatggatttaatgaatggaaaggaacaaaggaagtaaaaagcagacaagggttggtggggaggaggggtggagagttggataaaagggagaaaaagataatgtaaggtaagtagtaaagatacatgacattggggttcatgaaattaaaaaaagatagggcttcccaaggctgctctgactgcaaaatacacagtacatggtttggttgctgtgttaatgaaaataaagtcttttgatttcatactccactagtcctttaattttacttaattattgactgaactatgttcccaatcctggctagtcattttggagttatctgtcttgaccaaacaggagattgggcaatagattgtgttgtaatcagaacaaacacatcctttgacaccaaaaacaacaacttaaaatgcatgccctgattattgttgtatgtatatttgaactatgtggtcttctgtcaatattctggaattttcagatagcctagcattttaaaaatttattattttggtgacctcttcataggtaaacactctaactttaatttcaagcttatctattccaaagacatgaatgtgtataatttataatgtgggactattctaaatatatgtatataggttcatttttaatttttattttttagaaacagggtcttgctctgtcaatgaggctagagtgcagtggtgtgatcatagctcactgcagccttgaacttctgggttcaagcaatcctcccacttcagcctcccgagttg

SEQ ID NO: 122410 - DNA, 1031 bp, Homo sapiens
gttgatatcttagccttcaagatgatgatattaggaggtgaagcctttgggagatgattaagtcactacagcttcacactcatgaatgagattggtgccgttataaacaggaccacagaaagaccctttcccattccaccatgtgaggttacagtgagaagatggcagtctctgaggaagtggccctcaccagacagcaaatctcctggtgccttgatcttggacttcctgatctacagaaatgtgagaaataaatttcttttgtttataagctaaccgttctatggtaatttgccatagcagcccaaacagactgagacaaagggtattattatatttccatttaggcttgctatgtcttttgactgatgatcccaggttctttcatagttgtttctgtgtttggctcctgatcctttagacaagtcagccaattctggcagtgatagaacataatggtttcagagcctctcccacataagacaaaaatgactccccggtgagttgctgaagagccagaacagatcttctctcacatgagtcttgacacttcgacaaagcatgaagtgaaggctcatataacaaaactgtgtttggttgagttggcttcaagattagtttgttataaatgactacttttctattgcttttactttttcttgtcatgagccgcctttcttcttaaatggtgtttagtactttgcattgttatgtgtgatctaccagttatataccatactttcaattctgtatatattttattgactgaaaagagggagtttgagtatgaaattataattgatactatagtcttttttgtgatgataaatttctaaagtcaaacctatttattagcttgggaaaataatacatagtgatattcagatgtgtcactaacacatagatgatttgtgtataagaagttttattttaattttattaggttagattctacccttgtatatatattttgatggtgtgtaaacatttcaagaatactacagcttcttaaagtagggtttctagcatga

SEQ ID NO: 122411 - DNA, 1036 bp, Homo sapiens
gttggtcaggctggtgtcaaactgctgacctcaggtgatctgcccaccttggtctcccaaagtgctgggattacaggtgtgggccaccacgcctgaccccaaatcaaggttttacaggaattggcaactgtgacatttgacgtgtatagcatgtaaccaaatgaaattttttttttttttttttttgagacagagtctagccctgttattcaggctggagtgccagtcgtgtgatctcagctcactgcagcctctgcttcccgggttcaagcgattctcctgtctcagcctcccaagtagctgggactacaggtgtgcaccaccacaccctgctaagttttgtacttttgttagagacagggtttcaccatgttggccagactggtctcgaattcctgacctcaggtaatctgcctgccttggcctcccaaagtgttgggattacagacatgagccacccttgcctggcccaaatgaaattctgatgtatcttagtgaagctagcttctcttttttgtcgtttaacagcatgctaatgccatcaaataattactgttttgtgaacacattttggaaactggaaagaccattgagacgtaaaacagtgaaaagtggcttgccagcaaaactgattgagtacctgacagcacatctggttttgctgctttggtgaagggagaagctccacgagccactatgaatcattgcttttacattggcatcaaagactctgccaaagatcgtgaaagaagtcttgtctaaggtctctaaagtcacattttaacctagtcagggctttgaatcactgccttgtcaagaacttctcttgagaaataggagaggattatgaggttattttctattgcagagaagttcattgattctgtaaagaacaagtatcaaagtactgggaattctggttctctttgctgctacatgacttcatgaatcagggttttcagaacacttggggcaatcagttggattgttaaacccactgccatggcagagcacagtggctcatgcctgtaatccc

SEQ ID NO: 122412 - DNA, 1060 bp, Homo sapiens
taactgcagtatcaactgaatctcatgaaatgttttggcgaagcacttctttccaaggatgtcaaaaatcttctgagttaccaggaggaagtggttgcctgtcagggcagagtcttactcttgcatatattttagtgatatatactatatataaactcttggattacaatatggatgagttctacttttattctagtttgttcttcaggctacttattctgcttaatttcggtttggaattaaatatctcagtctgtgcaacctgttttttagtttcttgatttagaagaattattaatcccataagcaactgtcaatagaatgtatctaattcctgtgaatcttagtttcttcatgtctaaaatgggggatttttggcatagattcactatgacttcatgaaatttagctcagagtttgtatctgatatattcactattgaatccttggaatctgtctatatggtgcttggaacaaagtgggctgttaataaattattaaataaatgcaagaatttacttgaaattgttactttaacaatattagtaacattataagggagtggtatttgttttgataaagtttttttttgtagtagaagattttaaactttgtgttcaggcatattcttatttgaaatataaaattaaaatttgtgtgctgggcgtggtggctgatgcctgtaaacccagcactttgggaggctgaggcaagaggatcgcttgagctcaggagtttgagaccagcctgggcaaaatagcaagacccagtctcattaaataaaaaaaaaaaagaagattaaaaattaaattttgtggactattatctaaaatttttgatccattctgattttcctttccataaccatgtgtgatttaatgaataaggggtggaaaatagtcatttgaatatacattacttgaataggaatttgaggtcattactaatcaagtaattatttgaataatatttactattgtaccaattactattcaagtaatttaattttgcatttaatatttgagtatctattataatctaggcattgtgctaaatgctg

SEQ ID NO: 122413 - DNA, 1046 bp, Homo sapiens
agtgccaagaagtcccatatgccctctgggaccttgcaacttcttcatatggtgaaccttagagatgctgcatcatcacttaccatctgacagttagtttacaaagagaaatagtaatgatatatgtactttctttcattctcaatttaaatgttgcaaataaatcttaaaattgcaaattttttagtattttattttagcaggtggaagttatatttaaacttattaagtgaaataattactgggtttgttccttgttcctgtccacataatttagagtaaaaggcctatgctcagtctcttctgttcaagctttcaaattcctttgacagcctggatgtgaaattcaaaagccattaatttgatgtgttaattttgcactttttgacttactgcaaagatcttatagtttccatagcaactataacctatccagattgtgtaatattctttacagtattaaaaataaaactatgcaattacatgagcttctggactactttgtctaggggaactgaggattgaaatgtttctgttgaaaaaattatagtttcatgtgaaaaattttttagaaagcttttataattttgtttcaagaatacatcaaacttaaatatttagcaatagatacctgatagataacttaattattaaatgtataaaatttacatcgtaagcattgtgttgagcttctcaggcacatgtgctctcactctgtacccacaaatacatttaaggcacaggagggacacttggctttgattacattcaatcacctgcagtttatgcttcttaatggcttctgagtggtctgaaaaagtctggttttatgtctgggcaaaaaacaggatggagaaaaaggaaaaaatgatcatttaaactttccttatttttgactttgctttttaaaacatgcctgagctatcactttgaaaatactaaagattgttttagtaggtattctcagagtatcaatttattttggctttttaaaggcaatataatattagcactaaagttagttgacataacttcctatatcttaa

SEQ ID NO: 122414 - DNA, 1036 bp, Homo sapiens
ctgctactatcctaatttagactatagccacctctcatttaaattatttgcaaaggcctcttaaccagttgcctgtgctatcttcacaccttcagactacaaaaatcacagattgtgtgctgggcagggtagcatgtacctgtggtccctgctactctggaggctgaggcaggaggatgacttgagccaaggcattcgagaccagcctgggcaacaaaatgagaccccctcctatcaaaaaacaaacgaaaacaccaacccagattgcttaaaatccttacctgtgttcctacttgttctgcttcatctggccttcttgcttctccagctttaacttgctttcccctacttgaaaccagccttactgaacttcagatgtatcgtgctgtcttgcctgtgagactggacaggcatattccccgtctgagaagggaaataatcactatagcgattaaagcacagactctttagccagactacttaagtttgaattctggatcgccacttaatgagctttgtgatatagagcgagttacttagtctacctgctttcagtttcctcatctgtataatggggatggttaatagtacctgcttcatagcacgttgtagggattgtaagagttttgtatgctttgagacaaggtctcgccctgtcgcccaggctggagtacaatgatgtgatcacagctcactgcagccttgacctctcagttcaagctgttctcccacctcagcctcctgagtcactgggactacaggcatgtgccaccatgtccaactcatttttgtatttttttgtagcgacagggtctcattgtgttgcccaggctagtcttgaactcttgggctcaagtaatcctcccgcctcagcctcccaaagttttgaattaacaggcatgagccactgtgcccagcctaaaagagttaatatagttgaggctttttttttttttttttttttttttgagacaaagccttgctctgtggcccaggctggaatgcagtggcacaatcttggctctctgcaaactcc

SEQ ID NO: 122415 - DNA, 1051 bp, Homo sapiens
aattgttactttcagtgtatataaattcatactttattgctgcattagtttttccaatagtataaattggttcttttcgtaagaatataattagttaaggctcaacttttggtcttttcatacaataagctgcattatatataattaattgtgaatgttacctatatattgttgatatgctcattgtcaaatctaaaatctgagttccttggcagatatgtagacttgtgataggcatttggcattttatgttttgggcagtgtaactttaaatctacataaacttctctgccttttgcctctgctgtgttcatagattccaggagggcttcgtgtatggacctcaagcgttggaggtagcagacttttcagcagaaggtaaagcagagtattgccttctggtgtcattgtgtgtgtgtgctggggtgggtatgtgacaggtgagagcttttcacaagtgtaatcactaagtaatttataatgatgcattaaatgattcactttcataaaatttaaaaccaagataatacccgtacaattgtattcagtattactaaaattcattaaaaaaagtaacatttagatagaactaaagactctaaatttcacttctttgccattaagaaatagtaggagtgagtaggaaaacagcattagtataatgtatgctatataccatgtaattttctcagacctagctttactctgatttcttcgtgggaacttgtccaagtcataattcatatgctgctccttttactgaaaaattgcttcacaatagaggggcagcctaatccatgactcatgactggaagataggcattcatgctataggtcccatttgccagaaatgttagtttccaatatgctagttacctgtctcttgataacttgttttttttttttttttgagacagagtcttgctctgttgccaggctggagtgcagtggtgcgatcttggctcactgcaacctccacctcctgggttcaagtgattctcctgcctcagcctcccaagtagctggaactacagacacgcaccatcacgcc

SEQ ID NO: 122416 - DNA, 1049 bp, Homo sapiens
tttggccattatttctgatttggatagtagctggttggtctctcactatagtccaagatccaaattgctgctagtgtcattttcctataaaatcaatcatgtcatatctctttttggaaagctatacgtttgctatggcttatactatcagatccaatctcatctctttctcttctctccttgcatgattcatacttgagacttagatccaattttaattccttagtttgtcatgtaaagacatttacattcagaccctgaagtctgtagtctttatacctgccaccatttcttttttccagttgcatttaagctatatacttctgtagcattgaactcgtattttctggtacttaagtcctttcatgtctcattttctttgttctacattcactttagaatggtgttgctgtgccattcttccctcccccttttcccttatccttacaaacctgtaaaactcatacttcaatacccaactcaaatagctttcctccttgaagccttctcttaatcactcggtgtactcctcagctgtgtttctacccctttgttcttacatatgtaaagtcactgtaagtgatactaatatgcctcataaattactagctgcaaaaggatcatcattctgtccagtgccttgtacagagttggtcacataatacacaaaattatattcaattaaaaatgcctttaattggtaaagatgctccactgattttaaaagcagaccaaattcctttaaaaacgcaagtttatttacttttcttaaaaaacgaagtttttagtaattgctttgaaagcctgaaatacagtaatgttatatgaaataggtggttagatgtaaatacttctaatgtattttttctaagaaatgtactgcttttccaaacagttgataaatttcttttttcatttttttcacttgagactgtctcactctatcaccaaggctggagtgctgtcgtgcagtcgtagctgactgtagccttgaactcctgggctcaagtgatcctcctgcctcaggctcttgcgtagctaggaccaca

SEQ ID NO: 122417 - DNA, 1550 bp, Homo sapiens
cgccggggagcctgtcgggcgaacgcggcctggggtcctcgccagccccacggctctgacccgctgggcaccgccgcccccagcagcgatctccgcccttcgggctggccggcccgttggcttctctatgcagtcctcccatccctgttgtatgcccggcgtcccgggtttctcattctcacattctgaattgcgtaccttcccccttcgaaggagacctgatgggctagctgcgtttcgcaagcggcaacttaagagttggctgaattctctgctacccaccctttaccttgcagccccttgggtatcttgggtattatgtcctccactccatcctctgccagatgactgtgggctggggcttatggagtacctatattatcaagaacggaatacgaagtgacagagctgggcctgaacctttgttttcctaggagttgagggagaactgtaggaacaccttgggaagcctttactggttgtcctcttaagaagagctggataatgtactgagaatacctgtcctttcttggtcctggagggcagacagcagctacagcaggactggtggaaccagcttcctggcaggaattaccctcccccaaagctagggacccaggaagatgccctgtccagcatagactttaaagagagtcaaactctacggaagaggattgtaacggaccatttctgaataaagtgatgatcagccacaatgacattagtaaaatttgaagtgccgcttatctttgtgcgtgctgttataatttgatgtggttggtatatgaactctaggactaaagtacgttgtgtgcgtatgcactaacttcataaaacaactctattataaagtgttttgtcataaggtatcgtgaaaattgcaaagtgctatccaagtgtaaaggattattattattgcagaattttttttttcttttgtaactgaacaggccttaaggtactcagttgtttctcataattcctttaattaccaggtgtccttgaatgcttatcatggaatgtgagatactataattaacatattttggttttggaatatccactccacctgttatactagtgttcttgtgggaattttatcagttatatttggggaaagcacatccagttttccgtttggacattgttaataaatctgaggtgggtttttcccatactcctcatgctaactttgtggtatacttttggttttaaaaaatgtatcttagtgttttttttgttaaaatagctttcttttattagggaacttttgagaagttaaaaattctgcttctgaattgtatttgaatagtatgggcttacaacaaaaaccagataattcttgcttctattctttttgaatatttttcccctctaataaagtacttgattcgaatacacttcctttttgagtgaaatttgttaattagaattaataaagcttctttactagagtaagattagtttgtgtgtcttcaaaatataatgctttttttctaaaaaaaaaaaaaacctctcaggatctgaaagcattagtttaaatcactgta

SEQ ID NO: 122418 - DNA, 2025 bp, Homo sapiens
gggaatggagggcgggagcggcgcttgttcttgcctcgggcgcggataggaggggccctcccggccttgtctgaggggctggcgaagaggcctcccacccgcggcggccgcgggcagcatgtggcgttcgggcggcggggattgggcgggagcagttatgtcgcagtggcggggccccaccgctcccctaacatgctctgcgccagagccttttcggggcggctgggcagacggcgcagtccccggggccgccctcgacacggccgctgaggccgctgggggctgctccccaatctcttgaccttgggttgtgtaacctgctacggagccggcggagcggggcgggagaggtgcgggtggagggaggcccgcctgccccaggacataatgcctctaatgccttaagcttgagcaaaggaatctggggcccactcccactgcgggccgtcacgcgagagatacttgggctgaccgcgccgaagaggcgttttagttggtattgctgtggaaatccatgcttatataaaagcccagagatcccgtggatgcttaggccttgttcctggcggcggtcgcaccggtggccaccaatggccttcctaggccctgccaccggatccctggctcctctgcgcacgagtgcggctagggtggcggtgcagcggagtaactggcgtggccagcttcattgagaggcggcgaccaatgggctcctgggccgcactcagagcctggccccagggtgtggaccaatgggcgttttaggagtgttagctgttcttggagctgtcccttgacaaaaagcaactggaaaagggaatccaggcagacacgtgctaccgagactttaaggcacgacgggaaacccggtttctagcagtgtatcttgaacgattccattgtagaaaaaaatactagtcatagctaaaatgtcacacgtctcatttttttcaagcttcgtgtgacacttaaaatgtctatagcgcttactacgtgccaggctcacgtgagattataggaagcggactttggtcatggagaagcttagtatttccttcatttcacagatgagaaagatggtatttgtgatagacgtttggtaaaacgattgtgatcaggataattaacctagaaaatcttggcaagaacctagaaaatcttgggtaagaacagtcctagaaaacgaataacagaagttgtcactttggctttttaaatgtttgagcccttaaataatagtaagtacatgttcttaataaagggaagaagattttgttctccccaagttcttggcggtttggctgtttagagcttcctgagtcaaagtggagagaggaggaagaggctttttacaaagcagcctgctttctttaaatgtttaagaaccctttttactttgtactttaatcagcccaaattgttttactgctccagtgtggcttttaaaatcatggccaaagttaaactttgaaggacaaaatattcccttgtgtagatgatttagtgccatccattttgtggacatgtaacattcattgaacaactattggtagtacactgccacattgtaactgttgtagataaagcaagttaagcaagaactgaaaaatatgttgatttaactaaggtcccgtgataaccttcgttggaacatttttcagtgaccactcaagtggttaggttatttaccaggatgtttaaaaaagcctgaaatagtaggtgttccttgaatcacctaaaatcaacagcctagcaaagagagtatcatggacggagtccggtcggtggggacatggggccagccccagagaccccagggaaggataatcggtcatctagaagaataaagcgtgacatgttttactcaaatgacgtgattaagtgcatagcctctggaataacaagatttgaattcaaacagcatttaatagctgtgtgagctgtttcctcatctgtaaaatggagacaataatggtacatagctcatggaagttgtgaagaataaataagttaatatgttatatg

SEQ ID NO: 122419 - DNA, 1042 bp, Homo sapiens
atcttctaggtatgcttgtaattggcagtcattccagttttttgtgagtgctataagagtaacatcactcactgtgtcccgacagacaggcttttaaatttctatgccaattagattggtaaaattatgctcttctttttttttaagtgtttcttaaggttaaaaatctgcacattttatagacaaagtatcccattgaatttctgtaatcattgattagttaatggtttaccttggtttatggacctttgaacatttttttgcctatttttctttaagtaatttgtaaatacatagtataatgaccaatttttgtttcatatatagcataatatacctatcatttatctgggtgtgtcaatatagattattttgaaagaaactaaaagttggtgtacaatattaattaaaaatgtggtcttcatgagaaaaagtgtgagctttgtaatttttatgagtaggtgggtactattgtggattaatcgtaacttttttgttaaatgatagatctgagtgggacatacttttgaaggatgtgcaatgttcaatcataagtgtgacaaaaactgacaagcaggaagcttatgtactcaggtaagtcctgtaaaacaagtgttaggtagctaatttcagtcctaatcataatgtgaaacagttaagttcctctcagttgtagttctgggggtttttttgttttgttttgtttttttgagacggagtttcagtcacccaggctggagtgcaatggcgccatgtcagctcactgcaacctccgcctccttggttcaagcaattctccggcctaagcctcctgaggagctgggattacaggcaccttccatcatgcccggctaatttttgtatttttagtagagacggggtttcaccatgttggccaggctggtcttgaactcctgacctcaggtgatccatccacctcggcctcccaaagtgctgggattatacacgtgagccaccgcgcccagccttttttttacattattcttaaaaatatggtataaaaggaaacatttagtgtaac

SEQ ID NO: 122420 - DNA, 1052 bp, Homo sapiens
cgggtaatcagtcagccagatcaaaccttggaaattctgatgagtgagcttgacccagcagttatggaccagttctacatgaaagatggtgttactgcaaaggatgtcactcgtgtaagcatttttagtaataattgttgctggactcttctgcgtggggactaaattttatttttcattctgtaacttttaagttcagggtaacaagtgctagtttgttacataggtaaacttgtgtcatgggggtttgtcgtacacagtatttcgtcacccaggtgttaagcctagtacccattagttatttttcctggtcctctcccttctcccaccctgggactaaattttggactcaattgaagtttatttgtcaaacccttgttaaactcggtctttttccccccccaggagagtggaattcgtgacctgataccaggttctgtcattgatgccacaatgttcaatccttgtgggtattcgatgaatggaatgaaatcggatgtgagtagttatatattgcttcaataattatttaaatgtgaatagtctttccattcttaacactgtgaactttttctctcagggaacttattggactattcacatcactccagaaccagaattttcttatgttagctttgaaacaaacttaagtcagacctcctatgatgacctgatcaggaaagttgtagaagtcttcaagccaggaaaatttgtgaccaccttgtttgttaatcaggtaattttatattttattattaatcaggttatttgatttttaaaatcttaaaggaaatgagacagtgaggcctaagatgtattctgagatagcacatataccagccactcagatatccagaagtaatattgtttgaggttactggtagctgagaagctttgtttcattagacctgtgtcagtccttgttttctgtctagccaaactgatgggttcctcctgtcttgctattgacaggcctctggtgggaggaaccataagatgccctggcccctccagcacataagaaggcagctaaaataactcagatgtcttag

SEQ ID NO: 122421 - DNA, 1913 bp, Homo sapiens
caaaaacaaaaccaaaccagacctcaagtcaacaaatctattgggatattgtttacgaacaaagtccaccttaagcattggtcctcaaaacagagctcctcaaaatattaggtgctgtgctcattacagaatcaaactgatcacactgattgaaaacttcctcaatgaaattttcaatcaacaacatgcttcaaataaaagtcaaacagtgttccaaccacttgatttcaaaccaagtagattttaggtttagaaacactaaaaaaaggtgtttcatttataaatacggaaggaacaaaaacatcactgcatcaatccagaaattatcaaaatatttagaggacaagaaatataaaatttagtcaactttgctgttttctcagttccttaaaatcccagagaatctgcaaatatagctaaaaggtaccaactcttgaaagcctatattactagtcatttcccattgagtattttggaattttattattctatttattcatattctacttatttataatgtattctgctttatgatgtttatctgaataatctggacaaattctcattctgggcagtcattcatttcatcctatgaatgccatggtaagggaaacaccgtagttaagaggaacagatgaagtcggaacactcacatgcatcacagtcacagaactttaagtcacgagatggaaaagacattgattctgctttggatcaaagtttatagaacactacttaatggaaactagtggaaatggctgctaaaggaaaagttaaggtgaatgatccaagctgacttgatttactgaatccagaacaaaattatgctaaatctctctggtaattaactaaataaaaatgattttatactactactaagttagtaaaggggtgctactcattagacgctaatctcatttactgaggaacacagaattgtatgttttccacagttcagccagtacaccctaatctcaatctacaactctgggtcttccctgctaaccaactattttccaaaagagcacattacaataaaagagaggctaaattcccatgccctttaaagaatattaagcccagggaccatctcccccattccccatctggggtatagaattagtatataaacccacagtgttaacagtgtattgctttatttggggtcttgggggagacaccagggagagggaagaaatcaaaggactataaatgcagggtccaataatgttaaaatagcaaatatgcaaaatgagtaactggaatcattttcttaaggactcaactcatggaagaaaaactttaattgctgtttccaaaaacatcagtatgaagtagaaattggtttcaataacattagtaaagaatatgttctagaaagtggaggtaactggatgtaaaattctggcagcaatttaatagaacagtcctagagggttaggctgaggccaacacctaatgaggacgaaagccttgtctgtggggaattttggatgatacttggagaaatattacactgtgcataaaccaaattgagttgctttcacaagtgttgtaaagtttcatatagtaaaaggttttttctacatgcacttcaatttcacagcaagagtggcagagaatacctaaacacagaagagagcattcatgcaagatatctaactccttgatataataatgcatacaattcaaaatgattacactatcattacatctagggctttctgcaactacacagtggtggttatggaaagcactgcccccagcatcgacatctagaaagcatccaccaccttctacatgtgttctctttttgcgttttttcttcatttttcttaatcaactctgctgttgttgctgcttcttagcaaaactggtaaaaacaaaattgtaatcattgaacatagcactct

SEQ ID NO: 122422 - DNA, 1034 bp, Homo sapiens
tgtgactgtgatgcatgtgagtgttccgacttcatctgttcctcttaactacggtgtttcccttaccatggcattcataggatgaaatgaatgactgcccagaatgagaatttgtccagattattcagataaacatcataaagcagaatacattataaataagtagaatatgaataaatagaataataaaattccaaaatactcaatgggaaatgactagtaatataggctttcaagagttggtaccttttagctatatttgcagattctctgggattttaaggaactgagaaaacagcaaagttgactaaattttatatttcttgtcctctaaatattttgataatttctggattgatgcagtgatgtttttgttccttccgtatttataaatgaaacacctttttttagtgtttctaaacctaaaatctacttggtttgaaatcaagtggttggaacactgtttgacttttatttgaagcatgttgttgattgaaaatttcattgaggaagttttcaatcagtgtgatcagtttgattctgtaatgagcacagcacctaatattttgaggagctctgttttgaggaccaatgcttaaggtggactttgttcgtaaacaatatcccaatagatttgttgacttgaggtctggtttggttttgtttttgttttgttttgttttgttttgtttccaatagaattaagaattctaatgttgaaaaactgcacaaatttttatgggacaaagcctagaaaagagaaatgtagtttgaatcataatctaaatcatcgtatgatagaagagggaaagttttggtgccataatttctcctttcactggtgttggacttaaatcagttgaaatgtatttctgtaccacaatttacgcttcaataaaagtttaattgtctagtgacattcagaaacttttctgttgccctgttttttaagtagcctacttgaccaaatactacatgtctgaagtttaaaatcaatacaacaatgtgtatttatgagtttggagttagacaga

SEQ ID NO: 122423 - DNA, 1023 bp, Homo sapiens
gccgcgggaccatggcggcggcggcggacgagcggagtccagaggacggagaagacgaggaagaggaggtagtaagcgctacgccaaaagcctgcaccgcagtggcggtgatgcctgtgctggctgtgtgtggggaagggagttggggagctgcgggccggagggaggccccactgctcctcaccggcttcttgctcctgggcgcgaggagccgggcagcttgggaccttagccctaatcgtcaccccgtacttgggatgggaagtaccgggaagttaccttaggtagcgtagtttcctcttgctgaaaacagggtccggttttcacaaatgtgggaaatttggcttcttttgctaattgctccctcttggccgctcgcgtgctagcatgttaacccctctttctttcaccaggagcagttggttctggtggaattatcaggaattattgattcagacttcctctcaaaatgtgaaaataaatgcaaggttttggtgagttttctagacttggggggattgttctagagtgtcttaaatgtaaaacaagaatcaatggtgaaatacctatccgcaagtattgatatatttatttcaccttacaaagtagtgaactctaaggataagaagtatactaagtataattaattaatatgtaattaagtataatgtagaagtacagcggggactatgggagcagataggagaaaatggctaactttgcttgcctgtttgaatgtgtggctgaagagaaagttacagatttggaggaagtaacattgtgatatggaaccgtacatatattcctgtattctcagcactttgggaggcagaggtgggaggatcacttgagcccaggaattggagaccatcctaggcaacataacgagaccccttctctaaaataataataaaaaaaaatggccaggcgcggtggctcacgcctgtaatcccaatactgggaggccgaggcgggtagatcacgagcccaggagttcgagaccagcctggccaacatggtgta

SEQ ID NO: 122424 - DNA, 1005 bp, Homo sapiens
aagcagttctcctgcctcagcctcccgagtagctgggattacaggcgcctgccaccacgcctaggtaatttttctatttttggtagagacagggtttcgccatgttggccaggctgatctcaaactcctgacctcaagtgatctgcctgcctcggcctctcaaagtgctgggattacaggtgtgagccaccactcctggccaaggaataaaagaagggctacttcataggcagagcagcctactttctaaagtatggtatcaatttatactcacagtagcaatgtatggaagtgtctgtgcttcatatccttggctcaagggccttatcctccgtcctgcctaggcatacagttttctgaaagtttcaactccaggcagcaggttggcagcaatttttttcctcaggctttcatgattgagaatgtccctactccatactttggcttcaggtagtaagtctgactttggtccttaatttgattggtagaattttagatcccaatacgctgtagggtaaaattcctggccccaatttccatttcaaggatgaagcctgttagacctatgggtttaatctcactcataactctgtgtttctgtcccttgaagatgtttgttacttttgaatccagttgtgctttcaactgttaacgtatttttttttttttcttgagacagttttgcttttgttgcccaggctggagtgcagtggcacaatctctgctcactgcaacctccgcctcctgggttcaagcatttctcctgtctcagcctcccgagtagctgggattacaggcgtgtgccaccatgcccagcgaattttttgtatctttagtagagacgggatttcatcatgttggccaggctggtctcaaactcccgacctcaggtgaaccactcgcctcggcctcccaaagtgcagggattacaggtgtgagccaccgtgcccagcctgttaatgtattttatctatcatttttctatgcttggagcaggagggatga

SEQ ID NO: 122425 - DNA, 1054 bp, Homo sapiens
aaatatcttttactaatatctaccaaaaaagtgagattttggccggcccttgtggctcgcacctgtaatcccagcactttgggagccgaggtgagcggatcacctgaggtcagtagttcgagaatagcctgaccaacatggcgaaaccctgtctctgctaaaaatacaaaaattacccaggcgtggtggtgtgtgcctgtaattctagctactcgggaggctgaggcaggagaattgcttgaactcaggaggtggatgttgcagtgagccaagattgtgccatcactctccagcctgggtgacagagtgagactccatctcaaaaacaaacaaaaaaaaacaaacaaaaaaaagaaagtgagattttttttaagggtggaaccctaagtgacaaatatgtttttaagaattttcatattagttaagtcatggctttgcaatgtgaggaaaatgtttaaatagttatgaattgtgcttttctgaacagaaagcccaaaacgaaaagagccaagagattccttgagaagagagaaccgaaactcaatgaaaatattaaaaatgccatgctgattaaagggggaaatgcaaatgcaacagtgacaaaagtacttaaagatgtggtaagtatatatacttaatctttaaaaggtattgaagtcattttagaattttcagcatgctaggatgggctgtcggagaaatacgtagataagcttgccttaccataagaactactagtcttagagaagagctaaagttgggggtttatttaccttgcgtggcaccttttcttaaagcaactagttctcttagtaaattttattattgttttttaggagcacaggtgggtctggtagagtgaaggtctcccttagtaaatttaaactgttttcaattactagaatttggcttacttacattttaggaaaaaatctaatttgtaaagagaagtaactgcatattgctgtatatttagtcattcaacaacaccggttactgtgcctctgctgggaattaataggtgagacacagttctttcagtgagcttagagag

SEQ ID NO: 122426 - DNA, 1007 bp, Homo sapiens
cttataatatctaatataatgtaaatgctatgtaaatagttataatgctgtattttctggtttatcctgctttttattgttcctttttctttttatttcttaactttttttttagagacggggtctcactgttacccaggctggagtgcagtggcacgatcatatttcactgttgtaagccactgtgctcggcgccccctgcttttttttttttttttaacacactttctttgtctattgaatactgtcaatccgtggttggtcaaatcaatccatggatgcagaaggatgcagaatccatatgtacagaggactacttattttccacgagcctataaactccatgaaagcaagcatcttgtttaatgtagtagtatagtatcactagctcctagaatggtagcctggcatataacaggcactgaataaatatttgaatgaatgaatatcctttcaattgttttatcatctgaatataaaattaccttaatatattaattgtatatacttatttagattattaaaattgtcacttttttgatattcttaggaaaaatattacaagaccttttgaggatcagacatcactggtaagtataataatctttatgatttaagaaagcatataagtagtaattattcagactaattcatttgtactccaaatttgtgatttttttaaacattagaagtcatcctgtgtgagggaattttgtgtaaaatggagaggaaatactttaaaaaatatctatagagctttcatttcactatggctgggaaatgtgtttttcattgcctgcaaatatattgataaaatttttaaaacttggccgggcgcggtggctcacgcctgtaatcctagcactttgggaggccaaggcaggtggatcacctgagattgggagttcaagaccagcctgaccaacatggagaaaccccgtctctactaaaaatacaaaaaaaattagccgggcgtgatggcacatgcctgtaatcccagctactaa

SEQ ID NO: 122427 - DNA, 1050 bp, Homo sapiens
gggtgatttgaatctatcggatatgccatgagctgttttgaattgacaagttttctaactagctgaaaattagcagttttaagtggaagaaaaaattttagttgaaaattaaaatacatgtccctgatttctttttttgtttgtttgtttttgagacggagtctcgccctgtcgcccagactggagtgcagtggcgcgatctcggctcactgcaacctccgcctcctgggtttaagcgattctcctgcctcagcctcccgagtagctgggactacaggcatgtgccaccacgcctggctaattttttgtgtctttagtagagatgaggtttcaccatgttggccagctggtctggagctcctgacctcaggtgatctgcctgccttagcctcccaaagtgctgggactacaggcgtgagccaccacgcctggctgctccaccatcactttatcctgcctgtattccccagttctcctccaccagtgtttccagatccagagctgtttagacatagggtattcagaaagttgtggttttgttattttaagattttaaagttcacttcaatgtaaggaagttagtaaatgtctgtgctatgaggaaaagttgattctgaatgggttggtttaactcctacagtcttagataagaacttgttaatcgtataaacatactgtttcaaagaaaaagccaattataattacttttatacatacataaatctatgagtaagatgaagaagtcaaatcaaaggattttatttcatttctgagaataattttgtatctcacttgctgtttctcaataatattgtataattttatttctgatttttaaaaataagcaaactgcccttgacctcaaagagaaaaaaaaaatttttaatttgatatttgtgtgaccctttagctcaaaaagggataaaagacttataaagaaaagccgggcatggtggctcatgcctgtaatcccagtactttgggaggccgaggcaggaggatcatgaggtcaggagagcgagaccatcctggctaacacggtgaaacccc

SEQ ID NO: 122428 - DNA, 1071 bp, Homo sapiens
tacctgtgggttttttgtagaagccctatattaggttgaagaaattctcatctattcctactttgttgagtgtttttttttcatcatgaaagggtgttaaattttgtcaaatgctttttctgcatctattgaaatgatcctgtggattttgacgtttattctgtgtgtgtgtgtgtgtgtgtgtgtgtgtgtgtgtgttttaggctttacttggatcaggtaggcttaaggcaggggccatgctgcaggagaagggcctgtaaaccagtcagtactgctctttcatgcagccctgggacctcagggctgagctccacaggcaaggggcccgttaggcccctcaaagcagacacaaccactaacaggaaggaaggtcaggctggctttagtgcagggaagggtaatgttgggagggagacgttcatgaaggaaaatgggtagctgaggctttaaagggcttggatgggacacgggtttaggggaagtgaagaaggccaataaagtcttgggggtaaagaagggaataaacaggagaaaggaacaagaaggcaggtgctggggtgtagagtccagctgctctccacagcctgggcaacaggctgagtatgggcaactcaatcccacctcctggccttcaaggcactacttgttgccccagacagccatctttgtgaacacaggtctcaggaggaagcagctggatttcatgtaggcagagatctccaagccctcaaatcgggagatgaagtccttcaggtttgggaaggcgtccaaccacttgggctcaaatacttggtttctctcaaggatgccatacgcgatgaaatccacaagtgtgatcttgtccccaagaaacaatagctgcttccccagaaactgtgagtagagcttcagcattgcagggagtgcctccaggtattctggcttcagtttcttaaaatctgggttgtagcagagtctggccagctgcacgtggttgtccacaagctggttctccaaaatgtcttcccaaatcttctccccttctgtctccccacacaggttgtgcttgtaggcaatgcagcccaggat

SEQ ID NO: 122429 - DNA, 1015 bp, Homo sapiens
cgcccgccgaggccagcctgggcgacccgcgtggggcccccgagcgcatcccgcgtgtgggctgtgtctgcctccgagtgtgcatgtcggtgggtccctgtgccagagggtgcgagcaggggggtctttcgagttgcagacagagcctgccgcttctggggcctcggggtgcccgtctttatatggaatccagctgcagagctgtgtgtttgcaagcaggtcgcagaacttacttgccgagatcgtcctcctttcccctcagcagagcagacgctaacagtccacaggagcccttccttttattgtttgaaaacaaacagaaccccagaaccttcaaccccagtcatcgccctgtcatttttgtggtctctttcgtgactatgccagttatgtagttcttcacctgcctccctgggccgcagaggggtgtgcgtatgttggcggggcggggggtggagtttggaggaatgaaagagatttgtacgaaggtcactggagttccaaagggggccctgcaagagtcacggttccgtgcgttcccgtccccccgcctttttttgccctctgggttaaatgtagaaaacacgggaggcagccggattagggactaggatgaggaaggtgaagggttgcttcttccctcttcctgttgtgttttttgacatttttttttaaccatatagtaaattagatacaaaaggtgcagattcagcgttttctccctgtagagcattattatgactttttggctggttaggcaaaaaacaaatctaagaccttctgcatgacactttaacataaattctttcactttatcctgcaaggtgagcgcggtcaaccccatttgggtgagaaaactgtagctcagtgaaagtgtcttggtgggtagtagaatggcaataaaacacatatcaactgacttcaagggctaagtgatttccattactaaatcaacctccctccccatcatttggggtaactttatatgattaatagtctttttttttaaccttga

SEQ ID NO: 122430 - DNA, 1049 bp, Homo sapiens
accagctacttcggaggctgaggcaggaggatcacctgagcccagaaagttgaggctgtggtcagctctgattatgccactgcaccccagcttgggtgatacagtgagaccctgtcttaaacaaacaaaagagattgtattgtgttttgaaaaacatagtttttagagaaattctgtgttattcttctatttccattacagcttggtttaaagaaactatggaaagctacagactaacctccttttcctttggttttttttccatgttatagcagagaaccagccagggccagattcctgggcttgtgtcctctgcagttgcacagggctctgctcagaagggtcccatacttggcttaatgctctgctgtcagcatcttgaaaatttttaataattttatatttcatcttgttttgtaagttataagcccagtgggccagtggaggctgttctaggggtctgggtttggctcatgagaggtacatccttcccacctccccaggatgggctctcagcagctggctttctgtaccctggcaccccaggcccttcttggcccctaccccgtgttcactgttgccctcaccttgggtgatgactgggtcacatgggagaggaggaaacccatgttctgctgtcaccctccacctcttgctgggtcctgggtacaagctcagggagggttgggatcaggcgtctgtgactcacagtgttgtggggagtgatggtggtcattttatcccaggctggcagcgtgctggcatattgatgagcagctgctggcatgatgatttgtcctgaccctggaccggactctgtatcttggctttagtctagtccacttctcagcattccttggaagcccacctaaactgcagagacaaagaagaatatgctttgggattttaaagatggaaccccatatgctatcaattggaaaggagttcagattctggctgggctgaatcactgattttccaggcaagtggaactttaatgacccactagtgccctttgttcactgtgggctggctggggaggaaccctt

SEQ ID NO: 122431 - DNA, 1014 bp, Homo sapiens
aggtgtcaaaccgcattattgaggggagtgggggtggtaaagcagtggtgaggacgatgagaagcgacctccttagccaggccaggagctcacctcccagaccctgcccttcaggcactgaaaactgttttaggcttttctgcatggttggagtttactcttagttgctgacagtcactcatcccctggagaggggtactgagcataatcactgttggtattttatttactaccagttcttcatcattaccgagactcattccatttggaaaataaacattgcctcatctgttcatggtatatttttacacttgcctttcactcacatgttgcatattaactgaaaagatcagcatgatcttggagcctaatgtgatctggatcttattaccatgtatgtttttatcgtcaggtgctgctttggactctggcccattcctcccacctgtcttcatcctgtcggggttgatctctgcctggttccatagtcacttggcttttggagttttatttcttctctaacccactcttcccttccctgtcaaatataattctctcatgagcaactgtgcctgataatcccagtgtataggccatagctcaggttgttttaatgcttgcaaggaagtctcttcagattactacagggtaaaagaatccattccctttcaacctctcattacttactgaatcaattatttatttacttgtgtaattcacatccatgctcaggtatgtgtttagtttacctctgagactgtggctccctctagacaagggtctttgtctggtattagtccacttcctcagtgtctaatttcatgaggacagaatcagggcaagacctactggctaagacttgctgctgcctcagttatttggtttactgtttaagcccttgagccaggaggtgacagtatcttttgtgttccaagtcagataaccagtaacagtaatattctgatgtaggtctaaggggcaataggagcctgaatctgagccccttggcaggga

SEQ ID NO: 122432 - DNA, 1039 bp, Homo sapiens
tttccttactataagcctgtcaagtctagtgagatgacatggttattaatatattacaaatgaagaactctgacttggaggtagtatagcactgtggttaataatagaagttcttatatttttatatgaattatatattatgaaccagaccagaatactagctctaccaattacctagctgagtgatggtgcagcaacttaatctctcaaagccctggttttctcattgtaaaatggaggaccttataggattgttgggtagcttaaatgagataataggtagaattaaaagtaacggcaaaaaccgcaattacttttgcaccaacctgatatttagaacagtggaggcatatagtaggcattcaataaatattggtagtattattttcagaggttattactcatttaactcaacaaaaattgagagcccctttctatacgctagtcattgtgctaggcatcaggagcacagggcaaacctggtagggtgcttactctgatggaatttacattttagtggtagaaatggtaaatgagtcaacaagaattttatggagtgacaaggactttgaggaaagtaaaacgggacaatgcttgagaagggtgctagttgggaagtcctatcacacgaagtggtatttgatctgagacctgagtgaccatagccacatgaatacctgggggaatcacttcccaggaggaaacagaagcacagaagccgaaaggcaggatcacaggcggcacattttattggtgcagtgtggaggtagagggactggattgtgtagggtttgtaggccagggtaaagagcttggatttcttctgagtgtaggattttgagcaggggagtgatgtgtcttattttgggcgggcgctaggccaggtactgtgaaggaaataatggtatagaagaaatatgtctttcttgctagaatcttatgtgacatacaactagtggtggctgatcagcaattagaactgcagtgttcttgctggtgtactcctaatctgatcattggatgatatttatcacgtatt

SEQ ID NO: 122433 - DNA, 1048 bp, Homo sapiens
gcctgtgggtttggcattcatgggctgcatgaagtaagtggaggactaaggagatggaaagggagtggccagataggcagggggaaaacagggatgagagtgtttctaggggcaggagtggtcagcagtgtcagtagctagtgacaaagaggctgaaaggttttcattgaatttagaatagggaggctatgagtgagcttacagagaatggtttctacaggtgcagaaaattgatcatgatcatttgaacaaatggaaatatagacaactttgtccaaatgcttggctgtggaaggaaggtaaaggcaagccacaagggggggtcttaggttttgaggattaagcctgtctaattatattatacatgagaggcagtatttgagcagggccttgaaaaagaggtgaaatttggacacaggaaaatgattggaaaaggcattacagataaagttaacttccattaattgacttgaagtaataacagtcaaccatttattgaggactttcatgtgccagacaatgaactaagggctctacatgcattatctcattgatccttgccccagccctttaagagaggaggtaccattgttatttccacttagagatgtgaacactgaggaactgagaggctacctcactgtgggtgtctgtgtgtatagaggtccaggcagtcacaggacagtctggtcacacagctagaaggaagtgaagagagttggtaatgtgctgcttttaaaaatgtatttattgtatcatgatcactttgtcagtacttcactgtggacatcctcatctaacatttagttttgttctctagtgtcaagggagccctctaatggacatttattgcactacagactttcagctttcatacattcaaaaattgagtgcctcctgtgccccaagcaccagctcagatgctgttagggtgatgcaaacaagacagacatggtccctgagttcctaaagcaagcctgaggcaggaagaagccgaatgtgtgtggaaacccaagaagatggggaaagtggcatgggaagggactgg

SEQ ID NO: 122434 - DNA, 1134 bp, Homo sapiens
tcttatgttttctcatttgcaaccacccatgctggcatgaaagaaagtgaagctgctgggttgaactccatcttctgggggacatttgcagcctgcaggggcctggcaatcttttttgctacctgtttacagcctggaaccatgattgtgttgagcaacattggcagcctgacttcatctttatttctggtgctttttgacaagaacccaatttgtctctggatagcaacttcagtgtatggggcttcaatggcaaccacatttccgagtggtgtttcttggattgagcagtacacgaccatccatgggaaatctgcagcattttttgtaattggtgcttccctgggagaaatggctattcctgcagtcattggaattcttcaaggaaaataccctgatttgcctgtagttctgtatacctctttgggagcatcaatagctactggtattttatttcctgtgctatataaattagccacttcacctcttgatcgccagcgaaaagaagacagaaagagtgaggaccagaaagctctgctctctagctccgggctaaatgaatatgaggaagagaatgaagaggaggatgcagaaaaatggaatgaaatggattttgaaatgattgaaacgaatgatacaatgaggcattctataatagagacatctagaagtagtctgacggagcccacagctgaagtctataatcaatacccatcaaatgcactggtgtttgagtcttctccttttaatactggcagtgcccatgtgaagcacttgccagaaaccaggacaaaagggactaacgtttagagaagatggattactcactgacatctttgaataactgccacttctaaggacgccattcagagcagagcattagcagaatttcaccatgctttggggattaaaatttttaggtccatattatagcaaatgctaaaaatttttgaaatgttctgtaattcccagagtcttccataaataaccaaatggtctcatacacgtacaataggatcttgttataacgctatcatttgacatgtgactgattaggaaatattttatggtctccacccctcagagcacccaaagaaggcattgtttttgagaaggggggtattctcagaatga

SEQ ID NO: 122435 - DNA, 1613 bp, Homo sapiens
aaattaatgaaagtttctgtaatgtatgtctgccagtaatctgtggtagtctagaaagtagggattataaaaatttgttgtttgcatacacgcataaaaactttcctattattttttgtatttctcttatgctttcagatatgcaagaactgtacaggttgctttgatcgacacatcccatgtgtttctctgaactgcccagtacttttcaaactctcccgagtaaatagagaattgtccaaggcaccatatctccggcagttattagaccagttttaaattgtcaatatcacagtattacaggtgctatttttttcagtgcttaccactaaactgttgtgcatggtgctttttaactttcatcgagtcaaggatgttcactgtctgttatctgaagactatgaagacttctatgctaaccgaattaaaatgtacttgttgatctctgaatagctcacttcttacaatgtacaaattcctcattctgtcaccttttaaacattgttttataatgcaggtgttggatttgctccagtatgtgtaccatcttgtaaattcatttgagtagatcatgtttacttcccagtggaaggagcactgaaaacctcttaaagaaaaagcatttgtgtgttttccttgaactgtctgtatcaagacgtgttacttcgagatatccattcactttataattttgactgcaaaatattttgtaaatacacttttttacttttcaaacgagcaaaataatgtgcaatgatttttatacaaatgattttcaagttgtttggtatatttcctctaggttttgcttgactcaaagtagatcgttattttgatcaaactgtgcaaacagtagtaccacgtgtagcattttgaaacattatttttttttaaaaaatgctgtcttgctttagctattaatggggcattgtgaggaactgtgcaaagacatttttgttacaaacctgtgggcctgttgcaatactttaaaaataaaaaattttattccatttgcttgttttgtatagacatttctattgcttctaaatatacttaaaatattttctttccttatgtactgtacagttaatcttatttgccatcatcttgaacacaaaatgtgtatttagaatatttgtataactgtgtaaaataaaaaaggaattatgtggtcagtgcattgttttttaaactggaaatcattttgttttaaaagttaataatggaaaccatattaaaattgaataaaatataaaataatatagcagtgtgacttcatcttttttataagcctgtattggttacatctttcttaccctacccttttctgagttttaatgaagtaaattatttaacatatttttatatcctgtttgatattgcaatttccttaccaaaacttcttcagggttaaaacaaaaaaaaaaataaaaaaagggcagcaaaaatgggaaaatttaatttagcactcatccttttagagagttttaagagtgtacttgtttgttagtagatcttcagtgttcattttcattttgatataattattaattaaattacagagaaagcaaaaactacattacttcttaaaaacttaaatgccaatttttata

SEQ ID NO: 122436 - DNA, 1036 bp, Homo sapiens
cttggacacagggcggggaacatcacacaccagggcctgtcggggggtggggagctgggggagggatagcattaggagaaatacctaatgtaaatgatgagttgatgggtgcagcaaaccaacatggcacatgtatacatatgtaacaaacctgcacataccctagaacttaaattataataataaaaaaaaaatgtatctgataatattaagatgtaagttccatgaaggcaaggacttcattcatttctgtagctccagtgtctggaacagtgcctggcacatagtagctactcaacatttgttgaatgagtgaatgaacgaatgaatgaatgcctgagtaaacctgtaattagcatgaaaatagcagctttgctgtgaagctgactcaggcttacttctgaatggatgtttttatagatccataaagctaccagctcctcgcgaagtgaacctgaagggcggaaaggcactatttcacaatattttactaccttacactgtcctgtgtgtgatgacctaactcagcatggcatctgtagtaaatgtcggagccaacctcagcatgttgcagtcatcctcaaccaagaaatccgggagttggaacgtcaacaggagcaacttgtaaaggtacagttttgttccatgggcccagaatcacaagcagtctgatcttacaggaagatatagtcactcttgaattatagtgtgagatacaaaactggtgtgaaaagtgaaatgaagagtctaaatgataaacttcctaaaaatctcaaaaatatcataaactattaataatggtttgttttataatttattttttgttttttttatggaatagtgtgttgtgtttcttaatagctacaacaagaatggccatccatccaatttcttttataatacaggttgagcatccctaattgagaaaaatcaaaattcaaaatgctccaaaactgaaagtttttgagcaccaacgtgactctcaaagggaatgctcatgagagcatttcagagttcagattttcagattaatgat

SEQ ID NO: 122437 - DNA, 1013 bp, Homo sapiens
cctcccaaagtgctggaattacaggcatgagccaccactcccacctaaaatacatcttaagctagttgatatctgccaactcattattttccaggtaacagtgatttacagagtaatttttaaactcttgtaggatatctacacttggtgtcaactaagcaaaatgtatatatattattctcaaagaaatagtaattctgttttgaaattgtcttttgtagttttttcattgttttattattgtttaattctgacttaatttgtgagaaagatggcttccataacagtatttgggtgtggtttttttctttgaattcgaataggaaaatgctgacttatgaccggcgctctgagcctcaggttggggagcgagtgccatacgtcatcatttatgggacccccggagtaccacttatccagcttgtaaggcgcccagtggaagtcctgcaggacccaactctgagactgaatgctacttactatattaccaagcaaatccttccacccttggcaagaatcttctcacttattggtattgatgtcttcagctggtatcatgaattaccaagggtaagcttaccaaatagtacatgtgctctaactatggagagatttcactccaaattttcagtagaactaaaggttttatgtgctattgatatgggagtgctgggaagggaagagtgtggtcccgtaaaatgatacggaaagcgggaggggaagtgctgggtagagaaaggtgggtccctggctagggctccacccccacagatctaggtgaggataggcactcctgctttcatgcccaaatgttaccattttccaagaccaccttggcctgccatgccccaatcctgggcctataaaaacccgagaccctagtgggcagacacacgagcggctggacattgtgaggaacacttcggtggaagacccaagcagctggtcgtcaagaggagcacgccagcagaacagcacaccgagaggcactggcatgctggcaggccattgac

SEQ ID NO: 122438 - DNA, 1009 bp, Homo sapiens
agggagactccatataggaagtaacaatgaactatgtcttgaaaaattgttagaatttcagtaggcagacatggggctgcaatcattctgcacagaagaaaatggcatgtatggaattggaaaaggacagtatggaaatacggggaagcaggagatagatccggaaaaataaagttgagaccagactgtagactgtcttgaatgccaagctaaagtgtttatactttattcagtaaataaacaaaactggtagcgcaagaaaaggagtgagcaagtggtaacaacttaaagacaattcattttgctcccacgtgttatatcatgaatttgttgggcccaaagtcatatatagaattttttaaataattgatacttgattaaagaaagcacaaagacataaaaataaaacattcttggtggggggaaatggtttttaagaggcattttattaattttaccacaggtatatttgccctgtgttttacaaacaaaaaagaggtatgtgggttacatgtatgaaacactggatcagaaggacccagtatttgatgcaaaaggaatagaaacagtcagaagagattcctgccctgctgtttctaaggtaaggtttatctatcttgtcttcatctgtaagaaataagtggctaaagtgtctggtgaaaatgtaactacccttaaacatgcatctaggtgaaggaactatagcctatataattaatataactataggagtaactacatgaattttgagaattttatttgtagtgtcttattttgtttttgtttgtttgagacagggtctcactttgtcacccaggctggagtgcagtagtccaatcctggctcactgcagccttgacctcctgagctcaagcaatctttctgcctcagcctcctgagtagctagaattttatttctaataaaaacaatttatttgattttagtccttaagtttctgacttcctcccataccttacgttttatcaaaaattactaaaaagcaataca

SEQ ID NO: 122439 - DNA, 1046 bp, Homo sapiens
agaaatcacttcaggaacaaaccagtcaccttgtttttcttgaatttaggttttaaatctttaaattgttaaattttagttaacgaaatattgaaagaaataaacgtatgcttatactttctgccctttattagaatcaggcagacttaaatggcaacttaatggtcaaaatatattacctacaaagatttaaattgttttaatgtgtagatgctactagttgttcttctacattattttaaattaagactatcttagaattaatgatactctaataggcttattgtttatatttttcagaagatatccaaactaaaaatagggtcccttttttctctcctgtatctcccctcaaaagagacagaggaaaactttacaaattaaagacaaataagagacatcttaaaagaagattatattgcctcttaaatgccaactttattcctttcttttctattttcttagcagtgagtctgtactagaatcatgagacagtagagtggttgatggtagagtggaccccaccagccctcaaattcattctggtgtactatatcaaaagtggcatcattctctaccagtaagagggaatactaaactaaaattagccatgtagatgaagaaaattttaaccaaagagttcatggtatgtttctttttggaaaattttaaaatgtagtatttctaaggactgatgtagatgagatctacttggagaaatggaaacagatttttttttattaaatgggtctctatataaaaatcagttttccagtcacatttctgcgaatttggtccctgttctttttatcttatgtcttaaaacattatggctgcttcaaaatgtacaccaaatgaattagaggttagaatatgttccattgtcgcatatctagcagcttattatctccctttaacagcttttttttaaacttgcatctacttttggacccagtgtgtaaagcttaatgaaaataagattttttaaatattcaggtgtgtgaatatcctatacctgagattttaattgttaggtctgacatgca

SEQ ID NO: 122440 - DNA, 1377 bp, Homo sapiens
agtcgtaggaataggaaaaggatttacatatatcccttttcgcatctgaaagctgactaaataaccagtattacaggctggtcatagtggctcacgcctataatcccagcactttgggaggctgaggtgggcggatcacctgaggtcaggagttcgagaccagcctggctaacatggtgaaaccctgtttctactaaaaatacaaaaaattagctggacatggtggcgcatgcctgtaatcccagctactcgggaggctgaggtaggagaatcgcttgaacctgggaggcggaggttgcagtgagccgcaatcgtgccatcgtactccagcttgggcaacaagagcgaaacactgtctcaaaaaaaaaaaaaagtcatacaatcttattctgaaaagcagattatcctcaaatgattatatattcaaatgaccaatatatttaactgtgtttcttctcttctcacctccctttctccctgcagtaccgtgtggaatcaatgatgttgcgtattgctaaaccaatgaactatattcctgtgacacctagtgttcagcaaagatcccagatgagagccccacagtgtgttcctctaattatggagcctgaatcccgcttctatagcaactctgttctcgttttggatttccaatcactttatccttctattgtgattgcatataactactgcttttccacctgccttggccatgtggagaacttgggaaagtaaggtttttttcacatttacaataatattgttgtgctttgtacttcttactaaaattagacactttctgagtgtctctttgctctggacaccttccctatgagcaagataaatggactgtatcccagctaatccattcattatagttgtcttaccaattgacatggatcaccatatgattaatccagcttcatggatggatgactcatgaagaggattgggaataggtcagccttgcaactgtttcactccatatgtaactatagtctcttttaaaatgaaagttaaattgttgatgtaaattacctttcagtggaacagtttgaggattatgatcttataacttcaactagacctcctctttatttttcttataaatagtccaggattttaaaaattaaatgttaggttttattaattaatgtaaattaaattttataaactgataataacattttaaattctcaaaggattagatacttttcttaaattgtaggaaataacggagtcttcctttttattgatttttgcgtatttgagatcatgtgttggttttagtatatcctatattccttcatagaaagcatctgtggaaattatattggtaatcctgtctttttattaaaaacaggaatttggaaaatttac

SEQ ID NO: 122441 - DNA, 1035 bp, Homo sapiens
acagatggaaaatggttgatcattatgttagccgtgtccgtggaaatctccaaatgttagaacagctggacctgattgggaaaaccagtgagatggctagactttttggcattcagtttttacatgtactgacaaggggttcacaggtgggaaatcagttttcttgcagacttgaaagttctgtatgagtgatacacttttgtgatgtttgaagtgatttgactttttaaactttctgtttggtaccaactaatcaatagctgggtaattaaatcttgtcattttattctctttctatgccaactttccggccactgccaagttttttatggtattaagaaaataaatgtccatgcccttaaggatataatattcctgaatattgttactgtgattaaagatgtcccttaaaactagagaagcaacaaagaaagtacctttcttttgttttacatttttaattttggcttgttaaaacttcccatagataattttaatataaaaataaaaagcttgaaaatcaatataagtggactatgtaacttttttaaatgttataaaaaaagaaacctaagaagccatttaattcatatctaagtaatttcccaaggatataatgagagatttttactaaacgccttgctgaaaatgattttatatattcaacaaatatgtatttgaatacctgtagtttgttaagcacggtggtaggcatcagcgataccatattaaaacactcagattccttaacgttgtaaaatccttacttattttaattacctgtgtctataacataatcaaccagttcagtaaatatagcaaaaatagagttccaactacgtttgttttacctgtttatttcatttaattgcttataagctatttattttatttatacccatcaaatttaacaactgtttgagctagtctgtaataaaaggcaaaaataccttaaaacctcatgagaatacttcagtgaacccaggctggttcttgtgagtaattttttttctaataccccaagccttctaatag

SEQ ID NO: 122442 - DNA, 1014 bp, Homo sapiens
tctatcaaagccttatagaaatagaagctgaggcgaagttggctgagtgcagtggctcacgcctgtaatttcagtgctttggaatgccgaggcgggcggatcacctgaggtcaggagttcgagaccagcctggccaatgtggtgaaaccccatctctattaaaaatacaaaaaattagccgggcatggtggtgcacacctgtaatcccagctactcgggaggctgaggcatgaaaatcacttgaacccgggagcaggagtcagaggttgcagtgactaagatcacgccactgcgctccactccagtctgggcgacacagcaagactccatctcaaaaaaaaaaaaaaagctgaggagaaattatacaccaataaataaaacttgatatttaacttaacattgaaaactatattcagtggtttgtttataagccccggaatctctaaatacatgttttaccacctttaattaggtattatctaggatgataactgtttttgacaagtaaaatagaggactggaactaaaattgtacagaagggacttagactagacattagaccatttatgtcaaatggattatgttatatgagaagaccatgcactctttgagtagtcttggaaatatcagacaacttcattcttaaatttaagtgaatacttaaatttaaatgagtacattcttaactttaagtgaatacaaaaaaataagtctgacttacttttttggtaggtatggtaaccccttttgatttccatttgctttctacagtgttttaaggacatacatatatattgtaaatcgacttagaatgagaagaacttgctagtcaaggatttcttgtgttaaacctgtaaaacacaaaggtaccctaattttttttaataaacccagatttttgtctcctggaagccccagatttatatgaatgaattatgttcccaacattttattgtttcaagcttagaacacattttttcataaaataatgtcttgtgattagattcctaagc

SEQ ID NO: 122443 - DNA, 1944 bp, Homo sapiens
taactagataactcacctcaaatctgtggaatcccattaatcagcatgtcatcaagaaccaaaaagtaagtatggaaagaacaaaaaattaatttgcttgacaatgcttctgtcaatatgtatattatcatggagtataaaaatggtaagaactagaatctcttaaaataagtattatatgaccaagttgaatctcatcaggtctgctttctctaattaaataattttccaatttgttatgaacatttctgtccagtaggctctacatagttttgaattatgattcagttgtactgcacatcagttttacaagtagctttaatatctactatgaaaagtttaaagtgatattggtatcttttagaaccaaatttgctacataaatgtaagcattattataatggtgtcttgcctttttttttaggtggctctaactaactacacctttgaaaatgtgagctttcatgttcttcatcagcgttttcccctctttacctttcgagtcttgtcagactggtttgataacaagacagatctatacaggtactgttctataactctgaagaaggtaatataaaatcatcattgagatgtaatttatatgtaataaaatgcacacatttaaagtgtattgttcaggccagttgcggtggcttacgcctgtaatcctagcacattgggaggccgaggcgggcacatcacctgacatcaggagttcgagaccagcctggccaacatggtgaaaccccatctctactaaaaatacaaaaattggccaggtgtggtgatgcatgcctgtaatcccagctactcaggaggctaaggcaggagaatcacttgaacccaggaggcagaggttgcagtgagccgagatcgtgccactgcactccagcctgggcgacagagtgagactctatctcaaaaaatatataaataaataaagtgtattattgttcaatgactttgaaaaatgcatttatcttgtactcattactccaatcaagataaggagcatatctcacacccagaagattcccttctacagctttgcagtcaacctacccatccctaatcatctagataattactaattggatttctattactgtagattagttttgccaattatagaacttcatattaatggaaatattcataatctatcttggctttgaagaaactcagaaaacatagtatgtatttctgttgcataaatagtttgttcattcttattattaaatagtattcaattatatgaatataacttacccacccacctgttgatggacatttgggttgtttccagtttgaggctattatgaataaaactgcaataaagatttgcatatgagtcagcatgtgaacatacattttcatatctcttaggagtagaattactgggtcatatggctgttgtgtgttaacattttaagaaacttaatctgttttctttggcaagtctgttggcaaaaaattatcttagcccttgtttatatgaagatgtctttatttcacccttatttttgaaggataatttctcagtctcagttgcgtttttttctttcaccactctaaagattttgttcccttccagcctctcattttgctgatgagaagtcaacagttattctcatttttccagtatttgtgattcattttctttccaaagtcagatttaatgagtggttgaccgatgtcactttttactctctgcaaggtttatagtggaggcagggggagtttctcagttctcctgtctaacctcagtctttggatcttcctgttcttttttttttttttgagacagagtctcgctctgtcacccaggctggagtgcagtggcacagtctctgctcactgcaagctccgcctcccgagttcacgccattctcctgcctcagcctcccgagtacctgggactacaggcgcccgccacgacaactg

SEQ ID NO: 122444 - DNA, 1770 bp, Homo sapiens
ccttgtctcagtttattcatctgtaaaatagggataatagaacttatttcatagggttattttgaagaacttaaaacaatcaccagagtatatgttacattgtttgctaaatgaaaaacaaacttttaaacattatctctttaaaataaaaagaattgggtgagtggttgtacatggtctttggattcaggtaatcctagtttagaatactagttttcttactgtaagatcttgggcaagatataacatttctgagtagaattttccgtaatacaaaatgaaaattatactaacttcttaaatggtcctgttaaaataaaggaagtaatgtttgtattaaaataaatgatgttggtaaaattcttagaacataataaaccttcaatatggtaaatatttttattattctggaacctctaatcatcaacattcacatatacctagtgttacataggagagacgcattttaatttatattctaggtaaacttcatctcctaagaaactagactcacaacgctatttgctatgaggaactcttcatctagttctccatatgcattcaagagaatttcatcctgaatgtgaacatgatgtcaacaaattttcagagaatcgtttaggttaaaaattgaactagttttttttccaagaaattaccagattaactgtggatctttctcatgctaagaccaaagaaatgttagcattaggtgtttataaaggtagcatcaggcacctgtagtcccagctattcgagcagctgaggcaggcggattgcttgtgaccaggagtttgaggctgtagtgtgctatgattgcacctgtggctagccactgcactcaacctgggcaacataaaaaacaaacaaaaaaaggtagtgccaaaaattaccaaatctaaagaaaaaagtgtttcttatttaaatatagaaagaaggagggagggagagacttcaggttatatttatttcacaaaattttttcatacattgtgaattatatttcatctttaatattcatccttaatgtatattctcattttccctggcataattttattgaaagtttgttttctgtgagccctgatacagtctgttttcatttctatagatgacaaaattgagaacagatttgcagctgaaagagatgagtatggatcatatacaatgagtgagataaatattgttggccgaattacactaaatctttggagaatcatgagaaatgaggtgggtgatttatccaaaatgttgtttagaaataagatattcggtcaatataatgatttaatcattatagagtattagtaagatttactatatagcttatgcgtttgtcaattactgttatacttaagtagagttaaaatagtactttctaaaatgcaaaactacagaggtaatagactttaatgttttaagtgagtttttttttttttcttgtgtctaaggtagcaataactagaaaggtctatagctataataaaatattggggccaggtgcagtgctcacacttgtaatctcagcactttgggaggcccaggcaggggcatcccttgagcccaggagttccagaccagcctgagcaacatggcaaaaccctgtctctacaaataatagctaaaaaaaattagctggatgtggaggcgcatgcctgtggtcccagctacttgggaggctgaggtgggagaatcacttgagctcaggcagccgaggttgcggtgagctgtgattgtgccactgcactcaagcctgggtgacagagtgag

SEQ ID NO: 122445 - DNA, 1140 bp, Homo sapiens
attatgtttactttacaaaaatagcgtcaaatcgcctataatcccagcactttgggaggctgaggcaggcagatcactggaagtcagtagtctgagaccaacctgaccaacatggtgaaacctcatctctactaaaaatacaaaaaattagccgggcgtggtgtggggcacctgtaatcccagctactcaggaggctgaggcaggagaatcgtttgaacctgggaagcagaggttgcagtgagctaacatcatgccactgcaatccagcctggacaacagagtgagaccccatctcaaaaaaaaaaaagaaagaaagaaacaaagtagcttcaaatcaagtactcttaaccatccatctcttcctgtataaaaactctgtaggtaccactgtatcatcccttctccatctgggcaccgttagagaacataggtttttgttttcataccttatatcatgaagaaacaattattctggttaaaggttcaaatgtatggtacttatataacttttttaaattccttttttaggtatgatcctgatattctgctaggatatgagattcagatgcattcctggggttacctcttacaaagggctgccgctttaagtattgacttatgtcggatgatctctcgggtgccaggtatgtgtcattgtgaatgttttgtcattcaactacagagcaaattataaaggaaataaagacagaatgttaaagagtacttatgctgtagcccaattttttagtactaagttgtgtaagttttagatatagcataactccattgtagaaaaaattaaaaataaaataaaaaatattctagtctcactgctatatgtactgttagtatagttgttgggttttttcctttcagtcacttttcatatacatatgtagtggtttttaaataatcataccgtatattccatttttattatgcttccttcatctagtgtcttaccacacatatttttctgcattatgaaatagtcttcataattattatgaagctacatagcatttctttgacttgttgtaccataattttattgtttgtctgcctctgttttttttaatccattttgttggttaagaaggacaggatgggttgaggaacactagtagttaactaatcat

SEQ ID NO: 122446 - DNA, 1049 bp, Homo sapiens
agtgaattaattggtaggaaatttgaattttaaaaaagctctctttttactttaaactacaggtaaaactatatagtttagctaactacatgaagagtaaaacgtgacagactttggtttcattgtataactacttggactagtcattctctttctcaaacaggcattgagagatcctgcatatatttgagaaaaatagtctaaatattgtcattgagagcagattttctgaaataacatcatgaattgatttaatctaatcttgggattaaaaatctttcgttttaatatatggagtgctgctgagctgtgactttgtcctttatgtccattttttctgtaatcttacatacatatttccctagagccttacatacttctttgagcatgtctttaaaaaatgttttaaaaacatagtatttatttgcttttatagatacaaaatcttaccctaatcagtgtggagttgcatgctcgaactagacgagacttagaaccggatcctgaatttgacccaatctgtgctctgttctactgcatctcatctgacactccactgccagatacagaaaaaacagaactcacaggtgtaatagtgattgataaagacaagacagttttcagtcaaggtattgtccatttttattaatgatatacctgcccactctagggtgaatgttttaatggggaattcctgtgctgaagatctaatctaagcaagcatgatgactcttttctaaaatgtttgctgaggtaggggtaggagattgtgtataactttgtcctagatttattattcttacttggattagtcagaagcagccaggcacagtggtgcctgcttatatatagtcccagctacctgggaggctgggcaacaggattgctcgagcccaggagtttggggctgtagtgcactatgattgtgcctgtaaatagccactgcattccagcctgggtaacatagcaagaccccatttatttattcattttttaagtcagaagcaatgcaatataaagatcttaatatttataattatcttatataa

SEQ ID NO: 122447 - DNA, 1604 bp, Homo sapiens
caagaaactgcctaaaaccaagccaactggagttgtaaaatctgctgagaactttagctcttcagttaacccagatgacaaacctgtagtgcctccaaaaatggatgtaagtccatgtatactccccactacagcacataccaaggaggatgttgataattctcagattgctttacaagcaccaaccacgggatgtagtcaaactgcaagtgaaagtcagatgctgccaccagttgcctctgcaagtgatcccgaaaaagatgaagatgatgatgataactattacattagttatagctcccctgattctccagtaattcccccttggcaacaaccaatatccccagattccaaagcattaaatggagatgatagaccctcatcaccagtagaggagctgccttcattggcttttgagaacttcttaaagccaataaaagatggtatacaaaaaagcccctgcagtgagcctcaagagcctctagtgatatctccaattaatactagggcaagaactgggaaatgtgaatcactttgctttcatagtacaccaatcatacagagaaaacttctggaaaggcttcctgaagcacctggccttagcccattatcaacaggtaagtgtacaaataacaggaagtctccataattgttcttcagaaatagaaatgaagataacattagactgtaatgaaaatcagagctttttaaatgaaggtatagctcagcaaatatttttcgtcatgtcttagaaagtcgtcacatggcaactgtctttctgctgtgaaatctacttatatttgcttccatcctgtcttgtgggtgaaatgcaggagccctctcaaaaggcttatcttctcaacttgactttcctgttggcttttatacatacccaggtctcccacattttaaaacagaaacaaaaaacctgccttgacctcacgtctccagccagcttctactctttctcctccccttcaaagccaaatttcttaaaagatttatctaatttgacaactccagttatttacctcctactcatttctcagcccactctaaactgaattctgcccctgtcattctacattatagctcttgtaaagattcccagtaaacttatagctaaaaccaatagatgttcctgagtcttatcatatgtcctctaagcagccattttcttgttgaccttaccttccttcttggagcttctccacttggctttcctcctacttctctgtttttttcccacttgattttctcattattctcagttgttatctaaatgttggagtttattaaggcttggtcttaagccttctttatatctttctctaaatgatctaattcctgtctacaggattactacagataactcgcaaatttatattcccagttcagatctctcttttaagctccagaacactatatccaactacctatctgacatttccacttgaatgctaaatggcacctcaagattagtattttaaaaaccaattcatgatctcaccgcatacattcaccaccacttccccaacacacttatatatacatgcctccacataaaaacccatctggccttctttcagttttccttatttcaa

SEQ ID NO: 122448 - DNA, 4321 bp, Homo sapiens
ctttcacagacaaacaaaaatacagaaaaaggtctagataactcagtcacttcttttacaaacgaaagcacttattctatgaaataccctggatctttaagcagtactgttcattcagaaaattctcataaagagaatagtaagaaagagatcctcccagtatcttcctgtgaaagtagtatttttgattatgaagaagatattccatctgttacaagacaagtaccaagtagaaaatatacaaacattagaaaaatcgaaaaggattccccttttatacatatgcaccgtcaccctaacgagaatacattgggcaaaaattctttcaacttttctgacttaaatcattcaaaaaataaagtatcctctgaaggaaatgaaaaaggaaacagcacagctctgagtagtttattcccttcatcatttactgaaaattgtgaattactgtcatgctcaggggagaatagaactatggtgcattctcttaatagcactgctgatgaaagtggactaaataaacttaaaattaggtatgaagaatttcaagaacataaaacagaaaagccaagcctcagccagcaagcagcacactatatgttttttcccagtgttgttctttctaactgtcttactagaccacagaaactatctcctgtcacatataaattacaacctggcaataaaccatcccggttaaaattgaataaaaggaaacttgcaggtcatcaggagacttctaccaaaagtagtgagactggatccacaaaagataattttatacaaaataatccttgtaatagtaatcctgagaaggataatgcattggctagtgatttaactaaaaccactcgtggagcttttgaaaataaaacacccacagatggttttatagactgtcactttggagatggaacgttagaaactgagcagtcctttggactatatggaaataaatacacacttagagccaaacgcaaggtaaattatgagactgaagacagtgagtcaagttttgtaactcacaactcaaaaattagtctacctcatcccatggaaattggtgaaagtttagatggaactctcaaatcccgaaaacgaagaaaaatgtctaaaaagctgccccctgtcatcataaagtatattattattaatagatttagagggagaaaaaatatgcttgtgaagctaggaaaaatagactctaaagaaaaacaagtaatattaacagaagaaaaaatggaactatataaaaagcttgcacctttgaaggacttttggccaaaagttcccgactcccctgcaaccaaatatcccatttatccactaacaccaaagaaaagtcacagaagaaagtcaaaacataaatctgctaagaaaaaaactggtaaacaacaaaggacaaataatgaaaatattaaaagaactttgtctttcaggaaaaaacggtcacatgctattctttctcctccctcaccatcttacaatgctgaaaccgaagattgtgacctgaattatagtgatgttatgtctaaactaggttttctttctgagagaagcacaagtcccataaattcttctccacctcgctgctggtctcccacagatccaagagctgaagaaatcatggctgctgcagaaaaagaggcaatgctttttaagggtcctaatgtatataagaagactgttaattctcgtataggaaaaactagtcgcgcaagagcacagattaagaaatcaaaagcaaagcttgctaatccctctatagttactaagaaaaggaacaaacgaaatcagacaaataaactagtagatgatggaaaaaagaaaccaagagcaaaacaaaaaacaaatgagaaaggtacatcgagaaagcatacaacacttaaggatgaaaaaataaaatctcagtctggtgctgaggttaagtttgtactgaaacaccagaatgtgtctgaatttgcaagtagttctggaggctctcaactactttttaaacagaaagatatgccactaatgggctctgctgtagatcatcccctttctgcttccctacccactggaattaatgcacaacagaagttatctggctgcttttcttctttcttagaaagcaagaagtctgtagatttgcagacattccccagttcacgagatgatttgcatccatcagttgtttgtaattctataggacctggagtctcaaaaattaatgttcaaaggcctcataatcaaagtgctatgtttactctaaaggaatcaacgttaattcaaaaaaatatatttgacctttccaatcatttatctcaggtagcacagaatacacagatatcttctggtatgtcctcaaagatagaagataatgcaaataatatacaaagaaactatttgtcatcaatcggaaagttaagtgaatatcgcaattccctagaatcaaagctggaccaagcatatacccctaattttttgcattgcaaagacagtcagcagcagattgtgtgcatagcggaacagtcaaagcacagtgaaacttgttctccgggaaatacagcttcagaggaaagccaaatgcctaataattgctttgtaacttccttgagaagtccaatcaaacaaatagcatgggagcaaaagcaaaggggctttattttagatatgtcaaattttaaacctgaaagagtaaaaccgaggtcgttatcagaagcaatttcacaaaccaaagcactttctcagtgtaaaaatcgaaatgtgtcaacaccttcagcatttggtgaaggacagtctggactggcagttctaaaagaattgttacaaaaaagacagcagaaagcacaaaatgcaaatactacacaagacccattatccaataaacatcaaccaaataaaaatatttctggttcccttgagcataacaaagcaaataaacggacacgatcggtaacgtccccaagaaaacctcgaactcccagaagtacaaaacaaaaagaaaaaatccccaaacttctcaaagtagactctttaaatttacaaaactctagccagttggataactctgtatcagatgatagtcccatctttttttcagatccaggctttgaaagttgttactcacttgaagatagtttatctcctgaacataattataattttgatattaacacaataggtcagactggattttgtagcttttattctggaagtcagtttgtcccagctgatcagaatttgcctcagaagttcctaagtgatgctgttcaggatctttttccaggacaagctatagaaaaaaatgagtttttaagtcatgacaaccagaaatgtgatgaagacaagcatcataccacagactcagcctcatggattagatctggtactttaagtcctgaaatttttgagaagtcaaccatagatagcaatgagaatcgtcgccacaaccagtggaaaaatagctttcatcctctaacaactcggtctaactcaataatggattctttctgtgttcagcaggcagaagactgtctaagtgaaaaatctagattgaataggagttcagtaagcaaagaagtgtttcttagcctcccacagccaaacaattcagactggattcaaggtcacaccagaaaagaaatgggacagtctcttgactcagccaatacctcttttactgcaatactctcctcccctgatggtgaacttgtagacgtggcctgtgaagatttagaactgtatgtttcaagaaacaatgatatgttgacaccaactcctgatagttcaccaagatctactagctctccttcacaatctaaaaatggcagcttcacccctcgaactgctaacattctgaaaccacttatgtcccccccaagtagggaagaaattatggcaactttgttggatcatgacctgtctgagactatttaccaggaaccattttgcagtaatccttctgatgtaccagaaaagcccaggtaatcagttattttttcccttgggtcactctgaattattatgatatataaaattatgctatggggattgaaaaaaaaagaatgtatgcaacatttggttacctgactgctagttttctgtgataccgtatttgtaagtatatcattgtggaaagtatttctaattacagacttactaagaaaattcaaaaactaactggatggttacacctagagaaatttatttaagttgacttggatctaccattatttaacactatgtcttcattaaagattagaggtgctcactgtaaagatgtcatgatactttaaaaggattacaatgatcattgtttaaatggtatttaatttttaaa

SEQ ID NO: 122449 - DNA, 1056 bp, Homo sapiens
atagtttttttaactgtactttgattcacggaaaaccgtattacttaagaaggaaaatgcatttattttgaattaatattttgcaaagttcagtacattactaaaacaccataagtggttctttcttggtgagtatcacaaatttcaccggaggaaacacgggtggctagggccatggtcccagcctcctcatctcactggccagggctgcactcaaccagtccttcagtggcctccccttgagtggcatctcaggcttcctgcagccactgccagccttccctggcaaggcctcccaactaggggctgacagtgctgagctgtacccacggccaagaccctgtgcagtcccaggcagccctggctggagcacacaacaatgttattttaataatgtccctaaattactctaatgcaggtggtccaaggatcaactttgataggagagctacctcaacacctgagcctttgtaccaactgtattctttcagcctgtgccagtatctatgatgttgttattttattctgagtgatctgaattgttggattattaagaaaacaggccgggcgtggtggctcacgcctgtaatcccagcactttgggaggccgaggcaggcagatcacgaggtcaggagatcgagaccatcctggctaacacggtgaaaccccatctctgctaaaaatacaaaaaattaaccaggtgtggtgacgggcacctgtagtcccagctactcgggaggctgaggcaggagaatggcatgaacccaggaggcagagcttgcagtgagcctagatcacgccactgcactccaactccagcctgggtgagagagcaagactccgtgtcaaaaaaaaaaaagaaaacttatttgttggtgattattgtacttgttttatagtggacagtagtcctgatgaggctctggtacatcttcttgctggtttggaaagtgatggatatcggggggaaagaaataggatgccatcaccatgtcgctcctttggaaataataaatatccacaaaatagtgatgatgaagaaaatgaaccacaga

SEQ ID NO: 122450 - DNA, 1321 bp, Homo sapiens
cttgaacccaggaggtggaggttgcagtaagccaagatgatgccactgcattccagcctgggcaacagagcaaaactccatctcaaaaaaaaaaaaaaaaaaaaaatagtgctgttataagcagtaaagcataaattttaggataaatatcataaagttgtaaaatgatatcaatagtaacaaatgaaacagtttaagaataaacgtcactaaaaagattacctctgccaagcaaaagaattactagggcatgtggtatatttgtgtttaatttttaaataaactcccaagctgtttttaaagtgacagcaatgttttactttcccaccagcaatatatgagagtttctctggctctatatcctcactaacacttgttattatctgtctttttttaatgtagccatcctagtgtgtgaaatagaatcctactgtggttttaattttcgttaccctcattactactgatgtcgagcatctttatgtcaacattataactttgaaatttatccttgttcattcattttagctgctgatgactgttccattttaagactaaacaacaatgttagctatttctctacaagtattagatggtctttacttttgcacttagtgctacatctgtctccttatggctatgtgcaggagcttctctaccaaacacatgtagaagagtgagttgctgaatgttagggtgtatgcattgtactctacctagatagcatctgttctaacagtttttctataatgcaattagcttatacatggttagtaaacaagacaataataaaagttttactcagaagtcacattgtatcatacgcaattttactaggcaagcaaagcctcaacatttgatagcatcaaataataaggataaaataatagatgtaaaaaatttgctgctctgattctttgaaatagtgtctctgcattttaatctgcatttcctaattactaatgaatttgagcatctttaaaggccatttgggtttctctgtttgtgaattacattttgtgcttattttctattgagtcatttgtctttttcttatttgtaggagttcttcatattttctagatattaagtctttatcagttatacttattgtagagatgttttctctccatctaggcttatcttataaaaatcttcaaaaaaaaatgttaacttcttttccccccatttaaaaaaaaaagttatccttggggttttacatgtcttcagttttaatgtcaagtttaccaatattcctttatggtttagttttggtatgtgatttatgagaccttccctaccctgatgtaatgaaaatttt

SEQ ID NO: 122451 - DNA, 1078 bp, Homo sapiens
caacatggtgaaaccccttctgtactaaaaatacaaaaattaactctgcatgatgtcacatgcttgtaatcccagttacttgggaagctgaggcaggagaatcgcttgaacctgggaggtggaggttgaggtgagctgagttcgcaccagtgcactccagcctgggcgatggagcgagactccatctgaaaaaaaaaaaaaaaaataccaaagtgtttcaaatcaaaagttaatgaaatatgtcatcaaccactttgtagtaaaattaaggatctccccttttccacttggtgtccatttttgtacaaggcctaaattttggaatgagtaaactaggatccacactagatgttatctcttcattctgttaagtagggtcaattatgtggtgtcttctttatcttctcttttggggcactgatgaaaagcaaatgcttttgagtcaaagatccagactgggaaacaatcctttgtagttctcataaaaattaatgacctggtgatatcattacttttcctagctatgatcccactgttgatcattcatacattttatcagttctgtagttatgaagaattttaaagtattccctatctcagcagtagttgagggcaggaagaatggtgaatatcgtttgcccatttctcagtgtgctcaccttcccttttattgcatgttctcccttgttttttgaatactgaaaaagatgtctctaggcaactgatttcatatgtgtatggttttttatgcattcctctgaggtttttatattatcctatcccattctgccccgggtataaccatatgctaaaacgttttatattccttttatataaaatataatgaaccaaaatacgtagaatttacttcaaaaggatctagggtagtcagtataatatgttttgtatttttctcatcctatttttcattatatatacatataaagtatcaattttgtcagaataattgtgaattaatatatcaggttttctgggtacaagctaaatgtaagataattgtataagtaagaaaaatgttagaaagtttgctctcacataattattatgttttttatat

SEQ ID NO: 122452 - DNA, 1050 bp, Homo sapiens
caaatggtgaataatgtttgggctgatggcatcctaagtaccttgattttgtcattacagattgtatgcatgtatgaaaataccacatgtggctctatgagtatgtacaaatattatgtatcaataaaaagggatctgtaatttatgagtaataaaattttttaaagaacatttaccagccgggcatggtggctcacacctgtaatcccagcactttgggaggccgaggcaggcggatcacaaggtcagatcgagaccatcctggctaacacggtgaaacccagtctctactaaaaatacaaaaaaaatttgctgcgcttggaggctactcgggagactgtggcaggagaatggcgtgaacctgggaggtggagcttgcagtgagccgagattgcgccactgtactccagcctgggcaacaaagcgagactccatctcaaaaaaaaaaaaatttaccttctaaaaagtaattatatgaaaattgaaagtagaatttattccttttacctttctattcctaggtaatacattgcatgcaactggatcctgcaagaatcatttatcaggaaattctcttgctgatactttatttcggtgggaacaagatgaaataccaaggttagttaatgttgtaaaggaaatgaaaattttacatatatcctagttgtgatcagaaatcagtggttaccataattaaattttaaccttttattgtattggatctttttaatctatacacttaacagaaacaaaccttgacattagtgtattacaaggaataaacgattttaaaaacaaaccatgaaaatgtactagttattacctaattaacaaaaggaatacaaggtagatattgttatacttttctgcaacattcatcttcatcatctattctaatttgatatcctataacttgtcaagtaaaacaattacatttatgataaaatagtaatttaaaacaaaaatctaaatatttttaataacccctaaaatttataaatattaaataagtaataaagtattttgacatgctctggttttgaataatat

SEQ ID NO: 122453 - DNA, 1052 bp, Homo sapiens
gacatgtgactcttcctttcatttgaacatttagaggccattgtagggttactaatttgcctaatttcaatatcgtagtgtctcagggaataggaaggtgctaggaaagaaagaaacgggaatggccagtcagtggagcagttggaacacactcaagtttgctgtcttttatgggcacggtttattgtggtacctgaaaacaattaacaatagtaacatcagagatcactgttcacaggtttgaaatattgcaagaggaaccaaaatgtgacagagagacacaaaatgaacacatgctcttgtaaaaatggcaccaatagatttgctcaatgcagagttgccacaaatgttcaatatgtaaaaattttaatatctgcaaaatgcaataaagcaaagcacaatttaatggggtattcctgtatttggagttatgcaaccatcaccacaaattcagaacattttcatcacctctgaaagaaatcctatgacctgtagcagtcacccccaagcttcccatgtttcccactcctgagcaaccttactaatctacttttggtctctgtatatttgcccatactgcacatttaatgtaagtggaatcatataatatgtggggttttttcctacttagcataatgttttcacggttcatcagtgttgtagcttatatcagtacttcgtttctttttatggccaaataatactctgttatgtgaatacactacattttatttattcctatcccagttaatggatattttggctattatgaacaatgctgctgtgaacatccatttatgaatttttgtgtagctatatattttcatttctcttggacacctacctgggagtagaatttctgtgtcaagtgttttagcatcttttgccttttcttctcattgaattccttcccttctacttctcttaaaatgaaactgacacttccagtcctaatatcctttctaactgccataattttttttcttttccatcactgtcaaccttcttgaagcagaggttagcattttttgtctcttagttcacttttggtt

SEQ ID NO: 122454 - DNA, 1050 bp, Homo sapiens
aaccttttaatttttaaatatagttagtatcaaattggtttaagacaaaatattcttcatccatgcagttttttgttattcagaacatgttgcttacttgaaaacttgattgaaacttttaatttctaacaaaatacaaatttccggtaaaattgagatggaaattttgtgtgctaataagtgctttgttctgtatatttctataatcattgtttcatttaacattttagggaacataattttatgataaaactttttttttctaatttaggatatgtgaacttttgcaaagcggagccataatgaataaattttaccagcctcatgaagcgcatattccctacctcctacagctcttcattgactacaatctttatggcatgaatttaataaatctggctgctgtcaagttccgaaaagcaagaaggaaaagtaaggttaattttcagtcaaattaaatttttgtcaaattaaagttttgaaacaagtgttatatagtcagtgatttataaaataatatatatttagaaaataaatgttgagtgactaaagaatgaaaagaaatacatgcaaagtgggattagagattgtcaggaaaagcatctcagaaaaaattttttttggtaacagctttattgagttataatttatatccgtttaaagaggacagtttgatggtttttagtatacaggctacctaaaaggtattgtgggtttagttctagaccactgcaaaagtgaaccctttacactgcttagcaattgatatgtattgtgattcttttttttttttaacctcagaccttaatgttactttttatattttaggaatagtatatgatacacaattctagaaatccctggagttgttagagccttgttactttagtccagcacttccctgatggtgtgaatagctgtaggttagtggacgtgttggtctctcagcattccagacggattcctaagtcccttgagccatcacctccaccactgaacatccttgtccattttatctcagtgggctgtgcaagcattgttatttttctt

SEQ ID NO: 122455 - DNA, 1043 bp, Homo sapiens
ttctcattccagtgtgatcaatcatatttctgccattttgttggtttacattttaacatctatggttgtttcttagaattctgccttagactttcatctttactctgtatattttctgttccctctacagacttatttactcccatgggtttgtttggttttaacttttgtttttgtttatctttatgcttttgacttccaaatgtatatgaatagcctcatttctctctagagcttctaaacaatatatcaaaccatctactggatagatggaatagccgagtggttaagagtgagggctcacaaggcagagaaattttgatttgaattttagcccctttgtttttttaagacacaggatcttgctctgttgcccaggatggcatgcagtggcgccatcatacctcactgtaacctggaactcctgggctcaggtggtcctcccacctcagagctcttctatcttttgtgtgatttttaaatctaagataatttctttatttataaaatggagatgatcgtaccacagacttgtaataaacattacttgtaataaagtacgttagcacagtatccaatatatagtgctcagaaatgttagttacctctgctgtgttaataaaatgattattattttctttatgattcatttccaatattattattggatccccactatacctaaatgcccttgtgtctaaattgagtttatccttattccccttccaaaaaatcccaaaccaatttttcttacagttcttcccctttcaaataattgcaccaccactaaccagctgcttaagcaagaaatctaggcatcaccctcagccccttttctgtctcacccttcacatctagttagtcatcaaggcctgatcatttcaccccttatatgtctcctgaatcagtacatttctatgatccttgttatagccaccatccttagtttttccacaacagcctatttactccttacctgtagtcttctgtgttctatagctagtctggtgatgtcacttttctgctattcacctctcagacaa

SEQ ID NO: 122456 - DNA, 1020 bp, Homo sapiens
aggaaagtatatgtgctattgaatactatcaacctggcataattgcaaacccagttgatatatatgtgtgagtacacacgtgtacattagaacttctaataaagtcattctgtgagactaaatttgcaaaataatttatctggaaacagtttaaaatggggtcttatttttacctaagagtgtgtgatggatggagtaggtctgggatggtgcccagaaatatgttgatgcctgtgatttaggtaacccttagaatctactctaagaaatactgttttgataaagcaggtgatattttggattgatgaaggtctcttttagaatcagattgttcttattattgaatggttaaaatatatatttatgtattacattattatatattaaaatatgtaaagaatgacattgcttttatcttgactgcataattcttatcaatttcttgctctttccagtgatttccacatttttactttcctacctattgctattttctgtcaggtgttgataaattctggtgagtgacaggtaatatgaggggcaaatatgtttattcccctgttctttttctttaatcacgtttattgaggtataatttacatataataaaatggaccaattagacgagttatgacaaacgtatgccgtcatataaccatcatcaccacagtcatggtatataaaatatttctatcaccctaaaaagttcccttgtgctccttttagtaaaacctctctcgctattcctggtccctcacaaccacttatctgctatatcactgtaatcacttatagttttgccatttctagactttcttataaatggaaccatgtgttacgtagttaagtgtcatccacattgtcgtatgagttaatgtttttttttaattgcattatatgcatttatccattatatggatataccattcactaggtgctgaacatttggattgtttccagtttgggctgttatgaataaagcatttatgtacaagtctctgtgattatatactttcattt

SEQ ID NO: 122457 - DNA, 1016 bp, Homo sapiens
agacagagtctcactgtgtcgcccaggctagagtgctgtggtgcgatctcggctcactgcaacctccatctcctgggttcaagtgattctcgtgcttcagtctcccaagtagctgggattacaagcatgtgccaccacaccatacctgtctaatttttgtatgtttcatagagatggggtttcgccatgttggccaggctggtcttgaactcctgacttcaggtgatctgcccatctcagcccctcaaagtgctgagattacaggcatgagccacctcgcctggcccaattttaacatttccgagtttgtaatgtgtctcacagtatgtacatttaatacagtaattttccctcctgaaaagctggtattaaactgataggacatttataatcagtgacttcttagagaaaacgtgacattttaaaattcctctatgtgctttttttaaaaaaaatctaatgtgtcatggaatgggtttgcttcccaaataaacatttgtccttcatttttgccttgcatctgtaattgttttaaatttgtatattttgatgtgttgtttggcacatcccagcttcatgaccgataagtcttttatcacagtgcttttcaaattatttgtggtgaagaatcaggtttttttcccaatacttctttaaaatacattaaaaatgaattactagaaaaatgaaatgaaatgagaataacttgacaaaatagtaatataacctccatttttaaaaattattttatttaacaggtatagaatttccctctcagactgctgtaagagtttctaaatgctaagtttcgagctttgttcttgtcttgttgcatagctgtagcaaacagctagttcatagatggcatttgagtagcactgtagagatctttttagcaatataaaaagactaattcatttcttaaaatctttttgtcctgtgtcaaaattattattcctatttcctttcagtttgactatttctgcgatatattgtataaatcgtttttcatcact

SEQ ID NO: 122458 - DNA, 1037 bp, Homo sapiens
gtgtgtgtgtgtgtgtgtgtgtgtgtgtgtgtgagagatagtaaaccctggtactcttaacccattttttttttctgaagcaatattaatgtctcctctcaaattcatgctcctatttggactgaattaatgtatttgtgtttacaaggtgatagtaagattttaatatcaatctgatataaaatttttataagttcagtgtaattaaatagtatgtggatatattctcattgtgaaatttgaaaagcagaacaggtaagggaaaaatcttctttgaccacctattcccctctctacttggatcagcttttgttgtatgataaatctccccaaaacatagtgctgtgaaacaataggcatttgttagcctaattctgggctgggctcaattaagcaattctgctgcagcttatgtctggccttgcggatgtggctgcagtcagctgatgggtcagctgggagctggttggtctaggatagctatgtctggataatccgtactggttgtttgcttgggtgatgggggccatgtgtctcccgcaggctaggcgtggctctttcacctggaggcagtagtagggtttacagaagtaactagtgacagcaagcctcgtatattttctgttgtccataggccaaagcagatcaacatggccaattccagagttggtatgggaggggtttcctaactgagtggggctaattagggggccattactacaacaatctattatccaactgttgctggctaactcatttttcaggaaacatgcactaactagcgtggcattgctcctttcttgaagtagtgtttatgtaagcaatttattcaacagttcagataaatttagttaattcattgttcttgtttttattccatttttgtcatccttcagcattattcttagtttcattcaactcaacaaatatttattgagcacccattaagtgcacaataaggtatcaagaggtgagcagcagatagagcaagactactgtgttaatcatccaggtttgttttgttttgttttgttttt

SEQ ID NO: 122459 - DNA, 3343 bp, Homo sapiens
aggctaaggtgggaggattgcttcagcccaggagttcaagaccagcctgggcaacatggaaagacgctatctctacaaaaaaatacaaaagttagccaggcagggtggtacacgtttgtggttccagctacttgggaggctgaggcaggaggatcgcttgagcccaggaggtgaaggctgcagtgagccatgattgtatgactgcattccagcctgggtgacagagcaagtccctgtctcaaaaacaatcaaaacaactttgtttcatgtgtaacattatttaaaattatataaaattacattcaggtttggtcccatcctcaggatatctcatgtatgtgcaaatattctaaaatctgaaacacttctggtcccaagcatttcagataaggggtattcaacttgtatatgaaaatggatcccaccttcatttatgagtagggaaaagaagaattgtttaataaacagtgttgggatagccagttagtcatctggaaaaataatgttggcttccagaggagttaaagatttaaatatgaaacaaagaaacaaaaaaggtagggtaattattttttacgtaatccaggattggtgaagtcctttaatagcatactgggttgctggattttaggacataaaaataaaattctgtacaggggaaaaaatcaaacaaagttaaaagagaaacagactagtaaaacttatttgtatacttcacaaagggctaagttcctcttaatacaaagaactagaaaataatccagtagaaaaattagcaaagagaattcatatgaaaaaatgtacaactttatttataatataataaagatgtaaattcaagctacaacatactctttgtcacctatcaaatgagcaaaggttatgtatagtataactcgggaaaggtgagaagagaaaatggtcagccttatacattgctggtgggattataaagtattcatactctatagaaagcagtttgaaaatggttttcaaaaattaaaacacagatttatttcgttctagtaattccattataggattttattctctagaagattttgcatatatgtcaaataaatatctaagaatatttgtggcagcattatttgttactgcaaaagattggaaacatgctaaacatatcagtagggaagtagttaggtgaattatggtgtatatattcaacagaatactagtcagcctttaaaaataatgagagaatactatgtgtactgctgtggtgctatgtcaaagatatgaggaaaaaaagcaagaggcatgactgcatgtgcagtttgctgccattcgtgtggttaaaatatatatttttatatgctatatatgcctatgtattagaataaaattctttattataataaaatccatatgtgtgtgtgtgtgtgtgtgtgtgtgtgtgtgtgtatatataggcagctatagaatgtaatgtgcatgggaggatacgggagagtctgatgacagtaattgctccagtgtgtagaagtggttgcctagaggacaaagatggactaacttttaaagtatactgtttggtaatttttcagtattttaaaatcatgtgcatgtaatactattcaaagttaatatttttaagttatgttttgcttacaggaattggtaagaaggaaaaaataagagaccataatagttgttacaaacaaatgattactgcaatactgtttttaactttagttattgttagagatcttctaattcaaagttttcagttgatgttacatggctcacagaagggtagtcctagtagaatgggggctgaaggaaggcgttggggttcctgtgaacaaatagcatggtgagtgacaaccaacagttaaaagcagcatactgctccttttgatattttaagtgcattaaatgaggtgtgccttactacttggaatctacttcagcagccagccacagtgtacagctgccttttgtgggaaagggatcatggaattgttactggagtttgtattcacggtgccgaaggaacatgccacctaccacaaggtgcaacccacttacaatgagaggacaaggaagcagggagggtgtctctggtggcccagctccaggcctgactatctgtattcacctgtattggatgctgctcaccacgtgcgtttgatatgctctgcaaggtgactgcctaatagtgcatgtatgtttgtcagaaataaagcatgattttaattttgaaatattcttgatgtgaaaatgtttggttttgaaattcatattaaaattttcagcattacatgtgtcaaaaaatatctaccataacactttacattttttcttctgtaattagaaaatatgataattttttttcaccaggcactgtgtagatgcctccaaatgccctcctgttgtccagtgtgctaaatttttttttgctgacaagttttgtttgcaatgttaaaagggttgagaagcatcattctagtcaaatgtactcattttgtatgaagaaaactgaaatctacatagcaggctcagggatttgtccagtgtcctacagttggttggtgtgaggctggatttgaaaattggggatcttggatcttgactcttcagctctcatcacctcacactgaccccctctccccccgaaacatgagggaatattggaggaaggcattgatgataattgaaagacaaaaatacagaacctcagaggaattattaaaagaactgcacatatgtagttcagaaatctttgagaccctactgtatctaatagtgcttagaatcttcttatataataatattattaatattctataatctagaatagattatagtaggattcgttttatgatgacttgggctgtatctttaagaaaacaaaagattatagcaaaaggagtttagggcaaacataaataaaaattgatactaaaatcgtatgtatgctatttccaaaaaagggaggagggaatatatgagacctttcaagttcctctggtactataattacattttctctcatcttgcttttgattggattagaattcacgcaattaaagataatctagggccaggcacctataatcccagcactttgggaagcagaggcaggaagattgcctgagcccaggattttgagaccagtctgggcaacatggcaagaccccgtctctttaaaaaaaaaaaaaaatctaagtgaaaaatgattcaagtctaaataggttgggttaaagtaggttttagaggatgttgtcattggtgctggatatttcaaagaaatagtttgaacttacttataaagtaagaaatgggccatggtatgaggtatgtcactctggtatctggc

SEQ ID NO: 122460 - DNA, 1672 bp, Homo sapiens
aatatggattagtcatgttaaaggaatttttaaggaacttaaaatttcagatagaggaacagctacaaggtaattgacagatgaagacaactgctctttgcagggcagtttggcaatgtatattagaatccttgaagtgttcttttttgacccagtaattctagttttagggattttaatctatgagcataaatcttttggcaaatctggttgtcttttgaatccgtctacttcttttcataatccatcaccaccctaaactactagcatttttggtcaggtttactacagtagcctcctaatcttggtttatcccaatctactttgtccccttctgatctgtttcctacactgtaatcagagggatcttttaaaaatgcaaacctgattacatcaccctactgtttgatatgcttcagtagctttccattgcattcaggatatggacagaactctgtgtcttatatggtggcatctgcctgtcttacaaggtcttgcatagtctggcccttacctttctgtctagtcatgacttgagccatgttcttgacttactctttttgttccagccttgttggccttatctcagtcccttgttcttgccatgctccttcccacagtgagggctttgtacctgccgttgcccctgctgagaatgtttttacttttctttcacctaaacttcgatttatctttcctcagggaaggcttccctatcacagactctcagagcaccatgaactctcctcatagcacttgctgtcattgtaatttcatatgtgttggagattaacatctgtttttccaaatagattgtaacctccagaaatcctgataatgtgtttctttttcctcaccattatagagttaatgcttaccacagtgcttgaaactcgtctattaattcttggaactcatttgtggcaaggattaataaatagatgataatcatcacagagaacaactctaagtgttcaacaattggcaaatggttgcataaactgggtatattcatttgggaggatgtgtttaaaacatgttgtagaagtatgtgtaataacatgggaaagtgctgtcatattatgtgaaaaaattagtttacaaaatagtcacttattaaaagtgtggaaaaaaatacaccgaagtataaaagttggttatctctggaaggtatgttttatattttcagattttttacagataacatgtgctgattttataatttaaaaaaaccatgtacaaaattaaggaaaaattgattttctagatatggttccagaaatgtagtgggagacatgagattcgtaatggtctccaaaatatgtgtcaaccaaaatgcatgattgcatgatgatcatattgaacttaattatataaattccatttagaaattgcaaaatgattcataaattaaagcaagccagtaatttctggttgtattattcttacttgtatgtaaagtggttttaattttaaaatgttttgaaaagtaacatggttttggcacatgacagcactaaaacagagtaaagactagaattaacttaaatatatatgagagcttaatataggttgagcatcccttatctaaaactccataatctgaaatccttcaaaatctgaaatgttttgaacaccaacatgatgccacaagtagaaaattccacacctg

SEQ ID NO: 122461 - DNA, 1037 bp, Homo sapiens
aactatgttgaagaagggatgggaaggggagacagccgtgacagaaggtacgttctcaaaaactcctggggcttatgataatataaaaaagatagaggcccagtttactaggtgttttaaaatggttttgcttttttgcatgctttgaactgcttccatgaaataatggagttctaggaaataatgcatcttaggaaaggttgttcttccctctagctatgaattgccctatgggattttagatagcatttcccacttgatgctccttgccctcatcaccattcatcttattactacagtcagtttctgtggactaccaagataatagcgctttcccaaacacaagcactcattttaaagcagttatcttttaatgtgaattctctttgttaaaatgtcaatgttgtgagatttggtagcatattcctatttaaactagtgaatatgattttgatatgaaccttgaaagatggggaatttgagtgcttttaacgtgttgaaagtgtaacacttgaaactttggaggctgggaaatcgaggcgatgaagtgttctataagataggttttctgcccttttaaatatagtggtgctgtctttgtttccaattggaatttcagtgtaatgcactgttctcacttcagatgcagaggaaggataaaatagtgaagttgatatggccctgttcagccaaatttccgaatcataaagtgacatgctaataggatatactgtggcatttctgtgtattacagcttgtatggtttgagttacttttccacacataattttttctcctccacacaagtcattaaatatgttttcctgagagatagtcaagctttgttgtataggaaagtttcgtttgtggaaataaatgagtttcactgtaagctaatgtaattctattacgtgaggaaatgttccttaaaaaataaagaatattatatactgttgttttcctgaatattttttaaaagacacattaactatttcctatttaatccttcatggacatcccacaatagattaccagca

SEQ ID NO: 122462 - DNA, 1039 bp, Homo sapiens
cataaaagcaccaccgtggggaagggccgttttgaataaacaactttattcaaaaatcgagagggggtgaagcgatgcagttagggaatttttgttttaaagagtagtaacatgcagctggcttggctattaaattggaaacaaggggttcctctctgacttggccactgatattgggcgtgaccttggacaaataattttgtttctttgggctcagtttctacatatgtaaaacgggaaggtttctcttaaaaactaatcctgaagggtttcttctcaacaaaaagatgcaagctgtaggaggcagaaagcgtgggttcaagttcgaaatttgcccctgaattaggacccttgacacatttctaacccatccaagtagagatcgttcttttacatttgtgtgttatacaggtgcattttagtggttaccaggttgccacgtatttgaagtggtgtgagagctactcgtttggaaccgttgtggattttcaaataggaaaatcaaaaggcccaaagagacagctcactggtaagaagctgtctataaattccctaacatataaatgctataataagaacttacgctccgagggatttgagactgattactacagtaaattagcttgtagtttttaacctcagagcatgattataaacatacgtggcaagatttctactaatatgctggaaattagctaatatttttaagaggcaaaatctcttgatctgaaattttagaaggctatagaagtgattttaaaatatgactaccatgctaaaatgtattttttataaaataaatattttgtacacgccgaatgtcagatacacaatatcagtgattctcagtgttccatgacacctagaattctttaagtgttgatattttggctcttactgaattatattttgggggatggggcctgggaatctgtattgttagcaacactacttgccaccccgtgattcttaagcaaaataaaattgagaatccttgtactatattataatcagtgtatccataacttttaaattataa

SEQ ID NO: 122463 - DNA, 1783 bp, Homo sapiens
tttgtagcattggccaattcggtttgctttctttttgaggaacagggtctcacgatgttgcccaggctggtcttgaactgctaggctcctcccacctcaacctgccaactagttgggactacatggtacaaatgtgtcctctaccagagtgacttcagtaaatgtggagttagttggaaaggatgctgacaatcagaagttggcttcagtatatgacctagtttccagcaatcagatgtacccattcaggacatggatgtgagagcgagcaacatgatgcttcaactgcactcagggagataagtatcttctgacaaataccatgaaggaggtatctggttcctctgggtaggtagggaggagttgtggcatctgttctagagtcataggtgctgactggcaggcattgctgggatgggtttccactagaatagctttgtgatgtgggatgggtgttctttgtggtttggtttttcttggatgttgtttctagcttggtttatccaagtctggttctctggccctctgagagatctgtgaactaaatagtatcttttaatccctttttgcttcaaccagcccagtcacagccagctacataatttgtggagcccagagcaaaatgaaaacgtaaggcctcttgttccaacacaggggaaaatgtgctattatctgtattaaaatataaagctttttctttgttctgtcgtcgctctctccacttgtcatagtgtttttaaatttgctttttaatgtcattctatgagaagaaaaattaaattttttaattcttaggatgaattttaccattcatctttatattgtgtaatgccgttttaaaatgcaaatataagagcatttcaattgtatgtggaatcaccaaaattatacaattcatagcttgtaaatgcatatgtattttgtgctatcagagcagtgtaaactctgcacaaaacaaaactatttttgttttccttcttgatatgcacacattctaccaacattctccatcttctgcttactgatgagtaaggaaggatgaaaggaaagggagtgctgagttgccctactttccctttcattctttgtcatcattttttgtgtaaatggttggctaatagtggtaagtaacacatgagtaaggaaggatgtgatgtaatcacttgtgtttcttaaagatgctgttgccttctttctgcacctgaagcaagttcggatttgaatgaaaagtgtagcctcttggaactgtctatgcctccactaactcagtcatagatgttacatgcttgttttgtattaactttgttactctcttgagttcctgcacctcataggtccaccagaatcctttgtcatgaggcatcatggagaccatatgcaaatagaacggcaaggaagaaaggatacatacctctgcttgcatattatgctctgctataccactggacttacaaaacagatagtcaaacataaaagtattacaattttcaagacagtgactacagagcattaaaccaagcactgggccctgtgtgactatacttgtcgcatgttcatgaagttgatggctctgagcgcttgggtttctcaaatggggcttctggcatttttggtgaaacagtttttcattgtgcaggacatttaacatccctggcccccatgcactacatgccactgtaacaataaaaaattccccatgtatttctaaatgtccccaaagaggagttgctgctctccactaaactcctagagtgacctccactgtgtacagctatgaaccatg

SEQ ID NO: 122464 - DNA, 1042 bp, Homo sapiens
atggtggcttacatctgtaatctcagcactttgggaggctgaggtgggagaatcccttgaagccaggagtttgagaccagcctggacaacatagtgagactctatctccataaataataataaaaaaactagccaggtgtggtggtgtgcacctgtggtcccagctactggggaggctgaggtggaaggattgcttgagcccaggagatcaaggctgcagtgagccatgatcacaccgctgcactccagcctgggaaacagagtgagatcgtgtcaaaaaaaaatttttttttaatttttacaatttattcagaggactattgcacctgtacagaagaacttaaagtgaattttgctgtctttttcatgaggacattagtctttgccacaatgcttactactaatgagtacaagaaaacgctgtgtgggacagagttgctcgatccaacctcacagattgacaggcaaacaaatgttttatagggcaaggtagctgttggaattaaactttttaggatttttgataacagaatatgtacttctcataattagggttttttaaacatttttaaggatttttaaacttttataaaatctcagaattttctagtctgtgaacagttcatgtagaaaaatcagtggttattatgtacactgttattgcagcttcgctgaaagattaaaaatctaaaaaatacagtaaaaataagttctgagtttttgtattgatgttgggtgctgtgatgttatctcttttaaaatgtgtttttctttttccataatataaaggaatcaaaaaatacaacttgtatgtgaacttgtgcaaatgtgtgaaacaaattaaggtgacagggcagaagcaacaaaatgaagctcaaatgaaatccacctctcaaagcaggttctatttaatttctctatatttgctattataaattttttattttcatatatgtgtttctttgctagagatgataattggatgccaacctaacttccaatttttaggtgattattttaccaacaaaccactcaccttgat

SEQ ID NO: 122465 - DNA, 1099 bp, Homo sapiens
ttttagtatttaagtatgtctcatgcaatatttggctcggtacatttggtattttttgttatcttaaatactatttacgtgtttctatatttgggacataactttaaactaaaatttttctttattattgtaaattcaaatttaactaggcatcctgtattttatatggcaaccctacttcggatgaattttaaataaatccatggtaaagtaatctataaagggatagatgggtatattcagggatttagtcctagaaaaagttcggaaccgctgctatagatgctgtgtagtgtcagtgaaaggattgctgagcagtagtgaactcacttaaaaagaagcagcatgacttttcttgattgaatcactgctaagaagagtaatagcagagattgctggtacaagggaccactttggtttggctctagctggtgaggactgagcaggagatttgggcataattgaaatgactagagtccaggctgtaaatgaaagcaggtgaaaccagaagatgaattagaagggactgagagtttggcagtcacaatgagtcaaagaggtagaagttcacagggaagaaactcagaatttacaatcttggaggaatggttctgtatgataacggggttaaaaatccaatttcacatttacttttactaaattaaaagtaagagctctggagacaagatacttggttttgaattctggttgtgtgatcttggccaagtaatttaacttccctgtgtcttcgctctttatttgaaaaatagtaataatgatggttcttggggccgggcacagtggctcatgtctgtaatcccagcactttgggaggctgaggcaggtggatcacttgaggtcaggaggtcgagactagcctggcgaacatggtgaaaccccgtctccactaaaaatacaaaatttagccaggcatggtggcatgcgcctgtaatcccaggtagttgggaggctgaggcaggagaatcgcttgaacctgggaggcagaggttgcagtgagccaagatcacgccattgcactcgagcccgggcgactgagcgagactgtgtctcaaaaaaaaaaaaaaaaaaattggttctt

SEQ ID NO: 122466 - DNA, 1092 bp, Homo sapiens
tattctcctgctctcctcatccaccgcttcataccttctcatcctcaagccacaagtactttttctcctatcttcctttgcagtgttacttactatttccctgagaaatagaagtaatcagaggacttccacagaccacctccccccaccaccatatagagtcacctacttgtaactgtgccttgtattctctgtcttccatctgttcttatgaatgaaatgttccgagctgtatccttgcaacttgtgcactagatcccattccttcccctactcaaagagtgattcagcaactttctcctctcccctgcagcatcactcccaccctctctattgggtcattcccacaaccagcttggtggaagcaacaatcagcccgctcccggattcttgcagtagcctcctacctggtctccttttagcccctgctccctttcactttattttcatcgcaatagccagaatgattccattaaaatccactcttgctcagaaccctccagaggcttctcattcactaagtataaaagttaaaatctctaaagaaaaaaaaaaaaatccaaccctacttggtcttccctgccctctacctcttcttacttctctaacctaatatcttactcctctccctcagctctttctgcaccagccacactgattttatttttcctagaacaccctggctagaacttccatctagccccagattttctagtttcctagaacccccactgcttgccctagattttcatctagcttgttccctttcccttttttgacctttcatctttcatatcatcagtgaggcctttcctgcccactcattagaagtataactgcccccacctcccctactctatttttctcagttacacttgtctccatgttgtgaaataccatatatttttacttgttaattgttgtctatagtctgtcacccccctcaaccctaccccaggtaaggtgcttgagtggttgggatttttttttcctttttactcccctcccatattactggtgtattcctagaacatagtaggtacttaccaatatttgttgaaagaatgaatctataatagagtataattggaa

SEQ ID NO: 122467 - DNA, 1046 bp, Homo sapiens
ccatggcacttagggaagagccagctcattttagactggtccttttaatgttgtttgattttgtacacttggaaaatgggcttgcattctttttctctttttgaaaaagctattatgttgttttaaaacatacatattttaggctttaggtaatattcaaattctaatttaaaacaaagtattacttaatatatttgattgataacacattacatgcaccatgcatggaaagcaagtaaaaacaaattgtatgttttattgtactatatgggcaacagggtagcctgccttacaaaacaatataaatcatcttttaccactgctctccaaaaataatttggagtttacacaatccaaattgcacctgccagaactgccagcaatatcttcaattttcactgactatactttcctttcactccctccatatatttagacaaatggaacagatatttcagccacacagtttacacaataaaaaacaaaggttgaaataaaggaaaggaatgtattaaattaactttgggcatgtgagtgtatagatgctagcatccatagcatataaatacacaggtgaaatatacctaaaataaggtggtttgtgtgtatcagactgaatatgcaggtgtggtgtacacagatgtgtacatgccaaactgccgattttctcacgtaagtatagcagtttcaatacctagcagtgaatgttaatgtattttgagaaaaagaatttgtctccttaaatattacaatatacaataagcatgtatttgttataaatataaaaataatgtgcttgaaatgctaattaattagattggagagtacatactttgtgaggaatagataaaaaactagaacaattagacctcagcctgggcaactgtgaaaatataaactcacagaagctctgagctggaaggatttgatcagggcctctacaatctaaatcttattaaaggcatgaattgtctttgcaacatcccagtaaagtggtcattctgcacttgttatacttttggtgtagggatactcagtgcttacca

SEQ ID NO: 122468 - DNA, 1103 bp, Homo sapiens
tatgatttctagggtctctttctagactgaaagttccataacagaaataaatgatctgagaatttaattgattttcgtgctttctttcttcctttccccccgacctttggttgttgttgtttatttggttagtaggctaaaatagaactatttttcttgaaaaatagtgcataattctctgggatgagaggcatttcttctctgtggtattttcccacagtgtaaccttccttctcttttcatttgccactaggaggtgggtctcactgattcttcctggttcattaagaagaaacagaaagatcttgtgttttcagagactctttctggatcatttcccatgatcataggactttgcaatccatttggcaaaggtggtggtgacaatggggtgtttggcaaagtggatgaggtagttgacgaagcagctggggtaaagaaaaatgctcttggcaaaacatcatgaaactagggtggaatgttcaaaatggagaacttgcatcccttgctgagatgactccgagaaaaattctgtctttaaagaggtgatttatttaacaggaaacaaagaaaaaggtatcaacagtaataatttttctgagcactgagctgagaaatagctagtctaatactttgattgtagccatgtactgagacctctttgaacaatctagaagttaaaatagatttgaaaccagtcactaaaatttaaaattacatttaaaattctaaattagtcatcaaatattaggtaagaacctaaccttgcattccacaaacccacccctcaaatcggtgtaagtctgaataaagcctttgggctaagaggttatttttactaagtcagccctaccccacttccaccccaaaaatatctaaagatgaatgcctgaggaccagcataacatctaaatcaaccgagtgttaatcttattgtcagtgctctcaaatagttgttacaattcctttgatgggccgggcgtggtggctcatgcctgtaatcccagcaatttgggaggccgaggcggatggatcacgaggtcaggagatcaagaccatcctggctaacacggtgaaaccccgtctctactaaaaatacaaaa

SEQ ID NO: 122469 - DNA, 1050 bp, Homo sapiens
caaaggcacagagacaaaagaacacagcatgtgtgagggcatgctgaaatggtccagggtgaccagagcacacagcatctacagagggtgatgagagaaaactacgcaaggggacacagtcctcttctgagaggcctcatagatcgtgctaagaaaggtggatatgatcttgtagtcaatgggaaaacggcacaaaatttgtaagctaccaagaaacagatcagacctacattttggatgttcctctttgatggcagaggagaggatggctagcacaaggtcaaagtggagatgagaccagtaaggagactcatcagtaagtgacagcagtgagaccctgggcaaaggcagcgcagggaggatagaaaggtgtgccatcgcacaggctgtgcaccatacagcctgaggtgtcccgttcccataaactggagcctccctcatccagggcaggggtctcagtgcagtcttgacatctgaggatccctccagggtgaaacagggcctgagtttagggtgctgtggtctgattctcaacatgtttactccaccactgccttccctttgccaagcatggaatgtggcctcaggtggttttgcccccattctccaaacttgctggcagacccttctggtgtgaaaagcctcatatgaatcacggcaaagttcactcaggtaactatagatttaattcctgtaatcattagctttgagagctgaactatgtgcaatgaaatgcctccctggaacagccagcaaaaaccatacacatcttgacttttatgtacaagagataagaagtatgacatgaaccttctctttttctttcttgagttaaaacagaaactacatctttgtgtgcaacggttctttgaacaattaggacagcagtgatcctatcagatagctttaaaaccctcctgattcatactgctgaactgagtggtacaacttgttgatctttctggtaacattgttatctctaaggattgataaagaattgatggcagacatggtggttcatatctgtaatcccagcactttgggaggctg

SEQ ID NO: 122470 - DNA, 1685 bp, Homo sapiens
cctttttaaatctcagaatccttggtcaacaaacaagcctgagaagtacagaccagctctggctgaggtaggggtgggaggcgcagacccagcccctcctccagcacatatgggcacccactgggaactccacaggacagcctgaaagtcacaagtgtagcaccgcctcctagtcaagcagaaactgtctcacagcgtctctataatcacggggagaaggaggattcgtagcccataaaacagccagttccaacgctgggtgattgtttcggtcagaatgttctagttttatcccatgctggacaagtttaatatcctaaatgtctcccacttatttgaatataaccaggccccatagttccccacctgtcatgagctaagaacactcccttcccttgtttgagcatctgatatgcaccagatattttgaaaacattatttcatttcatcttcacgacaatcctgtaagtattagtgacccattttgtgaatagggacattgaggcacaaagagtttaagcagtggggccacggtcacacagcctgtacatgaggaagccaactttaaccaggcccacatgatgcaacagcaggtgtccctttcactacgccacctgcctttctgaaaaggtagggcacagaacatgatacagctgcaggggccagccctcctcaccaccccgtctcctgcctcctaggacttcatagttgctggtaaacagccaagccagcagagcacgtctttccagaatcttggatcctagagatgacagattgctctccccttgcaactgataggaacaactgagtcccagaggtgcagggacttgcccacagtccctaaggtagatggagccagaaccaacagctcctctcctgacatggcaagcctggagctcttcacccagcatcatgctgccttcagctggtctctggggaagaatgggacttccctggacaaggtatccatccccaggggacagtgaggtgttgtgatcccctccccactcaccattcgatgaatgtacttagtatgtaagccatgctcatcctcgtccagctgcgactcagcgccttccacgtcctgtttgtatttggggctgattgctacgattatcatcacggtcttctgttaatgagagggagaaaggcatgtttatggaagtgtaccagcaggactgtgggcattctctgacacacggggtggagggccaggctcattctccatagaaagagaagcactggcccccactcaggcagactcttatctctgcttctcccttctgtctccagcccagccccaccttgaacatgcagagcaaatggctcagagaggggctctctcaaatagatgtgcttttgcctaccattttccacaaccatcactaataaacctctaatgaaagcccgaatcactgagtgagtctgtgtcgtggcaaaaaggcactgcaacaccaacagtaagaagcaccctccctccctccagctggttctgagctgccagtcactgcactcgactgccctgtcttctgcgtgtacacattagcacagtcagtaggaacagacccttcagcacaaagcaaacatcaggctgcagacaaaaggaaaagtgcaacaccccagcctgctgagactcccgtcccccactggctccctccaaaagaagcagccgacacggacacgct

SEQ ID NO: 122471 - DNA, 1381 bp, Homo sapiens
cctgcagagctgagaccacaggttccccagcctccgtccccagctgctgtgcctagaccccctagcaaccctccagccagaggaactctaaaaacaagcaatttgccagaagaattgcgtaagttgtttgcaacattgttctctccttcctctttttttttttttttttttttgagacggagtctcgctctgttgcccaggctggagtgcagtggtgcgatctcagctcactgcaagctccgcctcccaggttcaccccattctcctgcctcagcctcccgagtagctgggactacaggtgcccactaccacacccagctaattttttgtatttttagtagagacggggtttccccatgttggccaggatggtctcgatctcttcacctcgtgatccacctgcctcggcctcccacagtgctgggattacagatgtgagccaccgcacccggccactccttcttcttgtgaggtcttatactttgtgatggctggatgatcactcgtccctaatctcgaagattttccttttttttaagacagggtctcactcctgttgcctaggcgggagtgcggtggtgtgatcatggctaactgcagcctcaacctcctggggtcaggtgattctcccacctcagcctcccaaatagctggggttacaggtgcataccaccacaaccagctaatttgcttatacttttactagagacggggttttgccatgttgcccaggctggtctcaaactgctggattcgagtgatccacccgccttggcctcccaaagtgctaggattacaggcgtgagccactgtacctggcctcataacctcagctatttctcatgtacacagtaaaataaaatgcacttttttgctttttgcttaaaaagtaaccagcattttgtatgaatgtttttagtgattctgacaccactagtaacactcaaaaactgcttacctctagatttccttaagcacatactccaaaaacaaataaccccagtgccttttccctcttctaaatgatgctcttgagtggacttgtccctgggtaaattgattggatgtccatgtggtattgggcagggacccagcatctcaccataagttagcagcagccatcaagaatgaggtcatttcctgtaggaatgagcaatcttgtttggaaaaaacggtctcacattctccatactgcatcacaaccaaatgcaaactaagccttttatttaaagaaacattcaactaagcgtaaggtgatgattctttttccacattttgctgccagaaccagaaatgttgaaatatcaccaaaatgttctcatattaaggtcagtcaggacagtaatttccagaaatcttaagaaaacagccactacttgtg

SEQ ID NO: 122472 - DNA, 1188 bp, Homo sapiens
atcgagaccatcctggccaacatggggaaaccccgtctctactaaaaatacaaaaaattagctgggtgtggtagtgggcacctgtagtcccagctactcgggaggctgaggcaggagaatggggtgaacctgggaggcggagcttgcagtgagctgagatcgcaccactgcactccagcctgggcaacagagcgagactccgtctcaaaaaaaaaaaaaaaaaaaaagaggaaggagagaacaatgttgcaaacaacttacgcaattcttctggcaaattgcttgtttttagagttcctctggctggagggttgctagggggtctaggcacagcagctggggacggaggctggggaacctgtggtctcagctctgcagggcactccaaggactccccaggagcaccagctctattaggtggctggtgatgtggctggtccctagaaaggaatacatttacagtcaattttcattctttacaaaggcaaaccttcagggacagaaagacttttagaactatgggaagatcccagtgggctctctctcctctgcctctatttcttaactgagacagaaggaagaggggagctccatggagttgtagtcaataagcgtttcagctggctgccacatgtgagggcctgtgctctgactccaaagagggaagcaggatttgatttctctattcaagatttgtttaattggaaaaacaagtctcatgcacagggcagacaaggtcaccaacaaaacaaagtagtatgacaggtgacacagatggttgatgttataggcattcagataaaaagacatgacttttagctcataataggtaacatttaattatgtatcaaaaggtaaagagggccatgtagatttagaagtatttgtactgttgacatataaatggaaatctgattttgaagaccctttaaagaagttgctaccatattagatagcatctttattattttcgttgccagtattcccacgagcattctgctgagatgaacaatcagatgacctcgtgtgagatttggaggagagaaggaaatggagagcatgcgtctgccgcttctgtggtttctgtcggtaagcacagtgatgaggtgctgagttttccccagaaggcctcccagtgtcctattaccagcttcacaagcgtcgagggcagggcatgggcatctattg

SEQ ID NO: 122473 - DNA, 1043 bp, Homo sapiens
atgagtgttcccttttgtaagtggaatctgaccagctttgtctggaatttgactggttgtatggaaaaggttcctaaataggctggacacgcctgtaatcctagcactttgggaggcctaggtgggtggatctcttgagcccaggagtttaagaccagcctgagcaacaaggtgaaatcccatctctacaaaaaaataccaaaaaaaaaaaagaaacaagaaaagttgctaaataaaaactatgtttatcaagtaaatgaccatcatttcactgctaaagttttaatcatttttttccaattactatgacgaaggcttgccaatttacttgggtactatacatgtaaaataatggctaacatttattgatcacttgctacatgtcaagtactgttctaagttccatattgagaattatagagttcaattttccattttcataaagaagtttaactcagaataaaaatccagattcctcaccatggcccatccagccttcatcttctagcacaccattctctccttgctcactctgctaggccccactgacttgcttttggtatcttaatgacatcaagctccttgcttccttagctccttgcttccttgaccttctcatcctttaggtttcagctcagatgtctacttaaagagattctctggtcaacctgtctattaatgtctgttccaacaaccagttacttcccttatagcacttataatttgtcattctgtttctgacttctacttcttatccatctctccagtagactgtgaattccatgaaaacaaggacggtgtataactatttgctgaataaattgataagtggatggacaggttctgtttccaaatttcattgactcccttctttgcttccctcccaggccaaaaaaaaaaaaatggcttttccaaggcttcacattacaaagactctactcatgattaaggctcactcctttccccaggaagtagagaacagatttctttttattcattcaacaaatatttattgaacctcgatggccaggcacttggtgaac

SEQ ID NO: 122474 - DNA, 1088 bp, Homo sapiens
gctctgcagtcagcgagcctgcgtctgagtctgtggttggagccctccctgcagagcatcagttttcatttatggaaaaacgtaatcaatggctggtatctcagctttcagcggcttctcctgacactggccatgactcagacaaatcagaccaaagtttacctaatgcctcagcagactccttgggcggtagccaggagatggtgcaacggccccagcctcacaggaaccgagcaggcctggatctgccaaccatagacacgggatatgattcccagccccaggatgtcctgggcatcaggcagctggaaaggcccctgcccctcacctccgtgtgttacccccaggacctccccagacctctcaggtccagggagttccctcagtttgaacctcagaggtatccagcatgtgcacagatgctgcctcccaatctttccccacatgctccatggaactatcattaccattgtcctggaagtcccgatcaccaggtgccatgtaagtgatctttacctcctctgggcattctgggctgggtgactgaagaaacaagggcctcacatcaatgcttcgtgtcactaggctggcatgaacaggtcagaatgcagggagggcattctgcttctcttaggggctttccatgtgtggctggatttgcaaagggcctgcagagaatgctttttcttagcctaaagcctgtcccacttggagtctccttctctagggacctttaaggacaaaatgggttcctctgtctgggttagtttaacaaacctgcctagaagcagagagatgaccaaaatgatttctagaaaatgtattttttgttctaatctttgggcatatgggttcttccttctcgtcatctttcttccccatcttagacttggcagagaaagggcttttagtcaaaaacaaagcaaaacaaaacaaaaaaccagaaggtgcccagaatgtcattgagactctgggattcgggccattacatgaaaatgaagttgtttctgtgattttgctgcttaaatccttttggacacttgagccatccacagctaccctacattccagccactctaagactggca

SEQ ID NO: 122475 - DNA, 1070 bp, Homo sapiens
taatcctcacacccactctaatttcctaagtactattgtcagactcattttacagacaggaaaagcaaggcatagagaaggtaagtaacttttccgaggtcacatggctattaagtagcagagctgtgattcaaatataagcggtttggcaccagatcctgtgcacttaaccgcttgcatctcggttgggagcactgactggttcagctattgggagggaagaaaggggatggggaagccacataacccctaggagattctgtaataaatatgcttcagagccattcaccttgaagctgaggaggcatggaagcaggccacctgtgttctgtacagcatcaccaggctggaaatctgccatggctttccttcacgccatcacaagaggatacagatgaggctgcagaggcatcttgatttgagaaaagcatttgactggatctcattaaattttaatcattaactgaattcaaaataaattgaaaactggttgacagagcaccaacaaagggtgatgataaatggtgatgcatctagaggggagctatcttccaggggacaactctaaggcaaggacggatgggatttaatgaaggtgttatgtccccagaagaagacaaatagcacagcaaggaacagaggaaggacaggagtgagcagcctgagtaattaataaaccatattaacagctcctccataatcaggccttggtgatcacaactgcttggattttttcttaagctttctttgagtcaggaataggtttgaagcgtcctagagacacacagcatgaatatttcaggtggacattaaaaagaaatctataaatttacagctgggaggatcctgagatctacttcggatcagaaactttcaattacaagattcccaaggccttacttcattccccagagagtaatctttttaataaatgtccaaaagtcatggatttaaaaaaaaatctttaaactcattaatgtcctttgtttcctgcccaaatgcatgcaaactttcataacactggtttgctgagtggaaggttggttttgagtgaactgtttggctcagat

SEQ ID NO: 122476 - DNA, 1024 bp, Homo sapiens
cttctcatacccagcactacatacaaattacaagtaaataagtgtctctcctacaccaataaaaggcaaatacaaaaaaatccttcagcgtttccccactttccttacttctcttccgttctccttccttcctttctctcccttcctcttcctctcttggtttttcctttctaccccttcctctccttcactccgtggctgtggctgaattagggatcacacatgtgcttagagaaaccatcttatctgaagaaacaaaaaaacaaaaaccaaaacaatgacaacgacagaaaaaaaaaaaaaacatgggctggtttgaggttgttctctaaatgtttattataacttctaatgtgatggagtcagtgtgttcccattagtccttctcctcctcatttagtagctcagaggagtcccagagcaaacttcctcaaatcaggtcggttcatactgcactgccttcagcctgatgtgagtcttactgtgctgggtttatgtccaagggccagtaaatattcccttccttccagggctcaccactgtttcaaatcctctggcaagcccagtggaagaacttctctgtatgggaaattcagcaagtaaacttggaagtatttgttcattggagtttgaatctgagccaaacagttcactcaaaaccaaccttccactcagcaaaccagtgttatgaaagtttgcatgcatttgggcaggaaacaaaggacattaatgagtttaaagatttttttttaaatccatgacttttggacatttattaaaaagattactctctggggaatgaagtaaggccttgggaatcttgtaattgaaagtttctgatccgaagtagatctcaggatcctcccagctgtaaatttatagatttctttttaatgtccacctgaaatattcatgctgtgtgtctctaggacgcttcaaacctattcctgactcaaagaaagcttaagaaaaaatccaagcagttgtgatcaccaaggcctgattatggaggagctgttaatat

SEQ ID NO: 122477 - DNA, 1054 bp, Homo sapiens
gatcaagaccatcccggccaacatagtgaaaccctgcctctactaaaaatacaaaaattatccgggcgtagtggcatgcgcctgtaatcccagctacttgggaggctgaggcaggagaatcacttgaatccaggaggcagaagttgcaatgagccaagatcgcgccactgcactccagtctggcgacagagcgagactctctctcaaaaaaaaaaaaaaaaaaaaaaaaaaaatcaaataaacctatcggagaagaccatttgcaaagttcagacattgtaaactgcgactaaaggatttctgttcactccattctctgtagctcctgatctcctctgatgatcagttcacgggctgggaggattagaaagcctaggagacagagggtcccatgctttagaacatcagggtagataaagacaaatgatgcatttggctctgccgtagtcgtgacacagaaagatgtatggggaaccaggcatttccgtgagaaaagttaagagtgtatataatccctcaaacacagccacactgttgaagatttccttacaagcaccagaaggtgtttacctgctttgagaaagataggaatcctcctgtggctaagtgttggcaccagaggattttatagtagcattagtgtggcaaaatgttatctgcaatttccccgggagtcttaagaatgtttactatattaattggaatggttctttcatgaatcttgaaagagtatggttttcaacaacaggcagaagagaattgtactaaagcccacagcaaaagggatgtcatctgttcattagtcatgactcaggacaaagaatgtcacatgataggcatttcctaataagttgcattggaataaaatgatctttggtcagtttgttcctgaaaggtattttaataggtttaaatgacttttgttgaccttcttaccactatatattatacaatactgttggaattcaattatgctatcaaaaatatttgttagaagggagggaggagactggttttggtttgggggcaggggaaggaagcttaaacacatttt

SEQ ID NO: 122478 - DNA, 1287 bp, Homo sapiens
tgcgggacccagagggaggattttactgcaagtcagcatcaaagcaccggtgttattctgaaaacaccagtggcctcatttttggcttttgcaaagcatgaattttttcatttggattgcactttcctggttcatgactgtacctgtaggtggttgttactttgactcttttcaggaaccaccccccaagctgaatttacaagttctgttagcactatttgcttcaacttactgcgatttgttctcaaaacttaaaaataagcaagcaaatggctgatactaccaagagaactggaagatggataccacacaaacttcttgtataaaaatatgaatgctgaaatgtttcagacatttttaatttaataaacctgtaaccacatttaagtgatctaaaacccatagcattgtagtcatggcaacccgctaaactttctcatgcaactaaaatttctgggggaaatgagggtgggggttgtacatttcccattgtaaaataagtgttttaaatgtcctgtactgctaacgaatgactttctatatgtccaggagttctccagtggaataactatgcactactttacatttcatggggatgcacaaaaacaaaaaagtattacatttttagttgctgtttgtaccaaccttaaattacatatgtttaacaacaacaaatcaaaaatcctatttctattgagtttttaatactgactagcaactctgaagtcttaattccttttttgttatgatttatttgtgagtttacatttttaaattgtttaactttcttaatttagtaattaaaaagagagcattttacatttgaattttttttttgtttatttgtttaaatcatggaaggtactcgtagttctgtggcacatctgtcccacaccagatggtatggaatcacctggtgaatttagcctttgtgcgatgacttgcaaatgacagaaacattcagaacatctggagagttcttttccctctagaaagggtaggctcttgaccagctatttcagaggatcattaaagcaaaagtaggcataccttaccatctgaatttatcagacattttttctaaccggaatttactgtgtcctgcttgtaggagaaatagacaatcacaagaagaatctttcttgtcctggagtcagtatatttatttccaaatgtccccctacttctgtaatgaaggagctaacggagcgacaacctggtgtggtaggaagggcagtgggtggacgcaggctacctgtccacgcctggctctgtgatcattcagct

SEQ ID NO: 122479 - DNA, 1018 bp, Homo sapiens
tttgttgacccgttgaccctgacagaacattcccatcccacttggagttccctctggccccttggcagggattcctcccctcccccaggcagccactgatctgctttctatagatgtagttgcgccttttctagaatttcgcatgaatgaaatcataccgtatgttgcctgttgtgtctggcttccttcacttatcatgttttgagagtcattctgaatttttcatgtctcagttctgcactccttctttactcctgagtagcatggcagggtttgactcctggggggatgggagtactccgcatgttttagccacatgcagacgcaaagaagaagaaaggggatctgcaagtgcggcggtcagggcctggatccccggggtgcccactctcactgcgcttgtctttgcaggcatgaacaaccgggaggtgctggagcaggtggagcgaggctacaggatgccctgcccgcaggactgccccatctctctgcatgagctcatgatccactgctggaaaaaggaccctgaagaacgccccacttttgagtacttgcagagcttcctggaagactactttaccgcgacagagccccagtaccaacctggtgaaaacctgtaaggcccgggtctgcggagagaggccttgtcccagaggctgccccacccctccccattagctttcaattccgtagccagctgctccccagcagcggaaccgcccaggatcagattgcatgtgactctgaagctgacgaacttccatggccctcattaatgacacttgtccccaaatccgaacctcctctgtgaagcattcgagacagaaccttgttatttctcagactttggaaaatgcattgtatcgatgttatgtaaaaggccaaacctctgttcagtgtaaatagttactccagtgccaacaatcctagtgctttccttttttaaaaatgcaaatcctatgtgattttaactctgtcttcacctgattcaactaaaaaaaaaaaagtattattttcc

SEQ ID NO: 122480 - DNA, 1101 bp, Homo sapiens
tgtaagtagcagctggtctaaatgcttcagtccccctccagttcatagaatctctcctctctcagtaggagtatgtgtctgtggttcccagagcagaaatgtcactggcagtgcctctgcccaaatggagtttgcagacatgtctgggaaagagaaggagaaaagccccactgctttttgattacactgtagcactgacccatggagtgagcctggcaggaaggtgccaggacctgttctctccacaggacccagctccagatggccaaagagagcagaggcacatgtgaaatgcaatttagagccactcactgcctgttgctgaacagtcaaaacatgctataccaaagcaagtataatgtaaagaaattggaaattcttagactctggaatgtttctgtattatcagatttatgctctccaaagaaaccacgagtttggcttatccatgcttaaattgattaacgtcgacagatggtgacataaaggacacccatgccatttcacctccacgctttagtggttatagcacagggacgatctgcttttttgaaatgttaaggacatatttttcagttactgctgagtgaagaaagaacatagctccccctcattccctgcgtaagaaaggagcttaaagaaaaaaaaaaaaaaaaaaacaatgatagaaacgatagtgacgattaatgaggaatttaggtctcttgcaaatcctgggtttgtaatcatagctttgcagtcagaggagctagcgaaggcagattaatttgtaatccctttgttccttttttatgattgtttctggtcatcttcagagaacacagagaggggcacatcaagataatctcgttctgggttggtgtagccttgagactcctaggagagccaagttgacatggaggcaaaattgacaaattcccagtctctgaagtgccggcactgggcgtttagagatgcgggtgtaagtcagttttattgatgctgcggtgactgctgctcccggcatgcacacacgggcagacactccgggaatcgccaaccagcacagaagaaagggccgccctgggggatggagcacagcgtgggtgtttctgaattgct

SEQ ID NO: 122481 - DNA, 1047 bp, Homo sapiens
tgtttaaccagccttaggcaagttgctatgaagaaatatgtgtctccaacctcaaaggatttgcattctatttaaggagattttttaaataacttatgaaagaactagtaaaaggacacagaggagacatggacacagtggaacagtgtatagtgtttatgcagtcaggctctggcaccttcggttcaaatcccagttctgtcatctacacttgtcctttgtttggcacattgctttcctctcggtgttccgttttctcatctgtagaacaagactattgctggcatccacctcatgtgcccagtgctttgcatgcctgactcttagcaagcgctcagtgtatgtttagctattgtggtagctgctattatcaagcattaaactgttgtttctagcactggcgctaggtgcattggagagattagtgaaggctggagtaatcacagatggcttcatgaaggaggtgggactggagctgaggaggctgtagctaagcaggtgaagagaaagagagcatttccaaagccaatgtaaaagaaacaagtgtgagcatgctaagtgcaggacacaggttatagtaaagcaaactgaactagattaactgtgtttggggtagcaagaaccaagttaggtcaggcacggtggctcacatctgtagtcccagcactttgggagaccaaggcaggaggaccacttgagcccaggaattcgagactagcctgggcaacatagcaagatcccatctctacaaaacataaaattaaactaggtgcagtggctcatgcctgtaattgcagcactttgggaggccgaggtgggtggatcacctgaggtcaggagttcaagagcagcctgaccaatatggtgaaacaccgcctctactaaaaatacaaaaattagccaggcatggtggcgtgcaccaatagtcccagctactcaggaggctgagacaggagaattgcttgtacccatgaggtggaggttgcagtaagtcaagattgcaccactgcactccagcctgggcaacagagtgagactgtctcaaaa

SEQ ID NO: 122482 - DNA, 1035 bp, Homo sapiens
tcaaggccaggccctgagcctgtgaggtggtcttccactgacagcactctagaagcaactagaaatttggggcgattgcttattctctattccctggacatctcactcaattacagcagatagttcgtctttagttacaaacactttgctaaattctgcccaatcagagtctctaaataatgccaacatcagttatttgagtgccttatctatgaaaggactttactaggagctactgatatcaagaagcctaagactgcacgacagtcagcaagcatgaggaggaagacgtgggggattgttgaagtcagatggaactggttttgaaatccagcgctaccacctgatgttctggggtcttaggcaagttatttaacttttgcctacctcagtttacttatctgtaaaatggaaagacattttgtctgctgtatgcatttttgcaaagattaagtgaaacaatgcatgtaaagtgtttaacagggtacccagcacatagtgataaatgttgcttgttactgttggtatatctggtacaatactaagttcttggggaataaacaaatgagtgaatggattgtagatacatggaaagtctcaaacactattcaggaaagggagagaagaatcaaagataattcccaagtagtcagatgcaggtgattgtgagaatggcattaccaataacagaaatgagtacttgggaagatcttactttcagagaaagaggatgcatttgggtttggatctgttgagcttgaggtggtggtcttggtcctccaagcccagaaagatgagtcggggtgccctcactgggtctcactgccacagctgggccctcagccttccagccctcccctgagttctggtcacagccacctccctaccccaccactgcaccttcttcccagaatcattccagaactcaccacaggcaccacaaggatctgctgtccatcttcttgtccataccacacctgtctcctgtgacccccgacataggcaatgtcacaagccttgcttctggaaattcac

SEQ ID NO: 122483 - DNA, 1267 bp, Homo sapiens
gagattgagtcccatttcttctagttttatcaaatatatgttgttattcctagaaatggaattaatgctgtttgtttttaaaaggtaactgttacttctccatgcctatacttttttctaccctgcttttttatataaacctttttgtccccccatgtggatggcattattccatttgactaccttattacttttaataagaaaaccaaatacagctctctgttgggaattatctttcaaagtaaattgaaatgattttatgttttgttcataggaagtttactggatttcttaaaagatggagaaggaagagctctgaaattaccaaatcttgtggacatggcagcacaggtaggccctgcagggtaacttgatgtgccatagatttaatgacgtgtctaagtacattgggtcgtggtgtaacatgtcctgttccctgggtttccacaggtggctgcaggaatggcttacatcgagcgcatgaattatatccatagagatctgcgatcagcaaacattctagtggggaatggactcatatgcaagattgctgacttcggattggcccgattgatagaagacaatgagtacacagcaagacaaggtgggcacttgaatgacaatggctcgtgatcacagctgtgagaacagtcacttactgcacagcccttccttcctccttcccttcccttccttcagaaaatacttgaaatgtcattcttcagcttggtttggacaccttgatctggcaggaatttgacagctctgcaggtgggagactgttgtgggcccagtggagggatgagatattggtttttggtgggtgggtgggtattggtatttgctgctgtggtcctcttggctcatgctggtctcctcacagcgtccaggcctagaatactctgtttttggagaaagagaccacatttattctcacattctcacatgcctgtgttttttacaaaggcacaggcagggtttcagaaagccaacagggcatggtgcagtgtctcagagcttgtaacagcaacagaactaaggcctcaaaggtaagggggcagagaagtgggcacaagaagtcagaatgggccactgcacagagagggcctcctcagtaaagagagacgtcagggatggatctggggattcacacccaaccccactctagcccacttctgggtcttctgccagacccaaccagaagtagaggtcacaggagctcagcgatgaatccttatgggtccagagcagggagagggagagtgga

SEQ ID NO: 122484 - DNA, 1731 bp, Homo sapiens
tttggttttaacattctggaattcctaaaaaaaaaaaaaaaaaaaaaaaaagatagtaagtgggcaaaattggcaaatggctcaagttgtactattacatgactctcaattcataaaccagcaaatggtccaaggaatgttccagctgccataaaatatcttgctcttcatttccaaaagcaaatatttgttgagtgtcatcctaacgggcaagtcaccttccatctttcctagtgcatgcataattatggattataaggactgtgttttctttattaattccctttcctgtagagaaagctgatggtttgtgttttaacttaactgtgattgcatcgagttgtaccccacaaacttctggattggctaaagatgcttgggaagttgcacgtcgttcgttgtgtctggagaagaagctgggtcaggggtgtttcgctgaagtgtggcttggtaaggcagagggcacattttgttttggctgcatctcaaagccgattaaaaggatggttttgaacaaaaatgcacacacagccgttgggacaaagacacttaacctggataactagacgggcacaggccatccagattttcagaatatgctgataccttgctgtgctcatctgtcctacttcatgtggttaattaaggcacccgcagaacaggaaaccagtacactatgaatctggtgtttcctcttcctaagaaatgggaaggtaagatactgtatatgggcagccataagaaagaccatggacgttttgctcaatgggcctgggtttgaatccttactagctaattaaccacgaacaaggggcatatttaactcctttaagcctcagttttttcatctgtaaaattggaatgatacctttttgttgttgttgagacggagtcttgctctatcactaggctggagtgcaatggcgcgatattggctcactgcaacctccacctcccaggttcgagtgattctcctgcctcagcctcccgagtagctgggattacaggtgcctgccaccacgcccagctaatttttgtatttttagtagagacggagtttcaccatgttggccagaatggtctcgatctcctgacctggtggtctgccagcttcatcctcccaaagtgctgggattacaggcgtgagccaccacgcccggctggaatgatacttatttaaaggattatttttaggattacatgggttaatatgtttaaagtcccttgcagatagtagatattcagtagagatacatacttctctttatttgattgtcattgataaggctggctgcactgggcctttgtaatttcttttatagcccttttgggtcagttacagctttgcttagaaacaattcatgggtttaggccccactcaaaaacatgtttcagtaaaacaatattaatacttatggaatcctctatcttccttcctcagaactcattaaaaacaatatcgatcagtaccctttgctacgtgtgggtatagatctttaggtgtggtctgcattaaaagagttaatacaggtggccgggcacagtggctcacacctgtaatcccagcactttgggaggccaaggcaggcagatcacctgaggtcaggagtttgagaccagcctgaccagcatggagaaaccctgcctctactaaaaatacaaaattagccgggcatggtggtgcatgcctgtaatcccagctactcaggaggctgaggcaggagaatcact

SEQ ID NO: 122485 - DNA, 1013 bp, Homo sapiens
cattattaaatttgaaccccttttgcaaagtatttaagttcatccattttattccttgttttcacatttcaagactagtcgtttaccatctacgaacagtgactctttaaaatgtaatacatgttttacacagagtggagtattggtcacagctgagggtaggtttgttgttttttttttcctattgtgataaaaagaaatcctggtttagagccccacccaagcatttgataaaattgttaccgacataaaatgctacactactgagcagatcaaggctgacttctgttggcaaataactactccctggctccaaggctctagggctcccagctccggggcccacaagcctacgagcaactttggggtttgggggtagacacttttcttggtgtggggtgtggtgggggcacagaatcttttagcaagtctttaaatcagaggaacagagacagctgttataaaaccttaaaagccattctaaaccagcgccaggctttaaatcatatatttgaattagagcaagataacaaagaatatctcaccaagtgcaaactgaaaaatctgaactataagaaccgtttaaagaaatacagctttaacaatgctaattacccacagtaactcaagaaataaaagataacatagtagagatcctattttcctaaatcaacatgaatatagagtatatctatttataggtgaattggtgcttctagtgtatcaaaaagatgacttaattcactcgctcaacggctctcaatgaatattttgagtctgtaccagcctctctaggctcaacatgtgaggtttactacataataaacattgaatctttgtcactttatgtctcctttgatgaagaagatgaccctagaaagcctagaaaaagagaaatcaaggattttatctttctcatgagtagctgaaaacccttgtgagattaatagggtcaagtgagaaaatcatgaattcctgattcatgacttcagaatgagctgataattgcattc

SEQ ID NO: 122486 - DNA, 1005 bp, Homo sapiens
ttcatgaccagcaaagagaaacaggaaggtcagtgtcacatctgggccacagtggcagagcctagctttctgggctgcgcctgtttaaggaacagtggtggcagaactggccgagggcccaagggtcagggtgtcacctggcagagccacaagaaaacacattagcacaaagcggctgtttgaataggcgtcatcaatgccccctccccaagtacgaggaccgctgagaatgaaagccgaggaggttcactctccaaggccgaacaaaacccgccctgccaatcttcccagtctctatagaggttcctcgccagatgattctgcaaatgtggcctcatcctttcaaaaacagtgcattctttttctctttctttaattcactagttccagtcaagaagatccaattcctttaaagacacagaaaggactttgaagaaggagatttgacttcttttgcctttgagctgatagcacggtgcttgtggtctccatgtctcccattttcgctgatcatttatctggttatgaagtcacagcccaatctaaatctaccagcctgagaatttggctgtgaggccacttgcactgtgtttttggggcagaggctggtgtctttcctttgaagaataacatgaagcccagtcccccggcccctgggtctttgtgttggcactttattcaggctgccagaaatcagcaacaacagcagggataacttttgcatcccctgccgtggtgtagaatttcaaagcttcttgcagctgttttggtgtgaatgcagataaagtagccagtcagaaagcatagtctatctaattccacggcctctatggggacagaatggctcaggaggacgggaacaaaaggagcagagaggcagactccagccagcctcctcctacactttattgcctgaaggaaaggaggatggtctctgccttccctgatgttggtttcctcaccctgggtgagcccagggtggttgaatatgtcgtgcgtgtctca

SEQ ID NO: 122487 - DNA, 1001 bp, Homo sapiens
ctcacatgtaacaaaagctacggctttgccacagttggggatgatttgtgaggtatgaattatgaatagacaggtagctagaatggatagagtcattggtccacttaggaagtcatagcttacttagatacctccctgtccagccacttgcatgcagtctctttctacccttgccttcttgatctggcacccccccatgcttctcttttctccccagcttcagtatgtgtctatcaagacccagtttcactcctgcttaatactggataagtatcagttgtataatgtgcaaatgcttttgcttataggtctcagatttagccagatctgggttaaaatgcagttaaacctagcactgaggccttaggcaaataactttacctcccttcattgatgatgatgataatacccagcacaggatgttgatggatcaaaggtcatttgcatattgcacctaggaaagctttaggcaccatagtgagggctcagtagaatggactcatagttgtttaagatttggcttctgactgcttctcaagctcagccacttacccagctacacatttcaatcccattaaactataagctccttttgagcagggagcctgtcttcttcagccttagcacccaaagcctcgaaatatgcttggcacatatttgaatgctccataaatatggccataaatcaaataagccgtaagaacacttacggttctttgagggtatcatggtgttccacacctctgtgccctcagatatgctattcccttgcctgcagtgcccatctcctccctgcctgggctaatatccagtcactttctcaattgctgacctggatgaattagaactccctctgtgtcccctctccaacctgagtccctcgatttacttgtctgtctccctcttaagtatatattagctccctgaggacagaggccatgtgtacttgactttataccggcagcccttagcacagtgcctgtcacataaaggggatcaaa

SEQ ID NO: 122488 - DNA, 1076 bp, Homo sapiens
tcacttccaatgataggggaatgctggagtcaaagcgactagttcacttcagaggacaggcagtgtataatgtcagggggaggagctgacccaaataatgtgtttcaagtcatcagaacacgttcatgtctggttttcatagtaaattgtgacagctgcgcaggagaagacagaatacactttttagatgttattttgtttattttgtgatgctgctttaaacagttccacagagtaaggaaatggagtttttacactgtgagactttaactcccttctttccttgacttgcctcttggctctgcttaataagccctttcagcaagacctcatctgctttccttgaagcttccaggtattatctcttggttgaatataacaaaaatcacaccaagtagctacctgacactcatgggtgcaagtatctcataggaaactggtgaattctgaaaatgcttttgagccacttcctttcactgctggactctcttaatctacttactaaagtgctacttggacaagagagtattgacagttacagggaaaaacaatgtagaatcccaggccatgtgtaggtttctgtggacacattttaattttttaaagaatattttagttatctaaattatgtacctaaccatttatattgagtacataaattctcagtaaattagcgtctctcttttgagggctgtgtgttatctgctcctgtgatccaaatatatagcactaagacaatataagggattctctctctctctctgtctctcattctctctctctcttccttccccccttcctttctctccctgcctccctccctctaccctctctctgtttgtcctaatttacctgacgttttagcccttgttgctgttggaggattctaaagatgaagccactcataaccttaatgcctgatagcatagagaatagttggtgacttcaccagaacttacacacccatgccttttcttttttgctttgccatgagtaggcagttgcatactttatttagcaaaagagagaactgttaaaaagctactaagtagtggtatattcataccatggaatac

SEQ ID NO: 122489 - DNA, 1051 bp, Homo sapiens
tccttccccgtgggagaggtgccctactgtgcatgccgggagttggctgtgggtcatgggcacagtacccctcacccaaatgattcttcccaaccatcaagaaagtaaaccccaacttggggcccagaaatattcagacagtagaagagttccacattcagacagacgataaaagaaatatcttcatattgcctagcattgaatttgataaggaatagaggaacagtattgtccttctgaccgggctctgtctcttgctgcctaaaattttattatcattgcatttaaaaaaatcaaagttcagtcttactagaatggatagaatgggtaagtgtagcttctagtttggtgagtccttcactgtttcttcctactaacctccctagctcagtctggctaagggcagggcctccatgatgaccagcaaaacttctctctggttaagctgagcttggtttgttaagcaactatacccaacatgtttatatcaaaagcacctgtgtttctcagtgtttctggaatcccaacttaagtgaggccggagctaatgctgtatttcagtaaataccacattagatcacacttttaagcagccatgtcaaacaattgacttaaattgaaattactttcagctaacacttccccacaaattgtttttacacatgctgctgctaaaccacatgtccaccgtcctgtacttaggcaacttttttttttttttggtttaggccctcacatttgtccttactaattttatcatgtcagttgtggcctaatactccagcctaccaagatatttttatatcttgagattgtcactcctgtcccttcaaaagtttgttccatctgaatatttcaccatacaaattttcaatatcttcatctaagatgttgacaagtttttgaagagctcagagccccattttaggcctcctgagaccaccttctaggtggacctgagctcaccaatcagccccacttaaatattataattcacttcattgttctagtatctagcccacattttcctatcttattcccaaaggtatta

SEQ ID NO: 122490 - DNA, 1132 bp, Homo sapiens
acttttctgccggcacaggagttctcactcaggagtgaaccagatcacctggggagcttttacaaaatacccaaggcttgtccttcctcctccccatgctgccccacagccgtgagagtgagatgtggggcccccaaccctgcaccagtaaccccagtatcactacttcttattacttcctcagaggtttcttattaaatatttcaaatcgcttttttcttttttctttctttctttttttttcttttcttttttttttttttttgcttgacaaaatccagtgaccaattttcttttttaacattttattcatttttttttatggaaaatttcaaatgtatagaaagtaaacagtgtagcctactggactccctgcaacctcacccagctccaacagtgatcatcaacattctgccattcttgcttcacctatagctggataattgttgtcattatttttgaccaattcaattttgtttcatagatagcatagcctgagcgctgaaaattggttatgtgttcctactgcatattgaattgactgtgtgcaaggcacttcccacaccttattgcatttaatctgcacagcacccataggcattgttacccacattttataacaatggaaactgaagctctaagaaattacacacctgcccaaagtctcccagctagtaagtgctcaagcaagcattcacactcatgtttgaaaagcatgcttttccccctaagctacacttcagaaaaataaaatgcatgaaaaaatgtatagttaaaagttttgtagcatgaatagatgcatagctatttgataaagcacgtatgttataatattaatgtttaaagctgggtggtaagtatatggatattcagtgtaaaattatgaaaactatgtttgaaattgttcacaataaaatgttggaaggtttccaacaaaagcaaactttgtcttaactctcaagcagtggacaagacaaacaagctattttcagatacctatcctgttgatatccgctccaaagagagagctttgagacttggttgaattttgaccttaaaaatagtaaaccttaaaaatagtaaagtgtaagccaaaaagtatctgagacaggtttcaatcaatttagaagtt

SEQ ID NO: 122491 - DNA, 1062 bp, Homo sapiens
gagaatcacttgaacccgggaggcagaggttgcagtgagctgagattgcgccactgcactccagcctgggcaacagagcgagacttcatctaaaagaaaaataaaaaaatagtgcccaagttatctttgtaagtattgcttccaaaataccaaaaatctttgcccttgaaggagagcacatttaagaaaatgtgaattattctactggcatggtatgttttgatttttatatattaagggaattaactctttcttacctgatttttactcttgtttttcaatatacctgaagttttagaagagcagctatgtcaaaagatcaaatgatcatagcatgacttactttgtcatttaaaggtagacacagaaaacagcattgtattttcctggatactgggtgatcttgttggatttggggagcagaggttatttgagagcagctgtttatattgcattaaaaatatagtcgatgttggggtggctgcttacctaggacaactatatcccctatatatttttgcagctttatgtgtaaattatgatcattggttactttgatattgtaggacacaataggagaattcccaacttgaccctttgactgtgttgtgataggaaaagacattatatgatttggctgtgtcatcacccagatctcatcttgaattgtagtttccataatccccacatgtcatgggagggacccggtgggaagtaattgaatcttaggggcagttacccccgtgctgctgttttcgtgatagtaagtgagttctcacgagatttgatggttttataaggggcttttccctctttgcttggcaattctccttcctgccatcacgtgaggaaggatgtgattgcttccccttctgccatgattgtaagtttcctgaggccttcccagccatgcttaactgtgagtcaatttaacctctgtccttcacaaattatccagtctcatgtatgtctttattagcagtgtgagaatggactaatatagacagcaagagctggtttacatatggctttgtttagaaggctgaatgatatttctagagg

SEQ ID NO: 122492 - DNA, 1052 bp, Homo sapiens
ccccaggaccacagcagaacaagcaggccttgtgtctgttttttataccagttatacctctgttttgattaacagtggttaggtttcttttttccaactagtcaaatagtctcccaatatgtcagtcccattttgagtattactcacaatgaaatatcagtaaaggttagattccatttccactaaatgtcaagtctctgaccactgaccccactacttgaattattagattataatcacaatctcaggggagaaaatgacaaaagaatggcgacagactcctggagtttgttgtgatagactttactaaaatacaaacccttagctgtaagaattgaaattcaaatagggaaaagattgtcccatattactaattagaggccagaaccccacatcttccaacattctcagttaagtgaaggctagaggagatcatgttttttgatatctttcagtaactgaaggatggcactgcaaagccagccctcttgtaatacaaatgaattttcttacattcccttcagtgctgtatcctttggattttgacttgatgtcaacctcactattcacagatcccctaaaatccaccatttaaaaaacttcaggtgtggggttgcatttggaattagaacagtgttgttgtgagtggcttggtttcttctctttccccaccatttccctagagtaatacacacttagagcccccaaatcacaatccttttatcccatgctgattcaaagccttttcatttctttaagtggatatctcatgttcatttcaaaatgtcatttagcagctgtatttctgctaaataaccagaaattatagttgactccagccaagtggctgagtacctagattttgtttccaagtatggtgctgagcagaaatgttttggtttcatcctcaatattaatagttgactgagagtgatggatgggcctggggatgagaaaaggaaaggaaatataaaatatagtggcagagcatcatctgcttcagggactcttgacctggggtttttaccagaattacctgagatgatattaaa

SEQ ID NO: 122493 - DNA, 1030 bp, Homo sapiens
tttataaatggaatttcattgtcatttgtttgtatgtttgtttttaacatcctcttttacacagaaattaatatgcttgggaagtgatagtgttttgatttgggggatgtttgattttttgaagagggggaaagttgggtttcatagaagtgttatttaactggattacttaataggttaaggtgttattataaaatcttggattttttaattggtaggttaacattacaatagtaggtatttcatatgtaagtttaaaggaaaacaaatacatttccttctacatatcatctgtaggattttgctgttttgaatttttctgactccttaagaagggtgtgacatctgttgttcccatcttgcactctttgttctttgtgtctttaactgtgttaacatgtcacaggaactctgtcagctcagtccctgagagggactgaagcagaactaacagataaatagcagtgactctccagatgggtccaggcagaggctaaagatctctgttggtcattctacttgtttttaccagaattattcttgagtttggagtgaccgggaatggtgcaggtaaagagcttctctagacttacttcatcatgcaagaatttggtcctgcctctcattttacactttaaccgcctgaagcacagagaggttgaggaggacccaggtaaaccttgctatggtttgttcccaccaaatctcatgctgaaatttgatccccactgtggcggtgttgggaggtatttgggtcatgggcagctggatgccattcttacgatagagagttctcatgctcccaattctggattagatctcgagggaatggttagggttcttccaaagtgaggacacccctcctaggtttggcgtcttcacacatatctgccatgttttgacccagcacatggccctcctgagaagctgagcagatgccagcactatgctacttgaacttgccagcctgcagaatgatgagctaaataaacctctcatctttatgaattacccagtcacagatatataa

SEQ ID NO: 122494 - DNA, 1067 bp, Homo sapiens
ccagctactcaccacaacccctcctccaatattcacttcataagaacctgtgggaatccctgcaacatttaccaccttctccaaccctggtgacccattcttagacaagcttggctaaataattcccttcctgccatcctcacaaccagtgaggtcaccttgtttgagctgtgttcatttttggagttaatgtcattttgaatcacatttatgaggaaagaagggtgggggtagatgataccattggttggacttcagttgccatatttaaactttcatttccaaacctttcttttgattttacgtttttgtctatgcttattacgtagccttcacagggatccaattgctgggctgaaatttttgagctttgactgaaagaatttggcttttgggtggggcctttacctgtggttgggaaactcagccgtggcattgcagatgggccagtgtttaaggtcagatgtctgtaggtgactgtgctgccatttcatagaatcaaagagagggacatggcttcaagggttgtctggcccaatcccctgctagcaaaaaaaaaaaaaaaaaaaaaaaaatgtctcctactgatccctgacaagggaattcaaattcttccagagatgaggagcttgctgttgcacagggtaccttggttcaattaaaaggacagttagggcctacagggaaacccttgtgaggagggggtatatagttgttctgtatcttagtgctggtggtatttatgcagttgtatgctttggtgaaaactcacagaactgtataatagaaagggtgagttctcttgaatgttaattagacctgaattttaaaaatggaaagaaaaaaaaccccagcatttaaaaattgaacaattagcccaacttgttaaaaagaaagtaaggaggctgggtgcggtgactcacgcctgcaatcccagcactttaggaggctgaggcgggcagctcacagggtcaggagatcgagaccatcctggccaacatgataaaaccccatctctactaaaaataggaacccaggaggcagaggttgcagtaagccaagactac

SEQ ID NO: 122495 - DNA, 1041 bp, Homo sapiens
tgtatgccaggcatgatgctgaccagatggagtgtaacgatgagaatagggagaagcaatgtgttcccagcaccactgtgaaattcttgcggggctggactgggccaaggtttgcagtggaggtgaagaaggcggtgttagtttacaggcccgagggactgggagaatgatgataacagctcaggcttactgagtgtttactgtgtgccagaggctgttataagcccttctatgtcgtgtatgttctttagttgatatcatttaatcctcatagcaaccctatgaggtcagtacagtaatccctattttacacataataaagcctagaaaagaaaggttaggaaaactgtccagggtctcacagctagctggcaagaagggaggatattactggaaagaaagaaaagaggaattggtttgggggaatatgttgtgagttcaactgcagatatttttccattgttctcttgtcttcaaatatttcaaagggctaaacattcagatatttataagcatagtttctggtatatttcattgtccagttttaaaattttttattagtgaatactgagataatttgtaaattggtttcatcttcctgggaaaaacagaggaaactggtaggtggaatttagtacatcgatgggtgcccgaagcagaggaagaggttgcagtttacagagagaaacataatatgtgttcaattatttctgtttaatgatgtggtttttcttttgttgtggtattgtttttcaggaccagtcctgcctctgttgtagaagacatgtggtgtatataaagtttgtgatcgttggcggacattttggtaagtgttgctgcatttacttctaatgcctcttgctgtaaaagggtgctcacgaagggaagctgttgccttgttctgtccatcttttacttctgcactaaactcaggcagaatggagttctataattaaatgtgacattgaattgatgttttctgacagtgtgatactttttcttgttattgctgatagtattaagcaatatggggttttctaa

SEQ ID NO: 122496 - DNA, 1035 bp, Homo sapiens
taaagaaaatgctgggcagaatcaaccaagttaaattttgtgacccattgaattgactcgggaccacaggttaaaagagtgtgctttagcgggttgtgttggcttacccggttagtgtgaaattgaaaccagcattaggacttgcctgtgacttagtgtggagacaggcccagaggcacaaaacagtaagaatcagagtggacatccttctgcaaacacagacatcaccttagcccagggttggcaaacattttctgtaaagggccagatagtaaatattttcatctttgcgggccatacagtctctatcaagacaattctgctgttgtgtgtgaaagcagccatagacaatatggaaacgagtgggtatggctgtgttccaataaagctttacttacgggcactgagattttaattttgtataatctccatgtgtgatgaaataatcttttgattttttgtgaccatttaaaaatgtaaaaaccattctcagttcatggactgtacaaaagcaggcagcaggccagatctgatccgcaggctgggggttgctgaccgctgcccaccactgcccttgctggtagagcctcagtcttctggctgcagactctcgaggaattgacctaggtgattttcctctgtccatgtacattttgaactgattatcttatttgacccttgtgattcctctgtgttttcagtaggaaaatctctgtggcattcatgatcaaaagttatttaaaaagcatatgttatcttcttaccagagaactctaattagggatgggggaccttcttaaaggacccacacaattttttgtcagatggtgaagttaggaatagagttgacaccgaaaagtctatgcaaaaacaacagagcttgaatttaaggagggctctcctttgggaagctaatatccagggaaacagagtgaccaaagaaaggcccgggtgtcctcatggcggatggaggagagcagctcagtggcaggggccctgccccgggatcttctcccaggtaggggcaggctggag

SEQ ID NO: 122497 - DNA, 1033 bp, Homo sapiens
cgtggacccaggggtccatttctccttcctaggctgttgggaggattgaataagaatgtgaagctcttggggcatgtaggattctcagcctcccactcccactcctaccatctaaaacatttcccaccctagtctcggcatagttaggaagatatgaagataatgggaaggtgcattccactgagtcagcatgcccaggtgccagcagctctctgcagtgggtattgcaaaattataagacagaatttcttggtccccagttggtaataatttacctcaccttcaatagtgggccgggacattcagcagctccatctcctgcaaaggtcctatgagggtcactctgctgaggctaattgcctgagaaggatagtacactatctgttttgccacattttgtgatttactttgtttcaagccttttccttttggtggtttggtgaaatgctgttagctgatgggttgtgggcatgaaggtgaagggtcatcttggaccgaataacctagggacagggatccttccaggagggcagagctgggccgaaggggtgtcctcctgacccagtcaggggtgcttgagtaatactgatgcaagtgtgtcccaccccctcctcctctggttagccttcagagccatctagactgatgtgctctggaaagagagagatggttctttatggcccctggggttatatttgaccaacgtccaggttccaggagttacaagctcgtgcaattgtatttcatctccgaacacaagctggttaaaaaggagaaagttcagtcaggctttgtgttttctacaatctaaattagatgctagtgctggggcaccctaggaactgcgtgggaagaatgtggtgaccagtctacacgtaaaccccagcttcctactgcacccatcccacttccccgttccttttttcccttatctacagggtcttcaactgcctcaagagctgttgtgggctcagaagaaaaggaaaagactaggaaaagcagaaacacgctggaggaactactgtgagagcca

SEQ ID NO: 122498 - DNA, 1812 bp, Homo sapiens
ttccagatctgtagaccagctccctctgcttgtccttggcccacaataggcgctgcagtgcccacgtctaatctatataatctgacagtttagcaacccacagctgactagcaataccttcttcattttcgaactccaaattcctggcagaacgatctaattagtttaacttatctttttaaaccaggctacaacttgtaggttcctagccagtatagggatgagcctcccttgcatcagttgttcacccctgccccatcatatgtaaggtcacccctaccctcatcatatgtaaggtcaagtaaggttggaacagattcccagagaaggggataagggtggggcagtcacccaaaaatgtgcagatgtgctttgagagatcatgaaatataaaactacattctgccctttgtcttcaaacaagtctatttgtgaaactggattcagttagaataaggaacacagaagccatttgacccacattgtccagtgtttgcagtacttacatttacagctccaatccttatactgtacacataccccaagccctacagcctgctactacccattatggcatctttaaaacgtttccttttgaaagtttcctctaaacttgatggcttctgtaaaattaaagtctgtttgtttcctgtaattctagcaacttagtaaatctaaagaaattcataaatgaaatcatacagcattaaaaactttctgtatcttgtgtacctaaaactgagctcctagagttaacagctcctgactacttgtatattcagcaaaggcacaggcagaagacagccatgtttgccacatatatcagctggtgccgggcaaggttggctcctgtgccaagcagctccaattattctttagtaaaacacacttttattcattgaggagcagttgcttgccaatgtattatacaattatatagtgaatggagaacaacggatgcattgtagaaatatttttaaaacaagtaaacaacagtggataggaaaaggaccctaactccaaagtgaagactgctgacatatgggatttagcaaagcgcgagtgtaaggaagagttcagaaggacagaatgctttgtttcaaacacctcttcctggaagggccccaggcagcattcatttctgctccacccacagggtgggttttcggggaggcacagggagcaggggtgtgtaggcatgtgtggaagtgggtgtgagtgcacccaggcactgggcttcacactcgtatttgtaagaagaaaaaagacagcatacattggttgatttagtgcttcctgaggtcttaacttgaaaggaacatgaacataaatgtaaatttttcaaggggttagagtttgcgggtttgggtgacttgggatgaaacagggccgaactaaaacatctaagagatttacagttcacacaggaggtaaccattgaaagtgtttgcactttcaataccgcagaatattcagtatttttaccagaccgacatcaagtggattcacatcccatgactgattgcacttgtaatttaattctgcctggatggccctgggatactctcagtgaaggccttccatgaatcagaggtttttctcttcccattccagtgacagccaaaggcccccttgttagacctgatgccaacagacaaggagaccacctttaccttaccctcatgatgtatattcccatattttcatcctaatagtgatataaatctttaaaccttaatccttaatcatttatcataggcatctctgtcatattatgaacaagacaggattcagattacaaagcagttttac

SEQ ID NO: 122499 - DNA, 1980 bp, Homo sapiens
tacagagtgaacataagtcaagacagcagtgaggcactctggcgctgggacacagtgagaaattaagatttgctagtgctggttccagggcggcctgaactcttgtacttcagctcatgtcatgctgggacagatctgaaggaagatccatctccctcgggtttcttgatacttctgtgccttctgtctggcaagggcgtcagagccacgggaacttagaggtagcaagggctccccacccgtcctcaacccacttgcaagtttcaactcacatctctttgaggacactctggcatccacgcacatcctcttaccacatagtgaacatctccattaatagctaacattcctctagcactgctaagaccttcagtattcactgctgctttttggagatcctgtgaaataggggtcattattatctccattttgtagatagcaaaactgaggcctagagaggtaaagtagctgatttaagtctgcaacttctcattatggtgtggagtctgttagagtcctgcatgctagctcttaaccacagcactcaatacctctttcttccaagcaaattccaataaagtgaaagttgaaggccataaaaagtatttgagaaacactgggatttcatttattgggatttgacctacattctttctgggaatattgtcaagatgagatatagtttgtaaatgaggctagtgcagtatgattattctctcaagtttgcatttcatgagtcatttactcatgctgtgttttgtagagtcttcctgaaggtgttgggttctctggtggtgagtatatctttcttaaattgctgctgtggtaggccttggtaaagttcaactgggttggatggggaagttctttgaactctttcaaaaatcaccaaactacagataatcgcaaatctagcagagggaaaatatcagttatttaactttgaaaacaaatccaactttgtattttagaaattacttgcaagacagtaagtccatgattttacaacacaattgcacttgtaggtttaaaattagaagtaaatagcatagtaaatgctcattcaatagttgtttaatgaattaagtaattatattgtttgtataattttgaggaactagaaagatgagtgaggcgatttcaatgtgtacatgagggcaacaatcgtgtataatatctacttggcacttcacagagggcatgactctttccataaaaatatttagtatgttcatgatgtcttttatctaaagaatttcatgctttagatattagtcaattctcaaaacactactctgaggaaggtgagtgacacacccctttatagacgaagaatttgcagttgaggctggttaaatgtgactaactcaagattaacactggtggtaggagacttgtctctggcctcattctgtgcccatgacctgctctttgaccttcaggaagctttatagcctcctcctgtccaacctccctcccttaaaaaaaaaaaaaaaaaaaaaaaaaaaggaaaatttctgatttaattacctccataaaggaagagtgataatttagctgtgtaagcatatttggtttctaagtatacaactaaagtatttctagccatttctccccaaactttttttcttcacacagttccacaaagtgcacaccaagcagatggtacagacaagaacatgggttatttacagccagtagagtagacgaaggcatatgcgctaagccctcttaaacccactccctgggagccattaacacatccatttagatgaaagagtcccgaggttttgccatgggcatttctgctacactcccctgaagcatcgccatctgccctgcctcctcccagaggccttgtcacccccactcctgcccagccacagccctgttcttccgagtgccctcattcacttagatgcagagctgatagcagttgctctctgtttttcacttaagccagtttagctctatgtctgt

SEQ ID NO: 122500 - DNA, 1021 bp, Homo sapiens
aaaaagagtatttacattaagtccataatcagcttgatcagatcaagccagccaccctcatacctgaggtatttataaatgctttgtgtgttgggtgtgtgctgctgctgtgctcagcgcccacctggattgatattgcacccaggaattgcatgaagggaagtggtagatgtgtatgttttctcccagtggtccctcttcgtttctctcagcctttcaccttgccatttctgtgcaggattatttgggggtaaatactgcaagaccaaaatatatagcttattcttagcgtggtgaacccttgcattggcatggcatgagataactgtcagcagatttctggaattcacataaatggcatccaaaggaagaggctgtcagtcatcaggtcatctgtgtgctctttgccattctcacagttggctgattcttcagggcacatgtgcatagatggagcatttgttggccctgactcttgctttcagaggctgaccagaatcacagccaggcactgttgtaaccagacagtgccccagtggaggaatcacgctgctcttgttggaatccaaagagagacactttgtcatttgtttattagggatacttatattttatcctggattgaaaacaataattaccagaaaccatttgttattgacacaagctgtctacttttaaactcaatccagcatttaaggaaagcaatgtatcttcgccaaataacttgaggtctttgtgtgaggagccgacagatggagtccattgatgatgaatgcacttggatgcacacagagtccaggagagcatccttgggccatgagggtttgccagaaagttaacaaggctgggttcagaagggctgtggacagagaaagtcaaaccagtgaaatagcatgcatggagattcttttttcagtgggatagctacgagggcatttattgcacctgctttaaaacggatacaccatgtattcgtttagttttggccatattataggagtaacttacagaaaagaggact

SEQ ID NO: 122501 - DNA, 1036 bp, Homo sapiens
taatggttatataaagagaattgccttaacacagcatctcttcattaggaaaatagttgaggtttatgaagtgagccttgtcagatacaatttgagctgtcttgctaagggttcccattcagtatcatggactgttcacagccctgatttaaggagaaaccaatgaaaacatctatcatctgatagccataggatgtcatccaaacttgtgtcatggtcctgtaatgttcccgggtttgtggagtgaagaaaataacacttgggtatttggaatttattcttaagctgtttttgtcagggatggatgagtttctcattcttgagttgaaatgaaacttttaaatattcttaataactgtcttatcgccagaccctctgcatgagacaccaagggtgagtgtttgagaataatattttttaaatttatttgggtattttttttaaagtgggggagatgagactaatttatgaacagtaatgagctgaagtcagttggtcactaacagtccatatcaagccatgatccctgcctgcacaaatttgaaaaacatgtaaacaaacacaaagtaagtagtaaagaaacaggaaagtagaaactacacaaagacctttacagtctatgcgtctgtaaaactaattaaaaatctgcctaaggggttaatggagtggctgaaactcaatttaatatgggtcatggtctcggggaaggcagttcaagtactatgttttaaagacaggttcagagaggaaagaatattctatttcagggactgtcgtaaaacaataatccaagatttagttggagacttaaagtgagttcatattatggaaggatttaaatgttggaataagaatttgaatgacttcagcaaggaacagaaaaggaataaaatgattctgcccgtactgataccttgtatttgtagatgtactgtagtttacagactccttttgggaatgttgttttattttatctgcactaaatcttaatgaaaatcacaaggctttttgaagactgaatctccaggattgctga

SEQ ID NO: 122502 - DNA, 1018 bp, Homo sapiens
aaaatctgacttcaggctctggaatctcgcctgcctctatgtaaatgtaaaaaataggatttcatgttttctaacagttttccatttagtagctcatttcgtaaagcatgttctgaagcacattggtcccaggagatgtgtggaaaatggattctgtggccagataagctgggaagagctgcttgttatatccccctcttggggattccctgtgcacattaacatttaaaggctctgagaagtcctactgcaaagactgtttaatgtgttgtttttttaattgtggtaaaacacatgccactaaaatttaccatattaaccattttaaagtgtacaattcagttgtgttaagtgtattcacattgctgtgcaaccagtcatgactacatcttggaaaacttaaaatccatacctcttaaacaacaactccggattctgccattcccctagcccctggcaaccaccgttctactttttgtctgtataaattcgactcctctaggtacctcatgtaagtggatcatatagaatgtgtcctacaactggctgatttcatttagcataatgtcctccaggttaatctatgttgtagcgtgtgtcaaaatttccttcctttttaaggctgaataatattccattgtatgtatagaccatattttgtttgcattcatccatcagtggacacttgggttgcttctgccttttggctattgtgaatagtgttgctatgaacatggacgtacaaatatcttttggagaccccgttttcaatttttcaactagatacccagaagtagaattgctggatcctatggtaattttatttttaattttttaaggaactactgttgtttaacatatttttatactcagttcataaacttgtttgatcacaaagttctttttccacatcacacctttgggtatcccacagagcatgggtttttcagaaaacactttggggaatcctgagctcagtaagcaatttctgcttgctccaaggggccagaaacctcag

SEQ ID NO: 122503 - DNA, 1027 bp, Homo sapiens
ggatttgatgttactgtctcttttactttgtaggtttctttgatgagaacacagagctttcctgtggttgctcattcacttgacctgagaaaaatgggtccatattttaaatagcagattaagtgtgaaataggaatagtccctggtgagcatattggcttcatttgtaagttctaaccactctgatatgtaaaactggtgggatttgttttgtttttaaacatttccattctttcatatctagattttagtaagcctaacttattttgttagcattcctatgaaactgaaagtagagcattaaaccattaaaagcacatgttctctggagtctcagaagtgcagctttttttaacttgttatttctgggtcacccttcattaatagcattcatcagatttacttgatcccaggccagaaagattagtgatggtggcattttcaaaatatttctgtcagagtttttaattatatattgactagtattgtctatttgaaactttgatggtgacagtacatatttgagaaggcagcatggtattctggaaataatttggaaatgttgtttttggccaaaaaaaatggaaaaaacctcaatgttccccatttgagatttaattatgtaaactgtgatacatctattaaattgaatattatatattaattaaaatgatgatcaaaattgctaaataagttggacaaatgtttaaggttgttaaatagaaaaaaaagcagtataccaaatcacatgcggaatgtgaagattggataggaagaagtaaagctgtctctattcacaggcaatatgacagtttatgtagaggaatcctaaggaacgtataaagcaaatactagaaggtactaaaaagtaaatttaataaagtcacaggatagaaggtcaatagacaaatcaattgcatttctgtatattagcagctaatagctggaaaatcaagtgaaggaaacaattctgtttgcagtagtaacagaaaaatatgaaatatctaggaatgaatttaacacaatc

SEQ ID NO: 122504 - DNA, 1029 bp, Homo sapiens
tcacttcctcctggatacattgcctttatatcactgtctttttgaaaacatggctcttggacatgaacacggtacttacaagatggtttgaccagtgtagagtaagaggttactatcaggtctccttaggtgcacattttctgcatcagtataggctatactgatgcagaccaatattacatctctcatcgagtcactttatcatatcttcagcttgcattgagcttatgtgtgataaaaatccttaggacttcttaagtatgaattgctttaaactcatctcctttccccatgctacataggagatctggatttctgtcagtagctggatggtatagcttgggatccagaatatagaccagatagggatctagagaacaaacagatccatgagctggggcatgctcatgggaatggtaccagcagcagagtaaacagaaggcagtttggataatctggtaagacatagtacagaggaaactcttctataggtggctgtctagatggacagaagtttggcagcagaaatgtatggctgggcatgtcgtagagccagatgagaggcatgcagatgtgcagggacttcagttcagaagctaatgcaaagagctgagtccaaaagaatgagttatagagtcaactactgaaatgaggtaggccccaagacagatacttgagcccagagtaaaaggaagccccggtctgaagtcagaatcgtaaaattgatatgattctgaatgtctgtggctgaaagccatacccacccagagtctggagacaggatcactggcagaacttgtaaacaggatgagttgtttccattcagtaaacaactgaacgtgaggcaagtgataacaccatcctatccacacataccatagattatttacaattgaaagcaagattttatctgttaatttggagaggaagatggtgttcttttggtcagttgtggctgtcattctaacctatttaagtcttttaaaatctctattctgtcgtccaattaattaactatctcctttcaac

SEQ ID NO: 122505 - DNA, 1626 bp, Homo sapiens
cattctttctctgaatgtttgctgagccttctctgcctgtacgtctctctgcctccccaggtgccttgagttcccccactgaaaggctggacgtcgcagctctcgctagccacccaggcgtccttttcggcccccactactctgcccaaccacattgccttgggtgtaacttttcagctgttctgagttatgttcctcaattccctggccacttgggggctgccccttcatcatctgagaatgacttggggttatttctcatcttgatttgagtgcaagagaggcttttctttctgaactagagccattctgaatgcagctcgtttgtctctaagttagggaagtatactatctgaaacattgttccagaacaattgtgagtaactcctgacctttgaccccatgcaggcacctagcttctgcaggatggcctgtgatctactgctagtcacgggcttttcagctcatacaaaccagggcaacttggggaaataacacagctctagttaggacaaggcagaaggagcctttttagaatccgcatgcactcaggttttggctgtggaagccagggattggcaaagactgtcgcctatgggaggtcagtatactgtgacccttctggactaggccaggtccacagcaggcaagagcctatgggtgccaggagccccctcagggcagtattgtgccttggagcccaaagaaatgcctggcatttgccccagactgcaggacttgccctcccctgtccaactcaggcagtgaatcctgcagccacaggagggggaagtccattcatctgggttcccagtcctggccccatgccgggcaaacagcagggctcagttagtggggtgtggggggcactgaatggaatgtgttcaattttgcttcacttctgctgttaacttcctgttagaccttagaaaaatcatttctcctccccaagtttcatttttcttatcagtaaagtggtccctttcacaggaccaagtaaaattactcgcttttaaattgaaaaacacaaaccaaatacattttgtttttgtttttgttttctgacttgggtcttgaattaaaatggaaaaagggctgttggccaccagtctaaagaatgccaggtaagaccagttatggattgggactgaaggagcaatgagtgtctaacaaaagagtgaacacgggtgactgacccgtggtgtggatgtctgtaagtgcacagggaatccagattaagagaagctaaacgggtagaaatgctgcttggatggagtgagtctgaggcacctctgaaaggctctgcctgcaccctctcctcagtcaagtagttgatgacctgaaaaacaatcattgccttaggggagtttgctgttttaaaagctctattctagaagttccactttcagaacctttttctgttgctggtagaacactgttgaacacggatctatcaacttttctttttgtctgtgtttacctatccagaagaatctaatataggatgtgcatctgttgtataagtaaatgatacctgttggccaactccagtggagaaaaattgccaaagttacagtgtttgttcttcatgtggatttttaagtttcctcttttagttgaacgttt

SEQ ID NO: 122506 - DNA, 1059 bp, Homo sapiens
cggttctgaggttctcactttagttgtggttgaatagagctatgatcattggtgcagaaagaagccattccgatgtgaatctgtgaagatgtgtctagcaatgtacagatgttttttggcaggtcagtgaatattttaaatcttttgcaagtagtaaaaagagttgaatttgaaatagagaagacaccatggcaagggaaaattataccttgtttttctctcaatcttccatttttaagataatcagacaaaatcctgaaccattatttaaatcttggattcatcatggctcttaaatgtccttcatcctgtatgatacatggttatgaccctaatgtattgaatctctttcaatagcaagaattgctgggtagtagtaaacataatagcagaatctccagtttggatctccattgatttaattctctctgtcacctcccctcttcacccttcctccagccatcaccagagatggcacacgcccctgtatcttgcaggtaccatgcttggtgtagtcccagtcaccaagaagctgacagtctagcggggaaacaacgaaacaggctctgcacaaagtgccgtgggaacacagagaagaggaaatctagtcctgcatgggggtgtgggcaaaggaaaacaagagtgaaaaagtgattttaatctggaccctgcaggctgattaggagaaagttgctacccagcagggttggtgagattggaatgacaaggcatagcccagcaccaggaattattgggggctgcctttctttttcggccctttcctgggatagaggcaggttgaaaacacagtggtacagtgctacttctggctgccttcttagctactgtacaccgtctctcacagtctggcctctgccttacttcccacctttctccctccagcctgccaccatcctcctagccactcctctgttgtgcagcactgtcaggcctctaagcgtgcagcccatgctcctttgactgtgtactggttgctttgcctgcactgccctgtcgtgaggttcatagggagatgtctgtgggcattcggaaacagtg

SEQ ID NO: 122507 - DNA, 1017 bp, Homo sapiens
ttctgccacctccccgctaccacaactaccaccttaaatgtgggagatcacatggcactttgacaaaatgtactatcccctttgctggcatataatgttaccacttcatgtatttattcattctgctcatgtctaccctcttttgtacacatcagcgtcaatattgtccattttcagtagcaagtttctagaaggctgagagtgaaccttgtttaatttgccttgtgctgcgtgatactacactgtgcatttattaaatgctcattggttctgattctaagcttccaagttgggaggttttacatatgttttcagtacttctagaatgagatgcgtcttaagtaacttttcttcatgcaggtgatacattgggtcctctgcactgatggatccttggagtcatggtttagaatccagattttggttgcatgttttagattcccccttatgttctgcctccttgggtgaaaatgcaatagccctacttctaatcttgcctctccgttagggccaaagcatagataatgtgccatacctcacacttcttttcatgtaagtgtggttgaccatgtaattcccatagtcattattcaacagattcttgatttcagactgccaagtgttagaggttgttctcttggaggttgagaattactcagtgaagactagtgaggatgaggagtgtctgggaagaatctggaaggactgtggtagaatgaacagaaccagatgcctctatgggtgccagcagctcctgggaaagggacaggttctggttaatttatttgttaagtatgatccaagagggattggcacttaaaaaactgcaaccctaaacattatttgattgtaccccagtccaacatgccatgtggggaagagtccctaatctggggtgcccaaggcaagccctactgctttccctgatcctcacatctctagctgtgacagaggttctgtttccagggaatgaatcaccctggcccccatccccagaacagggcttccttccacaca

SEQ ID NO: 122508 - DNA, 1562 bp, Homo sapiens
agcctgaggcaggcgaatcgcttgagcctgggaggcagaggttgcagtgagctgagattgtgccactgcattccatcctgggcgagagagtgaggctctgtctcaaaacaaaagaaaacaaaacaaaagcatgaggttggggtagggtccgggtttgaccctttccagctgtgtgggctgggccaagttacctggtctctctgtgactccttttcttcatctttaaatggagatagtagttcctgcctcagagggttgctgtgaggattcagtgagttaatacatgtcaaatattcagaacagtgtcctacacataggaaaagctatgtgtttgctgctgttgttaatccatatgtatgtgtgtatgtgtatatatacacatatgacatacatgctttagggaagggatgatgacaatatattgtgtgtatgtaaggaaactttgaatattttagaaagagatttgggtgattgtcggttctgaatcaaaaattgttagaaaagttgggaaatttacttacatggtatgattgaaaacagcatttttagtaagaaatgcagcaccttcattcttgagaacggaaaacatgaaagcattctgacgttaaccctgtaaaagggtttcttttagtcagataaccagaattttaacctatttacaatggaaatccctcgagtttgacttcagaatgtcattgtgacttttctaaaggtagaatgaactataaagtaagaaaaaactatgggttatgactttcacacatttggctcctatgaaaaaagagtgatttgtgttatttagaggactataataatttttttagtgtttctagttgagcaaatctaatttttagctactaaaacacatgagaagcctgaatggtattatccaaatggacttgggtgacatgcaatatagacaacttaggaataagtgacactgtggacttgattagaacgcagtaatcctggaagaatataaattgaattggatttatggtctaataaaaacgtgggaggaaaagataatgcttactgactcatgaaactttaacaatgtttgtaagactccgagttgttgtaatatttggttgagagcgctttcccatttgtctcagcctgcttccagaacagcctgctgtgcacctccgtctggaagtgaagcctgacttgggtctccttcttgggtatacttaggaagcagagatcatcacatactctgcccttgtaaacccatgacctcgagcagcacttggttggtttaggcaaatatgtattgagtacctattaactgtaagagtttgggggagaaaaaagtaccatgggaaagtcctagctcattgcttatttgcactcagaaagcttttttagaggactacttgtttctggccttgtattctcctttctgtgatactgcaaaaaagtagagagcataccacagctacctactcctccctgaatacaccatagaaataatagcacctgccattttattgaactcggaggcatgtgttaggtgcttacatacagtcatgtacttaatcatagcaactctaggaggc

SEQ ID NO: 122509 - DNA, 1055 bp, Homo sapiens
gatgttccctttaaggaagaaatgttaatgtaaatctgggggcttaatgttccgttttgtaagccagtgactattacatgcttaatcgatattgtcaaaacttaagttgaacctgttctttcctaaaagtatggctcctcgactatttttataagtaacagaactgtaggtttagtcttcagtaattttattagaaaagagttatgattcattaaatatttacttacacactttttaagaacattcatcgtggaactttttacgataaaaaaagcaatagggttaatgagtgtactgtaaaaacaaagggtcgtttgtttgatgccagacccaggaaggaaagccagagcacataaactcacactctgttgaccaagtttaagagacttaatgataaggttgaatgtgagcaaatgcacactctgctttctcctgggtctggaatctccaaccccatctgacttgctcgaagtcctttttaacctttggggcccagctcaaatgtcatctcctctgtgaagccgtttccatcttctcctttccaaacaaatcatcatgttttggtttcaaactttggcagcaggcattatgtttcgcatgagtctatttccaccattaattggtcagcacattgataaaaggaaccttatcttacttatcttgtttcctaccaagttttatcttagcgggtattctgtttcatttaacattaaacaaatgtgagttaggtctttggtatgtgctcaacacctgtatcaattaggctaatgttagcaggtgtaacaaataggcctgcaaatatataatggctcaaaagcaatagacgtttattcttgctcatttaatagtcaaaaattcatgtttctggtcggtaggtggctttcctccatgcagtgactctgggtcccacacccctatcttgtagctccaccatcccatagcttatcatcgtaacctgtttcagtttacagaaggggcaacagagagtagacggggcacacccacttttaaaataccttagcctggaagtgccaccatcacttcctctcacattc

SEQ ID NO: 122510 - DNA, 1029 bp, Homo sapiens
caagcgggcgccgggtgaaaatgggaattggcttgggggcgaggctggcccagactccgcccccgccctccttttggggccccccgcggggactggggctgtgtgtgttgttttaatgtcagggatgatgtaatcacttaataattgatgccccgtgctgcttccctccccacccaacccctgccccactcctccacctctcggcctcctccctcggcggcggtcgccttctccaacccatcctcctgcctatttctggcacctcccttgcacttcccccatcctccccttcactcttcctgtgccaccacccacccacccttcccctttcccctgtgctggagccttccctcctcttcctctgtcccccacccctctgctccctccagctcttttctccttcctttccggctccctcgctggatttcctctctacttccctagatccatggctgtttttgtttgggctcctcccctctgttatctctgcggccacaggcggaggggactgggccagaaggaggccaccgagcttgggcccagcagagatgtgctgggactcactgggaagagggataataaaatcacccttcttgcccctccttcccccaataaatcacacagactcgccgggtgtgtgagtgtgagtgtgacacaaagagccctttcagtgcatagagaggagacacacaaagtaccctaggataggcacgatgcttcttgtctctcttccctggggcttccctttctttcccatgaagcagttgatctctctgagtctttcctgccacatttaccaaaaaataaaagaacccccggatgccgggtggcaggtgtcggcattttgctgtgttcagagaccggtagtgttgactggcagctgcagtgtttcttagatttaagggaacagttatcccagcagtcttaagagttgctttacttttaaggtagcctccccatcccctcgttctttcccctgtccttttgggaacaagtactaagagctggggtagagtagattggtgtggg

SEQ ID NO: 122511 - DNA, 1088 bp, Homo sapiens
gtagtgatttccagcactctctttacccttaagatccccttcttatcagaggtctgtcctctctattcttcatcatattatagcacgtactcctcaatgttttttgctatctattcttgactcaattttacaataaatagaaatttctgttttgtttaatatcaagagccatgtcttattaaatatttatctaagacttagcaaattccataacacagcccagacagttttcagtggatgcatagatgaataattatcctaatctttctttaaaactgaattgtcaacttgctaatatgatagagaataactttggggtagaaggattgtgtagcatttctaaaaattaccctttttgagacagacttactgcctcattcaagaagcaggaccagctctagttataccaaacaatcttagggtaaatattttatcatagtgttttagcaagtttactatgtaagcatagagcattttggaaatggtgtggcttccttccaagttagtgatatataactaagatcaggacttctctactctgatgttcataatatctgttttcataattatagtgtagcaaccaaaatcttttattcattaacatagaaaaaagaagttagaatctgctctggttggtaaaattttccccacaacatgcagttaatacctgttttcctctgaaatagtttgactttaagcattataatgagatgcttttatttttctaagaactaaacaccatcccaccctccaaaacacacacatgcttacttttcaggaatctcttaatattgaattaagttaaatatatttaaactttacctttattgtctttaatatattgctgtcgcaaggctgaatgtaacacagtcttttctcttttctcatttcacagttgctgttttcattggtcaccctgttagatattcccatcccacatgttctggagcagggagtccattttgttgcttgcacaagacatttttttttccaaataagtgggagatttctataagctaaaacaaagggagaaaagtacatatgtatacatataaatgtacttgtataaatagataatttttaatcat

SEQ ID NO: 122512 - DNA, 1054 bp, Homo sapiens
ccaatgtgtgaaattagtgaaatcttagtaccttaacttcaaacatttctcttcagaaaagttcccttttctaaaattgagataacatagttcttgaatattttgctgtatttatagcctcatatttaggcatttatgcactgatgtgtcttcaataaaaatcttgtacagatatatttttataattatttataatttatattttgatattctatttaagttatcctgattctttaaaagtagttattgggagtagaagaacacaatataaatatttccgtgtaatagccaccaacttttcaggcataggttttattacaactgttaaggaggttttgcttcttctttagataacaacttgtttgcccaaaagaatcctaatttgtacacttaacatgtatttgtattaaactttttaaataattgctttcttatcaaaccaattgattttataataaatgtctatatttttcaacagtgctacttgttattgttctgcatgacatttatgcaaatgaacagaatgttactaagcttgatatcttccaaactttgcaataaatggctataattgttccggttactataatcttcagttctagccttaacattaatttatttttaataacattttatatttcagatccacaggttaattttaagttgtattctttatatttctttcctttgcaaagtaatgatactgttcttggtctttgtcttggaaatttaactttttacaatatttgatgtaaaaaattttagattgcagttgttaacagtggccagaaaagttgcattttctcctttccaaaagaaactgatattcaagatcaggcagtgaaaagtctaaatatatttacagcttaatcttatttctgttcaagaattaatctagaatttcacttgccctataatgatgtatcaactaatgggcaccttaggctacattgtcaaatatagattaaattttttaaattgagtatgtttttttctcccccaaaggagtctcgcttctccgtgccagtgcagtggtgcaatcttgacccactgc

SEQ ID NO: 122513 - DNA, 1002 bp, Homo sapiens
ctttatttgacatcattagcaaaatcgacctcatggtgaattctggaaagttgggtacaactgtgaagccaaagagtctggttacttcaagttctggggctttaaaaaagcagcataagaagccctttgatgcaatgaataacattgtggcaaatttgctcctcaacctaacgaggtaattctatccagggatagtcaaaaaactttattgtgcttttggagatattttgaatttttgtagtagcattttttagttattctaaattgtagaagctgcttctgtttttattttgtcttctatcttttcttggagtgatcacgcagaattttaccttctatgactccaaagcagcatttccccaagtatgttccatggaatatgaacagatatcatatgatgtaaaagattttgtggttgacacacttgtaaaacacgtagacaaaattaaacattttttagctgtagaatgtcttaatcatttaaaccaactaatctgtacctcctcattaactggtccaaaagatttctgtggctttttggtatcagagattgctttgacattattatattctagattatagagtatattaagcagattcttgaggaaattagttgtttctacagttactaattattgacttatatgtgtttaactcaaatataaagtttgttttaaataggatatttttatatgtgtaatgagcaactataatagtatattgattacacttcagataatccagaaagaatgactgtagggccagccatggtggctcatgcctgtaaatctcagcacattaggaggccaaggcaggtagattgcttgagcccaggagctggagatcagcctggggcacatggtaaaatcccatatctacaaaaaatacaaaaattagccaggcaaggtgttgtatgcctactgtagtctcagctgctcaggaggctgagatgggaggcggcggttgcagtgagctgagatcacaccactacactccagcctg

SEQ ID NO: 122514 - DNA, 1027 bp, Homo sapiens
ggaattatgtcactattttcttttcttttctttttttttttttttaatgtaagccctcttaagagtcaacagaactatactggaaaattttttttcttgtacctttagtttcttttacagaacattcagatacttttcaggatgtatgagcttttgagaaatgctgactttctccttagagtttgcctgtacagtcctatttcctagagtgaagcatttttgacgtgctcatgatgtgtgcttgccaaaggatattaataccctttctttaaccatcttcaaacctttcttgtctccaaaaagagaaaaaaaaggaaactagtttagtcaattcctttagatcatttattacatggcaattaatcaacttgaagtaaaaataaatgattggcattgctttcttcccccagggaagtctataccttagaactgaagtattttgctcccctgttctgtaaaaatagaaacagaatgtaacttgctgatttttaaatacgcttagcaaattttaaaagaacaaaatggtcacacttttttcctccaacctgagattaagattttatattcagcaagttaggtgtatgtacagttgatttttatacatattattcattgacatagcattttaagattaaaagttaaaattgctgtgtaaccatgtctttaaaagatcctcataatcatcggttaagaaacaaatttgtttctgtgctagtataattaacctgcaaatttgagctagctttttatttgatttatagttcgttatacctttttaaaaaatacctttactacccaacatctcagaagaacatacttacaattcacttaaaatagcaaaaataaatattaatactaaaggttaaaagtaaagttcttttttccccacatctaatgcctactccctgtccttacagatgatcaggtttgcagggtctttttatgtctgttctttcagatatattctatgcctatcaaagcatgtatgtatatttttacataaacaagattatccaatatatactat

SEQ ID NO: 122515 - DNA, 1052 bp, Homo sapiens
gactttaatatcttttagcctccagtggaaatttaacatttccttcagcaatgagtgtaggcaccaaatcacagtagtattattgaatctatcacttgatcactgtatcagttatcaattgctattataacaaggcccaggccgggcgtggtggctcatgcctgtaatcccagcactttgggaggccaaggtgggtggatcacaaggtcaggagttcgagaccagcctggccagtgtggtgaaaccccatctctactaaaaatacaaaaaatagctgggcgtggtggcatgtgcctgtagtcccagctactagggaggctgaggcaggagaatcgcttgaacctgggaggcggaggttgcagtgagccaagattgcacactgcactccagcctggtgacagagtgagactctgtcccaaaacaaaacaaaacaaaaaccaccccaaatgtattcatttaaaacaataaccatttattgctcatgctttcatgggttggcaattcaggctggattcaacctggacagctcatctctgctccatgtgacatatattggttgagctcactcagatgtctggggctggccgggaaggctgggcctctccctccatgtggggtcttaactcaacaaggctagtccaggttgttcacataacggcagctttaagagagcaagaatgaaaagcacacggtctcttaagcctaggcttggagctcagcaatgtcatatccattttactgatcaagaccagcccagactcaaggagtagagagatagactccactcttgattggaagagctgcaaacaattggtttaatctacacaatcaatggaagaaatcacagatttgcatattatattttagctgctgctgatatctcatgacactatttaaattcaccaataactcaaaattatggtaactattagatccacctttagatcttgttagttaagggattagtaaagaagcatatacattattatattacatttggtttttaaatatattagtctccttttaatttctatatattttattgtatgcat

SEQ ID NO: 122516 - DNA, 1018 bp, Homo sapiens
gggagagttaccccccaacacagcctaaggccaagcggcctaaagagggaaagcctaagagagacaaggtccagaagtcggcatccaaggagaaaagagcacggacagacggacagtgcagaggcctctgctgggaagagagttctgaggcctctgctcagggtgcagggaattgtgtgcagccacctgatggccaggatttcaccctgaagcccaaaaagacaagaggaaaaaaaaaagctgcaaagccagtagaggtagcaatggacactacgctgaaagaaacaccaatgaaaaataagaaaaagaagaaaggttccaaatgaattctctccagccagggccttccgaccactcagcttgtcagggcgctgctggggcagacacctctggcctgaagtcagagcagagttcaccccagagagccggggcacatcttgtgacatgcctgtgggtggccgagtctcgccctctcaccacatttctccccaagttatgttcccaggagggctttttttaaatgttctaaatcatggctttcataaacaaatacatttttgtaaactctgaaaaaaaaaatagtctctggagccatgcagctttctttttaatgctgactccaccagcatctagttatgtgatgctgggcaaattacttactctccctccgcctccctttcctcttgcctataataaggttattaacagcacctgttttgttggcttgttgtgttgggatcagtggtttgcagacaataaccaagcaataaatgttaacaatattaaacatctttgagtactaaggcagtcggtctaaagtgagcctggaaataattgataagcaatacagtgttctattggctcttgtatatagttttgtctttatgtacatagctaattattaggttggttcaaaagtaattgcagttttgccattaagtgatggcaaaaactgtaattacttttgcaccaaactaatatctacctatctaattatctaagtgataatttaatcatg

SEQ ID NO: 122517 - DNA, 1012 bp, Homo sapiens
tggatacaccaggacttggtggtttgacttttcagcatcgtaggtggactaatatgagtacccccatatactctcaaagaccatatttaattaggtgactgtgttggatattttaaatcatttttatatttctgcattatatgttccccaaaatttagtagtaattcctcaatagacttaaagtatatttaaacttttttttattatagaaggtacaggcgactggggtcattttgctgaatattaaaattactttcttaatataattactttcttattataagcaaataaatcatttctagtatgatacttattattaaacattagcaaaggagaccttactcagcaccagtaacagatatttttaaaaagagaatttcccgagaggaagaggtctcagaggaaaggagatatgtcgtatacaaatcatgtacagcacttaattaccttgagatttattcatttcaatagacacacacccacacacattttctcaagccttccctcctggctggatttgtgtcttaggattaggggctttgctctgatctctgttttacagtgtttggcctgtgtagactttcctacttggactaatgtgctcaattgtatttatctttccagacctcttgttcatttagatttcagagttctgtccaattccatggtctcttggaagtcccagctttggcttttcctggcctgactcattctgttggcacccaaggctggcccagttaggctgaaccactgggcattttcagagttgccaccatttgactagaagtcttggaattccaaacttgggttgttgactgcagggttctccttcctcagtgtctgagacacaggcttttggtgattgcctttccccttgcgttaaatgctgctgtttctcagggctctgactctaggcccttctttctcactctgcacagttttcctgggccgtctcaaccacttttctggttcccagttgccattccacttccgtgctgatcacttccaagtc

SEQ ID NO: 122518 - DNA, 1073 bp, Homo sapiens
atataatatgtatggctcttatccatgcaggaaattcatctgcagccaattagctgggaatattcaggaggaacatgcataggaatggaaactaaatttcttcatatgccttacaacatagttgtttcagggcagaatgctttagaaatcagattcatgtagattacccagcagaatgaaatatttctctaattcattgtaaaccaacagtgctctgaaaaaggagtgctggtaggggtagggcaggcggtggagaaggcagtaaccagtatcagtctccacaaagctgctaggttctgggatcctccccgagaagctaggttctgtctcccatcaaatataggtttagttgtacgtcgtcctgtgtctctatgtgattttgaaagaacttcccactgattagtgtccagcttcctccaccttaagattattttgggcactcaaatgaacagtcaacaaagtaacagggtcaaagtttaaaggtcatgaaagacaaaggctgaagaattccagattaaggggactgaagagacatgagaagtaaatgtaatgtttggtctgggattgaatactggatcagaggaaggacattagcgtaatgccaattggcaaaagtgtaaataaggtctgtagatttggtgatagtacagtaccaatgttaattttctgattttgaattttgtactgtggagaatctgggagaagggaatgtgaaaattatttgtactatttcataacattttttatgtctgaaatcatttagaaattaaaattaatgataaaaattatagataaaaatgttacaattgtgaaggtgcttactattaaaattatatttcactatgggtagtgattgagaatataggttggggcatcagaattcaggggtttgaatcccagctccattacgtagtagtagtataaatttcaaattaattaatctctaggtacttcagttttctcatctgtaaaatggagaaaacagtgctttctacctttcagtgtggttgtgaatattgaatgaatgaatgtacgtaacgtgcttggaaaagtgccaggttccataaatgttt

SEQ ID NO: 122519 - DNA, 1042 bp, Homo sapiens
cccatcactatgtgcgtattgtgctggtaacatggattacataatttttttttgcattaatgatctagctttcccactagactggaagccccttgggaccatgttatatccagaagatataacatgtattttatttatactatctctcaatgcatgtatgttgaaggaatggaatgttaaataattcattagaatgaaatggataatgttcaagagctatgattaacaacagaaggaaaacccaaatgtattgagatcaaagtaattgtttcatctgagtgatgttttgtcttagctgagatactacttcttttttccttcttttctttctttcattaaatctttgtttcaaatcctttttttctatcatattaaaaggaagcttctagacaaaggccttctttgggtggttactggcctcacccggacaagttcccaccttatctttcatattccttttgtagtatagacaaataaaacagatggagaacaatgttgtgagccaaagaacacagtgcagttggaaatacttgcctcatgtagccagagctgtgtttattgttttcctagataacagatgtgaacgcactacagaatggaagatagggtcccctgaacacactgccctctttctcacatccacacctttggtcctgctgagacctctgtatggactacccttcccctttctctgctttgtgagtgcctcttcatttttaaaattttcactcctctaggaaacccttttttattggcccccacaaaggaagttgctttctcttttgaggagcacactttggatataactcacagaggtactcaccaccctgcatgatagcgtttctttgctgtctcattaggttgtgaactcaatagcctgtgattatttcacaactgaattctcagcactaagttcaagttaaacctggcacacgtagttattcaaatttttgttgaataaatattgaataaatgtgaagatttgcccctagtctgggataatgtaatatttgtaatcattgagtcagatgataatgtccta

SEQ ID NO: 122520 - DNA, 1030 bp, Homo sapiens
agtggcacaatctccgctcacactgcaagctccaactcccgggttcatgccattctcctgcctcagcctcttgagtagctgggactacaggcgcccaccaccacgcccagctaagttttttgtgtttttagtagagacagggtttcactatgtgagccaggatagtctcgatctcctgacctcatgatccacccgtcttggcctcccaaagtgctgggattacaggcatgagccaccgcacccggccaagcatgctatttttatcttgatgtttgacatcttgtagttaaaggtgagcagggtatgagaagcactggttggcattgaggaaatttggtttcttgtcctgtgtctatccctatccatttgtgtgcccttggactggtcacttgtgatgcccccttttcacagcccgtaaaatgaagaactttcattgaatgatctctgatagtttttcagctctaaaaacattctatgatattaaaggcttagcgtcatgtgggttgtgagtcttagctgaagcttctttagttgtttggctatttgtggattgtgtattcacatgcattccatttaaatcacatgctatgtgctcatttacttgaagtttaataataatacttaagcatttatatattgcttctcatcttcgaagcacttaacatgcttatgaatccttccagcaacactttgagatagctaagtactattaaaacagggagagagagaaggggagagagagagaaggagagagagggattttatgtgatttagtgatttaagtcttcccctggctaaaggatctatcttcctttggctaaaggaaattaatataacagggccacacaattaaaaataaaataattatttaaaaaaagagagagagagaatatacccaggccggaattaaatctgattgcctgtgttatataagaccttggtgtcaaaaccttccttcctctgacattctaagggttaaatttagcttctcctctctgctctactccaggattttttctgttcttcatag

SEQ ID NO: 122521 - DNA, 1052 bp, Homo sapiens
taaatttgtgggcttttttaaagccactaaattgtgataatttgttaaagcaacagtaggaaattaacactatccctcacctctggcctttatcatgttgagcaaacgtactttagtttttgtttttatttctctgcatgttgttcacatagtagcaaacacttctgttctgccttaataaccaagaattatgccatgttgaattatttgtttatattatagctaaaggaataattagaaaattgattaattatgcttctgtgtaccgttatgttcccaagtctaattatttcctaggactatgtttcattcttcgaattcacagaatgttggatctggaaagaaccattaatatgatctaatggagtctaacactccccttttgtaagagaagaaattgtgacctattaagggtaaacccatgagcgtccccatatgcatctagttagttgcttataatactaggataaaatttgaggacctctggctcccaggcaggcatttgccccacagtaccatgctgtttccacaaaagtgtgagaatgtgaaaatatgtaatgaacctggtctcttaatgcaaaaggtgaagaaacgtgaaattcaaatatgtcttgtataattcaacccattctcacttgagaagcagtgtaatgcagtagttacaatctaggaccccaaagctcgattgcctatatgcaaatcccatgtctactacttcccagcaaaatgactctagacaagttacttaaccttaccattcctctatttcctcatctgtaaaatggagatgataataatagtattgaactcatagggttatggggaggtttgaatacatagtaggtcaggtgccgtggctcatgcctgtaatcccagcactctgagaggccgagatggtgggttgcttgtggtcaggagttcaagaccagtctgggcaacatggcggaaacccatctctactaaaaatacaaaaatgagctgggcgtggtggcgggtgcctgtagtccaagctacttgaggggctgaggtggaaggattgcttgagcccagga

SEQ ID NO: 122522 - DNA, 1309 bp, Homo sapiens
tattttttaattgatttatttatttggaggacattaattctcggtctgaggctgattttcaaaccgtttgcaaagcgcggctccattgttcgccaggcgcgcagaccccgccccctgctttgtgtgcggcgcgcggattggccgacgcgcgcgggggccgcgtcagcgcccgcgagcccattcatctgtgcacttgggcgttggaccccgcatcttattagcaaccagggagatttctccattttcctcttgtctacagtgcggctacaaatctgggatttttttattacttctttttttttcgaactacacttgggctcctttttttgtgctcgacttttccaccctttttccctccctcctgtgctgctgctttttgatctcttcgactaaaatttttttatccggagtgtatttaatcggttctgttctgtcctctccaccacccccacccccctccctccggtgtgtgtgccgctgccgctgttgccgccgccgctgctgctgctcgccccgtcgttacaccaacccgaggctctttgtttcccctcttggatctgttgagtttctttgttgaagaagccagcatgggtgcccagttctccaagaccgcagcgaagggagaagccgccgcggagaggcctggggaggcggctgtggcctcgtcgccttccaaagcgaacggacaggtaaattctacctgtggttgtggtcatttatttcgtgtctttctctccttccctcctggtggctcccaaggctcattcgtggagaggagtgtggctggattctagtctgaaagttgaatggaaatggatagcctaaattgtggatttttcatagccggggtccccccacaccaaaggagtggttccttagaatcctggagaattcttgagtagacgggaggaaaggagtgataaatcgtctaaaatggcgtggtttggagattggcagaacgtgactagctaggtgccctccttcccccgcccccagccaggtttcatttgtgtttgggggcacaatggtgtttgggtgtctctcgggtttgttgtcgaagctggattgtcttcgagatttctgaactggtggtgtgattgtgtgtggcgggggggggagtcgggaaaggggggcgcaatggggatggtggtggagaaaggcgaggagggaaaggctgtcttattgtatgccgcggcggcgtgccctgggttcttggaaaggtggctggctggggccagacagagggcttcggtaccttttgatgaggctttcccactgtcctaaatctttattcgtagctgtctgtgga

SEQ ID NO: 122523 - DNA, 1541 bp, Homo sapiens
aggccaagccccaggaggccgctgtcgcgccagagaagccgcccgccagcgacgagaccaaggccgccgaggagcccagcaaggtggaggagaaaaaggccgaggaggccggggccagcgccgccgcctgcgaggccccctccgccgccgggcccggcgcgcccccggagcaggaggcagcccccgcggaggagcccgcggccgccgcagcctcgtcagcctgcgcagccccctcacaggaggcccagcccgagtgcagtccagaagcccccccagcggaggcggcagagtaaaagagcaagcttttgtgagataatcgaagaacttttctcccccgtttgtttgttggagtggtgccaggtactggttttggagaacttgtctacaaccagggattgattttaaagatgtctttttttattttacttttttttaagcaccaaattttgttgttttttttttttctcccctccccacagatcccatctcaaatcattctgttaaccaccattccaacaggtcgaggagagcttaaacaccttcttcctctgccttgtttctcttttattttttattttttcgcatcagtattaatgtttttgcatactttgcatctttattcaaaagtgtaaactttctttgtcaatctatggacatgcccatatatgaaggagatgggtgggtcaaaaagggatatcaaatgaagtgataggggtcacaatggggaaattgaagtggtgcataacattgccaaaatagtgtgccactagaaatggtgtaaaggctgtcttttttttttttttttaaagaaaagttattaccatgtattttgtgaggcaggtttacaacactacaagtcttgagttaagaaggaaagaggaaaaaagaaaaaacaccaatacccagatttaaaaaaaaaaaaacgatcatagtcttaggagttcatttaaaccataggaacttttcacttatctcatgttagctgtaccagtcagtgattaagtagaactacaagttgtataggctttattgtttattgctggtttatgaccttaataaagtgtaattatgtattaccagcagggtgtttttaactgtgactattgtataaaaacaaatcttgatatccagaagcacatgaagtttgcaactttccaccctgcccatttttgtaaaactgcagtcatcttggaccttttaaaacacaaattttaaactcaaccaagctgtgataagtggaatggttactgtttatactgtggtatgtttttgattacagcagataatgctttcttttccagtcgtctttgagaataaaggaaaaaaaaatcttcagatgcaatggttttgtgtagcatcttgtctatcatgttttgtaaatactggagaagctttgaccaatttgacttagagatggaatgtaactttgcttacaaaaattgctattaaactcctgcttaaggtgttctaattttctgtgagcacactaaaagcgaaaaataaatgtgaataaaatgtacaaatttgttgtgtttttttat

SEQ ID NO: 122524 - DNA, 1498 bp, Homo sapiens
ttttattgtagctatatagcatgtcagattaaatcatttacaacaaaaggggtgtgaacctaagactatttaaatgtcttatgagaaaatttcataaagccattctcttgtcattcaggtccagaaacaaattttaaactgagtgagagtctatagaatccatactgcagatgggtcatgaaatgtgaccaaatgtgtttcaaaaattgatggtgtattacctgctattgtaattgcttagtgcttggctaatttccaaattattgcataatatgttctaccttaagaaaacaggtttatgtaacaaagtaatggtgttgaatggatgatgtcagttcatgggcctttagcatagttttaagcatcatttttttttttttttttgaaagtgtgttagcatcttgttactcaaaggataagacagacaataatacttcactgaatattaataatctttactagtttacctcctctgctctttgccacccgataactggatatcttttccttcaaaggaccctaaactgattgaaatttaagatatgtatcaaaaacattatttcatttaatgcacatctgttttgctgtttttgagcagtgtgcagtttagggttcatgataaatcattgaaccacatgtgtaacaactgaatgccaaatcttaaactcattagaaaaataacaaattaggttttgacacgcattcttaattggaataatggatcaaaaatagtggttcatgaccttaccaaacacccttgctactaataaaatcaaataacacttagaagggtatgtatttttagttagggtttcttgatcttggaggatgtttgaaagttaaaaattgaatttggtaaccaaaggactgatttatgggtctttcctatcttaaccaacgttttcttagttacctagatggccaagtacagtgcctggtatgtagtaagactcagtaaaaaagtggatttttaaaaataactcccaaagtgaatagtcaaaaatcctgttagcaaactgttatatattgctaagtttgttcttttaacagctggaatttattaagatgcattattttgattttattcactgcctaaaacactttgggtggtattgatggagttggtggattttcctccaagtgattaaatgaaatttgacgtatcttttcatccaaagttttgtacatcatgttttctaacggaaaaaaatgttaatatggcttttttgtattactaaaaatagctttgagattaaggaaaaataaataactcttgtacagttcagtattgtctattaaatctgtattggcagtatgtataatggcatttgctgtggttacaaaatacttcctctgggttataataatcatttgatccaattcctattgcttgtaaaataaagttttaccagttgatataatcaagcctgctaaaataggatttttttttacaaattttattttaaaatgcaaatatttttagagaaaatttttaaat

SEQ ID NO: 122525 - DNA, 1124 bp, Homo sapiens
gttgtgagataggtaaatttaagaaacaattttaagtaaaaacagttgaggattttagtgtcagaaagcatgtaaatgtttgggcacacataattttgtgccagcctttacaggataacttggaatagtttattaaatcactagaaaaattaaggcattaattactccagaaacacttaagacattatcaattaatgtgtttcttagcatgagcctacaggacctgatcaatataataggtcagtgcatttaaaccaagattgtgccatttttaatatttcacattgcctcttttaacagaaccaaatcagaacagctcagcaacccctgaatttgacagtctcaccaatttcagaaaatcattaaaaagaaaatattgaaaggaaaatgttttctttttgaagacttctggcttcattttatactactttggcatggactgtatttattttcaaatggctttttcgtttttgtttttcttggcaagttttattgtgagtttttctaattatgaagcaaaatttcttttctccaccatgctttatgtgatagtatttaaaattgatgtgagttattatgtcaaaaaaactgatctattaaagaagtaattggcctttctgagctgatttttccatcttttgtaattatctttattaaaaaattgtacttggattatcttttgtctgtttattactacaatatgaagtcttgtttcagtggctaatgacatcatttctgtagacttacaatacactctaggtgaaagataatgattacagcttgaaagataactatttgctgtttctttgggaagagtatttatagtaattattacttatctttgcaatagaaattctaccaccttgccctctatagcttagccagttagtatcagtgaagattaacatcccattacaatttatgaaataatacagactctgcaattgagatgtaggagttctttgagttgacccaaagattctcaaaattgaaatggaaattctgaattgaaagaagaaactgaccagaacttgtattgaccagacttgcctatagtatattgctggtttaaaatggaacctgcagacaaaacctgtttcttttactgcatttacatggcatcc

SEQ ID NO: 122526 - DNA, 1114 bp, Homo sapiens
attttacaacttctcattacacttaatgtgatggttagattgtagcataacagtatgtgtaatggtatagactgtctaacatatttggtattggtactttttttttggtctacttcacctctcagctctgaaataaaatgctactttttaagtaatgacattattcccatcccctattagaaaaacacacttttttcctttagagtttcagcatttttaaagaaaaagagattcccccaatttttattatgtgtttttgagccatttcttcatacatgaaagcaaagttttcaatattaaataaaccattcattccattcaaattttaaaatcattaggcatgttaccctttacgtttaaatgtggtaactaactgcttagtgcatttgtatgagtatgctgtaatgattataaaacctgtgactgtttttgtcaaaatttattaaaatattctgtgcagttcgagcatcagacaagcggatagcttgtgatgaagaattctcagattctgaggatgaaggagaaggaggtcgaagaaatgtggctgatcataagaaaggagcaaagaaagctagaattgaagaagataagaaagaaacagaggacaaaaaaacaggtcagatttgtttcttggtaattgtgttttaattgtaaattttaaaaattgggctgcattataatgtttatgctatcgagaagtcagttgcacaggtatcaggaggaagtatgctaggtaggtgactcttttttcttacatataagtggtacttagctcttaaagcttttatataaatgttattgttcctatttgctttagtaatacaggaaaccttattttcttgataacataggtttaaaatagtgaacattgcattgtgatatagattggttaagaaagaggacaaagtaattatgaatctattggtagtgcatggtcagaactgaacttctaaggtaatttttagctacctaaagcttatttaatgggagaaaacacaaagaagagttacatatccttagaccagttttgccattttgaaaaaggtcaaataatggattttgttcagaaattgaagaaaacattaaaaactctgaggaaagctaggaggggatt

SEQ ID NO: 122527 - DNA, 1032 bp, Homo sapiens
taaaagaaacttttctagtagcaataataaaaattgagtgctagaattatgtaaatcacatgttgcaactattgaagaatgcttaatgaaaattcccacagtatacagttacatgaagagaacagataaactttgtaaaattaactctgaaatggaaggaaatatagaaaaacgatttttgaataatgtcatttttaggtggttagttttttcattgtccctttttaattttttcccaaatactcttcagtatgcacaaatgtcttttgtaattgaaggattttcttttcttctttaaagattgagttatgtgcctaactggtaatattccgagaagggaacttactggaaacttataaatgtttattgaattatgacatttatccacataaaatatttacttttatgttaggtttactattaatattaaatttctacacgtagaagttgaagtttttgaaaattaatagatgtttttaactcttaagttaggaaaactactcagtaccactacctaaagttaactcagggttaaactatgttgtttagctttccataattattttacacatgtccatagggaaagaaaagtcaataaaaattaatttagatgatacataatgttttattgtaacatgatgaatttcaccatgtaaccctacatgaacatctttctgtgttaataaaataggtgtatattcatattataatcttaatatagttgtgtacttgacttttccatcagggacacctgctaaaatagctagttatatcttaattttttaatatgtattattgtataacgtgtttggaaaggagttttagacttgacattttttacatttttatttgtttttaaaatatttagaaaacccattttggttgagtaacatttgcacttattatctttttaaaatttatttttcgaactgttgcagtatgcagattttgttgttacccaaatcttcttgtcttaggtcatgctaaatgtgtagaagttgtaaaaacttttaacttaccattactgatgct

SEQ ID NO: 122528 - DNA, 1026 bp, Homo sapiens
tcttcatgtgttcagattcattgaatattctgtcactttcaccttcttgaaaaacagccttctcatctgttcatgtttggatgactatctttggtagacctggcaggacacatagctgttctctgctttttttctgttgtattggttctccctggtggctctgttctctgtccttaatttttttctcatgttttggtggagtgccttctgaagtagcttcctgataaaaagtgtgtgggggattaggagtgctgcagtacatactaaattttgatcatgtgttgaaatcagcatatgattgaaggctaggccaaagcaaaatatcaccattctggaatgaacttctagggtgtaagaataaatctgaaattttatttaataagatattataatgtatatgtagattagaaatgatttttatcatgagtgtttgtgtatgattttagaggtttttttccacgtgaacttttaggtagcaagttgacagtgtgctttgtattctctaagatgtggagaattctcaaatagaactttctccagaacaattgctggtcttaatggaattggataactaaatacagatattaaaagcttctttatttaatgttatgattgctactataccagctatattagaattatggtataatctgttattctatgttaagtggaatgatattaaattaattgtccctttgtaggtcaacagtggttgaaccgcagtttcatattgtaacttaatgtgttaataaccatcttttgcctcaaaatgtttataaactttctaaaatgatctacctaatgtactcttaaaagtgtatattaactatcagttttcctctttgacttgaaagtccttaatgtttttgtacttaatattttttataatcataaactgcagcagttcactcttagaaaaaaatttactttgtatttcagctaatagagtttcagttgcataaagcgtgtaaggatatttgtaattccaagtcttaaacttcattctgagtttctctgctgccagct

SEQ ID NO: 122529 - DNA, 2261 bp, Homo sapiens
gtctaactgcctaacttccatatctgaatgaggctttgttctctactgatggatataaaattatctctgagttgttgaaggagttatttttccttatctgtggctgcagtttgagagagagatctatagaggtacttaggaatttggatgttcgcaatgttagttattttttgccatcagttatgacacatcttagcagattctactttgtattatactgagctagtgttttttgcttgtagttattccatgcatgctatccatagaggctgacttttcagtcaacttaaaattgatactgactcctcaaataaacagtgattgagcagtatcagtgtaacatcttgcctgctcatcaggagcaaaggaaaatcatttgcaatcatttgccttgttttttaattgactgttgatgttggttccagtgtcttcaactctttgagcaagttcttgcccactcagctaatagttttaaacaactttaatttgtctggacacatttttttgggtggtgtaatcaaacatgatttaattaattgacttggtgcacagctttccttgcttatctaacacgtgagccgctcagaaactttattttgatcacagcctcatttctgtttttttaattttgtgaagaaattttgctgtactatggtatgctgtttatagtgttatgagaatattcttatgagtgcttagtctggaaatatcaatttacattgtattgttttatttagcacagttatggcaccattatataataaatacaatgctttgccatctaataatatctcacttcactatacttcaaaaggatgacatgagaagtccattttccccttattttgacatgagtatacactggtaacaaaatgtcatgacatggtgattcatgtgactcctaaactgcgtttgagttacaactgtgtcactaatctgtggtgctccaagcaccagtttgaagtcatgagagtaccacatgtagcctctgtcacagctaatcgattctgcagttcaaatgaagccataggtaataaacaattgagcatggctgtctttcagtaaaactttttttatggacactgaaatttgaattttgtataattatcacacgtcagaaaatactcttgttttggttttgtttttaaaccatttaaaaaataataaaaacttcttagttcaaagctgaaaaaagaggcaattggccaaatttgggccatgggccatagttagccaatccctattttatactattgaagatttactacagaggtgttttaattaacaatcttgagtatggtataatcttcagtttttaatatattagaaatatgtgctatgtttttgaagcatgtagaatagaacagatttcacaaagagtaaatatatattttttaacctacattgggccacaagtgggtatttaaaggcctgaggctcaaacctcagatatttgaataacctcttaggctgaatgtaaaaggtgattaaacattctggaatgcaagagctcaaaaatgggtttcctgaatttgtggtgcttcttcccatcttagaacctttaaaggaaaaaccaaaacttatggatttgttttcaggtatcatcagagagtcttatatattgatatagatattcatcatggtgatggtgttgaagaagctttttatacaacagatcgtgtaatgacggtatcattccataaatatggggaatactttcctggcacaggagacttgagggtaagactaaattctgtctgaaaaaatattgtgagatgaacctaggagatcagtaatcctatacttgaagtagtatttttctcctgagttaataatttgaaacttgtatgcagaattgaattactacgtatgcagtaacatttgctagaattcactgttgctgactataagcaaaaatttagtgaaaacttaaggacagtttttttctcagctgttttctttggttgaataaatgtttttgaatatccacaaagcatgaagcccttctcttgatgttcagtttgaatcttcaaaactacctgatggtagcctacgttgctattgattgtaaagaatggtggaataaaatagactaggtctttttaggttcttctgctcctctcttttgtgattggtcttgatttttagtagatctaattttaatctttttttttctttaagcttctaaaattggtaatgtatttaggtagagaaaggataccatagtgtaaccttgcctgcctgttaacattaagtgtatt

SEQ ID NO: 122530 - DNA, 1486 bp, Homo sapiens
tgcaaaagaggcatgagtagcccttgggcaaacaacataacaggattgatttaaaacccacataataatgagttctattaagcttatgatcctggccaggtgtggtggctcacgcctgtaatcccagcactttgggaggcggaggtgagtggattacctgaggtcaggagttcgaaaccagcctggccaacatggcaaaaccctgtctctattaaaaaagtacagaaaattagctgggtgtggtggtgcgcgcctgtaatcccactactctgtaggctgagacaggagaattgcttgcttgagccccagaggtggaggttgcagtgagccaagctcacgccattgcactccagcctgggcgacagagtgagactctgtctccaaaaaaaaaaaaagattatgatctctctgtgcagtaagaaactaaaattcatttcttatagtgcttgtgacttaagggtatacaaagatattaatatacaaaacaaggacccttattcttgaagaggttacaattcaagggcatagggaaagactaagaaagggttacatacatctgccatatcctttcattctctcagtgctaaggaactaaatgtgtgatcgtttatctgtaaatgttttccttgttgtctttagtatcctatgttttggctcccatgaacctagttaattcttagcaactttcaagatcaagattagccatgggaataggcaaccagctgttacatctttttggtttagtaacttactgacatgcatttcaaagttacagatattataggtatttaaggagtttcaaagaaagtaaattataaagcaattgaagttgcttttagaatgttaacttattgtaatattaaggggaaaggcctagaaaatttaagcctgtgttttaattaaataagaattgttgtacttagacaactattgagttcttgttaatagacagaaatattccacagataatcctgataagatttgatgatctttcacagataacactttaattaccttggataaaacaataaatatattttaaagttggaaactttatattatactgtgaagtgtatgtttgatgattgcatcaagcaaaaaagtatttgtgggaaatagtttttgtaagaaaaggctttcattaatttgcagaatgtgttgaaattaatgaaatccatcttccacagttaatgttggagaagattgtccagtgtttgatggactctttgagttttgtcagctctcaactggcggttcagttggtaagtgctaatgcaatcagatttaaaagttgatctgaacttggtgtgttatctttcgggttatttgtgtaaaacagaagttttaatgattgtgaattttgataacaaaaggaaatcagtatgtttatagtaaagtacaatttactttcaaacctctatgttttatgattatgacttaaacgctttttaaacttattttcacttggagacttcattcattccct

SEQ ID NO: 122531 - DNA, 1465 bp, Homo sapiens
agcaacaactcagtgtagcatattaagtatttttttttttttttttttttttacaataattgttaatctgcctgtgctgctgaaaagagttgacctgggactgttacaaaataataacacataaaattaatcccacaaatatttgcagggcatataatacatatggaatactgtgttagtgtggccaagcatagtacagataacacaagtgcaacagctgccttaatgtttttgtagataaagatgagggtatgtataaacaaatacagacacgacaattagctatttggggagaaaagaaatatttaaaacaattaatgctaggcaatatatgtgaatatgtgaattattttcagttacatgtagacatttagagaagaggggaagttagaataagactcagtctggaagtcttgtggaagaattgtgtcatacgtgaaattgagctcttcggaacaaggaagattaggatagaaaaaaggacgagaggtcgtgaacaaagatttagaattgaaaactcttgtagtgagtgatttcattgatgaaatcactggatgttttatcatggaaaaggagagaaagtagagtttatgaacatatggatttgactttttactcgaactgtttccactaaaataaggagtgattaaatcatagttgatatgcctgtgtaatgcttttaaaggagtttgaattagttttgagattgattactgttttctaaaacacatataagtttgggttagttttggaatttatatattttgttctggtagacttggttcttttgaggggaccgataggggaatttgtatatttgtttgataatactgatataaccggttgtaattccacagttctgacatttatttctcttcacagaggccccataaagccactgccgaagaaatgacaaaatatcacagtgatgagtatatcaaatttctacggtcaataagaccagataacatgtctgagtatagtaagcagatgcagagatgtacgtttctaagtaaaaagtagttttgctttgataaatgtaaattagtatttttaggagcttagaatgatctaaatctgaatatttttcctgttggtctaatatgttacagttatttactgatttgaaaagtcattttaacactactaaagctacttaagaaaaaagtaaacctatctgaagcttattggtttgcaaaactgctgtttgggtattcttctactcctagtttgctcccctgataactttgggttaatacatattggtagggagacctcactcccttactccctcgcttcaaaaaaacaaaaacaagattacactttgattagccttagcttggcatgtacatatctcttgtcttgtctttgtgtacttcagttaacctggactataatacacatctctttttctttgttaagatattagtgaagcttttgattctacgtaatgttctcttgtaca

SEQ ID NO: 122532 - DNA, 1087 bp, Homo sapiens
gtatcataataaaatacaatatgtaagaagtagagttaaacacattagcattaagcctgagagatattgttctacaagataattagcataaatttgttcaacaaatacgtctcaagcacctcctactctaagggtgcctctccgtgctgggtcaatggcagtgcacagaatgcatggcctgccctcccagagcggacattccagctgggggtggggtggtggaggggagacaggcagtaaatgcatatgtaaccagagcaatcgggaaagataaggcaaagtcaaatggatagaagatgcccagatgatgggaggagagaggctgccttcttatgtatggcagtcagggaagacttatcagtgagatgacatttgacaaaggccacaggaagcaaaccctgcccacatctgcgtgaagcacatcccaggaaggagcaacatgaccagaaaatgccagaggcaggaacttgctacatgtttatgtgcccctcctcctgccttcccccaagcaaagtaagcagatgaagtgggtgaggggaagggagaatggcaagagactaaataagatgtgatggggtgcagtagtctgacttgtacaggctggtacaagcccctcaaggatttattcaaatatgtcacagttacaatgaatattgttttgatacatctaatctaagtcttttttttaaactgatttcaaaaacaacagacatggagtcttgctatgttgcccaggttggtttcaaacccctgggctaaagcaacttgcctgcctcagccttccaaagtgctgggattacaggtgtgagccaccacactcagtctcaatccaaattttaccaccttgcttctcttttgggttcccttttcagctctaaatagtgccagctggaatattgagcaggatcagaaaataagcatgctttcactcacctcgccttcccactgaggcaggcagcaataattgatcacagacttctctagtcacactgcaaaaagtcagagctggccaagaaatgaaccattccagacataaccttgaatactcagacatctcctttcccttcttacctctccttcgttaata

SEQ ID NO: 122533 - DNA, 1059 bp, Homo sapiens
agttactccatattgctttgctccccttactgtgcatgtattagaggatggaattttccattgagggcatgtcttagacaaggccttctgtacaagttcccttatctgtgcctgcaggctgatttttcaggctattcttttgtttgaaagaattcaaccaaggacccaccctaactgcctgcttgaccactttccctctttctcctctctccaactgaagttcactcttatccttcctgaggacatacacctataaattctatttcttccatttatctacctaattgcatatttattaacaaatgatattatcagttctgccccacagtgtgatttctcccctctcagcataggccagaggccatgagcccacaggattataaaacagatagaatcctggtcctggacacaggtgtatttagtgtggcttgtgcaatgctttaacaatttttttttttaatttgcattcctttactgtggaaggcacactccaagcctgacctcaccactctttattggcttacaacagctgaatgcacacatttacctgcttagtgacatgggcagtgggtctggtctctctatagctcctcagtttgactcatattcatatatctcattttctccagcatacaggatttatttgcctctagctgcaacttcccttcaccaaaatgatcatttttccctttctcagatggcctgacctagaaaactagaaaagatctcttgactgtggaacttggtcatctctggggaactagctccctctaaatctgctgacatcatccaaacagcagttccttagtggctctctggatttaataatgacttgaaactctcgggtaaagtggtggaatgtgtaatctaaatatcaaggttatgtgtcctgcccactttctttgtatctttcagtggtatctattgaagcaggtcagctgaagaatgacaaggttcatacaagtggaaaggagagctttatttctcataaagagttgcagcctgcaaggtggctattctgataggctgggaggcacggcctctggccagatgccagaa

SEQ ID NO: 122534 - DNA, 1041 bp, Homo sapiens
tatagagcaggataatctgagtttggacttctcgctgagaatgcttggcatgaaacagtagggatgagccttcttcaccatgactgtctttaggggaatccactaggctgctttaatgctgctctttatgcttctctatttataatgaagtgctgtgagaccctgtagcagagatagtattgttttttgtttcaatatcaactggtactttttctctacaatgaaaaatgttttgtccataatatatatcacctcgtctctggttttattgttgaaaaccacctgacttgcgctccttttcttttcaacattttttattaagaaaatatttggaaggaagcaataatactaaattgcagaattacaaaagggcagcttatacagctaaattttaagatactctgagggacaaagaaataaagccactgatgctgggtaagaaaaatgtgtgacaatggaagtatgcaatgtgatttacttggctggctaccatgtaggaggaataaattctataatcttgccaaaacctaagggaaatgtgaattgaatagcaataaataaccttattggaaacagttgaatgtgatatactgtatcctctagccttaatacatgaaaatttctcattgattgcagcatcagactcaagtagactgaagatggggcaatttttaatgtactccacaatgtcccttctgttccctgccacaaccttctcaaacttgatgagttagaaggtcaggttaatctatgtatgcaactccaggctttttggcctctttcaggattaaataaaacttatagaaaatgtttttctctgttcctttcattttgttgttcagaagccattctatgtttataaatactgtatgtttagtaacattttaatttctcttattcgactaatgttttaaaggtatgaccactttagaacattttcttattcaaccctcacagtattgctgtgagctaaaagagagtattatttttcttgcatgtttacagttgagaacattcaggcttagagtgttatgtgacttg

SEQ ID NO: 122535 - DNA, 1032 bp, Homo sapiens
ttattgcccagaaatagctggtaaaaaatggaaacagagagagaacttttcctctcacacataataggaaaatagtaaacattctaaagagataaattatcaaggttatgagattatagaaatgatataatttattatgtgagcctataaacattatgaattagaagaaaatttatattttgaagttacccaaaatagaccatatcatgaaagattttctcaaatcctttgtgacagtatgtttctgtcatatctttcacatcaataaatataaaaaatacacttatttctttaaaatattttcaaattgtatcgtagcataaaacccaattctaagttatacaagtatacaaccaatagaagctaattcaaaactttgaaaatgaaaggataggcaaaggtgtactgggaaaatgctatctaaagaaattaggaattaaaaatcttagtatcagaaaacataaaatttcagggcccaaaagcatttactaacacaaaagagggactctataataaatgctgatgggtataatacataatgaaggtatatgatcttgaataagtaatagctttaagagctaccatagaagtttgttcagcaaataaacttctgaaaacatcccaagaaatagaaataacccattttttaggtggtagactaagtttaaaaattcagctcctgtattatgaagccaaatatttatattgaaatttattttcaagacaaaatatttctatatcaaagataattaaaactactcattaaccaaaaattaggtacttaaccagtcactaaatttttttcattatcaacaaaaagaggttccacgtagcttctctttttgaaaagaaagcaagcaagcttccaataaggctgtaaacgtatgcataaaacttttttgatttgaagaaaaatggaatgtttggactccccctaccctaaacagctattctaaacagcaggatataattccagagtttctgcagtcaagaggtttctgctgagcagaaattcttcttcaatttaggaat

SEQ ID NO: 122536 - DNA, 1055 bp, Homo sapiens
catttttcttgaaacactttttgtttgcacttgactttcaggaggccatacccctctaggttttcactttcctaacgggctgctctttctctgcatcttgtttatttctcctcatgtccctaacctcttagagtgtcataaggctcagacgctggatgtcttttctttcctcttctcactcctttaatgatttaatcagtcttatggccttaaataccatcaataggctgataattttcacctggacctcaccctagcgctccaggctcagatgcaacagattatatcacttagattctaataagcatctcaaatttaaagatccaaaacaaatcccaatttttcagttaattctcttccagcaccttttcccatctcagtagatggtaatagtgtccttacaattgcttaggacaaaagggtttttctctcatactttacatctaattcatcaggattaccttgttggctccatattcaaatttgaccacttacccccttctccaccattatcactctttcttttgccacaataatctctcaatggcattatttcatatctttctttgtcctttcctctgcccttgttccctaaagttaattttcaacacagccagcatgatccttttaaaattaaatttaatcgtgtcactccttaaaatcctccaatggctggccattttactcagagtaaaagtagaatcctggctgtgacttgcaaggctgctgtcattccttccccctctctcgtatgtctctgaatgtatcttctgctactcttacttcactccactctagtcagacactgtccactttgtgtcctcaaatatttacactttaaggcctttgcaccggctgatgcctggcattttcttccctctgttatctgcatgccttgttccttcacctcattgatcaaatgtcatctcagtaattgccctgccctgcatgtgttggtagagagaaaggaatttgtagaggaatcccaggggtctttgtggaggtcccacgtggatcctgggctgaaggctgggctcagggagaactctcctgtg

SEQ ID NO: 122537 - DNA, 1055 bp, Homo sapiens
ttgaagatagagtctaagtttagaaattagagcgttgaggcacctagcgtggctttaatacttaaactttgtaactttggtgaaattactaattcgacctgagtctcagtttcattagaaaaatggatgtaataaatacaccctgtctaattgtaagaattaaagataatgtatgtagagtcccaataacagtgcagtcacctacagagtactcatgccaccaccaatatttctaagatttttctagggaatgtcttgtatgcattcaataacaagttctaatagttattattattattattatccttatttcttcctctccagtgaaagattacaaaagaaaaggatgcaaatgaaaaactaacaacttgatgtgccgtccattgttatgaaaaaggatgagagaggcaatgaggctctacgcccaattgggataatagtagagccactaacaacaacaacaaaaaaatagtatcagatacttaaagacgtactcatacatgtatgcaaaggaataaagtatgtttattacaatcttgtttgtagtagcaaaagactgggaaaaacttaaatgtccttctgtaaggacagaagaaataaattaaggcatagtcatacaatggaatattattcaatcacaagaaaaaataaaatagaactttaaaatatgaaatggtttccaaaataactgtcaagtataaaagcaagatatttatactctctggaaaagtaacattttaatttgctcacctgtgctacttatgatatatgtacccagggtaccaaaaaagagaaaaaaagtagaattaaaagatgagaaattgatgttgccccttaacaaagacttccaaaatggccttcacaaggcatcagcaagacatagccatagactttgaaaatagcagtgacagctggtaaccagaagctgtactatataagagtcaagtttaccaaaaacttcaagataaaaattattctcctaggcagtatttgtctgtagaatcattcccaggagtaatatctttgaatccaaaagaggggagttatctaaatca

SEQ ID NO: 122538 - DNA, 1078 bp, Homo sapiens
tgcagttgtcttcttaatcagtctgaattgatggtcttcaattttgctgactgctgtgctgctaaaggaaggcaaaaaatatcccttttctatctctttctttcccacttgagtttccttagaagtattgtctttattccttgagcaacaatggcttggagctgtcagaaaagagcttcatgagggtgcatgatttattgatgctgagtgggctgagaagtagcagcccaaggttgggtgggtgctaattgggttgttgtgatccctgcacggctgtctgctcttgtgaggtctgagtagatctgaaaagagagttagggccacgacacctctcataatggcaagacactaattagctgtgaattacagcagcgcttttgaatattacatattatatgtggtagccagagaatctgtcttcattagatgcatgacagatagttttagtgaccttactcttatttgtcattggtagtgaattgtttttctgatgaaaaataccaaattctaactgcatgtcaactggtttggctatttcttgacttcaatcaattactttaaaggaaactattattgttattaccattaatattaatttactggttggtattctataagcattagtattatttattgtttaaagtacacttaaaaaatgcactttagggtctaaaattgagctgcagctgagtttttcagaggagattctgcattgaatactgtgattttacttgagacaactctgcacgtaaaagcctacagagtagtagagctttcacatttttcgtcagtgaaacctgttcagcaccaagcaataatatattgaagataattgaaaagtgactacattgaggccataaggcaaaagagctcatcaataatattcaaggtgatgcatctaggagttgacatatacttatacctttgtttatttcttcaacggcattcagtatgcccactgtgtgccaggccctctagtaagtgaaaggcagccaagaccagcaaggcacagtccctgaactcagtctagagaagaattacaatacagttattttgttgtgagacaagagagggcagg

SEQ ID NO: 122539 - DNA, 1003 bp, Homo sapiens
aggaataggttagccaggttcaagggtctcacaacatttagaaagattgtttttaagaaagaaataaaaaaaaagtcttatagagagatcagtgacacttcataaacaagtttgcaatgctgtctactagtataaatgaccgtacgttgatctgccagactcattgcccggctgtttttgccagggcacatatttgtgagacagctgctccgaactagggaaggtcaagcaaaaaccactgcctgtctagagatggctgtcctgatgtcagtctcattagttcctgagttcttgccaagttagtaagaactagcatagatctggaggtcaaagtttagcagaaagagcccccacagcagtgtgcaaagagctctttttctgttctactctttttttctctactggtcacctagttggtgtgtagcgtgtgtgtgtgtgtgtgtgtgtgtgtgtgtgtgtttcccaaatagtacttgaaggataggaaattaaatgtctgtgggaaaaagcaacattttgggttctcagcattttagtcagctgctttcttacttttccagactgtgactattctttgaagctattaaaatctattcttggtaatgagaaaagggagtgacttgatggttcttttccaattgctctgtgtctgacaagaaatacctaaatactttaatttgcctttttaaatttcccctagtggtggcaaaacaattctactcctatttgtcagggaaaaaaatctctgccgtgaatttcagtgctgggaacataacaagacaaaaagctacctgggctagcctgtttctccaggatgaaacaaaaggaatatagattttagcggctgctttaacagtttggtaaaggatctggtctatcttgggtgtgggagatgggaggggtaaagaggtcagaataccatttagatcacagacagaaagaaaccaggaagtaaggggaaattattacagtctgttcatagctcagaatgttaaaggcaaca

SEQ ID NO: 122540 - DNA, 1114 bp, Homo sapiens
gggtcagggggactagggctgtccttgaagatctcacgtcgtggaactttctctgcatgtctttctggacaccagctgattgtggacacagccacttgatttggtacttgcattttttttggctgcatttttctgtttgcacgatcaaccacccatcagtgtttaaactgcaatctgggagagatgcgtagtatatagtgtagtgtattgaaaggaacactagttgaaaagtcattaagatcttagccctagttttaccttctatcaagagaagaaaatacatatttattgcgcatcgactacgtgctccgtgcactttgaatacattccagtcctaccaacagtctgcgaagtttgggtcctcactgtgccctgagggagggggacatggagtatgcatgcttccagacctgtacactcaaattaattgccctccctccactattcctttggtttcccaattcccaaggaaactaattttgaaaagttaccagatttttttagtccaagatctaagcatccagacagaaaaagagctggttatgagtacagtggtgaaagcgaggactcctcagccagactgcctagcttaggacaccagctccactgttactagctctgtgacttcgaggaagttacttaacctgtgctgcttctcagtttccccatctgtaaaatggagctaataattggatttacctcacaagattgttgcaaggattaaatgagtaagagatgtataatgcttagaatagtaccttggcaaagacaagtgtttgcttttatggttaccacccaaactatttggaaacctcacagtttatgggtagaactctagatcactggtgcagacatcagccagggttgtgccccattatgggcacccgccagttcctgcacccaccagttcaggtacacgttaaaggtcaaaaaagagtggctgcccgaatttctcgtgtgttttctatgcccagatgctaaatttttttttaaatgtcctttttctgctgttacactttcctgctttcttaccttacaggtctggtttccttagtcacattgagaattaagaaggcttttttactgcttgattctttggccactgcttccccta

SEQ ID NO: 122541 - DNA, 1048 bp, Homo sapiens
gagcccagaagctaaaaatgatctatttgtgtaaatagtctaatgtgctttagtggttagatacctgctgagagtttgaaaagagaaattcatgcataaaaacaggtgtttatgaaaaacccctgaaacgtcagatcaggtcaagaaaaactgagagtcatttacaaagttttaacaagggctttatattctgttttccgttatacacaaattgctacattacttgaagagctcatagtttcgtgcgccaagtgcttaatgacatcacctgctttccatagtaacccagctgagttaaaaatatagaatgtcttggccccttgacctaagatcttcagggatcttggctacccaatgggttctcaaccattcacacatgttagttcctactctgtttacaacttcagctttcacatgcagtttctgctaagttggaaggagaaattatagcaaattaaagtgttaattagagaagtcacagggtaacactttttatttagatctctttgttcctctgtttgccatcgtacttgagaacaactccacagtcaccatctatagtgtacaaagtaaagtacttgtagggtacacgagtacctgtagaatattaagtacctatagggcacctgagtacctgtagggtctgtgtggcaacacagaccaccaagaaacccatcgtcaaaacggatacttatgcagctatttaacttaatcatactaacaatgaaaatacatcccagtaatgctgggcccttgtctgtttagccattgatcaaataattgtgttacctcacccacagacctcttccctaatagtgcaaagatgctaagtgagtcttcctgccatccctggttcctgcctcttgcccaccagtaatgctgaccagatcacctggcctttttgcaccctggtttcctctttgcctgctttctttcatattttaaaggtaattgctatttgggaaaaatgtaacaaatagaaaataaaatgtatatactatagagatataataaccattaatagtggtttttttcccccagtgatctt

SEQ ID NO: 122542 - DNA, 1027 bp, Homo sapiens
ctgtctctactaaaatacaaaaaattagctgggcgtgatggtgcacgcctgtagtcccagctacttgggagactgaggcaggggaatctcttgaacccaggaggcagaggttgcagtgagctgatgttgtgccactgcactccagcctgatgacagagcgagactccgtctcaaaaaaaaaaaaaagtgtaaaaggagaacaccaactttcatgagtttctcctggttttctatattactttaaatatatgactctaagtttagaattcaaatatttgggtgtatttaaattaaccttgatttttaatgagttagtaaacggactcttagattttatttgtaatccacaccagactttgggacaactgtttgttagacttcacaccagtaacatgttccctaaggggagtgggtgggatagcaggaagtaaaccaggagtggtgagccaatggtatttgtccctgacaactgtgagttagttcaccacatcccagccacaaatatgcatgataggagaatgagagctctgtttggcacatagttcaaaaacagacgttttcaaacaggggatcttaggctgatggcgttgaaagttactggatttgttctaaaatgtgctagttgccagcagtgaagaagtgatctgagggaaaagggttcaattagagaatgtattatgtaccaattatagatttgattcgtacatcagattgatacatgagaaatggaatgccttttaaatctaatatatcagcaaagttataggacataagaacttctggtttctgtcttgaagcattataatagattgaaagcttctttaaactctcctcctcactctgcagtgagaagttggacagttgtcctcaacagaggacaactgataacagctaactattaaatgtccccaaaagaatttgtttagaaaggtgtgatatgataaaaagaatgggcaacagtgtttcccttatcatacgttttgtcagagcataagatctgagttcagtaactctatgaaatgctaaa

SEQ ID NO: 122543 - DNA, 2053 bp, Homo sapiens
ttttcaagtaccattgcagtgtaaagctgtatgtattgcatttggaaaatgcatggttcatctttgaaaatagaatgtacaatacatgcctaaagggaagatttcttttttttttttttttttgagacagagtctggtgatgggctaattgaagtgattgaccaaagagatgttaaaacatggctctcaaatcagcattgatttgtagtgtactttttccccctcagaatagcaataagagtctattgattttacttttggctatttaattgtagtgtaaacacttaattaaaatgtgtgaaatttaaaaatagttgataaatatattcaatattttaacaaaacatcaacatagctggagtaggtttcgtctagcttaaaagatgttgtcactgaggccgggatttctttctgttcctgtatcctaacaccgtccatggtcacccagtttcccctcagaaggagacattgttattacttgttttcttacctggcccctgacaacagattcacccaaacacattatactccttgctacaggtgataatgttcctgctctgtgatttttatgttaaccttaatttaagtcttccaacaaatgctgatgaaaaaaaaatacacaaaactttgtatttgcttttttaaaaaatgctagaacagtgaggtggtgtttaaaacagtttgaaagtacacagttcatggtgtttatttggtaaacttacagattaatttaattatgaaagggagaggttctccctgagaaatatttggatggttttgatgatggaattaaataatttctcattcattctattttatttcactcatcaaactaaaaacaaagcaccgtttgatttgtttacgcctcaggattaataactcttagcagaggcatcttgttactttctttgacttgcctatgatgccttgtaggtaagcaaaaataatgaattgttttaatatcatttttcttcataagataaaaataaaaaacatcatttaggagtttaaaaaacaaaccataaataaccatatacaaccacattgttctttctgtttaacttttactccctgtgctggtttgaaatgaggctggtataacagaatagaactttggtttgacagggagtatacagactttaatattaggctggtgcaaaagtaattgcggtttttgccattactttcaatggcaaagtatgtggttgagtatgatatggccttgaagtatttctacatttggattagttaaggttacaagtagtttgcatgggtttagtgcttataagcattgttagacaactgtcgtgatggttacatgttatatagtttcctaatgtctccagactgctccagatatctgggataatctgagaaaaataataatctttcttattattaatgaccaattcatttagcactttatagtagtggtttttattttttggtttttgtcactcgccaacacaaacatctcttttggaattcagtggccactttctgggtgctctagaggaccattgtgaattaacatggcctaaaatcgtattttaagaatatcatgtaatacgtactgaatccagtttaagaagtttgactaaagcaaacaatctaaacaatttaaaatgactttgaatccatccaaaatcacatgtgtatttacctatcagtattctgcaggtcaatgaaattacatatgagtgaggttactccattacaacataggttgtaaaagcaaaagattagaagcaaggctggtatccatctaaagggcactgggtgaataaacaacactgcatctacacaaagaaataatgtacttctccttaaaaaaaaaaaaaaaaaaaagagggaggaagttgtgtgtgtactgaaatggaaacatttccagggtatatgttttttaaagagcagatacagagcttatacattttatgctatcttttatataaatggaagtggaggtagtgtttatacaaaaaaacaatgggagaatttacaagagacaaatgtattcagttacctaaaggctttagggttgggaatgggctag

SEQ ID NO: 122544 - DNA, 1558 bp, Homo sapiens
ttttccggcaaaactaatgaactttgtttttggagttaaaaaaaattttttttaggttgtagatctcattcaactagttgtgtttcgtttattagttagtttgctggtttaatactatgtaggcactttgaggttgaaaaaaatgtgttccattatctttgctttcacttagcttattatagtctgcctcataagggattactatgctgtgtatagtgcaaagtaaaaaggaatgcgtcttaaggaagacatgggcaaagtaagggaagaggagaccgattacatgtgctaattgcagatatatgaaagaaagcataaggaagtcttcgtggaggcaatggtaatttagagtttccttgaaagatgactttggtcatgtagagataggggagagaagtcagatggaatgacactgcagatattcttattgtactttcataatatttgcttttaaatttcagcatatcttgaataagaagtacacttaagagtaatatccaagatatctatggatatgaagaaagtagagatcagatagcaataattttgtgcttcacgtcctctccccaggccaccccacggccccattacatcacaactcttgccacaaccccttttgttctcctcaggagcccagcttgtgtaagtagcccctggtgcattgaccagccactcactccctggcaagaaggcctgctgcattttcctcatcatagcttgtttatttggatatttttttctctttgcctaagtgcgttcacttcatagcactgcctcccttccaccaaatagacatggaggggaggagaccaggtcttgggctgcaattacatggattatttgggtatgagaatatggaaaacaaagcaaaactaacctttggtaatatgtgtatcccagatatttgccccttttccctctacctcatgttttcattattaatttggtttaaaaatgaggattcccccccatatctcttgagttaattacagtgctctgagtttctgtaaaaatgtcagattgtgtggcaccagtcagttgtcaacgtaacttggttagtggaaccctagacaagtaactgtatggacttccaccttattacagtctttggccactgctatcttggaagctcaggcagtgggaaaagagctatggggacaggttcaaagagttgaaactatgttgaaaaagctgcctgccaaaaatcagtgaagtcttaaaactaaatagttttttaaattagaaaaatattaacatgaattgttgaagagatttgagtccaatgggggatcaagtgtatgtgaaattgcattttttaaagttgttcttttccagtagaccataacaaaaaattacatgaaaccacaagagagggtgtctccctgccttccccaaatttgggctcattttttaacaaaacagaataaaaacagttgaactaaattagaatgttgaaatggtgagagtgggtggaaagatgaaaggcacttcacttcaaacagactctaacggggaaatcaaaaactgataataagaccacccagctgacctgactcac

SEQ ID NO: 122545 - DNA, 1013 bp, Homo sapiens
gttagactgttagagattcaaataccatctctactttttgattgtttagcattggccaattgacacaattacttttaagttccacatgtgaaaataaacttgataatggtatttatctcataggatgttatgcagattcagtgagataatgtataaagaacttagcacaaggactgatggattgaaagcgctaggtaaacatttcttctttatgtttgctaccattgagaagcgtttacatgtaccagacatgccagtgcattgactactttatatacacatgtctacttcattaggagctccacaaatagcttcaccccagatagggctgccaccaaagctctctgaattttgtcatagagggcagtggcaatttatggccccagggcacctagctttgctcagaaaatgtccttcatcagcttgctagtgccaagagtgagcaagctttttctaaatcttccaagagagatcctggtaaataaaagggttatttctcctgtcaaagtgctgggtggtcaccacatcaacaaatagggattcagtcactcacttcctctccaaattgaggtcactgagtagtgaacaacagtttctgggtaacagccatctacttggtaaggttcacccattcattcaaagccacgtaactattccacacagcttgatcctgaaacagaaaacagtcaatgtggccagtaaatgatggcttatatggagataggcctttccttttcaggaccattatatgtaactgtgctcatgccctgcttgactcaagcagcttgtttaaagagcatgccttcttctattcgtcccatacataagaactacaggtggctgggtatagtgactcatgcttataataccagcagtttgggaggctgaggcagaagaatcacttgaggccaggagttcaagactagcctggacagcataatgagacctcatccctagaaaaaaaatttaaaaatagccagatctggtggtgtgcacctgcagtcctacctgct

SEQ ID NO: 122546 - DNA, 1869 bp, Homo sapiens
aattaacctaggtaagaaatttaaaatattgtatttaaatgcgtatgccttgtatttttattcctttggaaatgttaacagtagctttttaatggtaatttatattttgatcactagatggcactaagcacatatagctaagaaaaaataattttttctcaagttttctgaaagcaagtctatgttttcagcattacacactataaatttttttcttacgtagcccataaaattcttcttgctacaaaagctttgtttttctaagtgaaataatctcacatctgactcccttaggtatagtaagttacgagagagacacagcctctgaaattagcagtcatccactcatcaaacttctctattcttagccatttagatttattattatcatctgtttcttaaactgaccttttcttactagtacttcctcttccctgggaaacagagaatatattttaatttttttaaagggctattatatagcctctggcatgttaaaaatagatcctagagattcacacacagaagttcctgtagggcaaaatataaaaagagcaaaaactttgtttttgtttttggtcttctaaatattattctcatattgcaaaatattatttcttttgttagttttggtctggttatgatattcatgcaatatattttctgaatcatgatgctttaagttgcaaataataaataaccttaatgtttaagctattactaaattgagttattttacacaaccagaggttgtccagaagttgaatggtacttccagtggtggttagagttagtcagtgacttaatcagaaatccagtggtggccaggcacagtggctcatgcctgtaatcacagcactttcagaggcccgaggtgggaggatcacttgagcccaggagtttaaggctgcagtaagtcatgatcgtgccacactgcactccagtctggccaacagagcgagaccctgtctcaaaaacagaaacaaaagcagaaacccagtgatgtcatcagggacccaggtttgtttcctttcatatgtccactccgccatctctggtatatcagactcgtgctttgtgttgatgataaccgctgcagttctacatagaatttataatcatgggaaagtccagtagtagaagaggggatattcccccctttataggtttatttttatcagtggtatacattacttcaggatcctgcagcaaagttctcctcaggtctcatttgccatgcctgggtccccagcacttcctaaacaattcaatgacaggaggagggaataactgtgataggtgtagactgatagagacccttgcccttcctagcatcacagaccccctcagaggaagatgaaacccgaaacaatatcagagcactccccagcaaagagggagatggatgtggggaggcagaccacaatatttgctaccgttttttgtttttatttgttcgtttttgtttcacttaaagactcttcttcctggccaggcatggtggctcatgcctgtaatcccagcactttgggaggcagagtgggcggattgtgaggtcaagagatcaagaccattagaccattctggcaaacatggtgaaaccccgtctctactaaaaatacagaagttagctgggcgtggtggcacacgcctgtagtcccagctactagggaggctaaggcaggagaatcacttgaacccgggaggcggaggttgcagttagccagagatcatgccactgcactccagcttggtgacagagtgagactctgtctcaaaaaaaaaaaaaaaaaaaaaaacaactcttcttcctgatgtcctgatattcttgaaatataactgccaagtatttcaagtgtttcacactgg

SEQ ID NO: 122547 - DNA, 1056 bp, Homo sapiens
gaaaccaaaaacaaccaaacatgccggtcaccttgtgtgtattctttacttaaccatccattagaattctccagctaataacctccgttgtcttcacccttttacctccagtgtgctatgcattaaatcctgcttaatatacctgggaaatctctcatctttgtcctcctctccctttccactaggccatctaacccctccccaacctctcttcacttttcattagcacagacttctatttttgagttctttaaaatttcccacatctttttttattatttacttaggcacaaatatatttaatcacatgcacacaatatctcattggcttccattccatatagcatcctaaggctaattgtacagtcttgttcctaaattacctttccatcttccttaactctatctccataaaagtaccctttactcctactgaaatgattgccttttattcttatatcaagtttttgttctcgctattctgtcaacatcagtgtttctcagactttcatgtacacgtgaatcacctagagatcttgttaaaatggagattctgattcagaggccctggtgaaaccttagattctgcatttctaaataacttgtctggtgaagcagatgctactggttggaagatcacactttgagtggcatagatatatgtagaatgccttctccctttcctctctggtgacttcctacctcttatttaaggtcagacatacaaatcacacctcctttgcgataccttccttctgcagctccagtcagagctgtttccttctctgtattgtttagtgctttcacttggctacagttgggaaattgtctgctgaactttgtcagcggatgttagtgctgaggggtgcagctgtctgcaggaatctttctgtctttagcacaattccaacaacattaacagctccccgaatgaaggaggctgaatccatcagcgaactagtcaaccccatctccactaaaagtacaaaaaattagctgggcgtggtggcaggtgcctgtaattccagctactcagaggctgaggcaggaaaatcg

SEQ ID NO: 122548 - DNA, 1003 bp, Homo sapiens
agggtgcaaaatttacatctgaatctgatagactactaattaaaaacttaccttcctcaccctcaattctaaaaaattaacacctaatgactttcattgtgttatttatttggtaaaccgttttgtagcagtaggggcatgatgtcaagcagaggcatgatgtcaagcagatgtctgtctaatcactgaataaatcacttaccagcattgagatcctgggcaaaataacttccttgaaccttattttccccaattaagaaggccacgggattaaaaagtatatacctataagggccttataatatgtaggtaccactgaatgtcagctcctttccccacaaggttcttgtttgtacatgtcctgtagccatgccctaagtgtggtctgcccaactggctactctcacttgattaaaaagtatatgattgtcaaactgtattttcagagaatgatgaggagcaggaggcactgccatctctggataaacctggctggtactcccaagggaacgctgtccacctctatgaacttctgaagaaaatgactggcaaacctgaacccaaggtatttcccagttgaggagaagtcctcagtgcccacttgcagacataagcagttgtgaactgccaaatctctcctcttaattcttctgcttaaataagcctttcctttgtcaatgtagacaggctgtctatctgtgatagagaggagcaaggattccaagcagggcaccacagatttagggggtgtatgagtgtgtaggatgcctgtggaatgttatcctgataacaatctatccaaaaagtttccatatataaaacaaacaactgaaattatgctacagactagcttaaagatacacttgtttttgacagaatgatcacattgttgatgttggacattggtgcatttctaacagcagaaccctttcttctaagaaaatatttaccagaatttctgtgagctgagagatcgtggggtaacagagccctgctccattgg

SEQ ID NO: 122549 - DNA, 1135 bp, Homo sapiens
aatactaaatatgaaaattagaccaagttgttttttaactaccctttagacatcatcatcatcataatagaatagagagttatttttattatagggaaaaaattatgttttctaggttgctttgtttgggctagttttcagataataaccaattgaccatataaaaagctagtttgtgtttaaaataaaggatacttcataataaggaggaaatattattcctgttccaaaaatttaatgtgggcccaaagcctatttgtagattcctacagggtttcaaagtttttatttacttaatagacaaaaaaattatgagattgaacattagttaatcaccattttaattattctgttctcttgtttcagggaccaaaagcaaaacctttaaatacttcatctaaaaaatggggctctttttttattgattcagttttgggactggaaaatacagaagactccttggtttatacatggtcttgtaagagaatcagtacttacagcactattgcaattccaagtattgaagcaatcgcaggtaagggggaaaatacctataaagcttcacctgttactagacaataatgaccagtactagaattcttgtctttaagaaaaagaaatgttgccacaacattgatttatctttggggaaaaatcttctagatatggaacctaggtaattaggaccagcacttctgtgggaggcaactacaaaagctcaacaattttttttttaagtcagcttggaggcatattataaaattagggaaagagttaccaggacaagctgctgaggaggcccagtaaggtgaacctggcatttgaggctgcttttccccctgggtatttgctgattccggaggcggcaccacagagggtgagtgggcctttcagtaacttcatgaatctacaggaataggaactggaggagagggcctgcctaaggagggtgggtctggtgaactccctcaatctatgttgaggccttgaagggctttactttagaataaggatgaattgagaagaaatctccattttcacagggactaaaactcagcttgaaatcagctaaatacctaaaattggattgaggagatttcagattattagtgcccctgcacacctggtagaaaca

SEQ ID NO: 122550 - DNA, 1092 bp, Homo sapiens
tcttggggtgaaaaaatattagatatggcttgtggacttccaatatcatcctatccaccaaaatcttattccttagtattaatttatctcattgggaagaaatttgtagttaaaactatttaatgtaatttgaatttaatttctgtaattgggaaggagggtaataatgaacaaaaagtttgagaaaaaaatgctttaatgggttttacaggcatgctacaatccaggactgtggtgttctatgtgccgtgtatggtcatattagtagctatttgttgcaagatacttgaagccaaatgtttgcagtataggttcctggctactgtttatgctgtgatttcactctgtctatcatgggcagtattagaaaacacactggttttcactatctggtttacaaacactatcattattttacctggattgaagtgcagaatttggcatatcgatgcatgcaatggaaagaaaaaaaatttgttaaaatttgtaaatgttcagctaaatctcagatatactgtgggatgagtatctcagggtaagtaacaaaaaaacaaacaaaaaaaatcactgaaatttttccctcacagtcagtagctttgtttgatatttaacaataagtatatggtgatatacttgaaatttatgtccagaatgtcactggaatattacaatgagcataaataatcaagcttaggactaaatgaaagatactatctcatgtatgctttaaatagagaatttatttcttttaaaaataaagctatctttccttatccatgtttactctgtaaatggcaaataatacatctttaaatgcttatgaactactgttaatatgaaaaatgagaagtccaaaataagaaataactgcactttttgggccacttgagtagtggcgggggttcaggaggcagaattcagttgtcagaagttctagtattccctttatcattccacctaaagaccctgaacaagttaccaccaaatttggcttcagttttttccatcttatgaaaggaaaagtttagtttatttctaaatttccttcctttctagcagtcagtatttcttctaatgaatgttttttttctg

SEQ ID NO: 122551 - DNA, 1114 bp, Homo sapiens
gtggcccaatcccctacaatactacctgatgggtgaagggccccgtagaggaattcgaggcccaccaaggcagccagtggagagcgccagatccttcaggttccagtctggctaatctctgtcctgtgagaagcttctgcacaagtttccttaccacctcctcttggacctatgcttggccaacagcatgcagtcttccatctgctttctcttcatactgtggattatcttttcctttggttctaaatcttcagtaatcggttgcaagattgttggcttacctgcctgtgccattcttcctctgggccttcatgcttttctgcattgtgttaacatgtttcaagtgcatggccttctacggcttctatgccaagcgtatgatactatagatatagtgtaccatactgcctttctttgcatggcttggaccctatctgtgaccatgctcttctcccaatttaagtggttctgtaccacaaagaatcttgatacattttcacaaataactgattgggcttcatactttatgctggctgtgtcctgatacccatgtacttatggtaagctatttgggtattaccactgcaagacaaaactgatatcttaacccggccatcaacccaaattggacattccagactaccaccaactggatcccagctgccttcctgggcttgtgccatccaccctactggttatctgatagaacaagctggtggctgatgggtgactgctaggcgtgactgaggtaatagatgaaaagtgttctatgttatcacattggttttcctgtacctttggttactctacgtcatgaccagctgctggtgagtatgaagcctgtgctatagcccacccctactcactctcaccttctggttgaactttgcttaggccaccattgtctgcctcatcaggaactatctgtagacgtagctcccagggagctcacagcaacaccccctaccaccaggatgggcagtaatatgtgacagagcccaaagcaaggctggaacgcagtcccttccagcttagtctttctgactcctagccaacaaaccatccttaatgtgagcaacttctttaggcatttcctcttttccccgcctgcacc

SEQ ID NO: 122552 - DNA, 1084 bp, Homo sapiens
agacggaggacggagtcttgctctgtcgcccaggttggagtgcagtggcgcgatctcggctcactgcaacctccacctcccgggttcaagcgattctcctgcctcagcctcccgagtagctgggactacaggcgcgcgccgccacgcccggctaatttttatatttttagtagagacggggtttcaccatgctggccaggctggtctcgaaccccgatctcgtgatccgccctccttagcctcccaatcctctcttaaaaaagtgatagctcagaaacatttgtaaaagcaaggtttttatttcattttggctctgtcattttcagaggcaaagaagttggcctgtaaaatagagtgctagagctcttacgcccctccccttcttcccaacttcctacttcctagcccttttatcaactcctagaatagttaaagagagacacatctagatgggatgaaaggtgccctaagcaggagaaactgaacaaaaggctagaggcatgggccaggtaaaaattgggcctagagtgaagactgtgctgtcgttaagagctttcgaggaaggagtacttactccccaatgatgatgaatggaaaaatacttttcagggagaattgaaggggttaaagtgttaaatatgttgcctagacaagggttctttaaagaaagacagcgcaactttgaatgctttcttacttgttttgtgacctaatttatgtggaagattgttatttcattaggatttagtaaaatttttttttctgattctaaacttattgtgaaaattgagctgtacagatattcttttgatttcaattgggaacatttggaagaacaacagtcttacttgcctgtacaatatagagacatatgaatagtcataacagttttcaacttgttcttgtttctgttaaactatattcctagaaacatagtttgaacaacttggtctttgttaggcttgtcaaattgccttcatggaaaaataatctacaaaagtatggtttaattgattgtcttacatgataattttccctggtaacaacttagtaagtgatatatcttttttcctaaattgcttaa

SEQ ID NO: 122553 - DNA, 1760 bp, Homo sapiens
ggtcaagaggaccactcccctccaaacccacagcatcattatttctgaccaagtcccgagcgaccaggacgcacaccagtacctgaggctccgcgaccaaagcgaggcgacacaggtgatggcggagccgggtgagggaggctcggagaccgtcgcgctcccgcctccaccgccttcagaggaggggggcgtaccccaggatgccgcgggccgtggcggtactccccagatccgagttgttgggggtcgcggtcatgtggcgatcaaagccgggcaggaagagggccagcctcccgccgaaggcctggcagccgcttctgtggtgatggcagccgaccgcagcctgaaaaagggcgttcagggtggagagaaggccctagaaatctgtggcgcccagagatccgcgtctgagctgacggcgggggcggaggctgaggcggaggaggtgaagacaggaaagtgcgccaccgtctcagcagccgtggctgagagggagagcgctgaggtggtgaaggaaggcctggcggagaaggaggtaatggaggagcagatggaggtagaggagcagccgccagaaggtgaagaaatagaagtggcggaggaggatagattggaggaggaggcgagggaggaagaagggccctggcctttgcatgaggctctccgcatggaccctctggaggccatccagctggaactggacactgtgaatgctcaggccgacagggccttccaacagctggagcacaagtttgggcggatgcgtcgacactacctggagcggaggaactacatcattcagaatatcccgggcttctggatgactgcttttcgaaaccacccccagttgtccgccatgattaggggccaagatgcagagatgttaaggtacataaccaatttagaggtgaaggaactcagacaccctagaaccggttgcaagttcaagttcttctttagaagaaacccctacttcagaaacaagctgattgtcaaggaatatgaggtaagatcctccggccgagtggtgtctctttctactccaattatatggcgcagggggcatgaaccccagtccttcattcgcagaaaccaagacctcatctgcagcttcttcacttggttttcagaccacagccttccagagtccgacaaaattgctgagattattaaagaggatctgtggccaaatccactgcaatactacctgttgcgtgaaggagtccgtagagcccgacgtcgcccgctaagggagcctgtagagatccccaggccctttgggttccagtctggttaacatttgcccttgggaatactcctgcacaaggtctcctaccaccttctgctggacctgtgcttgggcatcagcaatgagtatgccttctattgtgctttgtttttgctgacttttctgcaccctgtttcctttggatattcagttctctcaacctcaagattgagacggtggtgggtatgcttctccacttccatatgaccttcatgctgttctggaatatcacatgctacgaggtcatccttcacactacttgtaagccaagcaaatgatactgtagattgtactgcctttatctgcactgcttggaccctgtttattcccagggcctctgaactggttgctgtcacttggatttctagctttgggagcctgttccacctactcagctctgcattgagcagtatgggcacatgccctgtggacagttactggacgttaatgaactcagaggagaaaagcagtg

SEQ ID NO: 122554 - DNA, 1147 bp, Homo sapiens
aatgtgcctgagaagaggataggacagttcttaaatgcttactctatttcctattgtttataacagaatacttgaatctgggtagcttaagaagaaaaggaatttattttttacagttatggagcccaagtccgaggttgaggggctgcatctggggagggctttcttgccggtggggactctacagagctccgaggtgatccaggacctcacatggtgagggagttgttcatgctagctcaggtttctcttcctgtgaaactatcagtctcattcccgtgattacccatgaatccattaacctattaatccatgaatggattaatcattcatgagggtagaggctcatgacccaatcgcctctaggtcctacctttcaatactgccacatccacattggaggtaaagtttcaacatgagttttagaggtggcagttattcaaaccatagcaaatatgttaaggttttctcatgggattatgttatcttcccctatagtgattgctagaataaaactctctgggagcaccaaattaccagcaaatgtttgggtgacacagcaaaattctttatacctcaagttggtgcccaacatggcaatgaggcaagttatatataagcccagagtactgaaaaggaaaattattttcctatgaaattcatatggtgaattagaatgggaagtagagattaaaatcccaaactcttgaggtgtactgatcgatgtaccatttgatgataacaataatgaagaatgtatgtttcacaaagtcttctcaactctaatgccccattctaataggaaatatgcttttaaaaattaaactgttcattaattggatagtatgtttaattgaaataatttttctttaaagaaaaatctttcttcctagctacttgggaggctgagatgggaggatcacttgagcccaggagttcgaggctgcagtgagctatggtcacaccactgcactccagcctgggcgacagagcaagatcctgcctcaaagtcttttttatgtgtatggtaaataaatgtatcccaaatttctatcatctcactttagtgtttcacaacttctagttatgtatagaagagtggcttgattagttgatgctgaagtcttgcagaaaagaatcaaactag

SEQ ID NO: 122555 - DNA, 1080 bp, Homo sapiens
ttccttcttaaactattttgtgaaaatttaagatccacctttttttctaaggaaacaagtactgttcagggtggattcatcccattatctatgtgctttgttacagtcccaagatattcaccattaaaatttttagacttcatgtggcttgcatagaattattctgtgtaaaatttaaattaagaaatgtcatttgaatgtctgctgtggtaactttaaaagttgaatttcatctcaacttgttaaatttcatcttgcaaatttcagattgttggaccacttccaatatctctttcttaagaaaggttatgtatggcagtatttagactacaaattgccataaaatcataaaccctgcacataaggaagtggagttagtggtgttagggtggttatattacagatcctagggtggttatattacagatccttctttatgtgcttacacctttttttcttgttggtgaagccactgatgtttggttcagtgattgcaagttttagaaaagataaatctgtgttacttgggaatgaatgttttaatatataacttttcccaatgtacttttgaacttggagagtcagatgaaaggatattttactttagtgatagacatactgaaaggatttagtcattgagtaagtatttgccaggtacttctgtgtttgaggggatgtctaggtggagggaagaggggaaggcatgcaaaataaatataacatagtttccagccttgaggagctataaaatctggttggagaagaataactgaatatgaaactttgtgagaacaattaggtgccgaatggacataaatgcagtaggattgcaggaaggaagaggttccaagggcagaagagggggaatgaattgggtctcagaggattttatacaaaaaagaggaaaggagaaagcactacaagcagatcagccagcagagcaaaggcacaagaagaggagcaagcagatatggagcagctgccaggtcaaggagaacttcagggaaaagtcatgggaattcacttatctccattgatgacattctctttttctccttcctttctttgtatattctttat

SEQ ID NO: 122556 - DNA, 1665 bp, Homo sapiens
tttgggtggagaagtatacaagcgagagagaagtatatgcctagattaggagatgccaagaatggggctaacactatgagagcagtttgctaagacagaatgaaataaggacaacttactcacctagataaggatatagactccgcattaaacattcatgaacttgtgcatgcacacagacatgggcattaaatatctggccatatttcaggccctcggagtttttaatttttttaaataatcatacctattaagcacctttcatatgccagtcattgctctgggcacctttctcatattatcattcatcttccttacagtcctgggagatagatatttctatccccaatttacagatgtggaactgagttggaatatttctgcagcagcatgttatttgtcctgtgtatccatggccagcaattcagaaattattctcttgttctacataatatatgtagtctccagcagtctactagagctttacttttcctcaaaaattatttcctgactggtaacatttcatagacttaaatatacaccatattaagttttttttagcaggaaatactagcaattgtgtagatgtagaagaaataataattacagagtattcttttgaattctctagataaaagttaatagtacagaaagattgtttaaatttacaaatagtaacactaatcaagtccttataccaaaccattaaataataattacaatccttgggcatgtgattagacatggggacatgagggaatcactttaaatttcaaaacagagcaacctaaataaaagtcagcacagaaacagtcattcagcagaaaggaaggcttggctggtctggacatggatagactagggagagtgtgaggtgcctaatcccatgcaagatgggccgaaaattttgagatggcatttagaaaaagacccatagaggactcatgaaatctatccttggaatgtcaggaaataatgagagacattcaggcagtggtctgcgattagaggcatgttagttaggcatgctaataatgggatggcgaaagttgggggtaaagcaagtcacctagacctagcagcctgaggtggacttagtgggagctttgtgccttgggggaggctgggaaggcactggccgtgatcacggctctcagtaaactctgtgataatcactcagagtaacctttagagttcaaacattgtagtacattttatctccatatgatttgtcttcctacacaaatttttattgtttcttttaatgtaattatatttatgtagctgtataactatatgtttagttatctctgaggatttaaaagtttacctcttgacgcagttaaatttatccaactaatatatattttttaagtgtttactaagtgctaggtacacttttatgtgctggagatatagcagaaagcaaagtgccctcctgaagcttacattctagatgggagagccaagcacacaaaataaataagtaaattatatagtagattagaaggtcataagtgccatgaagagaaataaaacccaggagggaattagagaatggtaatggttggacttggtaatgatgtcatttaaataaggtagtcattgcagacctcactgagagagtgacatttgagcaaaaatttaaaggggatgagggagcaa

SEQ ID NO: 122557 - DNA, 1345 bp, Homo sapiens
atgttaggaaaaggagataagttacagtgaaagaggctgtagtaagaaatacaggattttctggttttttgtaatgtctactcagattcccagatgattgttcattaccagcttttggttattgtggtttatgtattaatgtctaaaaaaatataccatgtgatgttttttgcatgatactatgtgagaagaataccaagaataattttttccttacttgaacaaatattatacattttcccttagtccaaaattctgttttccataatgaatacaattctgatgtagtatgtttaactctataaaatcagaactttagtaattttcttcctaattaaatttttttgttgtatttttaaaaatctaaattcataagctttattttcacatatggtttctacctcttatatgtttccacacctgtgccatgttcccttggctgacagacactttttttcctttttatctcacgtaggatctttcgaagatggtttggctgccttggagatttggagatctgatgccacgatgaggactcacacacggggggctcccagtgtgtttttcatatatttgctttgctttgtgtcagcctacatcaccgacgagaacccagaagttatgattcccttcaccaatgccaactacgacagccatcccatgctgtacttctccagggcagaagtggcggagctgcagctcagggctgccagctcgcacgagcacattgcagcccgcctcacggaggctgtgcacacgatgctgtccagccccttggaatacctccctccctgggatcccaaggactacagtgcccgctggaatgaaatttttggaaacaacttgggtgccttggcaatgttctgtgtgctgtatcctgagaacattgaagcccgagacatggccaaagactacatggagaggatggcagcgcagcctagttggtagatttttgtcttgttcttcttactgtggtaactctgcattagaaagaaacaaatccatatgacatctcagtggccagatcttcatgtacctctttgtgtatgtgtgtggggggaggtgttatttgttatttgtgttgccagtcttatgaatggcccttagtttcaaaagatgtagtaacttccatgtttaaagttagaaggaaaatatttagatgcagcctaatctaaagaaaaaataatttgctgaattgagtaaagagtatcatcgtgattgctgagaattctttcttccatattcagcatgtatatattactatcatctggtgttaggtttgattgatcccaagtagttaaaacattttgcagcaagacatttcaagtaattaagacttacttgc

SEQ ID NO: 122558 - DNA, 2481 bp, Homo sapiens
tttgattaatttataattaatgcttcatatgcttccaaacagatatgggatgagttgattaaacaagggattctacagatgtttttactcatgcaatttttaaatacacatttatggttcaattgcaataaaagaatttacagattgatgaaatttttttaaaaaattacataagctgcctcttgtcatagggctagagagagctcattttaaatgcttagaaaaaaatcagtgaatgcacctaatgctatgatgaattacatcttaacatatcacaggggtgaaggatggtggtttgcaagctttccgataaatttctggaattttgtaatgaaaagtattatgcaagagttggcattaaatccatatcagagctgatattttaggcctgttgctaagtacatgtagtcattttgaagtttataatattgtaggttgaaaagaattttttatttgatttatttcaaagcttagccatgtatgtagttgtttctgactttgactgacattaactgatcttattctattcttgacaccaagaaagaaaagatgtatgaaaacttatctgatatttgaattaccagattacattatcaaatgctacagtaactcactgattgatttgttcaattagtttaaaatagcaaccatatttacattatttagaaagaaacctttgtcatctagaagggtactttaaagtcctttttgttttagataagtagattttggcaaattaagaaattgatgtaaatgttccagagatagagcctgtagagaaccgtgtatttaatctcacaagaaagtaatggactgtgaaataccatttttgatggagattgtttagcacaatacagtaacatgagaattgtacaagactagtacagttttctcattataatgtaaaatatttgggtatataaataccaatgaatgaatgctgccattaggatgagactccttctatgaaaagagaaataaataacttgaaagaaatattataatttttacatagtttccacaagtccagatttattgatcactggaggtgtatagaaacttactaggggtctagtactttattcatggcaatattgatagaaataggtataactctaggccattatctagtaaactaaaagccaatttttgacttaatagagctgaacagttgacttctttctcttgaccttcaaggtaaaatcttgagaatttacctttacatctggtttctagttgcaaaagtgaacttggcttagaaagttgagctacttgaacattttgttttggcaggtactattattaagttgtgttgtttaataacttcacagaaattttaacttcttaaaaactaccacacccaacccttagacttttaaactttcatttagatttgtggttgaacacaattacaacacaattatgtgctgtaataatttaaaacaatgttcagtgattttacagttcaactacctctgtttcaattgctccattaaatcatattctcactatgtaccaagaagtacacaatgagtattgtcattgacttaggatataattcacctatatttgatttcagaaaaaacaaaaacaaaaaactagctgttacttacaaaagagatcaataattgatattatgaaagtaaaaaaaaaaaaactttctacaatagcttcatcaggctgaatgcattttccattttctttgaagagcatttttactcttttgaaagccagttactaagttatgttcattcactgattcatttgatcaacaaacgtttattgagcatctactgtgtatcatgcactgtgctagggtgctggggattcaaagttgaagaaatagcccagtaattttataatttttacctatggcaaagggtacaaacattgggttcttaaagcctaagctaaggatattttctctgctcagaattgagtgtgtggatcatttcataaggagtttccttagttttcattcatgacttaaacatttgtatcatgctgcaccctagtgtggtagaaaagcaccaactctggagtcacactgcctttgaatcccagctccctcactcttcagctatgttaattttcttaattaactttccagattaattttcttaatttgcgtgagcattagtgtcctgatgtataatgtggcagtaacaaccctatctaccttatagggttgctaggaagattaagtgcaataatcaatgtaaagtacttagcacagttcttgtctcatagtaagccctcagtaaatgagaataatgacaataatggtaattattgatgctgttcttttacctacctagtaattagaccctgtttggtttataatttggtatatgtaggctccaaggaaatagtatccatttaggattttactaatcttaattgctctcaaaactagaacatctgtttaactcataaaattttccccttggctttttccattaaaacgttcattgatgctcc

SEQ ID NO: 122559 - DNA, 1042 bp, Homo sapiens
aggatggatatatggggtagcccaggctacttttttcctaatctagcttaatcctttggtagaattttgcatgtgtagaaaaatgaaatgactgcctgtccaccaggcagcctccctataccttatgaatcttagccaagctcttggtagatgggttgctatgagcttaacattacactcctcagcaaattcttagtgattttccggagctaaaaacaaacaaacaaaatgtactcaaataattattggaaaacattacagatcctgaatcacttaagaaaggtgcagttaagtttaccatatttcacttaataatatgggaagatgaatgcatttaaaagaggtttaggataggattgtaactgagatcacttattgttcaagccctggttgataacatagaattatacagcatccatttccaagcagcaggcttttcatggctccttgtcttaatttgtaaaccctgaggaacaggtctggcccagtggtctttggatctgtccttgcatcttggctctgccattgtgttagccacatgtcctttgacaggttccttacactctgtaaacttggttcttcatctgtaaaatatgggttattcctcccacacaaggtcatcccaaggattgaatgaagtaatgcatataaagctcttagcattatgtgcctggcacatagttttactaaaaagtttgttattattacacaggaatagttacgaatatataactttattctcgctaggtttcttggtacacagtactccattttagctatgttgtcactctggagttgtgtttttgaaaagtatttgttgtgactctttagttctctctttatagtatttttccttacttatcatcagacagaaaataaatcacagaggaaagaaattacttcactcttgcattggagccagttagctacaggaaatcaggagaactggtgagggaaacaaagaaagttgaacttttggacagagaagtaattgtgttttttttttttttttgcaacagactgagtattaaattcttgcctg

SEQ ID NO: 122560 - DNA, 1111 bp, Homo sapiens
ctgctgcagagacttaaaaatactatagaagggtaaaataacttatgaggctttttacaacgatcaaattatttaaaatttacagaaacacacagccattgggaattcacttcttgaatgccgtttattaagcaggttgttgccatcagtgttacaaatggattcttgggcaggaatcaaggtcaggtgccctgtggtgggaggaagcagatgaagaggacccgagggagaggcataggcaggtgtacagattagttgagcagcccagttacagtgccattggacagttgtgtggtgcacagtcacaccctaaataggatgttctgctcacctaaattgttaggactcaactaatttaaactcttccccatctatttcaaatgcaggtgaagataaagttactctaataatgcttctttctaacaataactttaaaaatgttatgacagttataaatcatacatgattgaaaggaaatccgaagttaattttctttgtaagatatgtttattgactctaagattcagtattggtatgaccctcaagtcatctctgcgatgggtgactcacttgctcgcctacctcccgccctttcagtgtcatttgatacctttttaaatgcaacatgggcgggctttcagagttgtcagagggaactgtgctcaaggccagaggagttctcgtccctctttaattggggtataaatcagtgcccctcaccccatatgaacaaaggcaacatgaatatattaagtttcatgtagtctttacaatctgggtcttaaatttttctaacataaaaatctggcaagcatgatgtttgaattttgtggatgtcttgcctcattatcataagggaaaatgttagttggcaagtgccgcatgtatgtctgtattctctttcattgatacttcataatcactttttaaaagttggctttattttttggatgaaatattcacgcctaacaccacttaagatgtagggtcttgctgacattaagttcatgctaatgataacttgagagtaataatgacatgagtatgttcatggagtcctttataaagctgggtagttccttttaccttaggtatcttaagaatggctttt

SEQ ID NO: 122561 - DNA, 1043 bp, Homo sapiens
cccagtggtccagttggaccatgtggcactggtattttcaactctgccttcagtttgggcagtaatgagtttgcagatcagccctgagctggcctttctgcctacagactgatttataccttgtcttccacctttctctccaaccctatccagactgtatgatccaccttaacttcttccaccattacatgttctctagcccctcatccaacccaattcctatagttactttttatttaattcattggtttgcagtcataactgggttgcctggttttctgaccaggagtgtacatcttctagattcggctccaaagaaacttctttctagaaaatttccagattccatcttctatacccaccctccagtgtgattcatatgttccaaggaacccatgcaaaactgttataggttgttttgcctgcactgcaattcttggtttatttgtctcctctactggcacataagcttattgagggtagccccagcatttttcggggttccaagagccacatatggtatacctgccacaaagacactaattaattatattgaatgaatggatggatgaatgaatgaataatctgtcttatttttattgagagtctaagcttactgagagcagaagtcctggatctgtatacaactttgaaactgatttggtgccctgcgtactgtggctgctcctacttatctggtctcactttcactctgaagacgtgcctgtcatcagccgtttgtctgtcagcctgtaatcacagagacactgtacctttgacgtacttggaggccagtaggaagaatgtcaggatttgacatcttggtgcatagctcagcagagaatctcagattacctggtctttgaagtattcctcctgcacctggccttctctcctccctgatcccttgaattttggtgttcatcttcttacatgcatgtaatgtccatgtgtgctccttatcaggtaactacaacagagttttgtttttattcactttaaagccacctgcttcagtctttgaaatgaatggcggtgctgtt

SEQ ID NO: 122562 - DNA, 1196 bp, Homo sapiens
agtagagacggggtttcaccatgttagccaggatggtctcgatctcctgacctcatgatccgcccaccttggcctcccaaagtgctgggattacaggcgtgagccaacacgcccggccaatataagtttattgtatacttgctctgttctgggtattttattaggcattggagatacaaaaatttcaagacgtgttatgtatctcttttgcctggagttgttggtctatggaagatataaatactaatactattagcatattaatactagtagtgggataagtgctgtgactgggaaactacagtgtgtaatgggaagatctaggaatactttgcccaacattggagtgtcagggaaggctttcctgctgagtcctgaaggacagataggaaccagccacgtgaaggggaaaaaggagccgtgcttgactgttcaagcacaagtagctgctgtacaaaggcctggagataaaagaaagcagagtgcttttgaggaactgaaaatttagtgtagggaggaaactagcaagtgttgaggctttgggtagagagccagatgctgccaggccttgtctactatataaaggagcttggacttttttttacaagtactgtgaagccactgaaaggtgtaacagggcagtgacatgatcagatttatgtatgtacgttaaccttttcattgaaaaataaaagtagaatattatatgaataaatgtgtagctgataaagtattttgacgcaaacaccctggtaagtacaacacaggtcaagaaataggactttgccagtcactccctgaagccccttcatgggccacatcccagtcccagttccctcccttcccacaaagactaccctgatgccccagtgcctacaggcgtcatgtccttgtgttcccttatagttcatccaaatgtgcatctctaggcattatcatttaatcttgctcattttttaaatgtcttttaaggcttcaaaaaaaatctacaggccgagcgtggtggctcacgcctgtaatctcagcactttggtaggcagaggcaggcggatcacaaggtcaggagatcgagaccatcatggctaacacggtgaaaccctgtctctactaaaaatacaaaaaaattagctgggtgtggtgacacacgcctgtagtcccagctactggggaggctgaggcaggagaatggcgtgaac

SEQ ID NO: 122563 - DNA, 1063 bp, Homo sapiens
gcctgggcgacagagcgagactctgtctcaaaaaaaaaaaaaaaaaaaaaaaaaaaaaaaaagaagaagaagaatcttgttgtgggagtagattgccaatgtcaaaccaggaagtcaagtaggcctttggtgtttatctaaatgaaaacctagaataggaaataattgacaagttccagtaataaataattagcattcataagacttgacagttgtatttgagggccaaaggagacaaagaattttctttatgggatggtgggatctctcagtgggcttctaatacttggagctattgaggaatgctataaataataaaggtttggatttggatatacagaattgaagtgcctgtgggcccaagaggagatatccaatttatatctctcaagctttatttttagctgcttcctgtttgccagtggtacactgtaacttaagaatgggtgtgtgtatgtgtgtgtgtgttgtgcgtgtgtgtgtctcagtcataaaaaaatatatccaatatgaaatatgctttcaggtacaatatatatcctttctgttgatgatagaaaaatgcagaaagtccaaaggagatcgtatttagttcaaattatcctgctacaataaataaatgaagaatagctggaagaatgagaaatcgaggtgctgatacagcactgcagccacgtgggtgtcctcaaatcactttctggagctgaagccaaagaaacattgtgcaggctgcactctgggaggagggcatcagcttgagtgagtcgtgctgctgcttctcaagttgaaaaagaaaaaaggttcctgatgaagtgtagatagctattagggcttgtaacaacttagtgagcaatttttagttcatatctgtgattcatttacagtgagttcagtattacaagaaaaaaattgggaaatgaagagataagaataaataaaatctgtatgtattgctaatattttatattaacttcagcatcttcccattctaaatcataatttctagaaaccacatgaagtttactattttacctttttccaagagcctgttgatatgagaaat

SEQ ID NO: 122564 - DNA, 1028 bp, Homo sapiens
tatgattacattcagcatttggggtcaacttttattttcagtatagcagtaactctagatctaaaactggggaatgtgtttaatgcctggggcatattgaagttagctcacaagtttggctcataattttaatttatttattctgtttttttggcaacataggagataactataccccacaacattttttatgattcacaaagaaaagttctaaattaacttttatccactgtactgccaaattactttttaaagacatattctttgaaactgtattcccaggacaaaaaataaatattatgggttcagggtgttgtcacaggcattatttcattatttctcttgaatgtaagtggcttcaaagacaaacaaaattgttttggaggtcaagggatgtttttcttgtttttttttttccacaccatgacaaattatgctttccttcctgaattgactgagcccatttagtgtcttcatgcctgcccccttcatacaacaccatctgccctctactttgaacattctgaacttctctgatctcctgggttcctcctgatgatctcacagtgagaattttgtcttagtcctggctccagaccctctgctgggaagtgcctgggcagcctggatttcaacacagctcctcccactgaagcagccctccatgccagcagcatgcctctgatgggtggcttattttggatcacatttaccctctaagacagtggctttgaaactttttcactgtgacctacagtaacaaacaacccagtacagacataactttttttatttgtttctagtttttaattttatttttgtttctaattttattacactgtttatttttatttcaacttttagatttagggggtacatgtgcagttccatagtatgtatattgtgtgatgctgcaatttgggattcaatttatcctgacacccaggtagtaagcataatactcaataggaagtttctcaacccttgtttccctccctccctcccccatctagtagtccccactgtct

SEQ ID NO: 122565 - DNA, 1059 bp, Homo sapiens
agaaatcagttggaaagaagacaggtgtgaaatgtttaaatgattacaccatagttacagtaaccccagagagtgaaataaaagataccatgaaaagcgttatggttaaatataaaatgagtatattaacttggaattcaagaaagcagtgttctttcagtaattttcttcatgtaactttgaagatggataggagaacttaaggggaaattaaaaaacattccaggcaaggtattcgggtggcagaaaaaaaatacagggtatagcttcaattaacagtatcagtaccttgtattcacagagagttgcagtttacaaagtattttggtagacattgcctcatgtcttctgaagagggttgttgtaaggaacaaataaggaaatttaggtaatgtggtatcctgggaacagtgatctgattttaggcatcagtcacattggtatctggtgggagatggaagacacacaggaaaaggatgaagataattagaattttaaaccagaatggtagagaatggaaattgaaaactatccagaatattgacatatcaggtatgatgctgggtggcagaagaggccagggtatgatgatcagtcacctctgcatacccaagcctgacagctgcattgcccccattagtcaggagccaagtcttagcctgggacctatatttaggcccagagctggttagatctgggcctctggaagccccacacctgccacatagtaggccatggtagcgtggtcaacatgtttgtggaagtaaagcaatgtggctacacccacaccaggaggcattgggcttaattttattctcaagggttgcgtgttttaaaggaaaaccttaaatctaaagacctaggttgagattaaagttgtgttcatttttagtcatgtgccagaggtcttgaacaagtcagcgtttctgttttggggcaatgatacataattgggttgttaaaaggattaactaagattctgttcagtgctgtgtaagttataaatgttatagaaatatgaggagttggccgggcgcggtggctcacgcttgtaatccc

SEQ ID NO: 122566 - DNA, 1049 bp, Homo sapiens
gatctccgctcactgcaagctccacctcccgggttcacaccattctccttcctcagccccccaagtagctgggactacaggcatctgccaccacacccggctaattttttgtaattttagtggagacagtgtttcaccatattagccaggaagaacttcctaacttacatcatggactgtcacaacctggattacaagatgttatttatacactgacaagttggagttttacaaaacgcgatttgtaatataaactagttagataactcagagggttttattggccatatttttgtttatgctttgtcacaggctttagtcattgcttccatgtgttttcatccttcaggatatcttcaagaagcctacttatggaccaaacaagttctgaccatcatggagaaatctctggtcttgctcagggaggtgacggatggctccctctatgaaggagttgcgtatggcagctacaccactagatcactcttccaatacatgtttctcgtccagaggcacttcaacatcaaccactttggccatccgtggcttaaacaacactttgcatttatgtatagaaccatcctgccaggtatagtgaggagtcagaagtgtgaaaacattaaactattgtaattttttctgattatgaaaatgagctagactaggcagagaaattaggtccttagagtttgtcatattgaaattaaatagatttttttaatcaaagaaaaattgaattcaagagttgcatatagccagaacattttggaggctaatgtgagtatttatgatttaggtattataaagtttggagggttatggattaaatacaatttctaggcccctcaatactttttttttatatatccaaacttgagtaatatacgaactcatcttcatcattgcaagcaaaatataaacatttgtgattacctgtcagttttcctttatatgtgatccctgatcaatcctattttaatttttggttttcagttttttctttcaaactatacagacatgattcaaaatgaaagattacacctacacat

SEQ ID NO: 122567 - DNA, 2968 bp, Homo sapiens
ggcccagtagtttgaatggtcactctgacatcatcaagtgaagatagtccatgtagagattagagcagaaatcatttcgggcccaaacccaaggatcacaaatgataaagaaatattcctcttccagtcaccaagggtttccctttgtgcatactggttgtccttggatatttttagaattgtccctaatatactctgcactgccagtgctctgggtagcatttgtgtgtcgcatcttccacattaccatgttatgtgttattttcactgccatcagaaaaccatttaatttttcaaaattaatttcaggtatgatggcagcttgaaatcggttcctcctccagactttggcacccctacactgcattattttgaagactggggtgtcgtgacttatggaagtgcactacctgcagaaatcaatagatctttcctttccttcaagtctggaaaactggggggacgtgcaatatatgacattgtccacagaaacaaatacaaagattggatcaaaggatggagaaattttaatgcagggcatgaacatcctgatcaaaactcatttacttttgctcccaatggtgtgcctttcattactgaggctctgtacgggccaaagtacaccttcttcaacaatgttttgatgttttccccagctgtgtcaaagagctgcttttctccctgggtgggtcaggtcacagaagactgctcatcaaaatggtctaaatacaagcatgacctggcagctagttgtcaggggagggtggttgcagcagaggagaaaaatggggtggttttcatccgaggagaaggtgtgggagcttataacccccagctcaacctgaagaatgttcagaggaatctcatcctcctacatccacagctgcttctccttgtagaccaaatacacctgggagaggagagtcccttggagacagcagcgagcttcttccataatgtggatgttccttttgaggagactgtggtagatggtgtccatggggctttcatcaggcagagagatggtctctataaaatgtactggatggacgatactggctacagcgagaaagcaacctttgcctcagtgacatatcctcggggctatccctacaatgggacaaactatgtgaatgtcaccatgcacctccgaagtcccatcaccagggcagcttacctcttcatagggccatctatagatgttcagagcttcactgtccacggagactctcagcaactggatgtgttcatagccaccagcaaacatgcctacgccacatacctgtggacaggtgaggccacaggacagtctgcctttgcacaggtcattgctgatcgtcacaaaattctgtttgaccggaattcagccatcaagagcagcattgtccctgaggtgaaggactatgctgctattgtggaacagaacttgcagcattttaaaccagtgtttcagctgctggagaagcagatactgtcccgagtccggaacacagctagctttaggaagactgctgaacgcctgctgagattttcagataagagacagactgaggaggccattgacaggatttttgccatatcacagcaacagcagcagcaaagcaagtcaaagaaaaaccgaagggcaggcaaacgctataaatttgtggatgctgtccctgatatttttgcacagattgaagtcaatgagaaaaagattagacagaaagctcagattttggcacagaaagaactacccatagatgaagatgaagaaatgaaagaccttttagattttgcagatgtaacatacgagaaacataaaaatgggggcttgattaaaggccggtttggacaggcacggatggtgacaactacacacagcagggccccatcactgtctgcttcctataccaggttgttcctgattctgaacattgctattttctttgtcatgttggcaatgcaactgacttatttccagagggcccagagcctacatggccaaagatgtctttatgcagttcttctcatagatagctgtattttattatggttgtactcttcttgttcccaatcacagtgttagcactgaagctataaattacctggtcattttgtgatcacaagagtctatgcaaaaaaaaaaatttctttaccccagattatcagatttttttccctcagattcattttaacaaattaagggaagatattttgacacaagaaagcaggaacgtggagaaattggagcaggaaaagaaattatcaaagcaatagaaatagcttggtggtcctatggtgtttttggaagtatttggcattgctaattgagcagtccatatagtactacttttagaagaaacaaaaagtctattttttaaagtaatgttttttcttatgagaaaaaggtttagatagaattgggttttattaatattaatttaatgctattagcaatttccatatactatattgtggaaaagactgaagaatacaattctgagaaatataaaaaaattttaatggtatactcatgttgaaagataaatgttgctaagtcctggtatgatggtgtgagcttccttggggaagtacttcttgagttatgtaactaacaggatgttttactacagatctggatggctattcagataacatggcaaaaaatgatagcagaagatcattaaaaacttaaaatatattttattagaaaacatttatctatgaatgaatatttccttgatgctggtctctgcacacatatgcttggttacttgcatgcattcattggttgttcaataagtgagatgattacagataatactgtattttccttatatggaaaaccgttatagacccaataacaactaaacctttcaaaagaaaatattttctattatgaatgttgattttcataccaaagaagatggagagtctaaaatttggatatgattcttatgtttttttaatagaaaaccttcttcaa

SEQ ID NO: 122568 - DNA, 1053 bp, Homo sapiens
aaaaattaacaagcaacaaatgaaagataaaactcctacatgtaataaggaaaaaatgcagctaagaaaggtgaaggggtggatggggaactgtttagaaagactggtcatagaagatgtggtggagacttcctgtactcgtccatgtcaggttctctgcctttaaggcatgggaaagaaccatacttcctctttccattgcagttcggtgaaaccttgtggctagttctgaacagatattggtatttgaagcagggtgctttattaatttaaaaaccctaaaatatgtggcatgggcttcgcagttcagtggtggacagcatagaaattgataatggaggctagatagatgacaattcttgttatgtggtggttggtaaagccaacttctgtattaacttggaggaagattatgtagctaaagaaaataagactctaagggaaaggattggaaaataatgtgtctactgtgtgttagcaactactatttttttaaaggaatataaaattatttattaaccactgttcaccagtatttacaataaagtaaacaatatacagttgaataacattctgattactacaaagttgttcttcctggcttttgctgaaccagtaaagcaaagtgaagattgagcctacatgtaaggaatgagttggggtaaagaaaaaacatgcaggtcaataggttagattacaaaaggttgttcacacatttgtagcagcaggtcctaaactgccaacatctctaaccatctgatcaggtttctatgagccaagtcttacatattccattcatcattaccttttagtcaatgtagtaacagggatttcaacattttgttagggaatggcacactagggaaattttttaatgttcatttaatttagttttgtttagctagttaaaacacactagcatttgtctagtttcctcatctggatgaggaaaactgctgtgatggcagtgataaaatttttccttttaggaattttgcaaataaaccactgcaattatagatgatttaaaattatccaatttaaattgtccta

SEQ ID NO: 122569 - DNA, 1034 bp, Homo sapiens
taagtaattctaaataggacaatttaaattggataattttaaatcatctataattgcagtggtttatttgcaaaattcctaaaaggaaaaattttatcactgccatcacagcagttttcctcatccagatgaggaaactagacaaatgctagtgtgttttaactagctaaacaaaactaaattaaatgaacattaaaaaatttccctagtgtgccattccctaacaaaatgttgaaatccctgttactacattgactaaaaggtaatgatgaatggaatatgtaagacttggctcatagaaacctgatcagatggttagagatgttggcagtttaggacctgctgctacaaatgtgtgaacaaccttttgtaatctaacctattgacctgcatgttttttctttaccccaactcattccttacatgtaggctcaatcttcactttgctttactggttcagcaaaagccaggaagaacaactttgtagtaatcagaatgttattcaactgtatattgtttactttattgtaaatactggtgaacagtggttaataaataattttatattcctttaaaaaaatagtagttgctaacacacagtagacacattattttccaatcctttcccttagagtcttattttctttagctacataatcttcctccaagttaatacagaagttggctttaccaaccaccacataacaagaattgtcatctatctagcctccattatcaatttctatgctgtccaccactgaactgcgaagcccatgccacatattttagggtttttaaattaataaagcaccctgcttcaaataccaatatctgttcagaactagccacaaggtttcaccgaactgcaatggaaagaggaagtatggttctttcccatgccttaaaggcagagaacctgacatggacgagtacaggaagtctccaccacatcttctatgaccagtctttctaaacagttccccatccaccccttcacctttcttagctgcattttttccttattacatgtagga

SEQ ID NO: 122570 - DNA, 1142 bp, Homo sapiens
gtcttccaaatctcaagtcataggaagagaaaaacattcataaaattctaggtttggagatttgatttgtcggctgaaacctctttctgttaatgttgattccttacactggaaaattcctagactattatttgtatgagtgagaatttcttttctgattttcaatccaaaccacatggaaagaaggttaaaatggagcccgtgcactttgaatttattctcagcatttaggctgcagtatcacagcccaatttccaccagtaggaggcattatctaaacatgttgagaaatattcattcctaaggaatgacattgtttccttatctggctcaattcagtctgagaaggactgttgtttctgatgaagaaagagctccaccctcggccactgccacagctgctctgccaataacaaaggcacagcattttccctctgtgcatctccaacatggatgcttttcagggcattttaaaattcttccttaatcagaaaactgttattggctacagcttcatggctctgctgaccgtgggaagtgagcgtctcttttctgttgtggcttttaagtgcccctgcagcactgagaatatgacctatgggctggttttcctctttgctcctgcctgggtgttactgatcctgggattctttctgaacaataggtcgtggagactcttcacaggctgctgtgtgaatcccaggaaaatctttcccagaggccacagctgccgtttcttctacgtcctcggccagatcactctgagctcattggtggctccagtgatgtggctttctgtggctctgctcaatggaactttctatgaatgtgccatgagcgggacgagaagttcaggactcctggaactgatttgcaagggtaagcccaaagagtgctgggaagaacttcacaaagtatcttgtggcaaaactagcatgctacctaccgtcaatgaagaactgaaactctcccttcaggcccagtctcaggtaagaaaagacaaactcgcctttttctctcagcatgagctcgaagtattctctctgtgctcctttcagccagggctgtctgtgtcctgtcagaatattttgaaactaaatggaaactgaaacatgatgcagcattgagactatctcaggaaa

SEQ ID NO: 122571 - DNA, 1101 bp, Homo sapiens
agataaaacatatcaggctcccaaatgtcttgtgtcttttattgaagaagggtataacttacaactcttatgacagaatgattgatttatggtgtatgtcctcagtcaccaggctccattcagtcagtggcaggcccaaacacttatcattgtgtgagcttctcctctctaaacacaggtacaaggaaatcttgcacatcatgtcatagcttaggctgagcacactgacctgctgattcttcatcagaatgagaaggacctggggctgattcctgtgggaagatgcataaggaatgtgggcaagagaacttgtatcaatagcaggtgctgactacagaggttcagataggcaggaggcagcatatagtccagaccaacaataggtgtacatgtgcctggaggcggaaaagaacattcatccatgggtggggcagataaaaaatctagctggatgactctctattcttaaggaagatagaatggagtagtggaaagagctcagtcttggaattgtctggcgttgggtttgtatgctgatgctaccaatcaccagctatgtgacctagaactagtggttcgacctctttgagtcccagttttctcatagttagtggtaatatcacttactttggagagttgtcggaagatttagagatgatagatacaaatgggcataaagcttctggtacacagtatttgttccaagtcaatgaggaaaactgccatggtttgggggaggacatatgcaaaataagacacttttgagggctggtatggaagcatccaccaagctctagtttgactctgggtactgtgaattgagggaaagcatcggtcaatgcaaacgtcatgtgaaagggggaaggggacctgaagctgatggaatagtttataattcagctggaactggctcaggtactgagatgagatggcgtacagaagcctcagctgtggaaaaagaggaagacagacgatgaaggaaggaggaacatataaggtagccaaccacaatccattcagggactttcacttgatggtagttgtgcctcactcattaattataagtacagaaagatattatgagttcagtaacacatttac

SEQ ID NO: 122572 - DNA, 1015 bp, Homo sapiens
cctgaaatgggtgacattagtgctacaagtaaaggaacattttgttggagaagtaaaaatgatcaagaggaaggaaatcaggcctttgaaggaaggtgcaaagagcagggacagttgtcttacactagagaagggtgaaggtgatgaatattctcctcattgacaagaaagaatcttgcataggagtggaagtggatctttttcctgttcactgaggacagaagacacaggaaggaattcatcagaatggttgataagacatgaaaatcttagagaagggatatttggaaagcagatgttgtacatttttctaataggggagaatcaagcagacttgtttctaacttggtgaaaattgtgtaccattaggaggtcaaatttcgttagaatcttctttactcttttaaagacagaatatggtttctgaatataatttctaaatggggaacattctgggtttttttcatgggtcttttcctgctgagatatgaattcattttctttcctatgctctccatagaacatttcttactcgattcctcttcaaccttttcttttttaatctggagcattgaaagaactcttgttctatttccacatattgaagacttcattgtaaggtaaagcgagtagttcctcatggaagggactcgaggagcccttaaatgcattgggcaaggtgaggagcattcgcaggctacctcctgcagaagaaaagcaacttcctaaggggcctgaacaaaagtctgctttgattccttctttctccttcctcccctcttcccttcctcttttcttttctttcaactaatttttattgagtaaatacccagtaagaagtcctacattaggccccacataaatatgtacttcctattggcatatttaatttggctttcagctctgtaattttcctgtggctaatagagaatggagaatatcctggtcgaggaccacaggtaacaagaaagttttacatgagacttcttagccacctctgggaaggattcatatg

SEQ ID NO: 122573 - DNA, 1141 bp, Homo sapiens
gagatggcagtttcttaaggaaatttcctggaaactgtcagagggcatatctacttccatctttttagtgggaacttagtcatttggtgagagctagctggaaatgaaactgggaaatgtaatctttattctggtagtcagtatgctcagttaaaaatggcataactttaagagtggatattgggagacttttagcagtacttcccaaaatcttttttctttgccgtacttgcttcacgtttttttctctatagtggcaactttatgtagtgtccttggacaaatcacttagcctctccaagcattagtctctgtatctgtttaatgagaaataatgtaagtgaaaataccttataccttataattgtaaaacaaacatatgatactctttactagaaataccatcttagttgttgatttttccactaatatggcttcataatttcttgtctctttcaactaatgattttgatttccacttttttttagctgcacatgggcgttgccacaccttgaaaatgccatctctaacattttggcctctgaaaattactccttcccataacctttgtaccctgtagttcttttgttcccatgcttgtattgaacatgcgtctcatgatttctcatggattgatagttcatcagtttctttctggtccattttcctccctgttctatctggctccccaggtccggtagttcactgatattcttgctgacattcccatatcttttggtttcctcatttaccaaatagttactatatgcatttttttaggatctcagcttggggaaacagacatcagataaatttagggagaggggatggtctgagttgtttcagaaaatttaggagtaatgacaagttaacaagtaaatgagactagggaaagggtattccagcctgggacccacatatgcagaaacaggactctgagggatcagaatatgttcaaaggacaagtgatttgggtattgctagaacatgaagtgagaagtgagagtcatggaaaatgagacttgaccagtaagcagggaccacatcacagagggccttgtcagggacttagatgtgatctgacagggcaatagttcattgcccactttattcccacacagacaatatagtgcatattgt

SEQ ID NO: 122574 - DNA, 1029 bp, Homo sapiens
ttttttttaatcaatagcagtattttttttggaaatcacaaaaataaataaaagtaaattttagtaaagtttcactaaaattgtagaagtccctcatttggttggtggcatagcatgagtaatgaatgataatcagtaaaaagttagtaaaactcatgcagataagaccaagaagtataaagatttcacctatgatatagagccaggggtgtccaattttttggcttccctgagccacattggaagaagaagaattgtcttgggccatacataaaatacactaacaatagctgatgagctaaaaaaaatttgcagcaaaaaaacatgttttaagacagtttacgaatttgtgttgggccacattcaaagctgtcctgggctgcatgtggctctcaggctatgggttggacaagcttgatatagagtttagaattataaatcccctatactacagtgaattaaatagttactacatgtaaagaaaacctcatattttgaaatgaagtgataaagcaatgatttagtattagaaattgatgtgtattcaaaacatatcagttttgacagtgtattagttcgttttcatgctgttgataaagacatacccaaaactgggaacaaaaaggggtttaattggacttagagttccacatagctgggaaggcctcagaatcatggtgggaggtgaaaggcacttcttacatggcagcggcaagagaaaaatgaggaagaagcaaaagcagaaacccctgataaacccatcagatcttgtgagatttattcactatcatgagaatagcatgggaaagacaggccaccatgattcagttacctccccctgggtccctcctacagcacatgggaattctgggagatacaattcaagttgagatttgggtggggacacagccaaaccatatcagacagcaacaactttcttcttaacaatgaatagctatggtggtaaatacagtgaatacaatgcatattatctttgtttcttgtaataagaataaaaaatggactact

SEQ ID NO: 122575 - DNA, 1122 bp, Homo sapiens
tgggctccatactcagtcacacctttgatagcactctagagttccgtacttcattaaccttttgttgtatctgtcttgccagttgggaatcctttagcttctggcctttcagccttgttctggattacctgctgaagaaggttaagaagcagtattgatatagcttactgctaaatgctttctaatctaagctaggcctttactgataggcaacattttaaagtttttgataccttttccttttctgatttcaatgttttgtcattttcacctggatttttgtggtagtttcttaaattatttccctaaacctcttcctcctcctagtgccattacctattctatagtcactccctatgagatggtattcctaaaacccatatttaatcatacaatttctctccttaaaatcctttgatggtttccactgcttatagggagagaatgacctacacaatctttctcaaatctggccctcatctacgttactttcaggtattttttctcaggaatttcatcttccagttagaattattcaaggtcttatattttctctctgcctttgtgtatacttctacctaaaattgcttcatcctggctccttttcttcttggtggattcaaatttatcatgaagatatttcagacttcatttgctccatgatgcctttgctatgtctcctagacagagccagttattctttggccaggacttaattgtattacctacttcagacacactgaagagtgaagatgtttaatgcagagcctgggtattgtttcctgtaggctttagacattgtaactgaaggcataccattggctaaaaggggaactgggtgagaatgaagatcaaatcaaatcaattaattaacaagtatggctgagctttaacgatgtgcttatctaccactactggaagagataactcctcatacaggtcccatgatcagtgataatcaattttctataaccaggagaacatattatccttgtcttcaacatataaatgctacattataaattctagtaagctttttttaataactggatttttagactatgaactaggaacatgaagttgctcttaaaatttcagagtctctactgaccaatgcaaatc

SEQ ID NO: 122576 - DNA, 1047 bp, Homo sapiens
ttggagatttctgtttggtagtgccaatgagttttatcttctatttctgagtataagactaaaggagatttttttttttttttggttgccttttgcagctggaaacaacgtggaggtagatgagtctttgttccaagaaatggatgacttggagctggaggatgatgaagatgatccagactataatcctgctgacccagagagtgactcagctgactaatggactgtccccatctgcagagaggcttgactgccacagcatctgtggctatgctcagagggttatgattttcctttctttttttctaagaaaaaattattttcaggagaatattcttctgatagctttcatcattgaacttaataaactgaccttaaaatttcaaatataaaatgttcaaggcttcttactgttgagcacaaggttacgtatttaaaatcacctagtatttgagagagatcctgcctatagcaccaagactcgaaggtaggctgctgctgtgcacatgagtttatacacaggaaattggaataacttggaatttctatgctggagactttggctacttctggatttcaagcattgtatgaagtgtgagaaaactgaggtgactagcacattaaaccatccagattctagcctccaggcacactaaatttaagtcttgataaaaccaggaggccatattatgatcataagtaagatgaagtttagccttccttttagtccattttgtattgccgtaaaggaatatctgaggctgggtaatttataaaaggtttgccgggtgcggtggctcacgcctgtaatcccagcactttgggaggctgaggcaggtggatcacgaggtcaggagattgagaccatcctggctaacacggtgaaaccccgtctctattaaaaatacaaaaaattagccaggtgtggtggcgagcacctgtagtcccaactactcgggaggctgaggcaggacaatggcgtgaacccgggaggtggagcttgcagtgagccgagatcacgccactgcactccagcctgggcaacag

SEQ ID NO: 122577 - DNA, 1032 bp, Homo sapiens
taactctggatcacatgactcaaaacaggtcattaatggagattcttgtaccttctttttcttaacctttttttttttttgtccttttcctccagcttctttaaagaccctaggcacacaacaaaataaaacttaggaattatggaatctcgggcttgaaaaagaccataaagaccataaagtccaagcatctctccaggatgcttgtgaaaaataattgtctaccagtgaaagcaatcacgtctctcatctgtagatgctattgcttgcatggcttttgagttcccaacccaggcagtgctagggtgaccaccatctcagtttggctgagcgctgaaagttctttatcctaagaaaccccttagtcctcgcaaactcggagaattggtcactatacaagctacctggaacacatgccattttatccaagtctcttaaaatgtgatgatcaatagtctacatatgttctgcccatcccattatagctttaattttagaacttatgacatgtatagatttctatagatttttgcttccagagttacataatgatagggtcagtagaattttagggctagaagggcttttggaaaacatctaatacaactcatttgtttttgtaaatgaggagaccaagtcatggagaacctaatttgctcaagattccagtggctaacaacacttaccgactcttacctctccctccatcactaagctctagccccatggctgttccctctgcccagaaggcttcttttctaagtctttggctggctggctcctcattcttcagaactcagcttccatggaacactactaaaaagcttattcttttccttcatagcatttaatgtcatttataattttttatacagagagacagacttatattttaatatctgactctcccactagattggaggcccccagagagcaaggactctgaattttgtataccactatatacttagtggtagcacaatgctagcaactattaagaagaaatgaatgctttttctattctctcactct

SEQ ID NO: 122578 - DNA, 1100 bp, Homo sapiens
aatgttaggaatttcattgtttaggaatataaactataagagattaagctccctccactgatattctagcatttatgggtttacttttgtttaccttttggaatcatgagagttttgttctagaacagtttttgttctttcatttgagataatttgaataagaaggatcaaaggattgggaaaggaaaagtaaaatatttggcagaataaaaatgttttttttggtaatgaagcctttagaaaactaaagttaaatgaaaaaactgaagtagaactaaactcttacgtcttaggagaacttagatacatatgtgtcagagtctgactgtatttatattctaaacacacatatgatcacacaacatacatacagagactatttgtataactgtaaatagatgtgacgtatgtataacttaaaaatcttttgataggtcacagtcgaactgttattggaattgaagagaaaaaaaaccgaacattatgcttactaatacttgatcctggatgtccttctcgagaaatgcagaaattattaaagcaagacatagaggctagcagtctcaagcaacttcggaaatctatgggaaatttaaaacataagcaataccagatattggcagtagagggtgctctttctctagaggagaaacttgtaagtatctaaatatttatatgtgaagtttgaatgagatgaacttaaaagtttaaaacttttagtttaaaatcagtgttatcacttttttcttttttttctattctttttcttttttttttttttttttggagacagggtctcactctgttgaccaggcctgagtgcagtggcatgcaatcatgactcactacagccttgacctcccaggctcaagcgatcctcctgcctcagcctcccaagtagctgggactacaggcacatgccaccacacctggctaatttttgtattttttgtagagacggggtttcaccatggtgcccaggctggtctcaaactcctaggctcaagcgatctgcccacctcagcctcccaaagtgttgggattacaggcgtgagccaccgtgcctagcccactttgtattccttagcaccttattctgt

SEQ ID NO: 122579 - DNA, 1374 bp, Homo sapiens
tttaaagtgatgataaagctatcaaatgcttttagttatacccgaccttttaaaaacagttgttgagtagtataaacagtgtttctggttaaaaaaatgtttattcaagggtgacttcctcttgaaggaagaataccacggtggtccggtggcaaataggagatagatgtatagattgagtacacacacatttttctatgatttacaagtattttctgttatagagatttgagagaccgacaggaaaagtatttaggatctattttatatataccaatggctactgaggaattaaaatcagaaatcagcttctgatcatcagggttagaaactagaataaaagctgtgaaaaaattatgtgtagatgactttttaaaaatcaagtatggtcattatttactattcatggagattttatatatcagagaatgtttgtaacctttaggttagtcagcagacttattatgaagttatttaaatagttagctagttagaggaatagttaaatagttaaatagggagaattgttaaatagttatcccccacaaaaaggagttttttagataagtaataaaaatttatatttacttttcttcttttataggaaagtaatggctagaaacagttagttctaaactaagaatttgttgtatttgataactccatcgatgaaaatattttaaaatgccctttaaatgtgcattttgtcaatttttaataggtgtcatattgttgattttcacaaatcaactggtcctttgggtacacaccctcgcttatttgaatggatattgaactattattcttcagagggagaagggagtccaaaggtagtgtgtacatctaaacctcctatctatcttcagcatcaaggttagtattaatataactcatatttgacaatgttgtttataagataacaaattgttgctttcagacaggttaaggttttttgtttgtttgtttgtttttttagacagaatctcactctgttgctcaggctggagtgcagtggtgcaatcttggctcgctgcaacctccaccttccaggttcaagtgattctcctgcctcagcctcctgagtagctgggattacaggcgcctgccaccatacctggctaatttttgtatttttagtagaaacggggtttcaccatgttggccaggctggtctgataatagcagggagtattatgacattaatctgtttaatttttcagagctcctttgacagtacaatactttcttaggtaattaagattgatatttctacaatacttcattgggtaattaagactgatattcctgacatcttcaggaccttttgcacttcttgttttctgtgtttagttcacttgtccttcattgttcatc

SEQ ID NO: 122580 - DNA, 2223 bp, Homo sapiens
gaagtggttacagtgatcagtatttcaccttttcatggtgcaaggcacagctacaactattggttcatttaactgtttttatttattgatcttttattgtctttattaaagacaaaaacccattttcttctaggaaacccttcattcaagcaaaaagaatttagttattgtctttggtgccacatgctatgagaaagttatggggcatataataagatctccctacccataggcttcacagagtctgtagagtatgtaaatatacacaaagaattatagtattctgtgactgaatgttgctggtaccttggggacacaaaaatagggtagaatcagaaaaagggtctatgaagacagtagcatgtgaaggatctataattttgaaacataaggagaatatactaaaagcaggaaaggggccgagtcagatgtcccttgtcctaacaccttgtttttccatattatagcacttgttatagttggggtcgatgacattttaaaggatattatcatatttatctttttgtacttagcatttagatagtgccaggtgtattaaaaagtacttagcaaatactgaatttgaaaatttaataaaactctatgggccaaattatgtttaatgtgttcagttaggccacagccaaaattacagcaagaagagtagtgtgaaataaagataagacagtggatagctttctgtagacttcatataacatagattagaactattctaattaggtttataaggctattaataagattcctaaacctattgttctgccttaagaaaagttgtcttctgttgtctcaaacaaattaattaatctccccaaatagcaaaatggaatatgttactaaagggttgaaatttagcgtattggagtatgagatatgtttattattcatgaagtcaagagtttttaaatgaaaacatttgtgtattctcatgcttcgaaaattgcaaaatctgcaaaataaaatcttaaattacaaaaaaattaaaactattggtaatagggagctattaatattttttgattgggagcaaattgattaagactgagtgatctccagtagtctatacaataaaatggagacacaagaagaacattcattcaacagttgtactttatgtgctgggccctgcagatgcagaaaatttcaatgaactgtaataaataatatgctagtgttaggaaacttggactgtagtaacaagcaaggacacaaactaaggttatagcaagaagaaggtgaagaagatggaattaacaggatttaggtatggtgcgtgaaggagaggttgatattaaaaatgtatgagatagcaatataaaggtgataatgactgcttctgaatctcttttctactttaggaattattgaagcacttcataggtattatcagaatgctgccacagatgtgagacgggtgtggctttcttcagtggtggatcactttcattcatctttaggcgacaaaggttggggttgtggttacagaaatttccaaatgctactttcatcattattacaaaatgatgcttacaacgattgcttaaaaggtatgtgaaatctagtactctgaacttgtcatctgataaaatacatatgatatagaatgatatagcatacacaattaatagctttaacagttagtggatatttatataagaaacctgaattctggttagaggaagagaaaatgatagaagatgtcaggaataactgtcttaaaaaccgtaaagttccccgagtacataatacactgctaaatattattcagtactttattaacagtcatgtaacatgtttgcttgtgtaattttaggtatgttgattccttgcattccaaaaattcaatctatgattgaagatgcatggaaggaaggttttgatcctcagggggcctctcaacttaataacaggttacagggaacaaaggcctggattggagcatgtgaagtatatatactcctgacctccctaagggtaaagtatgtaccttaaaacctaaataaatgttatttccttatcggggagctttgttttgtaaaattttattttttagcaaagagatagtttaaaaataaaattaagtagcactaaattaagtagcaatgaaaatcagcagcctattcactatcttgtgctcttctctaccctcaagttctgtctctcagaggcaactgtcacttccattgtttttaaatggtatgc

SEQ ID NO: 122581 - DNA, 1025 bp, Homo sapiens
cccagcactttgggaggctgagacaggcggatcacctgaggtcgggagttcgagactagcctaaccaacatggagaaatcccatctctactaaaaaaaaattacaaaattagctgggcgtggtggcacatgcctgtaatcccagctactagggaggctgaggcaggagaatcgcttgaacccgggaggcggaggttgcggtgagccgagattgcgccattgcactccagcctgggcaacaagagcgaaactccatctcaaaaaaaacaaaaaaaaaacaaaaaaaagtgaaaaggaacaggggaagttaatttaaatagtttaaaccagtgtatccatgatattattatttcaacatgtaatcaacattaaaactattactgagacattttacattgtttatacattcttcaaaatccattgtgtattttctacttcacagcacaactcaattgggcagccacatttcaaattctcgatagccacaaatggctattggctattttattgtttgtacatttttagacactaacaactctatatacattgtatcatttaactcaaaacatcctctcctgtactgttatatattccaaatgaggtcactgttgcttagagaagttacagtgactttgccaaagcaaggttacacagctggttattcctaatcaaatcttccttgccccataatatggcttttttctgatgagtattaaaatttttttctttgtatatattagtatattaacagactttttatggaaacaactttgttactgtcacccagattttttgaatcttaatgttttgccatatttacttaaaagtttttaaagcttcaacacctttgataggtattcaaagccctttatgtacactttttctaattctaatttgccctccccacaagggaactattatcccaagtttgatatttatcagtctcatacatgctttagtactcttaccatgtatgtacatttccataaaatattttgcaggtgtttatatataaatgggatacaa

SEQ ID NO: 122582 - DNA, 1019 bp, Homo sapiens
ggaggctgagatgggaggattgctgcagtgagccgtgatggtgccactgcacgccagcctgggcaacagagtgagaccctgtctcaaaaaaaaaaaaagcaaagaaaaaaattaaaataaaaaaataaaaacaacttaattatatctctgatacagactgtgatcaaccactctatgattgtcctatgtgtgggctcatatgtacaaattaccatattcttcaggaacatgttgacttgcatttggaagaaaacagctttcagcaaggtatgtttatatgtttgaagataaaaatatcatttaatttctactttctaggacacatatctaatttttagatttgtgatatggaaaaaatattttaaaatacatcttttcctttaaaagtgttttatttacaagttgaggccatttctttagcagctagaagtatctgaatattgtatttggtcagcgaaaattgttgaactagaaaactgccatatggcacataaaattttacaaatgaatgtgaactatataaccaaaacatctttcagtgcatcttgagctgcttgaatagcttctaaatgacttactggttttattgtgattctataaaagttttcctttctcccctatgttttttaatagtggcattgtttaaataatcattatggtggcttagaagtggaaaaatcctatatgaatgttagaagcccactgaacgaaaataaaaagtagatcccaagagaaaccaattgtgttttaccctatttcagttttttaaggtacgtagatagcttctgttaaggcagaggtctttagtgtccagtatcaatgatcctagtaccagtatcggtgttcatggacaatgttactgctcactcaccctaagccaaatatgagattattggggcaaagatggaaaagttccctgctctggtggtttctgaatgtctgctaattcttactcttatttatgataggctttgtatgagcacgtatattacagtgtaaacctatagtgggtaataaga

SEQ ID NO: 122583 - DNA, 1201 bp, Homo sapiens
ctcttacatccgccagcattacttatggaagctgtataccattatttcttactgctgcttttggaaatattttctgagtacttaatacttcattttctcttgagctttgccattgaattttttattccaatgattacatcttaatattttcattttcttcatctttctattttttcttagtaactttctgtcctggtttcaaagattcagttccctcctttatttcagtgagcattttgaacatacttattttacagtttattatggattactgtagctccatttcttcacaggtaactttttcagtttgtagatttcttagctgtttttcttggcattgcagcccccagtgagtttagcaattcaaattttagtgttcatctgttatgggagttttatatgatcccttccctgtgaagcagtttcatggttccttcacactggctgttcacagtctctgctttcagaccaggccttacatatacagattgctctatgctttcactctgtgtatatgcacaattctgggtccctcttctatgtcccttatctgctaggtcttggtcttatagaggaacaatttctgtttttggcaagctagacctgtctgcctgcagtgctatgtgatggatgcagctctttaatctcctgctcctgtgtagacagtattaccccaattcccagctttatgctggatgtttaagttcagcaccttaccactctgttgggtgctgagaatttagtcctaaaaacccatatccagactgggccctacttaccactttggttttcctttctgcttctcttgttttgactacagatctgaatatttattattaatatttcctttttttttggagtggtatgagaggtttgtgctatgctcagccttctatctcgaccctagaagtagaaaaatagcttttaaatccactacaaagagcttttacttatataaggttaataggtggtagacagtctttgacatggggtgaaaaaatctaaaagttataaaaataaaaccaacttggctgggcatggtggctcatgcctgtaatcccagcactttgggatgctgaggcagaaggatcacttgagtccaggagtttgagaccagcctggacgacatagtgagatctcatctctaaaaaaaaaaaaattagctgggcgtggtggcgcatgcctttagccccatctactt

SEQ ID NO: 122584 - DNA, 2477 bp, Homo sapiens
atcagagactgtatccatttgtctggagagaaatgaaaaaaataaggacaatgtagggaggtattttaaaggtaaatttatttaaatgaagtgatagtgtcattacttttcctgtttgattttaaatagtctttagctgaacgatgacctgtagtaggaaggtggtggcgaagtgattgctttttttaaaattatttttttaacacttttatgtcagtagtcagtactttatttgtccataaaatccaaaaataactacctttggattttacagtagtctttgactgaacctcagagagatgagattccttacccaaaatgatgaatctgaaattattacccagttctcttgactctggaataagtgcttttttctactataccacttctgcttttattcttggggctgagagtacaggctgtggagcacgacggggttggcattttggcttccacctttttctgcttgtggtgacctgtctgagccagaatttctttatgtgtagagcgataataatagtacttaaattacaataatagcacttaaatagcacttgatacatgtaagactctaagtttacagtgttaaactctacttgtaagatgtgtttatttacctcctcaatataatcagcttcagtattcagtatttagatatatcagttgataaataggtttcttctcttcatttttttcttacctgatttatcttacctggacaattttttaaacgttattttttctccaccttgggccagagacattttttgaaatattttatttttaaaattacttgtattcattattattgcctttttttaaaaaaaaataaatgaaattttggttgatatttataaataagtttttgtatttgaggaacagtaagtacattgaaaacttcttcatcaaaataatccagcgttaaagaccaagtaattgtctcaaatcattttatgaaacacattttttcttcaaatctttgaaacctaatgttatgttcttttctagctacttgtcaataccatgctttcctgtaatatttgtggtgaaacagtaacctcagaaccagacatgaaagctcacctaattgttcacatggaaagtgaaattatatgtccattttgcaagttgtcaggtgtgaattatgatgaaatgtgttttcatatcgaaacagctcattttgagcagaatacacttgaaagaaactttgagaggataaatacagtacaatatggaacttcagataacaagaaagacaacaccctacagtgtggaatggaagttaattcaagtattctttcaggttgtgcatctaatcatccaaaaaattcagctcaaaacctgactaaagatagtactttaaaacatgaaggcttctattcagagaacttaactgaatctagaaaattcctgaaaagtagggaaaaacagtccagcctgaccgaaataaaaggatctgtttatgaaacaacatacagtcctcctgaatgtccattctgtggaaaaatagaggagcacagtgaagatatggaaactcatgtgaaaacaaagcatgccaatcttttagacattccattggaaggtaaagttttcatttcattataaattataagtttacagcctcaatttaatatgtggtattttaaaagttggtttgtaagtcagcttactacagatgtgttttgaaatccattttatgtctataacatttttcatttgctgttactgaaatataaaagtacattatggaaaagaattttaatgcagatataaaatgtttcagctacattgagagtagttttggaactttctgtctagtttccagagggtattctttttattgtcactaacccagtagcatctggactgtcctggactctctgactttgcattgagttctattttgactccattattctgttatgattggagaacaaactctctgtgatatcagttcttttaaatttgttgaggcctgttttatggctcaagacacgagctatcttggtcatgttctgtggatacttgggaaaaaaaagtgtattctgctttgttgggtggaatgttatatgtatgtcactagatcctgttgtttatgttcagattatttatatccttgcttgttttctatagtagtactgtctagtagttctatcaatttttgagaaggggttgttgaaatccctgattataattgtaaatttatctatttttcctttcagctctgtcaggttttgtttcatgtattttgagactctattgttggtgtgtacacatttaggatcttatgtctttttcttattgttgaactttaagaatttgtggagccaggtgttgtggctcatgcctgtaatcccagcaagttgagagtccgaggtgggcagatcccttgagtccaggagttcgagacgatcctgggcaatgtggcaaaagctcgtctcttcaaaaaaaaaaaaaaaaaccaaaaaactagccag

SEQ ID NO: 122585 - DNA, 1045 bp, Homo sapiens
agggtttagccatattacgcaggctggttttgaactcctgagctcaagtgatccacccaccccggcctcccaaggtgctgggactacaggcatgtgtggttgcttagattcttactgggcttcaaatctttataattttataatgttagggttgtgataaaatgctaccatctgtgttataggcaatttcgtattagacttttatttattgtgtggttttaggaaacaaatggtataacttaacctgaatgtttataagcctaatcaatacaattaattaattttttgtgtgtcagagtctggtgaccccataaagctatactgggtcctttgtagggcaactgcttgcctatctggtgtttttcttgaattaaagttttaaaaaagtgtccacccctcccgttgtttgcagccagccaggtccaggcattggggtttagtggccagagctgggattatttcggctccttatgccctgttcttctggatccgtttaactaaaggtacatatttacatagattgtttcacataattttgacctttcataataagacattaagttgatcattagtttttattccacttgtataaattcgtaggtttggatttagtccaaatttattaccttgatatacatttttgtagaataaaatacccttcatttgtgtaatgaatttgtgcaacctaaaactccctgcttctctctccaccacaagatttgcaaatggttattagctaaagtattcccttgtgatttaagtgaagaatcaaaatgagcgcttgatctctgaggaaacttccaagtgtagattcaaatcttgcatacttaagaattgcttcaaaaccctctgcccaactcttaatttgttatttagaaggtctgctgttaaatcatctgtcatttattttgggttagacataggatcagctgatagatgatgttttaggtgagtggcttttttaaaaatcagcacaaatttattctgtcaccttctgtaccagtgtgtgcactcacccttctgttgtctcatctggacagctagc

SEQ ID NO: 122586 - DNA, 1048 bp, Homo sapiens
tcacttgagctcaggagtttgagacagcctgagcaacatagcgaaatcccatctctagcgaaaatacaataaaactagccaggtgtcgtggtgtcctgtggtctcggctactcgggatgctgaggtgggaggatctcttgagcctgggagacagtggttgcagtgagctgagattgagccactgtactccagcctgggcaacagagcaagacccagtctcaaataaaaaaagaaaagaaattaaaacctggacacggcaaagtaatgaaattgtatgtctaatccaatgttgaatgtaaaagtctgaaagtacgtatgtaaaatagagaaattcattctggcatattagaaatttggcattgagggtgaagggaaaaatacagccagaatttcagatttttttttttttcattagactgaggagtagttttgcctttttccaaactgaggagtcatgtggatgttatcttccagatgtttattgtctgctttgtatgttaaaaaaaatagttgtttgccttactgggtgagggagacttagtttatgggaaaaataaagcaaacgcatgtgatgacttcttacccgatgtggaaatagagtcgtgactgtgagcgctggtatgctgaatctagaaccaactgtcaaacttgcctttcaatgggagttgaagaggaggggttttgtgggattgtggggtaagcattggaggattccctaagatccatgaaagcagagatgaatctcagcctcttctttcaccgctagcacccagtacggtgcctggcacatagcaggctccgggtaactactagttcctgagtcagcgcatgaatgctgtggttgaggtttgaaaaaattgaaaggaggataatattcatgttattttaaacagaaattgtatatatgactattgtggagcgttaggaaacactgtgcaggtatttaagaaaataactaggccgggcagggcggctgactcctgtaatcccagtactttgggaggctgaggtggacagatcacttgagtccaggagttccagaccagcc

SEQ ID NO: 122587 - DNA, 1053 bp, Homo sapiens
ccaggggagaaaaagttagaaaagaagtcataggggaacacagtttgagggagttacttatgcaattaagcctgaaattcatagtctttggtttatatttgaggtgatcacatttgccatagaaatattaagattttttaaagtccttactggtagctaaccattgcttttatagcattgcaatacatccagcagtgcagaatatggaatgtgcaaaagcagtaaagttttcaggactggactatgatatgagttttatgaggtttattttttctctcaactctcatgtttcataccttattagatgtatgataagacaccatatgtctccccagtgagatttgctattttcttgtcagtaaacattgattgcttgttccgtggatatggtgcataaacctacgcttgcacaaagcttcccatcctatttctttgtttattttccacagtatgctcaagtaattcctgaattgacacttttatccaggtttcagaaatgccattttggcttaactatagatcgtggaacttattgttgcctgtcctagacttataaatgaaatctggagtgaaaataagtatcagatacagatgtgttccaattttaggaatagatactaaaattaaaccatacaaaatttttatcttgaggattttctttcactttaaaaaatattcatggcaatatccctcttaataaggagggctttttcagtctgttgctactcagaatatatcttacaggatccaacagaacagtcactaataagagctttttggaaatgtagaatttccaggccctgcattttgacaagatccccaggtgattagtttgcatactgaagtgtgagaagtagcactttaatacactgacaccttcttttacaaagcatctttcaggagctaagcaaagtgaacaacctttgttggaagtaaaataggcacctctcattagacctttcccttaatagtctagtaaagagtacttcgataatttaaaaaaggggatgatagaacttctcatatcataatttttacaaaaaaactcctaat

SEQ ID NO: 122588 - DNA, 1036 bp, Homo sapiens
gtgtatctgtatatatatgtgtgtgtgtatatatgtgaaataatttgtaatcaatttttaaaaactatcattatcagatatggttgtcatgaaggctaaataaggtaatatgaagtccttagaacactgtatctgctactttttacaatgaatgtttggtaaatgctagtttttagtaagggccctttcataattttatttttttcctttcccaataactttttggctctcaatttttaaaaaactattatctgtgaaagtgaaagctcacatctatgtgcaaaggagaagtgtttacagttttaatttataaaactcagtttaactttgtctttacttggtaatattggatttttctggactccagagagaaaagtcaatatcaatattacactttatctgaatattggcagtatgcatatttaacatgaaaccaaggtgagaaagctagcatgttccagcggcaggaaagatttcttgacttatcttcagctgaagcagtggcagcttggatattacatcaacatcctgacattattaacaaaggtcagcagcctcttttctctgacttccttattctaagcatctattcaacagagataaaacagttgtcttagaattgtttcgctgtacaaacaagttttttttttttcttaaaagtcttctttgaaattaagaaacttctcttaaccaatgtgtccagtttgttgtagatgcccacaaaggacttgtaacttaataacaacagtgagaaaagtcttgcttttgaatcaagtcacataatataacttcagtatcatttttagaactccagaggccaaagtccacttctccacgtaagatcttcaatcccagaagccctatcatgggatctctctgtgtgtcccacttgtgagagtctaacccaggagttcaccagtatgtctcacagagcactactcccaggagatgccccaagaggaaagagttttctgggaaatactgtaaactgcaacacgcatcagagcttcactatacactgtaagggctttgagat

SEQ ID NO: 122589 - DNA, 1855 bp, Homo sapiens
aggctgaggcaggagaatcgcttgaacccaggaggcagaggctgcagtaagccaagatcctgccactgcactccagcctgggcgacagagtgagacttcgtctcaaaaaaaacagtgacaccctaagattttcttttgctgacacatgtcactttaaaaaaataaaatttagaatatgatagtcacatgtaggttgactcatataattgctccttatttcatatttaactgttttctgaaaaaaaaaaagtttttctcttcctcttttatgaaaggagaatttcatagtcctaagaaaagtgacatttaaatatttgatcaggagattttttggtggcttggagaggttgtgttgtgtttatattgagatgcatatttgtttgtactaattaccctaggattgctttatgagggtgctcaaaataaatgcttacaaaggtagggcaggtaacagaaatgagtaacaaggacctggtgaagaactagggtgtttggctcctttcaagggacagccactgtgtcactagccctgtgagaatgcctgatcatgtggttgtcacgtctttcagttgtcattgttgttgttgttgttgttgagacggaatctcactcttgcccaggctggagttcagtggcatgatctcagctcactgcaacctctgcctcctgggttcaagcgattctcctgcctcagcttcccgagtagctgagattacaggctcgcgctaccatgcccagctaatttttgtatttttagtagacacagggtttcaccatgttggtcaggctggtctcgaactcctgacttcaggtgatccgctgccttggcctcccaaaatgctggaattacaggcatgagccaccactcccagtttgtccttcagttttaaagagaaactataaattggatattttattaaagccctttaaagccgacaaataattcagatttcaaatcaaagccccgtgcactgtgtgctcctgcacactatgcttctctcttgtatcattttcatttaattcttggcaattttgtgtttaccaactgccagggagcccaaggaatttagccgtcacctcaaacttaaccaaacttacaacctttgggcccaaacctgctccctctctggactctttttgctgtctatattggcctctgtgttgcaatcatttctggactgaacaaggccttggtgttttttctcctttgttcttctcaccatagttcccccaaacctgagtctgttgattttgtctcaagaatttgcctgttttctgttcccttccttcctgttccagctacccccattgctagcctgcctactgctcctctgatccagattctgtccccattctagttcctgtagcgttgtccagccaggttgatcatctttttctaatacctgtttcgttatcttcctactcaaaaaattctatgtgtctttgttgcctaccatgtaaatttcactaattctgcctagatctcagggcttcatagtagttttatcttggctgtctaaagttccccccggcacttcttaacccattggtccattaaagccaactctatttccccaattcagccctctgtcaggggctgccaggaatctcgtgggagtttctggataatgggtagatcctttccctaggccttggctgttgagatgatgtagattctggagttttcaaatctttttcttttttctttttattttttaataaacctctattaccatttggccccaacacctcaaggcaagaaggaagtggaataaaggaagactcctgaatccacctctaactggggaagaggctgggagggaagagggctgctttgaggtcctcagattcacag

SEQ ID NO: 122590 - DNA, 1932 bp, Homo sapiens
tcagaaaagtcttcagataatttcttgttttgatgaaatgctggtaattcgctgcaacattctttcttgcctctctcctttgcattttgtttagacccctgatgtatatataacacatagcacctagaattatagttatttgaatgtgtgactatttgccattttactctgagttctatgagacagcaagtgctgcttttgtgtttccagcttttaataccatgtctggttatgaaaagcactcaacatagtagatccttgacattttctgattgtacatcccaagtctatgaggaactttagaatctgtgagtgtcattaactaagacatacatttcaaatgattattaggctcagtccccagctaaatgacttgtagctaaacaaagttacatcagcttaagcctcagattctaacaggagcattttctgtacattatctcatttaatcagcacaaccaccttctaaagtgagtaatattttttctccattgtgaattattacatgacatttggcttggcaaatgcatgcaaggcctgctgagcaagtttggacgggtggagagatagatgattagaaaaaataatgattaaatgatttgtttcctaagggctttccgttctaatgtgtgaaatgttttgatcaacaagaagataaaactggaaaacaagagatgaaataacctgaaacaatagatattgtttaataattcagtcttctttttttgttttttggttttccttctgcccaaaaacaataaaatacataacttggagattgtattggactctcaatcctcagtaagaattaatgaccccttcttcttttattccccccttctttttctttaccaggtgatggctgtggacacctagtgacttatcaggatagtggcacaatgacatctaagaattatcccgggacctaccccaatcacactgtttgcgaaaagacaattacagtaccaaaggggaaaagactgattctgaggttgggagatttggatatcgaatcccagacctgtgcttctgactatcttctcttcaccagctcttcagatcaatatggtaagaaaagagaactaggtttctctgagcatcaaaatttttgatatttgcagagaagggcaagtggtgtgttaattaacgctatatcatgagaagattagaagagaaacttgcttctgtaaattcttgggggtaacttagaaggatacatttgcttcataagctgaaacagcaaaagacatctaaggagatgtgagccttgtgtgtgtgtctcagaacctttgttagagtttcagtgctgctaggaagagaattagagatacgtgacatttggtaaaccatctatacagttcattattcatttgacaaatatttattgaatagaacagtgaccatgtttcaggtactctgtcaggaactgggatgtaacagtgaaaaaacaaagttcctctatgaaacttgcatctgtggggagaggaaggcagaaaataagcaaatgcatctgtagtatgagagatggtgagaaagaaaaggaataatgaaaacgaaggcatccaaaggtgatgtagagcctgcgtttgagtgtttttgtgccacttcaaatgggatggtagggaggcatcatcagtaagtggacatttgagcagagacccaaaacgaggtaagggaatggactgttccgttacgactgaggtcagaattttctggggaagaaaacagcaagtgcaaaggtcagtttcctaaatagcctttgaaatttagtgttttgtgctttgagatgtgctgttagcgcactgcaacctgaaatcacagtaacaatgaccctttgatcctaagcccaaggaaatagctcaggttggacaatttgaaaacgataacaaaatcttacatacattcttttgagtatagagattttctgaaatt

SEQ ID NO: 122591 - DNA, 1004 bp, Homo sapiens
tgatcgcttgagctcaggagttcaagcgatacagcctgggcaacacagtgagacccccatctctacattgtaagagaaaaaaggcagaaaagaatggaattagctacgtatctcaagctagcttgcaaggtgatcatggtctgcctcagggtgttatcctccccatttctaggttcttgagctttcaagcttagatgcatcactagaagatgaataatgagttgcaattcattcgcagcaataaagccaattaatttttctccttgaatttttttctgtataaattgaacgtttgtcttttgaaaataaaatgtatgctcatctgtattattattatcattcattattatagaaataaacatattcagtgcctattgtatgccaggcacctgcttggctcttacatatattttctagaatcccctaatccaccttccaaggtaaatattatcaatgcctttccacaggtggggaaaccgaggcacagtgtgattaggtgaacatgcccaagatcccaagagtgtacaattaggggtgaaagagagatttatatctgtgtctctgtggctgcaagacacctactcccactgctgttgtctcctggtttcaccatcaccaaaaaaaccacattgcactatcatccttcccaggtggactggcccattattacattatacagcaatttcgtctaaaacacaagaagtaggtagtatttttgattgaggatgtgcttaagataaactatgtagtgatgctcagaatttgtgttgtggctactttaaagatttcctttgaccaaaaacactaaccagacctatattttaacttagttaaataaacccctggtctgtttgaacatcctccaggaatgcagaaggaggaggagacagaagtgctttgtctttcagtggctggcgctcagagagtggacattcctgtgcagctgttgcccagcttcctggaagggtggaagggtgggaggcacctctgcaagctgatgtggc

SEQ ID NO: 122592 - DNA, 1977 bp, Homo sapiens
ccctaccctactcctcctggtggattcctggtaatccaagagtttgcccaaatcatgccaagctggtggcaagggttcactgaaccagaactagctccatatacaggttttcccagcctcatgagatgaacagagaacacatattctccaagccacagtatattcaatttggttgttttatttacttcactgccactgccagtctacgtctttgcatctttttctccttgaagaacctcttgatttttctcctctctcttttcaccagtctcagttccttccaggccatctaatgttgtgtaattaaaaatagttgcaataatttctttccttagttcaaaaattgttaattgtgccccacttctacagaaacttgctagcttagcgttgatgcatcatcttgctttcttcttcactctcacttctagcctcatctctgagtccttcatctccatgccatttcccaaatgcatcatacggtttcatggcctagtacatttttacagtcgttgatgttattccttccatgtccccctctttttcttcttttcctgctttttctgtcccttctaacacacacagacacagacacacacacagacacagacacacacacacacacacacacgtaaaagtaaacccttcaagtttcaaattcagggctgcctaccctagaaccttctctgatgttcatcagtttgtcccttttctgtgctcatgttctctttctaaagtttcagtagagcatcagtttcgggttgggataattattttagcttctctgtcagatacgggatgccctgagccaggaattacgttttattcatgctcttttattcacctaatatttagcatcgtcttacaattgcagatgttcagtcagtgttttaggactgagattataagtagcttgattttggcaaacatattaaaaaatctggatttttacaaaagagaaattggagtgtcattattcacactgtagggaaatttacactaagattcctctataaacattccctctgcatttaaagaaagctttggtttacataaaattttaaaactatgcttattatgtggaaaagaccatgtaataatgtggaaggtgcctgtgagtgagcattcaactatgtgcgatgcactgggcttagtaaaccttagcgttactacctcatttaacccttataacagccctgtgagataggtcctgttaccaacctttacacctaaggaaactgaagctcaaagaaggccaactaacatgcttgtaagatcacttagcgggacctgggattcaagtctgggcatttgaggccctgctcaaatgcccagaggccctactctttagctctgcaccatccgattcagtgtttgtgttgaaagccatctgttcctgtggcttgtgcataagaagacctgaggtgtagttcttgttcgtcacttgctggaagaaatggaaacttctccaggcctctccacaggagtatccggagaataaagtgggagtctgagaaatcacttacgtagagttccagtataagttgaaagttcaaaaaatgttttttagtcaaaatgctaagaggaggcatggtggccagtgatagaaagaaactctttactataggatcctaatggaagttaaattggttgtgttctgcataatgatttgcaccaggaagttcaaaaattgttctcctacgttttctgtacctccacttccaatcacaatatttttttaagcattgtcagtgacttagaagcacaatcatgtgaagtcaactgttaatgtttatgttacactaggaatgagagaaataggaatagttggaaataatgcgaagtggttagactcataatcacaacaggtttctgcatgtcattttttagaatgatacatatctgacatattgcaataagatctaataattacaacttatctgttgaagttttttaaatcccaaagaggggaaagcgcaa

SEQ ID NO: 122593 - DNA, 1054 bp, Homo sapiens
tagaagtgcgtcctcctctatggttgaggctactttggtggaaattattgagaaggactgctttttctttgtttgttttattttgccttttatgccaagatagaattcagaaagaatcttgaacatataaaacgttatatcagccagaatgctgtactctaggtattttttttaacacaaccataagcctcaaggagaaaaagctattgggttcctcctcctctttccccataaatacttccctggagactcactgtgattcagtttcagtaattgccatctttcattgggagagaagtaatggcttaagtgggttgtgaactcccagcgttgacacacttcttgacctgggtcctgtagccccaaggaaagccacacctttgtctaagaatccgcctgcttcatttatcatctgtcactgatttttgtgtgggaatgagagaccaaaattctccagggataccacttactgttacgtgactatggttttaatggcacagtccaggaatatcccttttttatgctaatttctctccttttcaaagaaaatggccttgaaaattctgtaatgttgtacaatgaccctactgcaattagcaagcaaggacaaatctgcgatttgactgcatcaaaaacaaattgaaaatggacacaaatctaatggtgtttgcagcttcagcatttctggagattgttttatcagcatacctctgagcacagatctgggccacgagaagtaccactcgcctggcagccaaatattccatgtggctgtctccacccacatgtactcccagggagggtcacttaggtcaatcaggcatgttcttatctgtcataagaaagaattgtgtgcttcagatgatgctccagaaggttaatgagggttttttggaggttttatgttgttgttgttgtcgatttatgacagacctttcaggagttaggtttttatttgatctctcagtggtttttcccactgacagtatggtagttaaaaaaaaaatcagaaataatactactaagggaaagaggtttctttgtttctctaatg

SEQ ID NO: 122594 - DNA, 1046 bp, Homo sapiens
tgatgaaatgatcaaaataactcttcagaccaggcgctgtggcccatgtttgtaatcccagcactttgaggaggctgagatgggaggattgcttaaagccaggagcttgagaccaacctgggcaatgtagtgagacctcatctctacaaaaaaaatcaaaaaattagctggacatggtggcacacacctgtaatccagcttcttggaaggctgaggtggaaggattgtttgagcccaggaggagccgtgatcacgccactgcactccaacatgggtgacagagaaagaccctgtctcaaaaaaaaaaaaaaaaatcctctcaatgatgatatttatatagagagggtatctcctacccctctagttacaattttgcagcacagtaataaaaatatgaaagggattgatgtctgtgtggtaagggtaattaaaggggcatgtgtttacattttccttctttgatctgcttccagaaatagttacatgcctatcataactgggaggatgaaaccaaattagagttttactatatttacatgtttttggtctaggaaatcatatatattgcacaacaacttagtatgatggtatacactctcatttgtgtaaaatatgtatactttttgcaacttttcctttcaactgtttcataaaatctaaaaaaaaaaatctaagcaagttctcactgataatcaatttagacttgcttaccttacagtttgtgggtttttttttttttttttgagacggagtcttgttctatcacccaggctgaaatgcagtggtgggatcgtggctcactgcaacctccaccccccaggttcaagcaattctcctgtctcagcctcccaagtagctgggattacaggcacccaccaccatgctcggctaattttttttgtatttttagtaaagatggggtttcaccatgttgaccaggctagtctcgaactcctgacctcctgactccgctcaccttggcctcccacagtgctgggattacaggcgtgagccaccgtgcctggccacctacagttttcattaga

SEQ ID NO: 122595 - DNA, 1059 bp, Homo sapiens
aagttactgtaaaggaaaatcagtgtgtatgctgcatgtgaatgctgcatgtgaataaaattcttaccatgctttgcaaagtcttttaactttaaaacttccccgaaaaaatgatttttttagtttatttgagcaaatttaggaggcccctagaataacatttttgtaataaaattttctttactacctaatgtgtttgacctttgtcttctttttacaaaaaacaaaacctatctcttgggttgctcacagttaactagttccagcctattgcttgtctagagtaagccactttcccccttggcttagttcacaatcagtcagaaattatcagtctgagcgtcaagctaaatttcagttggtaaagattataatcatacatatgtattgtctagtaaatttggcctttcaaggaaaaaaatgccatataccagtcatttgtgctggtataaattttgaaatgtgccacaagtgtgctttgtttttaggtccatactgtggaagtatgactgttcccaaagaactcttgttgaacacaagtgaagtaaccgtccgctttgagagtggatcccacatttctggccggggttttttgctgacctatgcgagcagcgaccatccaggtataacggaagaatcaacacaaatctctaaatgttatctgtctaagaattcctcttgccacttatccccatccctggacataattgtggactcagatgcagaattaagatatgagggagaagaggaacatggtatctttgtaaatggttaggtctgaactgaatcatattgcagcacaggtgtgtccaatcttttggcttccctgggccacattagaagaagaattgtcttggggccacacataaaatacactaacaatagctgatgagctaaaaaaaatttgcaaaaaatttttataattatgttttacgaaactttaggaatttgtgttgggctgcatccaaggccatcctgggctgcatgtggcccaaggggcatgggttggacaagcttattagcatgttagattgatcagttgacttatatgggatagga

SEQ ID NO: 122596 - DNA, 1053 bp, Homo sapiens
ttttttttttctctttttatgaaagagtgtcttgctcttttgcccaggctggagtgcagtggtataattatagctcactacagcctcaaactccagggctcaaagtatgctcctgcctcagcctcccaagtagctgggacgacaggtgtgcaccatcatacctggctaatttttaaatttttttagaaatgggtgtctttctatattgtccaagctgatctctaacttctggactcagcttcccaaagtgctgggattacaagtgtgaatcatggcacccagctatgactctctagagtgctttcctagtgctcgatatagctgtctgcacttagcacagagtaagtagctcttgtgaccatttcaacatgtctgcaaggaaggttctgttacatcctaaaaaccaaagtacaaaccaattaagacttgctgagggctacacacctcgtaagtgtagcctgggagtcagacttaagagcctgtggtcctatctcagacatttggacattctaatgaatgagattattttatgtgcagaaacaactctagtgttaactaatattatgtctaatagggggaaaaatgaaaatgagtgataattaaatattggttttaaagttactgttcatccaatatacacatatgccagtattatctattatagctatacctctacagtcccagttggtgatagggcctctggacatcaaatggtcatttcctgttctcctaaagaaagggaatatatccaagcttacagggtggcattatggtgccagattatctcagctttagcccagccattttgtagtgtttagattaaagataaggcctggtgactgatacaggtccacaagccctcatccataattatgaagtatagaaagttttgaaagccttttgtaactcatttggtggtgattcttgattaatgtgaccttaaattcgtttgacagcaaaattggactagattaacatgtctttacatatgttatttaatatgattattaaggcatttgacacaagtattttaatgttttttattaatgtgtg

SEQ ID NO: 122597 - DNA, 1001 bp, Homo sapiens
tgtgtggcccggttcctaacaggccactgaccagtaccagtccacagcctgggggcttggggacccatgcactagacaacatccagtccaggcttgtcattgtccagaggaatgggaagccaggtcaagagcagtggaatgacttgcatatactttgtggagttagaggcaaagccaggatgacaagataaattgctaaatttaaattcaggacttttcctcttcaactggctcctctgttttgtttggacccaggagtccaaactgatgataagaaagctttttaatgaaagaaaattcaggaacaatatacagaaaattcaggaaagatgaaaaagcaacctgcattcttattaaagagtacgatctttacgatctttttctcttctaattttaattctttttttcctccaagattagggagggtagtatttgcatctgtttcagtattctcattttttttctttctgtggtgaaatctttcctctcttttgttaggatagcagttattgcaaaactgactcactttgccaaacctaatctagtttgggaaatatgaactctctaaattgaatatcacaaaattctcaactttattgcaactatattgcaaaatatgatttgtctcattagtccttatactgttgtaacttaagtctaagggaacttttccattgtaaataaggtaagcagcattgtcattaacaaaaagagaaattcttgagtccagttactgagataaatttcatgagctgcctttctatgttggcattaatagtcatgaagaagtggagcatagctaaggtttatttaggaaattatgtttcttatcccctcactcctgggtctgagtgccttaacactcttccacagaggtctacacttggggacccacaggcctgggcaccccatagaaagttctagtcgtttctgtagcgccacttcctgacagagccgattccaatcccacaaccgcctgtaaatcagagccagtctgctgt

SEQ ID NO: 122598 - DNA, 1316 bp, Homo sapiens
ttaaagtttacatcctgatttatagtaaaagtgatcacttatgcacagtaaacctttaaatgccaacttgaacttgacttttgagaatgtattcctttttatgttttttgatggtttcttctgttgatacgagggtgctacttcaggaagataacaggctctagcctgaatttgtcaggtgctaccacctccaaacagggacaaagaacttccctttggctctcaatctgttttttggaatcgtttgtctgtatttgtatatctttgaatgccccttttgtaggaaaacaggataacaaaaagtttaacttggattttatcttacttttgaacaaacattattaaaactatttaataaattagactttacgttctcagttaacttctgctacatcaactggacttaatacatacatatataatatattttatataatttgaaaagtatatattatatattttatataatttgacgttaaacttccatgcaaaaagtagagtacacaaatgtaaaccattagtgaattagaaagggttttgcttcatattccatataattatttgtactaattgtctcatttttattttggggggagtagatagaaagttcagaattatatcaagatctcttatttctagatctgtgattttgcactgagcaaatagttaactgtatgttcacacagcctcttccactcatttagatttgaaatcttcagggagcagttgttttcatctgtgttgttttactcctggggaaacactgtacatgcggtcattgaacttatgttcccacacatgattgtttggcattcaggaaaaaccagagaaggaagtattgcagctgaggaagaaggagtccctaaagtaaatatccaggggtcttctgggattcatctccggtcaggtcatttccttgatttgaagagaccagaatggtatcaggaagagagactgacctcatacagaggacgatggtgctaaccatcagaagtgaaaaccttctttctgtttccatcagattaatcttgattgcttctgtagccctctgggaagcctccttattcctgtaatctgattgaattcattcactctaatgtgtgaatgcttcagaaccctaacctccctagggtgtttttagttttaaaagagtaggcttattaacctatagaattctttaagtggtctgtatttaattcgttcaatggaatgaaatggaaaaacattttccagttgataacggaggaaagccaggcagagagctgttagaagtagagcttttcctggtttcttctcaggattaactccaaaggtat

SEQ ID NO: 122599 - DNA, 1124 bp, Homo sapiens
accctgagaaagtgagaaaaagaccaggcagggctggtgtgcaggtttcagataatcctgcacaccagccccgtctggtctttttctcactttcccagacacaggtgcccaagcaatgagttagccatggtccagagagagagggcagtggggcaggacccctgagaaagctcagggaccatttgagactccacctccccagggtctaaacaccagctgcagtgtctcctctgcctcacagatgccatgccagtgcagattgtcggagaccatacccagatgatctcacaaagggagaatctgggacctgatgagggcaaaataccttttaaaggcacagcggaaagcatggttagagtagtgtttgctgttgtggttaatgaccttggcatgctgttcttagcacacacacctgaggaggacattgatcactgtcagctgtcaggaggcagcctgacctctgactcatcaaggaacatgttctggaggacgcgcattacatttctgacatattcatttggtttatgttacctttattccagactgttggaagcagattaaatatccctttgccagacatcagtcagctgagtttaccatcagctatgataatgagaaggagatgacacaaaagttagatctcatcacaagtgatatggcaggtaagtgtcatatttctaggactgtgctattagattggaggtgctgcttgtgggggagggagacaggagagaaataaggcaaaatccttttctatttagatagggtccagtaaatctgaaatgtgttttttctgcattctgcacagaattacaaactgacactgagatattacttaaaagccctattcagccagtcttttcacctgcaggggatatagtgacatccatagtgatagccctgatgtactacttgtatctggaagccctgaatctatttttgttaccaaagctttgattaaggcactggtacagaggggctgaaaggaggaattaaatacagttcctgccctgaggaaggtgagataggaaataaaggaactctctcagtatgagaagggcctcagtgtccctgacaagccacatcaagagtcgagcttcccaaaccatctatggggaaatgct

SEQ ID NO: 122600 - DNA, 1108 bp, Homo sapiens
ttggtcctcatatcctattaaacaaactactctgtgtccctcatactctggccatatcaactctattttcgaggctgtttttttctccatttccacactgtgtgacttccacctccatagcttctccagagccagtttcagagccacttcctccctgaagtatgtccccatgccccaggacgtcgtcgtcgcccccatctctgagaagaccctgcgaagcttcctgagcaggcggtgcggttgtgtactgcctgcgggtggcttctgtggctttcacatcagggttttccgcagtgcctgggacacctgagggcacccggggggaaagtcagtcaccacgacctgaagcagagtatccccgtctgccactgacaggccggcccgtgtgtggtgcccgctagctgccatctgtcttgtggtttcagattaccagcagcccctcatgattggcaccgggacagtcacgaggaagggctccaccttccggcccatggacacggatgccgaggaggcaggggtgagcaccgatgccggcggccactatgactgcccgcagcgggccggccgccacgagtacgcgctgcccctggcgcccccggagcccgagtacgccacgcccatcgtggagcggcacgtgctgcgcgcccacacgttctctgcgcagagcggctaccgcgtcccagggccccagcccggccacaaacactccctctcctcgggcggcttctcccccgtagcgggtgtgggcgcccaggacggagactatcaaaggccacacagcgcacagcctgcggacaggggctacgaccggcccaaagctgtcagcgccctcgccaccgaaagcgggcaccctgactctcagaagcccccaacgcatcccgggacgagtgacagctattctgcccccagagactgcctcacacccctcaaccagacggccatgactgcccttttgtgaacacaatgtgaaagaagcctgctgtggtactgagcgtcgggctgtcacaaggcactggaagaagggagcctgctggtccagagtgtgcgtgtgtatcggtgtgtgtgtacacttgcatgtgtgtgtgtgatccagtaggatcctagagac

SEQ ID NO: 122601 - DNA, 1411 bp, Homo sapiens
agttctgcacagaggttaagtgggaaaatgcagctgttgcaaaatgtatataaatagtatgttcatttttttcagtatattatctgatactgtgttagcagcaggtctgcttaaacctagtcttgttgttattgagtcatttcctctcctttgataactagaactgaaagcatttttaacattcttctcctggaagaaatgaattacttgaagcatgaaaagcacaccagggtggttgtttatttagcaattatgactgtagatttaaaaacaagcaaagaaacaacacctcagcagctgcccgtttccttagtctccacttcagagggggatgcgaagaggtcggcccagctccggtgaccatgaaggtggcacaggaattacagtgtgaatggctgtgtcagatgttttcgtacctcagattaaaaatattgctgaggtcagacgccacaattttcatgactttcttcagaagtagcacattttcgtgacttccgctgtcctctgaaaaacaaagttatttggaacatgttcatgcaaaagtgattctgaccaagtctaaatcgagcttttctactgacatgaaactgttggaaactgatctcattttataagaaatgattttcccctcaaggaggcgtctgtaattccagaacagtccagacatcagctgtacctcatgctcagtagtttttatttgagtttcttttgtgagttaactatgggagatttaacctcttttgccaaagagggaagtgtgtgtgtttttttaatagaaaatatggaccaaaaatttttttccctgaagaatgtattataaccctatttgtgtggttattacatcctgtgaaatgtatatatgttaaaataatgggggtgctggaaggtcatggcagactagctgctggttagtgtggaggggaaatggtttactttgtagagtttacatggttttatgcgcacactaattgtaataaactatgccaaaccaaactgcccctgactctcactagtcagccctgctcgctggggtgttagaggcactcaaggttcagcttctgtaaaaaggcaggtgccacagtggaaagagaaagagcttggtgccagattaggccagaccccaatctaccacagaagagaagtctggctgcttctataatgatgagactcggtttcctcatgtttgaaaatggtgttgtcgtgctttcttcctccaaaacttactgataaaaattagttggaacatttatcaaagtgttgtctatagtaggtccttttttctaatgtaagccttcagtgggctgtttacagaattttaatattggaatattagaccataagcataggcctagatctacagcccttctttacaatagagctgtcttcatctatcacagttcttctgcggcac

SEQ ID NO: 122602 - DNA, 2460 bp, Homo sapiens
attaatgatcatttattgtaatgagtttgcatttcagctttattcaatgcagtacaaaatagttttctttaagcagtcttttatcaatcaatgctgcactagaaatagattctcaaaagttactaaacattttactttttttgttttttaaaagaaatgcagatgagtgtaaaacatctgttctcaattatgttgatctgtgtgcgcagtactggagcatttacccattcatgttgagcctcaaatgcttgttttctggggtccacaaaagacagttttatacattttgagttgttcataaagtttgtcttgtgatagtcctggcacttaaagacaaatttttctggtagtaaaagttcagatttattactatgtcatgaaacacagtacattcaaatcaaacggcagttttctttctaagtaaatgatttccagtcatctaaaaggtgggcaagatgagataaagacattttgatacagtaattgttttggttgggttttcatgtcagtttatgtttgactaaagctctcttcatatgcaggtttataaatttgttaggtctgttgtcccatgattaaacatggagtgcctcctctctgatttaatattctgcaggtcattgtaacctgctaggcaaagtcacaacattgcattaaagaggtgatagctttgctaatatcactgttttaaaggacgtacagttaaaggaatattaagtgggagaaagcctacaaggcttttagaatattatcagtatcttcatttctggtattcagatgttatgtgataaaacacattttttttggctttcccagatacactatatatttgttcaagggtaaatctataaaatgtatatactttattttgtggttttgctatttataaatttaatgttttaactgttgctcatttatggtttgttttgggtggtggtgttcatctgtatatcaccatgttaatttgtaatggaagtgcacttcgtagtgtatattgttactgacattaaaatactttatagcattgtctctgagcaaaagctagtatttaattgtacaaatgaataagcaagttacatgttattgtttgctcttgacagggtaggcctcttaaaagaaaaaaaacaacttgttttttctttatgaatcccctatgccaaacacataccttccatgcatgacatgagatctgcaaactggattttagccaccgtatttatttagtcaaaaaaattgtccattgtagcagacccgaaaacctttttgctgtgacatgaaaccatgttattcttatcttcttaaaacacagcctgggatggaatggccatggcatttttttcagagaacatcctttatctgctatgactgaatccttaggaaatgtaagctataaccctttgattttcaagaactaccgaataagtgtatgaagaggtggttttttaaaacttcaagttggaatttttatgaggtcactgtgtaatttgaagaattgtgtgagattgtcatgatataaattccttttaaggactgataaatagaatgaaaagtttccaggtagtttaaaactccacaggtcagtttccttttcattcctgcttcactgtggtttataagcctacgggagagcaccgttgctcagatgctactgtgagcttcctgtccggtgttagaaagtaactagttaaaagttcattttagaatgtatggtttttggggatgaactaagaattagttattagttccaaaggactgagaaccaattttaatattttcacatttataggaaagaaattcatatgtccctgaaacttctaggacaaaaccaaacaagtaaggagggaactgttgcaaagccatttcatcgagaaggggacagaaggagaaatacacacatgtatacacaaacagaatggttgagaaaacgttttaataaaatgtgagggttgtatgtgtgcgtgtatatatttacacttaacctctaaaattctcttctacagtatctctgttatgaatatgatggaaaagcaacattttggtggtgagactattgttaaaataaatttgagaaagacgaaaattttgtgagtcttgataattacaagtcaacagctatcgaaagttagcacagcttgtctgtggtgctgtttttttccccactgcagtggacttatgctgttttcatgtttagaaacaaaaaggtttcatgtgattcatgtgtaagatgcacagtatttgacatcctgattatgtaatccctattccatctatccagtcttacacttatggttggcctcaaatctattgcatttatgataatgtattatatctagttgagtttaatatttttttattagcctgtaaataaagatggcatcttctacattaaaatgatattgatctcatttttttaaataaacattttgtttccttgacgttaaatattttggcttgttattt

SEQ ID NO: 122603 - DNA, 1100 bp, Homo sapiens
aagatttatatgatgtccttatggcagtgtacaaaaatcattttctaggggtttcttgaattagttaaggaaaggtttgtatgatatccttatttaatatctgactatttagatgtatttgctgaattgctgtgtgcagtacaaagtagcaaataactttaaaactgaatacttgttccaaaattctataaatttaataattaagcatcctcttaaattttagatctattagcaaaaagactatggtcagtagaaagagctactataatgtttaaaggaactgtagagaggattcacgaggctgatcagacatgatggcctcactacctctttagattctagaattttattatttattttctggaaatcagctatctcttagatctctctacccctaagccttcccacaaagaatttggaaatcctttttaaattacaattacaataacttgactttctcattttcatttcctgttttagagaggagagattgaatttgaagtagtttatgtggctcctgaagtggattctgatgatgaaaacgtagagtatgaagatgagagtggacatcgttaccgtttgtaccttgatgagttagaaggaggtggtaaccctggtgctagttgcaaagacacaagtggggaaatcaaagtattacaaggtaaaaatcactctaaaaattattattaacatattcattattattaaatgtttaaaatgtgaaggcctcagaatttcttcagtaaaactgttttgtgaggaaatcaaaggaatgaagagctttcccttgtttattgttttattgtatactatgctaacagtttatttaccatatatgttcttctatattcatcttggactgttaagacaagtacattaccagttactctactgcaagtgatccttgaaaaataaataaaattttttctagactctgaaacaaagaccaatatactattttgagtagatctatcttgtagactacattgtctgtctgtcttgatgcaaattcatctctcacaatgaattttaagctaattatgaataagtatgaagtatactgtcaccttatgattgctattagaatcaacttatattat

SEQ ID NO: 122604 - DNA, 1541 bp, Homo sapiens
gccaagtagccataaaataccatatgctggacaccataagtcataccttatagtgcaacaatgaatagccagtcactaatcagtgattgtaaaccaatgagaattcttatcaagcaactttgtatctgccttgttcctttttccctttaaaatctgcttgtaactcaggtgccagagcactccccaggcatctgggaaatatgtgttgagtagctgtcctcattttggctcaggtaaactaaagtatattttgtgcctcagccttttccttttaggtttacagtaggaatagtaatactagcagtagtaggtgtgttggaatagaataaagattgtgaaccaatactttaaaaaattcacctctgccttgaaagagtgttctgcctgttactccttttttaaagtaacagcacaacaatacaccttctttcacatcctcctttccctcagcaattgctctgttagtatctctttgaagtgatttattattcatagccaacagtagagaaacttttaactttgatctagagccacattgataatgaactggtgatatgcttgtccctttgctgctttaaatctgtcctgtttttaaataggctgttttgcaacattgaagcttaagtttaatattgatccagtacgcacttatgaacacgaattatgtgccagatgctgtattgggcacttaggatacaatggagagcaaaaaagggatgtagtcatggcttttatggagtttggattatattggaggaatttgttgggagaataatcatgtaaatgagaaattgcaactttgatgaatactatgaaaggtacataagagtaaatgagaccctattttgggatgtcagagaaggcttccctgaggaagttattgagctaagacataaaggaattatgtgtaaataggaatgaattaagctaagagaaataggaatgccattcaacattgccgtagagggaatgggaagtgaaaagcacctgtggtgggcaagcgcatagtgcatttgaagattcgagagatagttggtatgtgtaacaagagaagagggcaaaagaagcaaggcacaagataagtttgaacagacagagagggactatttctacatgactttatggccatgcaaaaatatttggggctttatcataatcgtgggaagtcttttaaaccagttcgtagcctcagatatgaagttagaatagttcactctgactatggtatggagaaaattgcagagaatgacatgaatgaatgcagaaaattgtttagaaggtttctgtttatgtgagattatgatagtgtggagtaagataatagaggtaggagaaggtattcagaacaagagaaactggagaggtaaaaataaaaaaaacctagagatggattggaacagagggatgagggagttcaggataaatccaagtgacaatcttgtgcagctggttgcctgaatagatagatgaatgtgttatattattagcaataacaatattgccaactttattgatcagttaccatgggccaacctctcttc

SEQ ID NO: 122605 - DNA, 1114 bp, Homo sapiens
ctactcctcagaaaccgtttctgtcggggccgtgagaggagacagtataagacttcctggacccaagggacgccgggtcccctggaagcgcccatcgcattgaagaccacgtgtgccttgctggggtcccattcagacaagtcccgggtcgttcgctcatcgccctccacgcgaccagggggcgcccgcggtatcggcccggctagttcgcaggcgtgcgccttccctcactgcgccggaacgggccacgttctcggacccagaagccgcgtcagaattccacgctggccaatcggaactgtccatgtactactgggggcggggctgccaagggaggaggaagatggcggcgggggcgaggtgaggtgttggcagtggaaaggggttcgggctcggggggcggggggacgcggagcgatggcccgcgccggccgcaggggcggataaaaagccgtcgcgctgcgggagtgggcgggagggagagggggtgtctgagggccacaagagtatgacggggctgtacgagctggtgtggcgggtgctgcacgcgctgctctgtctgcaccgcacgctcacctcctggctccgcgttcggttcggcacctggaactggatctggcggcgctgctgccgcgccgcctctgccgcggtcctagcgccgctcggcttcacgctccgcaagcccccggcagtcggcaggaaccgccgtcaccaccggcacccgcgcggggggtcgtgcctggcagccgcacaccaccggatgcgctggcgcgcggacggtcgttccttggagaagctgcctgtgcatatgggcctggtgatcaccgaggtggagcaggaacccagcttctcggacatcgcgagcctcgtggtgtggtgtatggccgtgggcatctcctacattagcgtctacgaccaccaaggtgaggcccggtgcggtggtggggggtggccgaggcgtcttggaccgctagaccgctggtctggcgggtggtgcccatggcacgagttgccgcggcctctctgcaaatcacagcgctagcgctttcgaggaagggagatcagctttattgaacacctactaattctctggatttgactcagtagcttttta

SEQ ID NO: 122606 - DNA, 2106 bp, Homo sapiens
ggatgtcaggtttgattttcaatcagatcttgaaagcattggaatttctttaaagatgtgagaagaatgatttaagagtattggtatgaagggaagaaaacaaaagttttattctctgttcaataaattacctgtgtgctctagagaggcatacatctttgtcagattggtaaatttaagtgcagggttttgtcagaaagggaaggcataggccagacagtaacgcttacaggctgatctctgattgccctatcatctttcctgcagcccgcaaggaacatgatgacgcagtagcctgtcatcaccaaatgatgatttgccctatagggtaaagtttgatatattcagagactgacatttatggaacttgctaaagaactcagcagaccaatagaaatcatgagactgttaggagatgacacaatccatgcctaaaccaatgcaaccagttttgcttggggaaaaaaataggtgaagcaaaagtggacataaaggcattaagcaacgtggtggattgatgtacagccaggtgattcttttaaagcaagtatctttatcttccagtagggaaggaaaatgtatagctaaattgtttgacttgatgaccgtgcctactagtacagactataatgttgccacatttccttgtttctgcaagtcctgtgtttaaattgctgatgtgattcagaagtatcctgtgtcatagttgctaaaagaaaaatgattagtaattaaaaggaagaagtaagctaagccaagttttggctgagaactgaaaggcaccttaaggagcattttcagtgaaagggcttacaggattttgtatcttaactgtaaaatcagtttttttgtttgttttttttaaaagaataagaaatattcctgaaataagagaccttcaattagtccattcttggttttgattcgttcatacattcatttacaggtgacagttggggtctgttaagtaccagatactcttccagacatgggaatgcagcagtgtactcatggaacttagatttcagtgggagtctgacaaataatatacgtgggtaaatatgtggtaatgtaagtgcaatgaggaaaagtaaagcagagaagggaagataggaatgttgaaagtcagtggtgtaggaaggggtacagttttaaatagggaggccaaggagaggctctttgaatatagacttgaaaatataggccatgtggatatgtaagaatcactcagagggagtatagacatgtaagctttatttagtgtttctttttcagtggtttttttttttttttttttttgagacggagtctcgctctgtcacccaggctggagtgcagtggtgtaatctaggctcactgcaacctccgtctcccagattcaagttctcctgtctcagcctccccaagtagctgggactacaggtgatgcgcgccaccccgccctgctaatttttgtattttcagtagagacagggttttgccatattggccaggctggtctcaaactcctgacctcaggtgatctgcctgcctcagcctcccaaagtgctgggattacaggtgtgagccactgcgcccggccatattcagtgtttctaaataaatgtctatttaagcttatttctagatagatatttaactatgaaaaatcctattgacatactcgtaaatgccactgggatacaagaagtacaagaaatggtgtctcttaaagagtttccactcaagtaaggatgtccattaaaaattaacacaagctaatatagaaatgctaagtgaatggcagatactttaaggagcgaaaaatggaaaatttcccgggttacctccatatttgtctggtaaggaagggagcaacacctgagctggacctagtcaaaaagatagaattgggattggcgtgaacagtgttctctgtgtgtgtgaatggggatttccctaatggcagcattctcattagactaggttcagtaatagcattgagtagagtgttgggagcagtgaatttatgtaatgaacagttgggaaatgaggtaggatgaaggcttggacagctattctggttacctactgctttgtagaaatctacccaaagcatagtgtttt

SEQ ID NO: 122607 - DNA, 1017 bp, Homo sapiens
cccagaacaaatgtttccagagacttggccaaaggctgaagctgaaagatgtcttaggacctaacctaggaaatcatgcagtgttatttttgctatgttctcttggtcagagaagtctcacatctgttctgcatcaagaaagtggagaaatggacttcacctctcaatgagaaaatggcttgtgtagaaaggttgggtgaggatttgaagggagatggacgggcagccactttgaagacaagcttaccaccttacattttattctgtcctacacccctttgctctcaaatttgtacttaaattcgttctaattatggttggatctagataacaacatttaatccttagactaaaagatctattatattgaccttaatttgactgccagcaaactgatctttttgtttttcactacctgcaatatttcttgattataatagagtctgcaagtaattctttcatctttcaaaaattcaggttgttctctcaggacagtgatcaggaattttttgagttcagaattctagcgagatttggctgttctgtctatatgattataatttaagaaatgaccataactgggatggtacaagaaccaggggttggggtaaatggattttattgttctagccttagcagtgttgtttgcctgtgtctcacatgcaggtacacttggctccaagttatctggatatgtattgttatcttaagtgatggaacttgttcttatttcctggctttattgtgccttgctgggaaccttgctgttgattggtatttttcaaaacctgtctgtggaccatctgtgaattagtcattggggatgcttataaaaaatgcagattcaacacacttagtaatcaaacttaatgagggaactgggacctgggcgtctctgtttttatcaagctacctgtatgatacttctgcacactgaagtttaaccctaacacagatcaaaggatactctgctacttgccttacattagattatttatatttcatgttccttttcat

SEQ ID NO: 122608 - DNA, 1272 bp, Homo sapiens
tttaaatcgaagctaggttgcttttgaaatggtttttgggtacaggtttctcacagtaacattttaaaagtctgcccagtgtatcctatcttttcaacctgtttctcaatgctttgcataccttttgctatgtctgtatttaggtatttaatgttccagtttcctggaactccctcttctcctttttctggcaaatggctgtatgcctaccaagaggctattgttcatcttttccgagtcaatcctaaatatcaccttgtatatttttgcctttcttgactattcactccgttccctatcttactatatctctgaatctcctcagaacttcaaacatctctaaaggtacttctgttctctgctttgtgtagtcatatttgtatgtatatgtgcataaactttcttactagattataagctccacagatgctatccatccttctcatttttgcttttcttacagagtgtatcttggtgttatgcatgtaatgaatagttaatatgtgttccttgaattcaaagaagggccgcatttcctgtagataagaataatgaactgagttgcactctctgcttcccaacacaatacccagaagccttaaagtaatggaggaaaatgaacatagtttaccctagtttacttagttggcacagtgacacagatgctattgagaagtatgattttcttaagtttattctccttatgttgaaatacagaggtgccggaaatgttgaaagtctaaatataaatgtgattacatttgacatactgaatagtacaacctagtgtttatcttccctcatgtggaaactcatgtaagggagcattctattcttaatctctacctttgtgtagttgactttttgtacagtttcacatttatcttaacatcctgaaatgtcctcttcacctttttctggcaaagggctagctacctgtcaaaagactgttgattcttttcttttttgacatggagtctggctctgtcgcccaggctggagtgcagtggtgcgatctcggctcactgcgacctctgcctccggggttcaagctattctcctgcctcagcctcctgagtaactgggattacaggcatatgccaccatgcccacctaattttttgtatttttagtagagatggggtttcaccatgttggccaggctggtcttgaactcctggcctcaagatccacctgcctcagcctcccaaagtgctgggattacaggtgtgagccaccgtgcccagcttgttgattcttgtaagttcatcc

SEQ ID NO: 122609 - DNA, 1037 bp, Homo sapiens
gagcttttgtgcttaaccgttacattattttgatttccactggtaaaagaatgtgacgacagtagtcacttttagtactgtttctgattcttttgggtcatcttcaagctttggtaaacaggcacttatctacaggttatagaaattatttgtaaaagatatttaaagactaatagagatttcttcatcccactagtgtacatgttcatcctttgagttataggacacattttttaaaaaaccagctaaaaatttaatgttatggtgctccagctttgtgttgagctgttagtttgtcaggtgagcagattctgtaaatatattctcattttaaaaatgtccaacaagatgccgaaaaaacccacatggattgttcattttacatatctcttgtgctgacaagctaggacttaaatctagccctcattttgttatatactttgtcaccattacacatacctgttctcttactacagcactgcagtataattttctacagtataattgttgttctgtgaggtgtcctgaagggctctctcctgaaataaaatagcttaatggcctatgtattttgttatgatttattttcttatgactacttcagtcatgtaaaattttaatggtagatttttttcattttaaataattgctccataaatatatgttttcttctctgaagattgctctctagtcgttttataattgagttgttagaggtaacttaggtgactagtttaaaaagaaaaagaggtaggccaatttttagaacaggcatttatttataaatagagattactttaattccataaccagtgaagtgcttaataatgaggagagattgtttcaatgcttatctcatttttttctcttgtttgttcttgtaagtacttgctattatttcttaaaaagtctgtttctgtagaagggaataaataatcacagtaaaaattccagtttcagatttaaaagagatagtaaatgtattttaaaagtctcattttatagacttgattatacatttcacataccttttaaaa

SEQ ID NO: 122610 - DNA, 1421 bp, Homo sapiens
atacagtatgtaacctagtaggtagattaggcaaattaacttctactctactctgttttcttctaatccatatgtgtggcttctcctctgttgtacttccaaatgttgtggtgtcctagagtttggagctgtatgtatgcctttgtctttctgttactcactttgttgcaactactcaactctgctagtgtagtcaaaaatggccataagcaaatgtggctgttttccatagcagtagtttgctgacccctgtcctgcagataatctccccaatcccatggatttaaatgtcacgtgtgtgctgacacacaggtttgggctggaaatacagtcctgatatctcccataattccagacttctatatctaactccttgtctaaaataatttattaggtcaatcctatgccttgtatgtctaaaacagtactttttgagacctaatccttgttttagtctccattgcagccatccaagtttaaattaccattgttctttcacctggattactgtagtagcctcctaattgatctccatttttctatcctggtccctgtataatccattcttcacctaccagcgaggtgatctttttttgatggcatcatttggactgaataaaaccctccaacagcttctcgttgtagttggaatgctttcgaaattcattaccaaggcccacaggccccttcatgttacggccactgctgacatttctggtgtccatatgatactctactttcctcgaatgtgatgagaaacctgactgctgagagaatatgcaatagagtgattcctataatagcaatcacctggggaagtattgatttttatattttaagaactgaaaaaaacagcaaaaaactttttgtttaatacagttgttaaaataatcatgagactagcaccaaggaaggatacatattacacaagtaaaaaaagcaggatacaaattgcataatcatatacactaggattacatatgcatgtggacaaagactagaaaatattgagaagtcgaaatagttgtgttacaatggtaaggttagggacattccagtagttatggggaaggttagggaacattcccttattatctaaacattgaacatcttattttttaagactagaatttaaaacaaatgtttcttagaatctaaaatgaagtcttcatttggcccccaaaatgcatacctgctgtttattaagaaataacaaaagcatggtagtctttctgaggtataactttgctagaataatattcttctttcacggaagttgaagattttgtggttttacttttatttttttcaacttttattgtagattcaaaggatatgtgtgcagtttccttactttggaaattgaagattttctcgtgtgtgttttgtcataatggctatttgatatatcttttctttct

SEQ ID NO: 122611 - DNA, 1983 bp, Homo sapiens
atttaatacaagtagtaaatctgcagaaaaggtacattagactgtgagtgaggaacataacaggctctagaccactgctgcagtttataatttcttggagaagaaccttaaagagtttaggcctcagtttctgaatccataaagattttaagtaagtgatctcttaaaattcctaagtctaaatttctgtcatattcacatgccactacttaagtagttacctctgttcttttttttgctggaagccagactcttgtattaacaaagttttgttgtcatgttttccttttagattctagtttaggactagtcattacagctttgtttgacattcgtttagttctggatctagtgttgttttcatagcaagcattcacttgaagaggaaaaattaacctagttgtgttttacttgcctttttcttttttaaaggtattttcaaaagaaataattccagattgatggatgaaattttaaaacaacagcaagaacttctgggcctagattgttcaaaatactcaccagaatttgcaaatagtaatgacaaagatgatcaaggtaagcatgagtgtataattgaacatgtaacatatgaagatgtgtgttttgtgtttcatggcaatttctgttactctgtcatttattcattcacgttgctctgttactctttattgtcaacatctttaatcatcagatttagactttctcgtcttaatcttggtaaaaagtgaacacatgataaggattttatttaaccaggcaaattttttaactggttccacagagaatccatagaatggacacatttgtagagatattgaaatgaatatataaatagaggtacaactggttgttctatggagtgaggaaagaaattgaatctttgctggacaagaaagaatttgcatgtctatagataagaattttgcagtgttatctgagaatcccatcaattgtaagatagctcctataaaagtagaattgataaaggtatgtatgctataggcaatgcatattccactctaacagttttttcttagtctttattttttcttttattctgtgttactgctaacgatatcgcaattatacaggaaattttagatgcgtgaaaatttgttagctagcctataaagtttctgttttctagaggatgtagtcacaatgtatagtcattctgaacactttgaaaagaaggcagtgtataaatatatacatggatgtgatttgggatatatggatcctttcagaggagaatagctaagtatgttttgatattgaaattgaagggcttaaaaaattcttgtttactgtaagaactgtatgtttattttggtttaaccttgtatttcttaaaactgcttttgaaatatacctggaagagagtgtttttaaaatacattgtttgttttttcttccagttttaaattgccatttggcagtgaaggtgctgtctccggaagatggaaaagcagatattgtaagagctgctcaggacttttgccagttagtagcccagaagcaaaagagacccacagatttggatgtagatacgttagccagtttacttagtaagtttttttatatatatatacatatatatgtatatgtatgtgtgtgtgtttagttttgtcacacgaggatacagtatgaaagaaaatatttttgtttctttcacaccataaagcctgattcttttgttgttaatacctgttaaatttctgaaatttaaagacctatgtaaaaatggtttcgagacaatgaaatttgtagccactcactcgcatgaggatttaatggtaaaggagatgacctttgaggatcttttttgtagtgatgaatattcttgaaaataggacttctgcttgttagccttcctctccctcttcccctttctttttagtttgaactttcccttaactttgaacttaatctttttatgaggtgatcccaggaatataatcttactgttaccatgattcc

SEQ ID NO: 122612 - DNA, 1004 bp, Homo sapiens
ttggaaccttagtctcttggattatagtatcttttttctgtactcttcaaattttatttttaagctattgaaatacccttgtcctttttttccccaagtcaggtctcatatggaaaccagttcatgaaagagataaaaattgaccttgtccttgttgaggcagatgcttggtctccttttcctctctgaggctgctctggctctggggaccaaggaagacatttgtgatgtatggctaggagttggtctttttgggttcatagctgtaaaatgaggtgcatgagggaaggaaggagaatagatattttaaaatttccttttcgtctctgaagttattcaattctgtggccagaatcaagcagtcacacctttagaactgtagtaactttcccaggattccaagagaacacctacattgagtcttaaaagatacatgtgattttgggggcacctattgggtatagtgtgggaggtgggttaccctttcttatcaggtaatcaatcaagttaaacagacttttgagaaaacttccacatttggaatgagcatagatattaaagtatgtattacagagttgggggtggggcatggagacatacagataaaacttctgaagaaaacaggtagtttaaagaaccaatttgattaatacattttgcccatgatctgtgtgtttctgtgtgtgtgtgtgtgcacatgcagtgcatgttaagttcatgtgtatttatttatttccaaggttcaaatggttgtcctgatcctgatttagtattgaagttcggtcctgtggacagcacattaggctttcttccctggcacatcagattgactgagattgtgtaagtaattaaaagcgtactgactttgtttagattcagcaagtgtttcttgagttcagcactgtactagatctggtggggatttccaaagaattataatactggatcctttacctcagttatttcacagtaccactggtaaaataaagtcatacataaatgag

SEQ ID NO: 122613 - DNA, 3487 bp, Homo sapiens
cccaccctttcagtctacatattatgattaagacattttccgtgcctgtcatggtgctgtctggtggaggataatttggtgtattctattcttaacttctttttggtccttatcttctggttcccccctacattacagtgtatatctaattgcttttctccccccgtgttttcttttcagctctttgccttcccacctaaacatcagttatgaggactttttctctgcccttcgtcaatatgcagcctgtgaacagcgtctgggaaagtagtggtcattggttgcataatttgatttgaggcttgtggaggaaaggaaccaagtgactctgatgtttacaaagcacctatgaaaccctgtacacacctagttcataatcctcataatttatcaacaaacacaaaaaagtgtcttacttgagagtgagtgtgtgtgtgtgcgtgtgcacgtgcacacatgtgcacgtttgtatgtatggaaataaacttataaatggggacgtattggagaaggaaatacatagacctacaactttgagcaaatagcagtgatgttttaggaactgaaatgtcacacttaaagtcttcagcccagctacttccctatttttgtggggagaagagggcctgattagaactgttctggttgtgtttggcgggaggggaataatttttgttcagtccttcttagtgaccaaactttaatttttaagaataatatattgacttactgaactgaagcattctgagttgaaaggagctccagaggagtggagttctgtgttgctcacatgttaaaatcttgctcaccttcagagcagagggaatacctatcttcagatatccgtccattttcatctcttaattgtagtcaaaagtatgacttgagagtgttgctctggtattctgggttctgaagtctggtattctggtattctgggttcaaaagtatgacttgagagtgttgctctggtattctgagagttgctctgtattctgggttctgaagattatttgaaaaataactcctactacattgaaatgcagacttaaaaatttaaacattggattaggcagtcaaaaaaaccaagcaagcataaaaggtcaataagttgtaatcttgatagtaaaggtggaaaacttattataaatggaaagaaagttttatttccttttttgtttgatgggcagtatgccatattatacccaaagttcttttaaaaaatatttccatcaaccatttttatttaaaataaacatttgagggaagttaccaaggcagcttttttcctcaaaagtaacctgttcctctttggaatagcacattttaggggcatggttaatacctgagatttttactcagtaaatcctgatggttactgtgtgtaaaatatctttaagtaggattgaaggcctctgtgggggaataaaatattaccaaagtctataaaaataaattttacatgttctcttttatgacagagagcagcactggttctgttatttttaaaatgaataattgatttcttgataggtgtttaatatttcttccctcactgctgattcttagatagaaaccattctttatatttgatagactgctttcagaaaacccttatcaacaagtgtacaatacttatctaaaactatacatttagaatggagcagtttaatactagatctcagaagttttgaaaaatagcaaagaagactggatttggaaagcatggtctacaattggttgttaaattctgaagctatgaagaataaatgtttcaactttggattatgaaaccccatttatgattttttaaatacacttgaaataaaaatgattaaactaaattttggtccagtgacattactttgcactgcataatccattatacgttgtacgactttttttttttgttttaatttattactgagagttttgtgtgaagctacagcatatctaaccagagaatttctgattccttatactgtgattatattatattgaggcatttgtagtgcagctgaagactgaatttatgccttttgtaaacatgataggtataaatgtcttataaacattctggagtatgtatagctttaatgaatgaaatttaatggacctgattaaaatgaagggatttaatcgttgttaaagttaagttagtcaaataaattacctactggaatatagcccaagccagtaaaggtttaatatttgcattttcgtgcttttattttctccttccattcataagtatatacttgaaagtacatctgtagcctatgatttgagtctcttgaagttctaggaagaggcaaactacaaactactaggattctgatttcagatgtagtcattccagaaccttctctttatgagttcacctgctagtacaatctccacaacttgaatggcattggttgttctgtaattcctgccaaaagcatcacaagttgtacatcatcaaggctccctttgcactcccaagaagaactggtaattttaaacaaaagtatgtgtctttatttgtattggaaaatactgtctttaaattgtttcttgttgacactccccacaatggaaaaattaccgaattaaacctgttttatggatggcagcttggagcatagcaagaagttggaggatttgaattccattcccagttctcattgtgttttgtttcttaaaactataataatcggttactgttataaagtttaaaaggtggttttaatgtgaatagcaaattctggtatatcgtgactaacgcttaagaatgcctgtctttgagaggaaggtgttataatattaatgaacagtgccaaatacactgtgcatatctgcaatttaatctttgaatgtatgttactggattagctccctcctcctgtgtgatggtaccatgcatagagtcaatcaaatccttgtgatgttttgtatggactttgacaatatgtaaataatgtgtaaagccagtttttatgattaaggaatcaaatttattgaattttattattgaaagttgaaacttaacatgtatgaacaaaaaccaataaaagaatatactcttttcattgactatagtattatgtgaatgctacatttgttctgaacacttaggggctgcaaaaatgtaataagaaatgcatatgactagatagcaatagtgttttttttagatggtatgctcttgattgaaatatattctcacttttaccaggttaaacatttggaatcttataatgttacttgctttttgatagataatagtgaaataaattcagctttgccattgctggagttgtcaaaattccacagtaattaaaatttgaatttttaccgaatatgaaatttccaaattaaaaacgtatatgtgtactcttttaaaaaggaatttgatagttcttgtcaaatgagaaaatttaaaggtaagagttatggtttgtcttatgctgcatagactattcacctcctaacttgaaggtctaat

SEQ ID NO: 122614 - DNA, 1072 bp, Homo sapiens
acagggaaccctgtggctgtggcaaccacagggtcagaggagtggtgcagctggaaatgtggatggaatggtttgggagggaatgtgaggtggaggtgttgagaatatgacttttgagaaattttgtcctaacaaggaatagagtgtaaggagagtcttttaatgggagagataatacaacaggtctgtgtgcttatgggaatgctgtactgaagagggaaaattgcaggaaggagtgagataaaggaaggagggaaccttgagaaggctcagatggtggaattcaaagcatggtggggaggaactagtctttgacaggactaggacactgtccatagtacagaggagacactgagaatgggggtgtaaatgaaggtaatttggtagatttcatgatttcgtggtgggaatcataggcagttcctctctggtggcttctctttctctgtgaactctgaggcaaggatatcaatagtgaacaaagatgctagttgttgggggaggtgtgtaggatgtttgtacaaagagaagtgggaaacagtcatttcgaagagtaagaaaggaaatatactaaagaagtgttatgtgtaaagttgacatttgtggtggggattcagtagagggcgtgatgagcagaaagaagctaccgctgtttagaatctgcgaccttggaaaagatgaactcagatctgtgcccaagaagccagaaccatcatcttataaatgaggatagtggggcagtgcatatttgagggggctcagtaggacttgggtcctgattgtactggggagtggggtatgagagagagagaagagggaattaagataattttaaaataattttttttttaagagacaaagtttcacgccatcatccaggctggagtgcagtggtgcaatcatagctcactgcagcctgaaactcctgggttcaagtgatcttcctgcctcagcctcccgagtagctaagactacaggtgtgcaccaccatgctgggctaatttttaatttttttttgtagagatgttggtcttgcaatgttccccaggctggtcttgaactgggttcacgt

SEQ ID NO: 122615 - DNA, 1115 bp, Homo sapiens
gctttatttgacctcagctaggaatgtgcatgttgtgtgactcaaattttttgccactctagatgtatgtctgtgaatgatcatgaaagtggcaagagtattgaaatggggttataaataagttttagcaagtaagcaacttcacagttatggagtccgcaaacaatgaggatcaaccatacttctttgaaagtcaccttctctttgttcaagtatgtttgaacaaaaagatgtttgtggttctcttgattgaatttggtgccctctcttatggggctggttttcttgaactatttgatgattcctgtatgtgctcattgctgtatttgagattccttgcttactcacctgtaaataacatttctgcttactaggatctgcctttgttggagggtgagagttgggatgtgctgccaagtgtggtgtttaaatgctcctcttctgcatatagggactttctgtttcttgtgaacactgacagtccaagtccctccaaagtctactgtcctcacatgctgtgtaggtccaggggtggatgcttctgctattgctgttgggggtttgggtagttggtggtaggattatagaaggtgtgagggtgggatgtgctaaactgttccccagccaattactggcccacttccctaggacttcttcctgctgccttgtctgtcatccctgaattttgagtgtctcagagttgctctcatctttgcaattgagttctcctccatgttatctggattgtggttttcctcatcaaagactgaattcttgtcagtctcgaaatccataaaatttctgttcatcaattccacccattcttgttatctagcactgttgtgaatttattctttttaaaaacagatttttggtatttttaggaaattgaggtgggagtagataggcataaaggcttagtctgacatttggatctaattccctactattttaattagaaaaaattacagttcttttaaaaaaaaactttgtattttaaaaatgttcacacaaagatgtctcaaatctggatatcaaggcaggatttgcatggaatcctttattgatggcttatgtaggcatctataagaataaacaagtagttccaatttatt

SEQ ID NO: 122616 - DNA, 1030 bp, Homo sapiens
cctctgtatggttctattcccaagcatcattggagggcttctgcatgtttataggggctgaagtacgtgggacggcaagcagtcatgaaaagaaaaagaggctacgtgaagtggaatatagttaatggttaatgttttatttttggagttaatgttaagctttacattttctaaactctgttaaactatgtaacagtggtcaaagacttttttttgtatattcataccacaacctacactattcttttataatcccaatcttttacagtagttatcagcattgtttttacattgcctttttttcttattttttcccaagaaatcattttggggcagggagaaattctccatagactccatggtgcctctgctgcctgatggatgttaaggattctgatgtcagtctgacaagctaggcattgcattctctgtatgtttcaagatcacagctccatgcttatgcttttaagaatacaaaaatacgagattcatatttaatctgtgatctattacaacccccaaatctgtttctgtcaaacttatatttaaaatatatttatttacagtttctgtttttctttctaaataaattagcctttctttatttctttttacattgatgtgatctgtaaatcagttataggaaatgaagtaattttgactctaactttactgggtgtatttctgtcatgtatttcttgttagcttttccttctgagatgacaacaaatatttttgaaaattactgaattgcagatggtatgaaaggagaccaagaagtcaatatttaatgaggattttgactagcattgaagcctttatttcaagaaataaaaactatgattttagagaacagcaggttcttttccctaatcttcattcttcgtttccatgcacataaaatgttatggaagtacaaagggtagaaactattttaattttccttgacaacagcattcagaacattagcagtggtgaataatgtgggatgatgagttgacatttaattggagcagaatctgtggtatgg

SEQ ID NO: 122617 - DNA, 1479 bp, Homo sapiens
atttcagagcctgttattggtctattcagagattcaacttcttcctggtttagtcttgggagggtatatgtgtcgaggaatttatccatttcttctagattttctagtttatttgcgtagaggtgtttgtagtattctctgatggtagtttgtatttctgtgggatcggtggtgatatcccctttatcattttttattgtgtctatttgattcttctctcttttcttctttattagtcttgctagtggtctatcaattttgttgatcctttcaaaaaaccagctcctggattcattaattttctgaagggtttttttgggtctctatttccttcagttctgctctgattttaggtatttcttttttttttttttcctgcctcaggtttatttgtacaaatagcacaggaggaccccagccccatgcagatgatagcccaggggtgggggtggggggtcgcaccagtccttctgtcctcatgttggcagagatatctactctgaagcctttgtaggggcctgggtacctttgggagcctgagctggaactgaagctggagctgcagcctgggccttggtttgatccttggccttggccttggcctttggccggcacagcctgagccccttggcaatacgggcaagagcacgcttcccaagcttggggtgggcaacgtaggcatgtcgatcgagcttgcagctgactccctttgggatcttgggcttaacctccttgggctttacgagggccttgatagcctcggcacgtgcactcatggccttggcattgttggcctgcatcttctttaggccctttttgttgtgcttcttggcaaagcgcatgttcctcaggaacttggggtccacccccttaagagattcgtatctttgtgatcggggtttcttgataccatttctgtgccattttcgggactggttgtgtgtggtgtggttcttggacttggccatgtctgcaccataagccgcggctcccgaagtgcctagaaccggaagagctgattttaggtatttcttgccttctgctagcttttgaatgtgtttgctcttgcttttctagttcttttaattgtgatgttagggtgtcaattttggatctttcctgctttctcttgtgggcatatagtgctataaatttccctctacacactgctttgaatgtgtcccagagattctggtctgttgtgtctttgttctcattggtttcaaagaacatctttatttctgccttcatttccttatgtatccagtagtcattcaggagcaggttgttcagtttccatgtagttgagtggttttgagtgagtttctgaatcctgagttctagttggattgcactgtggtctgagagatagtttgttataatttctgatcttttacatttgctgaggacagctttacttccaagtatgtggtcaattttggaataggtgtggtgtggtgctgaaaaaaatgtatattc

SEQ ID NO: 122618 - DNA, 1084 bp, Homo sapiens
cagaaggcaagaaatacctaaaatcagctcttccggttctaggcacttcgggagccgcggcttatggtgcagacatggccaagtccaagaaccacaccacacacaaccagtcccgaaaatggcacagaaatggtatcaagaaaccccgatcacaaagatacgaatctcttaagggggtggaccccaagttcctgaggaacatgcgctttgccaagaagcacaacaaaaagggcctaaagaagatgcaggccaacaatgccaaggccatgagtgcacgtgccgaggctatcaaggccctcgtaaagcccaaggaggttaagcccaagatcccaaagggagtcagctgcaagctcgatcgacatgcctacgttgcccaccccaagcttgggaagcgtgctcttgcccgtattgccaaggggctcaggctgtgccggccaaaggccaaggccaaggccaaggatcaaaccaaggcccaggctgcagctccagcttcagttccagctcaggctcccaaaggtacccaggcccctacaaaggcttcagagtagatatctctgccaacatgaggacagaaggactggtgcgaccccccacccccacccctgggctatcatctgcatggggctggggtcctcctgtgctatttgtacaaataaacctgaggcaggaaaaaaaaaaaaaagaaatacctaaaatcagagcagaactgaaggaaatagagacccaaaaaaacccttcagaaaattaatgaatccaggagctggttttttgaaaggatcaacaaaattgatagaccactagcaagactaataaagaagaaaagagagaagaatcaaatagacacaataaaaaatgataaaggggatatcaccaccgatcccacagaaatacaaactaccatcagagaatactacaaacacctctacgcaaataaactagaaaatctagaagaaatggataaattcctcgacacatataccctcccaagactaaaccaggaagaagttgaatctctgaatagaccaataacaggctctgaaattgtggcaataatcaatagcttaccaaccaaaaagagtccagg

SEQ ID NO: 122619 - DNA, 1067 bp, Homo sapiens
atccttattttgtgatatagtgatatctcaacagggatattgtaagactcaaatgcaaaatgcaagtgaaagtaacttaccaatgtaagtcactaagatattgttattatttatcagtctttgtatggaggtcctgtattttgcaaattcagtaattaatctggataaatatgcaccaggccaccttcaatttgttaaatttttactaagcttatatttcttcttggaagttgatgattgcacaggatgatttaggtgtctgagagtgctcttttgaagttttcatttttattcatttcaaatcctgaaattgagtaatctctaaatgttcttatggagaaatatccacaaaaacgtttggggttacatttaatatccagaatgtctgttttatcactgagagttttagtgatgactgaaagtgctaagttaaattgtgtatattttgcttattgtctgaaacttaaatcctatgtaaacaatgtactaaccattgttttggaaaacaaagttctaatcctactagattctgtcctaccatcacctaaaattcagaaaaactcagtttaaaatttattcaacaatcttgttttcaatttttttattttttattttttaaaaacagggtctcatgctgtagcccaggctggaatgcagcagcctgatcatagctcactgcagcctcaaacttctgggttcaagtgatcctcccacttgagcctcctgagtagctgagactacaggtccatgccaccaagcctggctcattttttaatttccttgtagagatgaagtcttgatatttttcctgggctggcctcaagtgatcctcccgccttggcctctcaaagtgctgaggaatacaggcaagccaatatcgtacctggcctcaacaaatacttattgagtgtctgttaggtgctagagatagatctagttgctggtcatacaaaatcaaataagggaatatacagtctcaggcagagaaacagacaaacacataaaaacacatgcctacaacatggtggatgtcatgacagaggtatttagtcacaggcatgctagga

SEQ ID NO: 122620 - DNA, 1011 bp, Homo sapiens
taagctagataaatgtttgagatgatgtatatcccaattaccctgatttgatcactagacattgtatacatgtatcaaaatatcatatgtgcccccaaaatatgtacaactgttatataccaataaaataatttttaagtagtacacagcaaaaaagaaaaaaaaaaagcagcgactatcacattgtatttataggctccacctgcctgcaagggaagaagattatgtagggtgtgcacagcagggggcttgaatttggaggagcaactgagaaatctgcctaccatgcccatgcatgacattgatatgttggggtcaatatttaaattaatttcaggtttgatgtttacaaacagtgcagaagctggactctgaggaagttcgtaataaaagttacagcatgtggctgccatcactcacagaatattgggctagacggtccatgggcctgaccttatggagccatttaataatattcttgctgaaatagcccaagaatgaaaatttagctcacaattcaggataagagaaccttttctggaatttacttagaaaaacagaattttaacctatatttaatgctagtgacagaccagattagacctaagcagatggtcagtgacaactgcagatggcaacagcctctgtttaaaagtctatccattgctttggggaataacaatctttaatattttgcttccactgtctaaactccctctggagtttgtttctttgtactttccctcagaatatggctcttctgctcatgttttcatttctgttaatataaactaaagacctatatgaaggatttcagatggtactattataattattgaacatatcacgttggagaacttaaaatagttacagcccttagaaatatcttttgtgttgatactcgtgtactgtcgtgaagtgtcatttatcactttctgtatctatgtccagttaacgagcaacaaatcaagatactctggtgattttggtgtgtcgaattattcatttatt

SEQ ID NO: 122621 - DNA, 1029 bp, Homo sapiens
gcatgattttgtgggtcagcaatttggctggaattagctgagcaattcttccactggtctcacagggggccactcgtctggctgcagttgtttggtggctccgctatggctagataatctaagatggtctctcttccatgtgtggaatttggtgctggttgtcactggggcctctgtctttaggggagtgaggtggtgcggagagtggggaatttgccagatctctggaacctgagttcagaattcttgcagtgtcaaacttctgccacattttgttggtcagagcaaatcaaaaggctacccacattccagggggaaaagaaacagagtctacttcttgaagagaggattgccaaaaccacattgcaaatgggcatacatacaggagtggaaagaatctgtggcaactaaaaaaagtttgcagtatatcacagaacatgatcagagttttgttacaaagtctttctgactacagcatcaaaatgaaattggtgatcgggaagaaaatttagactggaaacctgaggactaatccggaagttttggtagcaaaccaagagtaattattggtgtattagtgaccacaattgcaaagtgatgaacacatgtgaacagactcaaaatcaatattaagatggtaaaactcggaaatggatttgatgtagggaagggtcaagaaggaagaccaagtgtctggtttggacaagtggggagcaaagtgatgacattgaccaacacaaggaagactgaagaaggaccaggcttggatggcaagttgagggctgctggaatattgagtctgagaggcctgcagagaggcagagctctcacctgaggcagagctctcacctgaggagaaaaggaagttgatggggtttaaggaaactgctgaaatagctgtcactgggaatggagactacaggacactgggaaactggaattatggacagtgctgagcacttgtcagggaatagaaatcatgaatgcaagtgactcaaggctacaagcttggacaattttttttttttt

SEQ ID NO: 122622 - DNA, 1016 bp, Homo sapiens
taattcttttttttcttgtatttttagtagagacggggtttcaccgtgttagccatgatggtctcgatctcctgatctcatgatccgcccacctcagcctcccaaagtgctgcgattacaggcgtgagccaccatgcccggccgggcaattttttcataatgctcagccacccttatacaggaatagagaatgcagcgaatagatcctgtcatttaatatgtgggcttggtaaaatttctttgctcaaggtaaggataagaagtttaggtggagatttctgaagatcaaagtaaggtatcttaaaagtcagtgaaggagaccagctgcataatttgctggacacaaatgcaaaacgaaaatgctgacccccttgttaaaatattgtgtagagttcaagatggtgacaacaaagcattaagccaagctgagacccctctgagagtgtggccctgtgtggctccataggacccaggcctgtgaagctggtttggcaatagggaatccttatggggattggcagaatataatcactgagagaaaatttggatacttctctttgaacatctttttcctttcccctcttcttttctcaaatatataaataactaaggtaataaagatgatgatatatgctagggaaatggtgggcatggaagggatttggtggcatgatatatttaaggactggccctcactattcatctgtgcctatttaaatggaaaaactgatgtctctggcctcaagtcctatatcacagtgtctgctccgtgacagttgggtgagttcccaagccatattaatattaaggttatcatcttaagcacagtattcctaaaatcttctgttttcttataaacctggagccttcagctccattgtctttgagtctgtctgaatgccgacttctttgtgctgtaaaaaaggaaactgctctctagcttattgaagactattcccggaatcaagggaataagaaaccaattttgaaatcaatgttgagttaggtctgctggg

SEQ ID NO: 122623 - DNA, 1041 bp, Homo sapiens
tgaaattcaaaggataacattgaacactgagattcttgcagatgagttgtatggtgaaatttgaagaattattgtaaattaagcatctgaggaagtatagtaagaagaaaaaaaaattctcttctaatttgagaagagattaatctggctaaaacgctattgtcttagtctttggccttgatatttgggttaatgaggttttgaagtgcagtaagaggttgctatggtggaagtaaaatactggacaaatcctgatttatcaaaagattctgggaaaaatcaagagtagaggaggtctgttttttgtctccagtatatcctgttggtggaacaagtttgtgatttttcataggaaaatctttgagaaatgaagacaactagttactagagaaggaaaagacatttgaggaatggatttctgttgtgtagagacagaaggcttgtggaagacaacctcctttgctaaatgtgtggaagctttcagattaaaaggcaggcagggatgtttggggagggtgagggatgagattattcagcagcaggagatattccttcctttgaggggctaggaaagcatccacgcactttcctgttatatcttggtgaggttggtacacggaaaattatcccctggggtgaaggaagaaagtaatacaatgtctcttattctatttaatctatttttatgtatttttaatgaatataatataatggcacatatttatacacatagaatgtaggaataaatgcatagaatatgagggggtgcattttcaacttttttaagcgactatggtaaaaatatctaaaaattttgggtttttagatttctctttcctccagtaactcagcccggcctctctgaacatactccataaactaggaacccaaggaactggtttgttttcaatagagagcacctgtgaatcttgtaaattattgttttaacttaagaactcatcttatttctgtcttatttccagacatttgtttctcagagtccctattttctcatttctttttttaatcccattgctctgt

SEQ ID NO: 122624 - DNA, 1032 bp, Homo sapiens
ctaagtgctgcctataaagccactccccattcctccttacttctgtgctacctgccgtggtagtactgaggtgaggtaggtgtcaaatgatctcatgctcacttttgtgaggtttggatgttctactcctacaatagcagctttcccaatcttgcagctcaagtatctcccaaaactggaagccacagctaatcaggtctccatcactgctccatgtcccttctgttcaaattcctgggatcgctgcactagatatccacacctcctgggggttgcggatctagattttttaccatcccccaaagcatgccaactcttctgtccctctcaccttccttacctagaatgttggcctcactttctcctccacacctctcttgttagaggccttgtttctaggggccaaccgcttgcccatgtgtgggaagatcctgtgttcctacagctgtttttttgaaagagttttcatatcctttttacttttgtattcaatgcagctgaccatcttatttataacaatttatttttagtaaatgttatttctttaaccttaaaagtgaatatcagcatattttatctttctaatgatgctttttacctatcatttacttttaagggggaggagggaggaatcacaaatagctcaagaagaatcatatgtattagcccaggtgccttttttattccacaaaaccatggatgtggagaaaattccttacactgagcctcagggaagaccctgctcctacccagtcaactacaggagactgacaataccaataaagaaacccagacagccagatgaaaaagataactctcttatgtttttcccaggatatttcagtccctctgagagtgggtttgtgcactaaaaacccaggtctgtgattgacatataatcagattcacccatggaggtttagcaactcagtctctcaaaactaaacttagataatagcaaaatagttttgaacattcttctttagaatatttctatgggagccataacagaaagattatgtccacgttatt

SEQ ID NO: 122625 - DNA, 1020 bp, Homo sapiens
aaaaaaaaagaaaagaaaagaaaagaaagaccaatggagaatgtgaacagaggactttttaattattttgagacagaggagcaaagccagtcaggaaatggttgaaattgtgtcagaggccttatagcaacttacttaaaagaaaccctacattataagaattgactatatttattaattgtcaataatatactcattacacaggaattatttccttattgtctttatttgaagacttcaaaatgctaaacataaagtagcactttactatggtcatgatttttgaggtgtatagattgcaaaagtatcacattttacgcagggtggaagtatcacatggatatattacagaacttcagctcaatgcaaaacagtacctacccagatttcccacaaagtgtgaacataataaggcatgtgtcccaccttcatactcaccccttttcacatagagtggccttaagttgagttagattccagcgtgattcaaactgagttgtcatgcaatggcctgaggctccagtgattcagaagagcctgtgtggatgactacaaagaagaaccaaaacaacagaaaaaaaaagttccctacagcttcatttatcatttgacttcacatgatttatttataaaggatcatcatctcaattccacttctatatacatgcatattcaaaaggactgaaatcagagacttgaacagatacttgccccagtgttcatagcagcgttttatttgtgatggctaaggtggaaacaactcaagtgtccatcagtaaatgaatatataaacaaaatgtggtatatccataccttggaatattactcagccttaaaaagaaatgaaattctgatacatgttgcaacatgagtgaaccttaaaaacatagtaaattgaatgtcagacatgaaaggacaaataatatatgattccacttgtatgaggtacctagaatcatcaaattcatagagacaggaagtagaacaatggctcctaatggccaggtaagtggggaatat

SEQ ID NO: 122626 - DNA, 1057 bp, Homo sapiens
tgttacataagcaagcaaagcaaaacaccagtggggtctctggaaagtaaaaggacagactacagtagaaggactgatcccagagtgcctgtacaaggcctaaatctggcaggcaaaagcatcccacactgtctgtcagcacccacatggcctttttgcctgccttctataacgggtaagtggacctacccttggagatagagaagaaaaattatcttctctgatattcggatgtaatggtcatctcagttcagccccctaggaaacatgttttattttccatggggaaaatatcagcgttaaagctctatcaaatcaaaacaactttgccaacatcttctctctgctaccttttaaaccaattaaatacctttctctgaatattttgtccattcagatccgaagacctttaaagactgtggttttatttttgtgtttacattcctttggtttgaataatttgcttgatttattgcatttttagtatttattttaagccagatgttttcatctttgattcatttttatgacattaatttgtagacacttagtaaagtcttatgagaagcaagtggatgaaattatctccaagtccactcagtagactggagttttttaaaaatataaatttccaaaaagtttgcaatcaacagatggctaaaggttgccatctgaattattttataggatattttaattgactccattgtatggaaaccaagtgtgaatgttaagatgaatttgccgtataccctttatcattcggtgtccttgtactcagactttcatgtccctgggtgacctcaatgtgttggtttgtctccatttagaaaggttgataatatattgaattgttcaagatcaggagttccagactgaccctccaggaaaaaaaaaatcgcaaagaacaaattctttttctgtgtaaaaaacactgatcctttgggaatggggcgggaaatgggagtaggacaacattaactttagctgttttagtttctgagatttcataacctcagtagacaccagcaaaattttcagtttctaactccaccac

SEQ ID NO: 122627 - DNA, 1018 bp, Homo sapiens
ccagccttccctgtgtagtgagctggaaactcctttagattgtattcattggtgtgtatgtatatgtacatatatgtataaatagttaaatacataaacataaaacttaacatcgcattgttgtgatgacaagaagtagtaaggtgctaggtggttacattaaaaagcacagcacagtgtataatcagtcactatgactggtggttttgtaagctgggttcagtttttgaaccacccagaatacctcatgtgtaaatacagtgttcatgacttaattgaaatacagttattgtttaaaaaaaaaaaaaaagaatgtgaagccactggttggcttatgccttctgatctatcattcttgcctctttttttgtaaaggggttttcttcttgttgttctgttttttaatagggtttacagctagaattttgaatgccaaagttctatttattaaattaagaaaaaagttttcaatgttaatggctagtatttttccactggactattgtttgttgatgttggaatttgtatttacagagaaataaattttttataaaaagatttatgtcctctaagagcctaatgttagtataagaatgtatttgtactttcagactctctattctgaattctcaatgacaagaatgtgctgtcttgacttttaggtgaaagctttgtataaatgcacaggagaatctttgactaaaacatggagaattctgccttctatcttataatttctttccaattacaaaaaagctttttctcagggccttctcataaagggtactgagattttctgatggcaggtactgtaacataggaaatcatgcctgtgtccatttcagttaatagcacagtgtctcctttctgactttctagaatccctgtttaaaccaggagtcttctttctagttttccaacagacagaatctgacttcagtattctacgttgctgaaagttttggttggcaagttaaatcttttattttccaccctctaatcaaaggttaagaacgta

SEQ ID NO: 122628 - DNA, 1036 bp, Homo sapiens
ccatatataattaataaaggcattggatcattattataaaaggaagattaacaaagttaccctggaacaatagcttacttatccaaatctcaacatttacattttaacagttttgtatgtttcaaagttgaaactactgtaagagaaagccaatactatttatatctgaatcaacagtagcataaacattttttaattgagattgtattttaatcccttttgttaaagtacattaacaacagtttttcacaggatatgaacttggcgaaattagttcttaatctgaattacagggtattactatgaaatgcagttgattttgcagtagacgtacagtcatttaaacttccaaatgagtgttgtccatgtttctgttggtattttggaaggattatacattttattgccttcagcattgattatgttcttttgaatatacttagttttggcgaaagccttgtcctttgtaagttggtttgatcttgtgatgcaaccaagtctcatttaggtcaagactaaataagagatggaggggtagagggtgtgactcaagcaggataatattgatttgataaagagcatatcacatgcctgttttcttgccagataaagggcatagcacatgcctgttttcttatatactagaataaaggctctcctaggaaagatttttcttaaatatttaaaagtgaaaatgtgagacaaggccttcaaggagactacccaggaagatacacagtttaaaatgttggctatacagctctcaatagattattttatagttatagttgaataatcagttataatacactgtaaagaaatcagattttccttctgtttggtgtctgagtccttcctgctcttcttacttctgagaatctgggcactaagaaatcagtaagtacattgtagtgctcctgcatcccagagtccttaacctaaggagggtcttagtcactggtaagaacttggctttctaattatattcacttggtttttaacattagtagcttgacgataatcagggtatagtaaa

SEQ ID NO: 122629 - DNA, 1060 bp, Homo sapiens
tttcccttttattctgcccacttgtaacctataaacatgacatgataactctctgtatctactttttaacctttttaaaaatgttctttctagaatgcctgttcctttttccattcttgccagaatctgtttttcaaaatctgtctcaaaagccacctctccagaaaagcctttttcctcattcgctcaatgtcttcatgtatcctactttctcccaatactttgtacttaacatggcctttatttggctaccatattcattctgttctatattacaatcatctaaaggcttctcatgtctctgattaaaatttgagtttgtaaagggtgagtctgccatctttgaaatagcctggacatgataaatgctatttctgtaatggttgagttgcatgcttaccttttgggaaagtatcagttcttcaaggcctagttcaaatttacttctgtaacaccctcccttagctactgcacatgtaactatcttagcacttagtttcattgtctttttttggtctttttgtgtatgacacattaaactggtgggatctgattttattaactgtagaatccccagcacctagcacaatgcctaacgtatgtgctttgtaaatatcttttaaataaatggaaaaataacctctttctttgcttttacagtactttgttgatatctttttacagcacttaaccacatgctgatttgtttgaaggaatatttgtatttcctgccttcctcttccagattttaatcctacatgggggagagggaatatcttccccttgaaaagaatttccttcaaagccttgctcatagaagcaataatacatttattcattcaacaattattttgtgagtacttattttgtgccatttttttctatgcaatagggaatataagatggacactttgagatggacaagaatccccgattcatggatcttactttctagttagagaaacattctattaatacatattgaatttagtattagctggaaatgattaactgtgaagaaatttttctttagtttttatttatttacttagaactttca

SEQ ID NO: 122630 - DNA, 1034 bp, Homo sapiens
tctaaatgaggccttcccagtgctccctgagtttggcagctactaaatatatatataaaatgtttacctgtaaaaatgtctctgtttcacctttacacattttgaaatgttactttgatggcatactttgtttcttcaaattaactcacatagttacaaggtttataactaccttttacattgcatgttcatgtcaaagttttgtcattaataagttataaattatatgcttaaattaacatgttctagattacttatattggttacagtgatgtagaaacatgatagattactttgaaattctaagtagaacagcatagcaacagtaattttatgatttatcaatatgtgaattttgatacatgtttttctatcaaaacaagtacctcggttttctgggatattgtcaagatgtatattttactagtaatatataactgccatgcaatggtatgcttctcaaagccagttatgactttactgaataaaaattcttgttttctaactacttgggaaaaaatgtgttactaaagggatataggggagaagttatttgaatataaaatcctttcctcttttctatattaggaagcaggattgtcttctgccttaatagaaggcttctttgttctcctagagttctgacagcgcctaagaaccagcttgtaggttgttatcaacttcattcttcatccatgcattcttggtgtagggtatatatgtcatctggccttttctcttatctcatggctagttgcagatgtggagttgcaccaaagtgatgatgagataggaacttacagccacgacagtgcattctgtcatctatagtgcatctttgggacttaaggattctcttctagcagatgaggcctttatttcccttcaatacttcttctaaggtagaaagtgaaataaagtataagtatttcctgtattatattttttgttgatgtctaacatacagtaaagtacataggaatattaatctttaataatagctccattccaatacacacccacatacatctccc

SEQ ID NO: 122631 - DNA, 1131 bp, Homo sapiens
aggcagaaatccatttaatcaaatttgtgtgaaaataagatagttaagaatattcgtgtgtcaaaataactttttaaagtatcaaattattctctaacgtcagattttttgtgtttgtgaacattgttttaaaatttctaaacttctttatgatacaatattgaatttaatatcagtaactcaatttattaatagcatggaatttttttagaaatgtttgttaaaagttgactggactttagaggggaaacatcctcaagggcactttaaaagtagcttgtattatatattctgaaactccatttcattattcactgtatgaaattatgataatattggaataggcatgctgataatgtgcatgttgtagtcaaatgactattcatattagttcagatgtaaatagctcagttctgcactgtttctcagcagagcaataaataacaaaattaagtcattgtttttgcatggagaaattaaccactactaccaaatatggtaacataattggaagattttttaattggcagaaattcacatttgaaaagcaaaataaaagtgaaagataaatttaaatgacaaaccagtaaccaggatcaaagatgaatatgacctttttcatttcaaagttgtctcatttttcctgtcactaaatggataagcatttataaatttaagcactttgtcatgtcattttattgcctaagattgaactgatattcataaaattaactcattttaaaagttcagattatagaaattataggaattaagaattatagaaagtaagaattaccaaagtcagcgaaatctgtttcttaccttggcagctgtgatcatcacagtatagagtattgtgttgtatgaagtcttacgggtgtttagctggggagttttctgactctgtcacccagtttatgggaacagttgcagtaggtggaggagaaaaagtgttctagggaggtcttatgatgtcacataggaattctgaagtttcgattggttagccacagtctcagtcttatcacaaccaaactttagaacttcttactttaggtatggaaaagtcattaacactttgtgcttcatcttttgtttttaatttaaaacagtatatggtagataaatgaa

SEQ ID NO: 122632 - DNA, 1046 bp, Homo sapiens
acaatgctttacaagtgtatttacaagtaaaatattcttcttaaccctgtaggagttggaaattcagaatcttttctgggggaagagaatatggggaggtagtattgagaaagtcttaaggatttaaaatgaatgccacttaataaatataccccctattaatgtgagtgagttagtcaacctttttttttgtgcgggggttgggggttgaaaactaaagatggagtaccttttcaaaggcactagaggtcctcagttgactatgagtatgctgtacatccaggcttcattttcatgtgtttatttggtaacacatgcttcagaattactctgggtaagaactttgaaattgtacaaagagactacttgattctagggaacctagaataaagtatcgaaatgtgatttttgtgaaagttttgaggagatgttaacttggattttaggtatcagatgaattgaaggcatgagtattttagcaatgaaacaaataaaaggaaactttgattgattggggtgtgttattttttttaaagtctgtgcagttagtttgaattttgccttccaggaggtattgcttaataactaagggcatctgtaattttcgtatatttctggttttgaaaatgatcagtagaatataatttagactattaagaatgtaatgctatgcataaattgaatttaaatggagtggaatggcttttaattaaaatagaagtttgtattctctgaatttgccttttgccttttagaatatcatttacagtatttgggggctttcaaattttgtttgtcagtgtcatggtttactttaagccatgctgatcagtatatagaggatgtgcatgtggcttagtgacaaaacctaaacttctgccaaggtttccctgttttcttagttctgtgatcttgagcagttcacctttttgcatctttcctaaattgtagaatagggatgcagtatcaaatatataattaagaggaccaaatgaaatatttgtgtacacgagtatattaggaaattgctctttaagaataaaaaa

SEQ ID NO: 122633 - DNA, 1107 bp, Homo sapiens
agaagatgccggggagtgacttcattctttcactcctgagcacattgagtgcctactatgaggcagatactgttcccatgtattggggacatggaacagatattccttgtcctaggtgtttacaatcagtcttggctattctgtggaagaagaaattgtagaggagtggggcaagaacagcagtagggaagacagctaataggccattgcagttattaggtgagagatgatggcttgagttagaatggttagattggatttggagagaagaaaatggatttggtatatacatgagaaatcttaaggatttactgatggtttggagttgtcaattaagggaaagaggagtcaaaaatgacatcttgattttggcttctgtgattataatcgatagtgatgccatttcctgagatggggaaggttagtgggcagagggcggtggggagagagtgtaaggaaaataaatggaatcaagagttctttttggccatgtgaaatttgagatccttttgagaaattcaggtgagatgttgaatatgaagttgggtataaatgctggagctcagtagggaggttgctgggtgagagataggaatttgagaattacttggttataaatggtgtttaaaggtcatggatcacaccgagagaatagagaagacagtagaggactaagccctgggacactaacattttctcttcaggcagaggaagatgtgccgtccaaagacactgagaaggagcagccagggtggtaggagtaaaagcaggacaatgaagtgttctggtagagaggagtctgaaggcagtagtgatcaccagtctcatgcttccaggcagccatgtaagatgagtcagaagaaaatgcatcaatgcatttggccagtttcagtgagatacttaaaaatataaacctagcagaaattagagattatctaatccagtggagctgactttattgcataaggattgatacataagtgcttaataaatgtttgaattgctctttaccacttattaagctagggtgaccagttgtctgggtttgcctgacgtttcagttttaaaactaggggttgtgtgtcataggttgcctaggactgaagg

SEQ ID NO: 122634 - DNA, 1025 bp, Homo sapiens
gcggggacccgggcgggaaggtcgctgcgacagtgctgcggcggcggcccgggcgcgtctcggaggggccgcagttccgcgccctcccgacttctggtaggcgcaggctggggttggctgtgcccacgcccgcagccgctacttttagggcgcgttttcgggagggaggatgctgccagagatgcggccgctctcagccacccccaagggaacttcagcccctcggaggaacctggtcgccgccccgcagcccctgcggcgtaagaggagggcgcgtcctgcagtagccaatggaccattgagcaaccgggttacgaatccgtttggctttccgtggccccttcaaggaaaattaggggtttgctgcattccgtatctgaaggggtctgtttgtatcggacagccatttcatgcttgcgtcgctcagaagttgtgtaggagccacaaaattaggataaatcctcccctaacttgggataaaaaataagtcttgggttgcctgtgatatgttctctaaagatgatggtctttccaggcacttttaatcttgagttttgaggccttttgagaaactgagttatatggacattctgcgcagaaaaaacaatgccatatatacatacgcaaaattttccctacaattttagctgtttctgggactcctgttaagtaaccttgctccacaaagtgtttgagctcgacttgtgtaacttagagatatttttgcatacatttccaaagctgttatttacaaaacaaaaaagcagaagcagcatttggaaaggggtcttttgatggtaatattttctgctatttaaaaaaaatcaggcactgaccgagtcactagtatcaggctattgaaatttcgaataatgcaattctttgatagtttagatatttgtgatgtgtggtttttaaaaagacatatgtacattttaaaaagccagagttagatttgaatcattcacttaagtttggtcctgaaacacttaatgtatgttaatgaatgatttgaatcattcact

SEQ ID NO: 122635 - DNA, 1021 bp, Homo sapiens
cccttttctgcccctaaagtaatctataaacgaaggaatacagatgaggatttaaatcccaatcctaattccaagggaggctggaagccccctcagccgcgccctggcttggctttttcatctcgagcggttgtgacgccaggggcaggtcttccacgtgtcttcacagaggtgcccggagggagggcgtgagggattacccaagggaggggcgagtatcgcaaaataggccaagtcgctgccctctactcaactcgcagggcgggaggatggagacagagggatgcggcgggagggcgggacagcccagtcgccgccaaggaggcgaagcggggtcggggtagctcacccgccccccgcagtccccgccccccgcagtccccgccccgcgcggcgccgcgcacgcctgaagtcattgcccgaggccccgccccctcgcggccccagccccggctctggctctgccggcggagggggcggagagaacccgcagctgcaacttcgcctggagcctttgagcctgggctcagccggggatctagcagccgtcaccgccgagtcgccgcttccccggcgcgggcctcagcccagccggcttggccatggcaggcgccggcagtgcggcgaatctggcccctgcgctccccgcccgtagctgagcagccgttaaccagccatcccgcctttcctcctgcccgtgtcgccgaggcccacgctccgcgcaagtttccgccgccgaagaagcaggaggacggacgtgaggagtcgggcgtccctggcccacccggccctctcgcccgcgatgtgggggcgcttcctggctccggaggccagcggccgggatagccccggcggagcccgcagcttccctgccggtaaggaacgggacagcgccccggctggggtgggggtcacggccgaccgcggcgcctcgggacctcgccgccgctcccctcccgcctcaggcctgtcttaccccggccgcctccccgacgccgccgcgtgcccagtgtcctccccg

SEQ ID NO: 122636 - DNA, 2031 bp, Homo sapiens
atgagctaataggtaattaattggtagaaatttggttggtagaatttgtgcctgataaggctttgaatccggcatgcaaagaatccacctctaagtaccccctggtatgattacacagtaatatttttcaggtaacagctttgttgagatagaattcacataacatgtaattcactcatttgaagcatctgagtcaatagtttttagaatattcagaggtgtgcaaccatcatcacaatcaattttagagtattttcatgatctcaaaaagaagctttgtagcctttagcacatccccctccccagcatatcccccaagcagtaggcaagcactgaattactttttgtctctatagttttgcctattctagacatttcatataaacggaatcttataatatgtagtcttttatgaccagcatctttgaagcataatgtttttgatgcttctttcatgttgtgttatatattgatgctttattcctttttattacccaataattttccattgtataggtataccacgttttatttatctgtcagttgatggacatctaggtggtttctactttttggctattacacaaaatgctgctattaacatatgtgtacaaatttttgcatgggatgggacaaatgttttcatttttctaggtttatgcttaggagtggaattgctgggtaagatattgtaactcctttttaggagctaccagactggttttctgtttgtttgtctgtttgttttgagacgagtctcactctgtcacccaggctggagtgcagtggcgtgatctcggctcactgcaagctctgcctcccaggttcacaccattctcctgccttagcctcccgagtagctgggactacaggcgcccgccaccacacccggctaatttttttgtatttttagtagagacggggttttacggtgttagccaggatggtctcgatctactgaccttgtgatccgcccacctctgcctcccaaagtgctgggattacaggcatgagccaccatgcccggccaccagactgttttttaaagcaggtgtaccattttacattcccaccagcattctaatttctccacattcccaccaacacttgctgttctgtctttttgattatagccatggtggtgtgtgacatagtatctcattgtggttttggtctatatttccctgatggctaaagatgttaagcatctttcatatgcttattggccctatgtatatcttctgtggagaactgtccattcagatccttaaccactcccttcaccccttttttaaaaaatacagacggagtctcactctgttgccctggctggacttgaactcctgggctcaagtgatcttcccacctcaacatcctgagtagatggaactacaggagcatgccaccatgccagctctttgcctattttgaaaattgggtcatctgtctttttatcattgagttgtaagagttccttatgtgttctacatacaggtcttttgtcaaacacatgatttgcaagaagtttctctagttgtttggattatcttttaattttcttggtggtgtcctttgcagtgtaaaagcttttaatttagatgatgcccatttaatctattttcgttatgttggattgtgcttttgatgtcatttctcaaaaaccattgcctaatccagcgtcatgaggatttacacctgagttttcttctaagagttttattcttttagcaccttacatttgggtctttgatcaagtttgaattaatttttgtatatggtgtgaaggggtccaaattcatacttttgcatgtgcttgtccagtttcccagcagcatctgttgaaaagactattttcctaatgaattggcttggaacctttctcagaatgaattgaccttaaatgtatgggtctatttctggacaatcaattctgttctgttgatctgtgtccttatactactgctacattgtcttgatgaccttaggtttgtgtagtatgttttgaaagcaggaagtgtgagtcctccaacc

SEQ ID NO: 122637 - DNA, 1059 bp, Homo sapiens
taaactagtgcttagggcagaaatacatgaaactagttagttgttgttttagactgaattatgtctcccccaaattcgtatgttgaagcactaatccctagtacctcagaatgtgactgtatttggagattaagttaaatgaggtgattggggtgggccctaatctaatctagctggcgtcctcacaaggggaaatttagatttacagagaagcacaagggtcacacgcacacagaggaaacacagcaaaaaggtggccatttgcaagccaagcaaagaggctttagaataaaccaaacctgccaacaccttgatcttggatttctagcttccagaactgtgagaaagtaaatttctattgtttaagccacccagtgagtgatattttgttatggcagctctaacaacctaatatagctataagatatttttcccctcagaattaagcttatttgagcatctaatcttactgaatccaaatattggtcagttcccaagcacttcctgtgggtgaaatgatgtggtcctttagccatgccagtaagggtgtggcgtatgtggagtggtgtgctgttgccattcttcagaggaagtatataccactgggcatatagcttgaattctgaagacacaagatgcagcttacttgcatggattcaagactcctctacagagaagtgaaacttgaagtcaaattgaggtcatacacaaaacaagatgaaagagcgaattcaaatatactaaaattgaattaaatcaaaatgtgccaaattaaaatatattagaactaggaattaaattgagtgtcagcccgtgtctactgcaaaagttatcataggaatggaagtactaacctctagcttttgttcaaatctagatttccacctcgggtaatcactgtgttgaattgtcttctcatttgtattattaccaacttaaaaaaattcctcatgtaaggcttgttttaatatggtctttagttagtttaagaggctcctttttatttattagaaataggatgtcaaaatttaatgatagttttaaataaaattttctgta

SEQ ID NO: 122638 - DNA, 1024 bp, Homo sapiens
cgggcctcccagcccttattccactcactttgttctccgcctttgtcctaatccacaccagcaggtggagccgcagttaaagtttccgagtccattccgggagcgggagcccatcttgctggctgccgaggccctcgctggaggaggagggtcagaactcgggtgcagccaatcgagggcaacgctgctacttatcagagcagaatgggctgtagtttagtgaaataggaaagctgcaaaacactgtggagtgctcccgtgtaaataaaaagaggaaaaaagtttctcaagtcgccgctgcacgacgtctggccggcgctggagcgggggtctgcgctctcccgagcggccgcgcgctggactttattgtgccgcaaccagccccagttcccattgtttgtgtttttttcaaaatatggcaaaggttcaggtgaacaatgtagtggtgctggataacccttctcctttctacaacccgttccagttcgagatcaccttcgagtgcatcgaggacctgtctgaaggtgagtgcggcgcccgtgcgcccgggctgtcagttgcgggctgcagacgttgaaagtttcccgggccgggcctcgcgctgggcggctgtgttcggcgcctggcggccgcgggctgctctgcggagggaaacttgaagttgatggacgacggccgccgaggcgcgcgcggctttccgccgcagcccaggcgcctgccgggctcaacttgcgaggaacttgtttgagcggaggagcggaggtagccatgttgtcagctttgtctgcgggcgggcagctcggagacccgcactcgctcccgctgcgccgcctgaggtcgcgccgggctggctccgcgccgccaacagcctccgcgaccctccgggcccgagcagggaggctgggaagggagaggctgtgcgtgtggtcgcgccggcgagttcggagcggagccatcttaccccgagtcgagaattgggccagcgaccccggcgcacggcgcctcctcttgccccgccgcccgc

SEQ ID NO: 122639 - DNA, 1014 bp, Homo sapiens
tttaatatctttagtaataaatatttagaaagctaaaacgacaattatctttgctttaattatcttttactaaagtaattcagtgcttcatttgccagttttgaaggggaaatagtttaacttcatcgatgagggacatactttgaactagaagtatatgtaaaaaatgcattgaagatgatttaggtaatcgtggcatgtaaaacttttcattttaaaaactagtttttaatctctaaaatgtatatatcatatgtaaggttaattttaattataaaacaatatatattcattgtaataaacttttagaaagttgtacaggcatatataaagttaacagttctctgtactcagtgccttgccctatctcctttcggtaatcacaattattactttaacatgtgcccccgtttttttttttttttttaaacctatatagagcataaatgcacatacatatatagggcaaattttgaaagatgattcatttattaaaataatttcaaataggccattgataacactaaggggtatttttcttattactctgaagtcatttgattactctcctatgatactactattaatataagcattgcagctaccaggcccatttttcacacccaacagtaattttttttttattgccaactgcatataaaaatagacaaaagaaaaaccattgatcggtccattccaacttataccacactgtttttcagatataccaccagaagttcttcaaattacaggtatttctcaagtgttgccttccattttaggagtcagctctgaacaaagaagatagatgactcaggatgtcgttacagggcttttacattgcatagatgaaaccagccattcataaagccaaaacgttccatttttaactgggatccattcagaacccagctgaatcacatcagggatttacagtactggtgtcaaaaacatacttatttccaatggtatatttcacttcctaggcaccattactgagcatttatttagtat

SEQ ID NO: 122640 - DNA, 1024 bp, Homo sapiens
aacctaactgggaagataaattctttctagctctgaaattagcagtggaataagggaatttatttgcaggggaagtgagagcagaggagatggagagagaatctagccttaacaagaacaggctgcaactcagggaacacttgtacattgatttttatgtttatgggatgcttgctacagttgctgagttttacatgctcaatacccttttatacattggcatcagtttttttgttgtttttttttttaacccagctttcatttaattcctctgccccctgtatttgagggaggaagggtaaggtcagatgttttacataagttctcaggtgaagaaatttgttcatttattttaaagttaacttttatttaatcacagtaatcatgattaaatgatttacccagcctgaaagtatttacatttgtggtgaaagagtgagtgaatgagggaagtcatcaagagaatttttagctaattacactacttgggaagacctgtggtctagtggaaagtatgtaggctttggaattagaacaagctgaagttggaaagtatgaagcaccatgctcaattctggtatattataagtattcaattgacagtagctgtaattaagatatatatatatataaatttaagaatggcaggatggtcaatcaaaacttgtacagtcttggtgaccatcaagcacatccagccagggtctcaggctgtcttaacccttgatataagccctatattagaaagaaccaaattatcttaagaccagatattcctcaaggctttttctgaagcaaagctacagggcagctcttaaaggaaagtgaacgtttggggctactgatgaaagtatgaaaaacggtggccaaactctgctttgagacttgaggcaaaataacttattaagaaaattcttttcaaaatattctatagtttgggctgggtgcagtgggctcactataatcacaacactatgggaggcaggggtgggaggactgcttgagcccaggggttcgagaccag

SEQ ID NO: 122641 - DNA, 1423 bp, Homo sapiens
agcatgtaaaactcagcaactgtagcaagcatcccataaacataaaaatcaatgtacaagtgttccctgagttgcagcctgttcttgttaaggctagattctctctccatctcctctgctctcacttcccctgcaaataaattcccttattccactgctaatttcagagctagaaagaatttatcttcccagttaggttttcagaagaagcccggggtttgtagttacagaggcatagcttggattctgattctttgatgtacaaattatgaatttgtgtagattacttaacctctcagagtctcaagttatttgcataatggggataatttgatctacatgatgaagctgttgaggtttaaacaataggtatgaagtagaactaatgcccagtatatagtaggtattttctaaaataggtttataaattatggctatgttcctatgccagtccacaaatgcgaatttataccacttaggatcaagggcattatatgtagtgatacaattatatatgaaattaaaattcatgaaaacctttatgtaataattttttttttttttttttggagacaatctcgttccattgcccaggctggagtgcagtggcgcgatctcggctcactgcaacctccgcctccagggttcaggcgattcttgtgcctcagcctcccgagtagctgggaccacaggcatgtgccacccctaatttttgtacttttagtagagatggggtttcaccatgtttgccaggctggtctcgaactcctgacctcaagccatccagccaccttagcctcccacaatgctgggattacaggcgtgagccactgcgcccagccactctatgtgataattcttagtcttatcctcacttggctagtttagtacctttcacatcactttcttaaaacagtttcttcacttggcttttgggtcacctacctcatttgccacttgttttgtaacttaatttgtcctcttatctttggagggctcaaatctcactccctagagcaagcccatgtatttttatggctttacatatcattgacaggttccaaatttttatcctgcctattcagtatctctgcttagaagcagacatctcaaatatgtctaaaatgaactcctgattgctcccctaccccacatcacctccctgcaaaagtggctcctgctgctttcatcttcaggattttatccagaatataactgttgcacagccccatggccacacgaggtccatgccaccataatttcttgcctcaattattgaaatattgtttcttcccttgtcctcttacactctatattgaacacagcaatcaaagcattccttttaaaatgaaagttggctcctgttactgctctgctcaaaacccttcgatggcttcccatgccacgcagtgtgaaagccaga

SEQ ID NO: 122642 - DNA, 1167 bp, Homo sapiens
gaatgtatgacacaggggggtgccgtaagggaaaaaccctaccattgttcgttgacagttgatgagctgaagccacttacttctgagccatgagggaggttttactaataatttttctactttggagctctgtgattatttggatctctgcagcgtagtatagggctgcccttccaaagtgtgttgagaagggccttaaaagatgatatacaaaaaaagggggattccatagccaaataaatttgggaagtgctggattaatgttactggtgttctttactgaaggatatctcagaaaacttactgtgccagcatgctttatgaatcctcaagacaaggtttacagcatttcccaagtgtttggctatgttatcttgtttgtgaggcactgtccaggaactagtgtttcacaaaagagtattttgagaaactctgatcaaagtgtgaactctggtaggaactttataaggagcatttcactgcctttctggattgctatgagaagccaattttaaagccagtaagtggctaagtggacattaaaagggtctttgatgtcatctggtaatgtaattactgaatatgaaataatgctttggttttttaaccctagacttggaatggaaaattatctatgtgggctctgcagaaagtgaagaatacgatcaagttttagactctgttttagtgggtcctgttcccgcaggaaggcatatgtttgtatttcaggtaagattaatcttggtaaatgtgtatgccaaatatgtttcgaagtagactatattatctattatcttataacccttatccctttccttttgggttaaagaactgcttctgctgcattcactttaaatctgtttccatcatgttttaggcagtctctgtgtcacagaggaactcttacttcctggttttatatgctgagagatgttaatgtgacgtttactttagagagatgaacaacctacagtaaattttatactgtatcatggcacacagggtggtgaatttggggctcttcctgtgaatagcacctcagtatcagacttccaaggtggctgtctagcaacccaaaacatggattcaaaatatctaaaactaactggcattgttagtaatatgcatcttcagtttatggtttcagccactggaactgatggtgat

SEQ ID NO: 122643 - DNA, 1052 bp, Homo sapiens
aaatacctagtggggtagtaaatttgcaaaagtagtcctcttataagataatgtagattataagatgctttagtaaactctggaatgtcattccaatgacccaagaccacacatctctatccactaaacgtatctgttaacctagctcaactactgattatgctgaaataaagttgtttttgttacatcaccatcagttccagtggctgaaaccataaactgaagatgcatattactaacaatgccagttagttttagatattttgaatccatgttttgggttgctagacagccaccttggaagtctgatactgaggtgctattcacaggaagagccccaaattcaccaccctgtgtgccatgatacagtataaaatttactgtaggttgttcatctctctaaagtaaacgtcacattaacatctctcagcatataaaaccaggaagtaagagttcctctgtgacacagagactgcctaaaacatgatggaaacagatttaaagtgaatgcagcagaagcagttctttaacccaaaaggaaagggataagggttataagataatagataatatagtctacttcgaaacatatttggcatacacatttaccaagattaatcttacctgaaatacaaacatatgccttcctgcgggaacaggacccactaaaacagagtctaaaacttgatcgtattcttcactttctgcagagcccacatagataattttccattccaagtctagggttaaaaaaccaaagcattatttcatattcagtaattacattaccagatgacatcaaagacccttttaatgtccacttagccacttactggctttaaaattggcttctcatagcaatccagaaaggcagtgaaatgctccttataaagttcctaccagagttcacactttgatcagagtttctcaaaatactcttttgtgaaacactagttcctggacagtgcctcacaaacaagataacatagccaaacacttgggaaatgctgtaaaccttgtcttgaggattcataaagcatgctggcacagta

SEQ ID NO: 122644 - DNA, 1055 bp, Homo sapiens
ggggtgaagtatttcttttttaaatttgtttttgtagagatggggtttcgccatgtggcccaggataatctcaaattcctgggctcaagtgatccacccaccttagcctcccaaagtgctaggattacaggcgtgagccaccgtgctcagagcgtgaaaagattatcaccacgttttaaagaacctgtgtgattcatatctctagaacaatggtggagttaaaggaggtatgaatggagatattggctggagacaaactgagaagggccttgtcaatgaagttaaagaactgagattttatcccttagaaaagggaatactcttctgagggttttaataatctgaggttttaaaaccaaagagaaagaacatatctgtgttaatgctggtagcagtgcaaatgataggctagagctggggagatcagttagaaaattctaagcaatattccagataggagatgacatgaattcagcctccagaaatgaaaaaaatgttgagactgactagatgtaggagataagggagtgaagctgactgaggtttttagcctaggacactaggtagcgattttatgcctttttgtatcatctacctgtgttaggcatacagtaaacaacagtcttcaattttcacaagctaaggcattggctaaagtgctcatctaggcccaggaatattccttggtgccctggcaacaggtaagctaatttgctgggacttgatccatttaccacccagaatggctgcctcagatgcctcagccatcactgcctgtgttccccagtctggctccttccatccggtcgtctcattactacctgcaccctaccacggatggggccctgcccttcgctcatgctcttagtctagtctaactcagtttactttctgcattcctcaaggttcaccttacaatagcttgatttaaaacaaggtctttgacatctgcctaaagcaatccttaccttcactggtttccacattatgtgtggtttaaagagcatactatattgtagagtctagcaaagtaactattcataatagaggattat

SEQ ID NO: 122645 - DNA, 1050 bp, Homo sapiens
agcatcttctgaagcattcattttcaaaaatgaggagattctttcttttagaaaacagaagtataggagttaaatagttaaaaagccagatgaatcccctcagattctccgtatcttgtttctgttaatctaaaataacttctttgctacagccctagtcgttacatcttattagttatatttaaggtacttaacttgaattatacctttgtatatgaacttagccctttaggagtactaacatgaaccattttattaagcttctatttgtatatggtgatttaactttcttagtgtttaccatttgtatgtttcctttttcctctagcttcaaaggaatattttggcatctaatcccagggtcacaagattccacattaattgggaagataacacagaaaaactggaagatgcagagagcagtaatccaaatctacagtcacttctttcaacagatgcattaccttcagcatcaaagggatggtccacatcagaaaactcactaaatgtcatgttagaatcccacatggactgcatgtgaccacctaccatccctttagtacaaattaagctattaaaaatacacagaactatttccctgaaattccgtaagtacatagtcaaaacacaatgtgaagaatttgtttaaaaacatcctgtagaaagtttataagaaaaccagtatttgaacaaattgtggaatataaatacaactatttttaagtaatttttttctctaatgtgttattttatttgttctgaaactaatctgattaaagcatatatattattttcttctcctttatatgtaatgaaagcacttataaagaaacaggaatcattagaccaggttgtaaagatgtcttggcctcccagacagtctttggaccactattttactggcctttgaaagaacaaagtttacttcaactaaaatgtttcttcctgtgaagacatatggtatcattttaatttaaggggcagatttccattcttttttggcatgtccttaaaaagaggatttgaaatcaactatatgctaccaagaac

SEQ ID NO: 122646 - DNA, 1431 bp, Homo sapiens
ctacataattacttaggaaacattccacataattacttgggaagcatctttatttgttgttggtatcattttatacagaactctagaacactgggtcatacggatttaaaacgcatgggaaatattctttatatattcttgcctagtatcctgaagtttgtctacccttctcaattccaaaaatccattcttgtcaatggttaatatactgttgagttatatttcaaaacctgagacctccttaacagttttccacttatacaggaccattaattggccattttctgttgtatgataaattttaaagtgttagtttctcattagaaatttgagcattcattagcccaatggaagttaatctgactcccttaacaagtagcaaacatttttaaaatgtgtgaagccaagggtctgttttcagaagaacagaaacattacccaatcaaaactgtaaaaatacaaaatagcatcaaacatattttttaaaataatttttttctaaattccctgggtcactttatttataatcaaatcttgacattctacctgcaaaggcttttaagtgtacttgctaaagaatcattacaacttatgaatgaagctccacattgcaatgatggaagtatattttccaaatattaataaacattccctacctaagaaatttcagtaggagctactgttgcctatcagatttatgagcatgaaaatgccttaagctctataccatctatctacttggtaaagtgaaatatccccctctttagtttaacattccagttgctgagtcttgataaaatgccagatgatacggactttttcctgcataaaagtatgaaggtaatcactagagaatgagaaaattgaataggattgttcaaaactaagatgcaaagtgaaggtggagcttgcaagatattttcttagagctaccaaaataacattgcatatttccttccatttttagtggtaactcaaaaattagcttgaaatttatcctattataggtagtttttcattagaaaaaaccattgtgttaacttctgaagtaatgttaaattacttgaaattgtcacatacaatacctgcactagtagatccaattcctgtggtcagcacagatcttggtgtaatctttgctgcatatttgaggaactgagatttccctgtgccaggatccccaaccaataaaagatgagattctcctaggaaaaagcaaatacatgaagttttaaatttctataaaagggtccatttggaatgccaacaaaatattacatagtgtttttactgtgtacttttacatagggtcgtttgagaaaggatttaactagaaaatcttcagaaagttaactgtcataaacagtccttaattgattactcaatgtgacatagaatctaaattctattaataaattatgtgctatttcc

SEQ ID NO: 122647 - DNA, 2071 bp, Homo sapiens
gggtggtaatcccagcactttgggaggctgatatgaaaggattgcttgagcccaggagtgagaccagcctgggcaacatagtgagaccacgttgctccaaaaaagaaaaaaaacattagctgggcgtggtgctgcacacctgctgtcccaactactcaggaggctgaggcagaaggattgcttgagcccaggagtttgaggctgcaatgagctatgatcacgccactgcactccagcctaggtgacagagtgagaccctgtctcaaaaaaacaggacattttgaaccaaaacaaagttatttcctcctttaatcctgttggtcatttggaattggacctcctgatcacttcacatagtagagtatatttaaatgaggatggtcagataggaaaggaagggaaatttcagttggggtttcttgaaaattattgctgatttctgatctttctgcttttcctaggaaggaatgtaatattggctagcttgtgccctcaagtgtttggaatgtatctagtaaagcttgctgtggccatggtgctggctggtgggattcaaaggactgatgctacaggaacacgggtcagaggttagtacctatttagaaattttgagtaatattgacacatggatggaagctagaactttttctttcccaaataaaaactgctcgttgggttttattttccaattgtaatcttataaaactgacagttgtctgaatatcttatacttagtctagcatctgtatatcagaagctactttctagagttccagaaagactgaaagaagttacatttttctatggcatatacttttgctatagcctataaggatgccacaaaataaaatctttgtttctattactgtgttttttgttggatccccggtctgttttcaaaaggaaaaagattagaaatagtgtattttaatgtctccagtcagcgtctctccatctgtggctgtcactgtgtttctcttagactgctgctttcagtcatctgcctgctgattctccttctgctggtagatagcaaatgtgccatctgccatggggtgctgctgcaggtcacaccttcaagaaaagattactcttaagtgtataattatgtccagatggcagaaagctcttttgcagctaacacacttaaccagagtctggcatacgggttattacggccctgtacgtgggccataataaccaaaaattaaaccaaaagactaaaagggcattgttataaatcaggctgttagtagggactcgaaaaccatatagtacagtatagaatagtaagtataaggcgtccttatatgttttgatcacctactgttttgcaaggcactctgccaaatgttgagcttaaataggggtttcctattaatgtatttaggaaacacttgagaattgctgaagaaacttggtcagtgaaatcatatgtaccataggatatgcacgttatttatgttacatttgcaaaatgagtacttattttaagatacatatttcactaagttactaaaattttcataaatgaaaaggtcttcacttaactgttagaatcataatttgatatttgtaaagtacttgtaaaatccctaatacttctaagtgcttaaataaaaatagaataaaatacttatatgacttgtatgcaaggatttaatcatagtagtttgatatttaaaaatagagtaaatcagaaactttataagccaaaaattttttgtttgtttttgtagacatggagtcttgcccaggctggtctcacatttccgggctcaagtgaccctcctgccttggcctcccaaatgctgggattacaagtgtgagccaccgcacctggccccagatattttttaaaatgttaaacataggcctgaacatctggaaatagcacataatttattaatagaatttagattctatgtcacattgagtaatcaattaaggactgtttatgacagttaactttctgaagattttctagttaaatcctttctcaaacgaccctatgtaaaagtacacagtaaaaacactatgtaatattttgttggcattccaaatggaccct

SEQ ID NO: 122648 - DNA, 1030 bp, Homo sapiens
taccaggaatggtgggagggtttcctcaggtaggagagaaccatcagcaaggaacaagcaggattgtatcttgtgcttttatattttgtgggaaggaactttgaagcataacaggcatttattcatttcttagttcattgtttctttggttcactaaaaaagatgtgggggggcagtgagtaaaatattagcaaatgagttaagtaaaaatgaacatgtaagaaacccaaactacctgccagtcatcacaaggttatctcttttcctgactccaaattatagtttaaccttctggctgcagttcccacatctcttctctaaatgagagctaaatggttagagactcagaggatgaacatttcatccaatgtaactgtgatgaatgaatcatccagtaaactattttcccagtgaaaagtaataattttgtaggattatcatgtagcaggttatgaaaaataggaaatactgacttcagcttttcactttacagatacatgactgtgggggacaacagtcaagaatctggggtgctattctgcccctgaattgttttctggatgagtgtacatattgtaaactctagtaagggagtggtttatttctaatttctggtcctttgtcattttgagtctgtgctcagcatgcaggatgctactgctggactcacttgatgctttttcctaggtgatgacctcactatttacgggattgtaatgcaacggtggaagccctttcagcaagatgtgcgctgtgaagtggagatagtcctgaaagcaaattacatccaagtaaataatgagcagtcctcagggatcatcatggatgaggaggtccaaaaggaattcgaagatttttgggaatactataagagcgatccctttgcaggtttgtgtttaagggctaaaactgattattattaatggtattacattcagtggttaaatatgatgtctgtgatttgacagtcttatatgccgcataactcaatgactgagtttaaagggtaggattagtcattacctctagc

SEQ ID NO: 122649 - DNA, 1041 bp, Homo sapiens
cttaacatgtatttaagcatactcagaatctgttttcttttctttgctaggttcaaaggctatctgttggaagtattccacgatctatgaaggttattctggaagatgacttagtggatagttgcaaatctggtaagaagaggggaatttttttttagcttgtgtaggtagtcctaaagtattgattaggaaaagccactttttattttcccaagatcactggcaagggaaatgtagagctgtaattgctcaccttgagattagaaactggcaggtgggaagtgatagcaggaagagagctgggctagatctatacaacagcagctagtccaggtgcttgttttatgaatgaagaacctgacttgtctaaggtcacttagagagttaagtggcataactggaacatgaatccagaaccactgatgtctaatttaaggctcttttcagtgcactatagcttaacagcaggaactttaaaaaatgtagtgaatttaatgggtatttttataaaatgaattagagaatgtgactctgttaaatgctgctgcgtgtcttattggtgcctagaagaaaggacatcattcctctctgctctgtgctggtgacaccgtgattggagtcactgattgtagtctgctgtcttctgagggtcctcaatgttttcattggccgatacctgaattgggagggtacttgaaacccatactcaatgaagaactatacatggttagcatggagaaccctgaggaaggacatgacagccaactttcaatagttagaagactgtcacatagaaatagaattgtaattacagaagttgctgttgggtttcagtggggtaagccacaaggaggtagattttgactcaatacctaataattagaggtgtctaacatgggccttagatggtgatgagttctttttctcatagacaatcaagcacagcatatacagtacattgttagggatttaggccctacagtggcagttgatctggataataatctgcaatgttccaggcaatttaaagactttctgagc

SEQ ID NO: 122650 - DNA, 1025 bp, Homo sapiens
tgactgaaaaagtaactttctagcgctgtggaactctgtggtcgtcatgctaccatctctttatcggtctgctgcgtgatttactaaaataatcatcagttgattttatctgtggcaagtggcaatatattttttgttaaatgccgttaaaattatatactttagatcctactgagatagccctcttgtgagaataagtcctttttaaaatcctggttattataacttctagctatttgctttaaaacatggtctactcattgtgcagtatctggattaaaaaaaaactctactgataactgttatttgcaataattctttatattttcttaatagagttgatgatctgattttttcttagtaaaacacaatcttttttttccccctgaaattaaaatttatctttcaggaaataggagaagaatatatcccttggagtcaaatctcaagattgaagttgatgctgtttttttgttttctccatcaggtttgcctgtctgtcctgagctggtgagggaacacatacctaaaaccaaggatgtgggacactttttatctgtcactgggacagtgattcgaacaagtctggtgaaggttctggagtttgagcgggattacatgtgtaacaaatgcaagcatgtgtttgtgatcaaggctgactttgagcagtattacaccttttgccggccatcctcgtgtcccagcttggagagctgtgattcctctaaattcacttgcctctcaggcttgtcttcgtctccaaccaggtgtagagattaccaggaaatcaaaattcaggaacaggtaaataatcacataaacgagataaataaatttgaagaagtgtttttcagctatgggcacattgggaggattagggaacacagaatggatacaaatgtacttgtgttgtcactttgtggaagatcaagctcgaaactgttccacatatatctgaatatagtctttagaaaccatgcaatcatcctttttaggtggaacattgacaagaaagtagtgaaatg

SEQ ID NO: 122651 - DNA, 1016 bp, Homo sapiens
tctcctttgactcctattcatattgcatttttgaccactggtagtgcactgtttcgttttatttgccccttggatttctgaggacatagagaaccttttactatacttttcatttgccagcatagtgccttgtacatgatagatattaggaaatggacattgaattgggtttatacatatgtaatttgttatccgtctgtatacatgaaactagaatggggataggtgctttttatctgtagatacatactttttaatagagtgccaggggaatgagataaagtaatggtatatgctgtatttattttcaataatacttttttattatttgaagactcagtgttttttcaccttcctatgtttatctgttttctttgcattgttgacagctgtttctgcagaacccagtagatttcctacggtaagaaagagaaagaaggaaacaaattcacttccaagtatgaatttctaaggacagtctgttaattattcatgtcagaactggctgtcagtctgattaatggtatgtgtttcagttacatagcagaatacacatgagtgtgtgtgtataactaaagagagagagagcacacgaaagaatgacactgtgttcatataaacaaaagctagaaccaggactcttgcaaagaactccactgttactgacttaagccaaaagatatgtttcagattttatacttgagagcaaatgtgtgtgtatggaatgtggcctcttacatatattatgtaaaataaataccattatatgtcatttaatgatggggatacagtctgagaaatttgtcattaggtgattttgtccttgtgtgaacatcatagagtatatttacacaaacctagatgatacagcctactacacacctaggctatatggcatagcctgttgctcttaggctataaacctgtacatcatatcattgtactgaatactgttcgcagttgttgtaacacaatggtatctatgtatctaagcatagaaaagatacaataaggat

SEQ ID NO: 122652 - DNA, 2006 bp, Homo sapiens
aaattaacaatccatccttattgtagaactttaaaataattttttgtttactaagtggtttttgttttttatatatgtttatttttttccctttcttgtttaccaagattatttataaatatatatatatatatgcttattgtcaaaatagaaacatacgtaaactctgggaacttaaatatacttatgcaaaaactaaatttagaaaaaataaataattttaaaaatttccattccaattttttaccttgcagttgttgattaaatgtattagcaaattttgaatgaaatgcaaatttcattagaaatttagccattagataaagtcagaaagtactgttgttttatgctcatcttactattactgattttttgctgctttatgttttttttcttattcttactaaatcttagcagtgtcactagtaatagtcttacaaagtaggcaggtttttttaggctaagtgattagtgacatagttaatgattaacaaaaaaaatagcaagaatgaaaattagtcagatacacctctgaatttgtctcctgctaaatattttgtgttgcttattttcccttgtgcatgggtatgttcaggtatcagtaagatgcatgtgcatgagctcaaggaacatgactactggagtttccattacacattgttgcgtgccttgtaattttccccaaagacggtagggattcttttgttttcttaagtagcccaaagaatctttagttagaattaagaaaagtataaactatataacatcaataacgggggaaattatatttttagtgttctccctttcctggagtatttgcatagggaattatgaaatgaaaatttaatgtaaaatgcatatagtaaaaaatactagtagttactttagttatatttaaggacacatctgtacgatcagctaaaagagaaaaggtgctgaaagagaggaccattattttattctctcgtttcccacaattcttactgaattttttattcaaagaaggtgacatttttgcagttgttttttgttctttgtgattgttgtgatgtggctcctccttaactgacttcatttgagctgctgatgcactcttatgctctcatggagtggagaaccgattctagtatagagggggtagcaaatctttaaaacacgacttacaacatggggaacccgttgtggtaatctatgctgatgttttatgtgcttttgccttcattttgcaaaatgacttaatgctgggttacatgtctctctttttatgaattcagtcctgctcagagtgaagcttctccagtggcttctccagatccccagcgccaggagtggtttgcccggtacttcacattctgaaagaattgtgttggcacagctctgtatagactgttactaagagcatgactttatacagattgttatgtaaataggctttcctatgtcaaacactgtgaatgagaaagtatttgtctctccaacttgaaaatgcactgtatttcctgtgatatttattggaatcattctataaggtactatattatgtgtgtaattataactgttatttttatttgagatggaagagtctttaacctttgtaattactgcataataaattttgttagaatcaaacaatgctttttatttttttctacgtttgctttaatttttaaatattttttaattccaggtaagacttgtcaacaagttttactgcattataatcatgtcatatcaaattatttgacttcagtaatcataatagaatcaggatagggaaatagaaactcttgttccagtacaatgtgtaattttaactaaattgttctctaaatttacaaagctagaatgaaagtgcttgtgtaaattgtggactttcaagtgtataaaatactgttgacttttaggtggttttttttttttcagttttgatagttgagatctagaactttagtacagttagtatctataattaatactatgttttatggccaaaagtcactgggtaa

SEQ ID NO: 122653 - DNA, 1669 bp, Homo sapiens
gttatctccaaatctttagcttaggctgagtttttggagggattttatggtactcaaatacactgagattcaggtacctctctagggttttgggtgggaataggaatgtataactgatttctggaagatagatcatctacaagttactcagtattcatgagtgaataattttttctaagaatctttattaaccataattttattgaataatgttattgaaattttaagttctatcctttatatcctgaaaacaagatttttaaaattgttctaagtatttgcattttctaaaattgaaagtgctttttctgaaactaagccagcagtttccatttgtattctcttcagtctgccccatcctatattcttagactcagcaggatgtgtcacctgcttataaaaagtggcctatattttaacgttcaaggcattcaggcctattaccacctcatatcattcaggacagaataggcttagaagggaacataattcttctcttacctgatgaaactttttttcagtttgtatgtattggctgataatatagaatttttaaactttcttttctataaaccaggaaaaaatgacgtcatacatgtgtgtcctttgttttgctttcatctgtatttgtttcttgtcctttttatatgttaccaagccttgtgttatcacacagtattgtattgtgataagcacttgtaatagtgagcctgcctttctagtatcaaacctgttatttgtcaggttagtatcattcaacatataatttcttctgcagagcttatctccagatactgctcaccttttctccaaatactctggaatgacttaaaatgagtgacttcttcagaagtaacctgcaaagcctttcatagtaccatctacccctttaactcctttaatgcaactactgctcttgaagcagtcatgtcattatgcttaaaagttttaaggaaaaaagaagttttgtttcagatttttgtgtgtgttcaactagactaatttttttaatgtaggtattacagaagaatgtatctgagtgatatcaatgagctaaagtctttcttgttttcagattagaagaaatggaagaaaaatatctaatgagagaatcaaaaccagaagatatacagatgattacagaattaaaagccatgcttacagaaagagaccagatcataaagaaactaattgtaagatattttggttttagtctaaccatgttagtaatcaatagatattgattgggaaaatatgggacaatctttttaagtaatgctaagtgaaaatagaaaacacagaacatgtgcattgtgattgaaagttcattgaaatgtttatgaataaagtaatttttaaaatttaaatttggcattagggtaagggaattgtacgtctttcattttttttaaaagaaagtctttttgatacatattgaatgtttaataatatgtcactgccagtatacaattaatataccattgaagtgtgtgtatgtatgtgtgttgcacatgtagtattaggattggctagcaaagaaaagccagcacattcatgcattagcctgtattgtacactaacaggttgagcatattgatttcctaaaatgtgtcctagcaaacactaatccaaaatttttactctatagaaaaaaaatgttccataatct

SEQ ID NO: 122654 - DNA, 1092 bp, Homo sapiens
accgagccgagatcgtgccactgcactctagcctgggtaacagagtgagtgagactccgtctcaaaaaaaaaaaaaaaaaaaaatcatgtccagagtaaaaaccatgttaaagcaatttttccatttaaattagcaatataaatttaaaatatcattttgtatttttggaaggtaaaaatatgaggtgactgaaaatgaaattacattttcattttcccccatattaggagggaggggtatgtaggtttttccaatggtgtatcaacataaaatttcaatgaacttctgaaaaatgagcctatgttgtaaataattttgccaaatatatcctaggaaataggattaaaaagatataagggtgtctcttcttcctttccccctaatataaaaccagattattattaaatccttaatttctagtgattatgtcatatttatttctggcttccaaattatatggtcagtcaagttagtgttggcggttttcaccgcaactcatttctcttaagagaaattctccgtgaacctacagcaaagtgggcataatgctttgaatagttatcttgtagctttctgggaggaatttagaacagtaatatcccctcttggtccctcagtaaccatcatcttttaaactgaactctgatttatatggcctagcctttagtagtttgtataggtaagtctgcaagcccacaaatatatcagacattgttttaagggattatagataatttagactgtgtgtctttaatttctttttgtttagtttgtttcttagaactgttttcaacttgttttctcttgagcacattataattaatgttctgtgttttactctcccttcttattcctctttctttcacttagttgatttctgaatgtttccctttattcctgtaatcttttcttcatagcggcagtctctgggtgaagctttgcataaatctatcagcaatgtaagtgagcggcacttacaatttgtacacaagggcatgttgcacttttcattttgcataaacaacatcactgctttaaagcttcaacttatataaaaaatactgtttggcattcaataagatatattttgt

SEQ ID NO: 122655 - DNA, 1036 bp, Homo sapiens
ggatggtttttaagatatttttatctaaaattttgttttactcttttatataatctttatcttgcttcagcttcttataggtattttattatatggtggaactaggaattctctttgttaaacaaaggtatatctattcctttacatggttgtcatgaaaaaagaagatcttaaatgtgaaagtcttttcaaaacacagcagaagaaagctgtcatggttatttgagtgctttttccaaattaatcaggaaatcatccattcagtaaaattacaactaaataaaaaactttaggaagaaattgtaagactattttgctattctattacaatgaaatatattaaaagtactctatttacttacagattggccacctccaagatatggtaaggaaaagtgaacaaggtcttggctctgcagaaggacttattgctagtcttcaggactcccaggaaaggcttcagaatgagcttgacttgactaaagacagcctaaaggagaccaaggatgctctattaaatgtggaggtaatttcataattctactgcaatctaaacagcggcaaaataaaaatagaatttagccatttgacctagagctatttaaacagcacattgtatataattagtatattagttcttagaactaccataacaaagtactacaaactggggaatttaaaacaacagaaatttattctctcatagctctggaggctagaagtccaacatcaaggtgttggcacagctatgttccttcctaaactctaagggaagatccgtccttgtattttccagcttctggtagcaccaggcattcttggcattcggcaacataatttccatctctgcctatcttcacatcttaaaaggataccaggcatattggaacaagggctcattctactccagtttgacatcatcttaacttaatacatctgtactgactgtatttccaaataaagtcacattctgaggtattgggagggtaggacttcggtatatctttttggggacccagttcaaccgataacaatt

SEQ ID NO: 122656 - DNA, 1154 bp, Homo sapiens
atcacaagaacagcgcaggaaagacccaccccataattcagtcacctcctactgggttcctccctcaacatatgggaattgtgggagttacaattcaagatgagatttgggtggggacacagccaaaccatatcaccagaaaaaacggagtgtgatagcaactataataatatttatttagtgcttactgagtcccagactttgttttatatagcctctttatactgttctctcctttaatcctcacagcaaccctgtgcagtaggtaccagttactaaagcatagaaaagttaaaataacttgcccaagtcagcacataataagtaggtaaagccagaattccatttcaggtagtgtgctttcagaactcaattcttaaccctactctttctctcaattagtatataaagaccaagaagaagggatgccatgctgaggttggagatttcagcaggggctatgttgtggaggtcttgtaagccccatgaaagattttgaaagttatcctaagggcagtgaaaaacagttgaaagatgataagtataaatatgtggatgcttgtgcagtggatggggcttatgctcgtgtccatatttgtaatttataaaaaactcactgtagtgttgcaaggagagtggattagagaagaacaaatagaggtagacggatatttcagggaggaggtttctacttactgtattccctcagtttgtacattaatatggagaatctgagtatttatttctattgcaaatgacagaaatcctacctcaaactagcctaaagaaaaaaaaatttattgactcatgtgactgtaaagtccaaggataatgttagcatcaggcaagactagattcagaactgaaattgtgacaatggaacccagcttttctttttctcttaaattgggtttgttcttgtgttgacttcatgcttcaatcacatattccctgaggtatacgtggagctggcaaaaaaccttttctgggagctccttttaaagtcctgagatcactgtgactagataagcttaaaccatgtgcctgcccctgaaccaatccacatacaaacaaaatgagatgaccttattggtttacgtttcaatgaagcacttcattctggagtttaagttgagcgcttactaagaccacat

SEQ ID NO: 122657 - DNA, 1071 bp, Homo sapiens
agaacaatgttcaggtaagtaaagaatattatattcaacacatggattttttttcttttaaaaatatttgttttgtaggctggagagcagtctggcccacttagaatcagtggcttcacaccacttagacttttttttttttttttttttaacttttcctgcttttcctttgtgagaaaaatcaatgacaggataatttgtattaccctgtagttgttatttcagactttcagatattaggggcccaaaaagacaagcttaaaaccttgtctaattattggctaggcacagtggtacacacctgtaatcccagcactttggggggcccaggcaggaggatcgcttcaggccaggtgttagaaaccagcctgggtgagtgagcttagcgaggtaatacgctgttcctgggggggggggcggacaatattgctaattatttacaaaaggattttaatattgggcttaaagtttaaatacatttttttcttttcctttcactaataatggtttgcctgctagctgatatttagaatttgatcaagaaattgcttgctttctaaacctgaatttaataggggtattgcacaagtctgggggaaaaaaatgccggaagtccacaagttttgttttgttggcttagaaaatttcatagccatgtttttaatatctgtgcaacattagaatggattagaaagtgtggaatagcctttcctgattgggtcatgtttatgaaaacatcaagttataaatcactaatacttacagatttaaaaattggtatatagtttagtatgacttctgaataagagaaagctgacccttataatttaaatgaattatttagcttagtattattcctgcattttaacaatggctatttaatctttcttaggttcttcaaaaacagcttgatgatgccaaggagggagaaatggccctattaagcaagcacaaagaagtggaaagtgagctagcagctgccagagaacgtttacaacagcaagcttcagatcttgtcctcaaagctagtatgtgtgaccacagtttttgatgtaatgcttagctaaaatc

SEQ ID NO: 122658 - DNA, 1040 bp, Homo sapiens
ctgtttgagctgcatcctacaagttttgatacattttgttttcatttacatccaatggcttcctgcccattctcccaaagagtttttctttttttctctttccccagcctcactaggttatcacatttgccctggggctaaaggtgccgaggtggggcaggggtagaaaaagagggtttgttgcccttaccctagtagcttatggcttttgttccttagatgagaaggatctgggtagtttttgtgctttccctgcagtgggaggcctgtttctctgagcaaagctttctctgtctcctacccagtaaacagtttttcttgtgactacccactgaggtcatagaaaagagactatgagtaggcaaacttgattgtgtctgtggcttccctgggttccattttctcacacttgcccatgttcttaccttgagcaatttttagtaaatttttgctgaattcttacccacttatgtgaccttctcattttccttctgtgctctgccacaggtgagccaatgcctgtgtcctgtctgtccttggaggcttttcttagagtgaaagccagttggttgcattgtgatctcagctttctgataggttcatgaaaattgatgaatttataggttatttcatagtcattaggtagaacattgctccatttatatttctacattctaggtggaaactggaaccccatcagatttatttttaataaattgaacacacccaaatgtcaatgtgaatagatatttaattttcttcagagaattctttaatctgctgcctgactcttggcattcagaatttgggcaggtgtggggagaactcgggacacattgttcaggatgcagatttttgaaaaatagactttactcttttagagcaatttttagtttcacagcaaagttgagcagaaagtacagagttcccatccccttttctccaacacacatggcctccctgactgtcagcatcgtgtagtagagtgatatgttagaatcattagacctacattgacacatcattatcacccaaagtcc

SEQ ID NO: 122659 - DNA, 1021 bp, Homo sapiens
tagtttcctcttgtaccctgtgcttattgcactctaattaagagtcctgcatttggcttcaaaggctgctgccataaacaataaatatctaaatgtcattcacctttaagcccagaccagtttcttatcatctgacagtttataatgggcatattgtctcattacattaagtggactttgatcctctttagattactcttgagaatatttttttaattggcttaaaggaaaattctaaattatttttaactagatgtaaatattacaagactaaatttgcggcacactcttatttgtattaattttctccactttaaagtaggccaaactgtgttcatgtgcccagagaggttattgattagataaagaggttttcttaggtggttttcatgtgaaatcgcttggaaagtacttaaacacattactctctaatattggttgggtaagcaataaagtggtggagggtgtcaatctgtactaaaagagtgataaatgaacaacatatttggtgctagtatccaaaatttttgctagattcaaagggattcaaattatagaattcactaatctgagtttctgagtctagtgagcaagaaagtgataatttcatatttatgtttgataaagaagtttcaaaaaatggaatttgtggtgtaagcataagcactatatagaataatccttaagaattataaatttgcttttcaagtttttctaaagaagggaaaataggtcccttttcaaactgaagacgttacaaaatacattattgtgttgattctaaaggaaaacagagtaaaagagaagaggcaggagtcaggaaaattatgaatttagaagctataggcagccagataagctaatattagtgccttatgcttctgtaattttctatagcctacaaggatttccaaatatacacacacacacacacacacacacacacacacacacacatatatatgtgtatatatgaaatctcattaatttgatttaatctaatctggtacaagcatgaata

SEQ ID NO: 122660 - DNA, 1024 bp, Homo sapiens
agattacagaaaaattgcatgtggtgaaaaataatgtgtcattttcatttatgtattcactgatgttttgaagttaaactggatgaaattgagcaaccatttggcagctgataataatttcttcttggcaacatgcatgaatttttaattatatattgtatccactctcaatcccatttactaaataccagtgacttacccaaattcacacaataagcactggcaaaattaatagtgatattagttcactaaaattccccctgttcctttgcctaatcaagtacactccttgaatcagctgtacttccagctgtgagactgatttatcatcttaagttttcctgtagggcaagaagcgacatttcatatttatctacaagattacttttcaaaatgtgctgttggtgtcatttgtacatatatactgttttgcgaatcactttattttcacagtatggtccaaggtatagggaacagctggcctagagctgctttcgtagttttggaaggctgtcaccagcaaaagtttcaaaggagtggggaaacatatatctggcaaaatcatattttcttaattaccttctcagaataagagaatgtagaaagctgcccaggagaagaaaaaaggagggcttaaagatgctttttagactagctgtgcattcattgttgactggctttgaaactcttggcaagaattaccactggagagacactgaatgtgctggctgtaatatcataattctgctcttccctctcaattttgaatgtgtctctttgtcaacatctctatgttaacaacagtgtgaacttattggtattatctgttcacattcctctggtattctggttattgcctaaagataattggtttctttaccttttctttgtcaaaactaagcatttatttgagtctctcctgtgataaagatttcttactaagtcctgggaagagtttctacttctcttcactttattcaagaagataacagacatgttctttccctcaggggactcacagcct

SEQ ID NO: 122661 - DNA, 1009 bp, Homo sapiens
aatataccctttgctctacttttttttctcctctccatacactacaagttattgatacagggaattgtcccctttgacaagagttacaataatttgtggagaaaatggcacctctgttttttagcattttctatatactacaaatgtatttccttatttgtatacaaggaatgtcaatttatctaaattgactgtcaaccaaagtcatttctttattgacttccactactaaatgagagttagattccaaaagatctgtggtatgcatgaggaaaattttaaatttaaaaaaaatttttttttaagattccaaaagatagggcttgggaagtagcctcaacattggtattactggattaccttcagtctgggagcccaagtgcctggatgtctcagtggagaggctcaggacttagagcaggagttagacactgaagcccttccctctggagaagccacacgtgacttctttgtcgattgctttagtgaatgcttccccagtggctgacagagaactttgcctccattttccatgctcttcagggctcctccagcctctctcacttcttccttgtttgaggaggaaatggtacgcttccagtccaccatgctcagtcatacggcttaaaggagaggggaacaggtacctgcttggtgccacaactatagcaggcctttcttcagtaaataagctagagcttttctttggacctaaaactgaggatgggcctcatctaattaatcttcctaaaacacagttctgcacactagactttcattatttttccattctaaccagaatgaaagttttagcctcgcatttgtggccctccatgttttggcctgagctgtggatgcctgacctcatttaccagtatcccctttttgtcagggaggctgccccattccctgtttattctgtagggccccacttgccgccttctgtcgggaggaggctgatccctcagggattccctctttacttttcaatcttcactccggtctgtgg

SEQ ID NO: 122662 - DNA, 1056 bp, Homo sapiens
cttcatggattaactaacaaaccagatttgcttcttaaacaggctcactggacagactattagatccatgaaatccaaagccatagcaagtgaccttgagtatggcaccttgcagggtcatttctcaatatcgtacagtacaagataaatagaatttaggttttagaatatgtaattggatcaataactggttgaataactgcatccaacagttgattgatgtctagctgaagatatatttctggcagtgtttgacatgactcagaccttcaccttggaataatttttatcggatgtctacataaaggtcttgattatccaaaattttcacggcaggaagagaaaatgcattatgtcaagaacctatagccagaataagaatataagatcatcttaacagtcttcaataggcagaaatgtgggaaactgttaccaggtttaaaaactgaaaaacacaagtactaattgagaggaatatgatttgagggtttaagtttattagattttattattagatattattactcttaaacataggaaacgtagtcacgtgaaccaaactaaatacatgggttagcttcgcttttccttatcagtaattttgtagaatattaaagcctttgccaatatttatgtaaaattcattcagagtgatagacctcaaagttaaattacacctatatatagtacttttaatcagattatatcaggtgcacattacaaattataaaatacagttaaacacaccagtcttattttgtgatgtttttgcctaactttgacttagtaattctgtctcctaacttgttttcataattgtccttttataggaatttttttgaatttttttaacttaagcaattacttgactttaattgttagattcttaaacctttttacagagagcatgtaaggataaaattaatacatacctccttttttttctggaaatattttatcccactaaaatgtagactcaagtgagcttgaggaccttatcagtccttattgccatttccctatcacctaggacagggtctggcacatagtagttgc

SEQ ID NO: 122663 - DNA, 1091 bp, Homo sapiens
cagctgagacctagccagctttaccagcgcatcttcatttttaagtgacagttgggattttgcctcagatacttgaggaaggtattgacctctctggagatctgcggaaggatctttctccttttggaatgaatcaggatgcttttctaatagttgaagatcaaaagtagtccaaatagaatttcagaagtgattttaatgatgccagaaaatggcaagtcttacacagctgaattcttaaagaagaaaaattaaccaaaaggaaatcatgagatttcctagaaatatttgttcttatgtgtgaagaggcaggctaatcttttgtatgtgagaggccttcagtgttgtaaataggataaatatgcattttgtcaaagatattttatttttaaagaaaagcatgatattttgtgtgtgaagtttgggcttttttttttccaccctaaatccttcaaatgtttttagtcatgttttttaagatagtgaagagctgcatatttcaaaatgtatttatattctgaccttggttcataaaagtctgccaagcgccagaactatttaaatttggctataacactgtgttaacgtgatgaataacgattgacataaatgtactatattatttttataaattgtggttagacatgatagtaattttagaatatttacagtgctatttttggagactttttttttttttttagtcaactagcagtgttgaatgttttatctagccaactacaggttttcagctcataattagaaatgcctgagaagtccatattgtgatttaaggagttattagcccaagtcagcaattttataaggcattcttattaggaagtataaaatgaactttatgtagtaaaaaacgtattttataattggcatatatctaatgcattgtatacattcactcatattaagcattttggttagtcttcattatttaatcctcctgtggttacttaacatagaatgtgtaatgaagaactcagtagctttaaaggtggggtggttgaggagaatagaaaatgaaggtgatttattaactactgttgaaagctgctttagcagttagggtgaataaa

SEQ ID NO: 122664 - DNA, 1053 bp, Homo sapiens
cgattctcttttgggatgcacttacctgtctctgatccatccatttgaagcaatgtagtggttagaagggtggatctggactcagataacgtgggtctgaatctggcctctaccattctcttgctttgtgaccgtctgcaaattacttaatctctcagaactttagtttcctcatttgtaaaatgaggttaatagtacccactttgttggatcctgaggcttaaatgtgatagtaaagcacttagaatggtatcagacatgaagtgggcacacaacaaatgctgcttgtgattattgctgttactggtcaccacctaaagccatcaagccaagattgcattgatccatatgctgtttaataactcaggaaagtggataatgaagtttcaaaagggtatcaaaaatagttaaaattgagttttagtgcttaaagggatacatttccagttcatcaaaaagatcttccatacctataattttattttgctacggtcaactctgattttctttgatttttaccaaattccaaaaaaacttaagtatctttagaatgatatacttactgcatatacatcttcagcttcttcagaatatatgttaaagaattaatttgtctctttctcatagtcaaatatgcctattcccgcagataccatctttcagagtagtcacagtcgagttatcttaatttctcttttttctaataaataatttttttatttacacaatgcagatcgggtctcactatatttcccgggctggtttcaaagtcctgagctgaagcagtcctcccacctcggcaccccaaagtgttgggattacaggtgtgagccaccatgccttggctgagttatctatcttaagtattgaagttattcttctaaatagagagagagatcgagtaaagtgaatttcaatctgtttcatcttggaggaatgtttttaagaagtgagaattattattttaggcttggcaaaaattatataattatgataaattctataatcagagctcagtccatcacttagtagtcaaagttagcataaatcagt

SEQ ID NO: 122665 - DNA, 1034 bp, Homo sapiens
gtcggtgattccagagttatgtatgcagatctaactcctgggattcaagtgaagtgatgcaataaataatcatgtgttgaagtggtaaaatgcatggcatttttgtatttttctaggaaaggcttgttagcctcaaagctgaaaggatatatagcatagaacatggtgacaacttacaatttaggttaatcatgtcaatttaagagttgctgcacttctgctgctcatcagggggtagtcagaagatttatctgaggaacagtctgaaaaatccattacaacaattccctaataatgaattccaaacaccagtgttatttgtagcaaatatttatttaactcccatggattctgtgggcactgtattattcctctagagaatggagacggagtaatagttccttatgcctggggagacattggtgtccagcttgctatattctggtgcaaaggctaaagtgaatgtgtttgtcttccgagggcaaagggcataaaacacttttaacagaatgctgccaggtcacttacatttgtaccatgggaatctggagtataaaggaagctgactgcagaaacctcaaggaccagggtgctctattattgtaggctcatctatcttggcatatgttgatgagtgtgcctccatccttttaatcaaaatgattgaaatacaaagtaccacatgcttacctggtatctgcttaagagtttcccaacagcagctaaaaaaaaatgaagagatttcatgtgtgtacacgtttagctgaactgttaaatttttttgtttttggtttctccgttaattttcacttgtggaaagggcttgaactttgtcttgttgtgggacagggaagaattatattattttgagatataaattgatgataccccgtgggtcccactttcctttttatggccagcaggcatgagggagtaaaagttagactatcaggtctagagctggctcctgggagaggagtaaagctttcaactcctattttacagtgaaaatggaagatgaccatttggtctgg

SEQ ID NO: 122666 - DNA, 1030 bp, Homo sapiens
taataggtattcaatacatatttgttgattgtgtaagtaaataatgtaaataaataaatgggaaagatgaataaactttgttttattcacatcaaataacaaacattactaaattcattaagtgcctaccacttatttttcttcctatcaaaagcatcatctttaaatttgattaatgttgatttacagtttcatctctcttttgactatttgagggaaaaattataatagagtttgcaaatattaacctctttaaatgttcccaaaccattctccattgtgttttcagcataatgctgtcagtttaaaactaaaggattaaatggggagaggagattatgacctaagcctctgttaaattactaaaatttgaatagcgttggtttaaatccaaactaagaacatgtaggcaaggaattaattttagcgtgtgtcctagaactaaccttactttttacccttgttgttttcatttatctgagagattaggacaaatgtttttttgatagataccataactttactttttttgttgttttattttcagtgggtaggtgtcaaaattcactgttctcttttaatgggcactcatttttcttgtgagataaactctggtatagtttatttaaatatgtatttacatatccctttaactactccatttggccctgaaatagtctcttgtctgtgaagtatatatgtacagcatttttcacttattcatataataaccaataatgaagtattgattaatgaactgattttattttgcctaccctagaaacatcccctgtcaaaaatactcacatgatttaagaattcctcattcaactgaagctatagagattgaaccttggaaattatgttttacactttcctattcaaaatctcagatttgtacagagggaaaaaagacttatcaataattctttatataggccaggtgcagtggctcacacgtgtaatccccatatcttgggaggtcaaggcgagaggatagcttgaactcaggggtttgagaccagcctgg

SEQ ID NO: 122667 - DNA, 1035 bp, Homo sapiens
aattcaataataccctctggtataggctgaattgtgtctgttcaaaactcacctgttgaaatcctaaccccactacttcagaatgtgactatatttgaatagggcctttaaagaagtaattaagttaaaatgaggtcattaagttggaccgtaatccaatatcacaagtgtctttattaaagcggaaattgggacacagacatgtactaagggaagtccatgtgaagacacagggaaagacaaccatctataagcctcagagaggcttcagaagaaaccagccctgccaatagcttgatcttggatttttccagaatagtgagaaaataattttttattgtttaagccccccctgcctgtggttctagcaaactaatacgtgttagtttgttcaagtcagttaaaagcaggatcagcatgccaaaaggttgaatcaaggatataaaaaacaacttttagaaccttttcaagaatatgtttttagaaaaacaaaatgatagaaaacaaaaggaaattttgtatatctgtatcctctatacctatgacaaattgagataagccattaaatcttttcccttttcctccccacatctccaaaaaaaaaaaaaaaaaaaaaaaaaaaaaacataaaactgaaggagaagagatattcaataaggggaatcttttgtcgaaggtaaagtaatttgtaaatcataaatgaaaatgaaaatattggaaagtagttgtgtttgtttcttatgactatagtaacaaagtaccatgaacttggtggctaaaaacaacagaaatttattttctcacagttctggagccaaaaggccataatcaaagtgttaacaaggctatgttcactccatagttgctaaggaaagaactgttacttacctctctcctggtttctagcagcctttagaatcttagcttgcagatacatattgcttcttcacatggtgttctccatttgtgtcttttcattgtcttccttttgtctgcctgtctttgtgactgtatttccccttcttataaagacac

SEQ ID NO: 122668 - DNA, 1072 bp, Homo sapiens
tattatatcaccaatgaagtagtttttcatcatgacctctggcttgctaggacaatcaaggctaccctagaccaaattttgataaaatggtaaagatacattgtccgtgcctggtgaaagtacctgtttctgacattcacatttggccaagtcagtagtatcttcccagtcatagagactgtgttgattcactcttgtgaagaaatttttatattgatgatgtcttttgttacatgtaatgaacagatacactattgtaaagcttaaggaaacctaagatcattgggcagattgagcaatacttccagcttctgtggtgtatatgggaagtttgttccctgaagcacatagtgtgtattgtctgtgtttagtatttcagagggttttgatagcagccataaaatcatatgggtagtttttttattgctgtgagaagactgttggagaaattctgcaactctccattgacgtcttgtactatgtttttttctttccaatgggtatacatacagttcataaattttgaccattttatttatgtaatatattttagagatttctgtatttcttcacagaaggtttaattcacttattacaaaaagggaagagaagatgtaatgatgataggtttctgtgaaaattatttgtgtaagatcatacttatgtgtagcacaagatgcctaatagaaataaggacttggccttcaacacctgaggtgaagtgagaaagttgataaacctgactcaagggaggtgagacacttgactgaatatcacctcaagtgtacaaatgctttcctagtcttaccagaagagtctagatacttcccacctctagccacctgccgtgcctctaaagctttgctgcaagcaaacaaactgttatgtctttatcatcttcaaacatcatcccgtatcctcaagggtactagacttttggagcctctgagagccttaaaattataatagtggaataatagttgaacactgcttagcattgtatgaaatagggaataaaggaacagctgggaattttactgtctttccttcggtgtacagaaacttctctaaa

SEQ ID NO: 122669 - DNA, 1593 bp, Homo sapiens
cttttctcatcttactataactgtcagtagcatttgatataggggaccatttttttttttttcctgtgtgaaaaattctcttcatttctgtgtatcacacactcttattgctgcggtttctttttctttctttcttttttttttttttcattctctagtcaacctctgaatgttggaatactcaggatttagtcctggacccaggaccaaggatcctaggtttctgtgcactctactcttaatttattacacttaaacatttgcctttaaatatcatttatatgctagtagatgcccccatttatatctctagcccagacctctcttttcagctaccaaacctatatatacacctgccttctgacatctcaatttatacatttctcacttaaacatgttgaaaattgaactcttgggtctcccaaacctccttctacaaaaacaaacaaaatacatctttcatttctgtctcattaagtgacccaaccgtctctttaattgcttaattttgaaagtcatcataacttttttctgtttttttaaacaatagttgatctttattataaataaattaaccaatgcagaaaattaaatataatgaaattccttgtaattctaaaacggtcattattaacactgtggaaaatcattctaggcatctttctgtacatatacagacagaaagatatgcagatatataaaaataaattcttttataaaaatagaattatagtacagttgccactttaaatttgaactgaattttataggaaaacaaaaaaaaagaagccccagtgtgagactgaaggaattgctgaatttcaaataactgttttttctctccaggggtcattattttcgaagagattcctctaaggtaaagagaaaacattgtgtaaaacatttcaagaggtttgagtgtgatttttcacttttggacagtactgatcaactctgctatgatagatgaagacattcatgctcttgtcagctgcccacttcccctgtcctcacctgtgttaaaaagtagttcctttgcccatttcctaacccaccgtcatgagtcagagaccctatcttcctccctctccaggagtgtgattaagcaataagctaatctgcatttttcagtgtagttacctaatatgtgaagtgccttttatgtatgactacacagtaaatttacaatttaaaaatgtactcttctatatttactcaaccagtatttattgaatacgtattctgagctacagactgtgctagtatggggaatgcaatgatgagtgaatcagatgtggtgctcattctctttaaccttgttatctagtgaggagtaagataattagttaatcgaagaatgtgaagtaattaaggcagaaaagaaacatgttcttataaagccctcacccatcttttatcattttaagttactggcaattctggacaccattgtgtgtcttaccctaatgtatctctacctttcctgtgtacaatagttcctacccttccttagcctgaactaatgctccgaggaggttagactccttatctccctcaaggacaaaacagcatttattcctgcttctgtacttg

SEQ ID NO: 122670 - DNA, 1017 bp, Homo sapiens
tttagatttgatgcttagtgatgggcaaccacagcatgcttttgagctggggagcccaagagtaaatgtgcctgagaaaaatattctagttgtgtttaataagatgcaatgagagtgaagagcttaaatatttcatggagagattggtaaaattgcaccagaaaatgggttagctttgataggaaaaggcatggcttttaaaaattagctatcatatttaggttagttggattttcagtgaatgtagttaaaagatagcctcatggtctgagggcaaaaatatatagaatttattatcttgccccagagtccctaattattattcccttgcattttcttacatattggatatgaaagtgcaaagaatgagaaagatggattattgaatttttgtcagaaccaaacttttaagagatatatgacattttaaagcatattccaaatttcatgtatgtatgtaatggttgttacatcatgcattgtcagcttatagattattgctgtgcatgttaactgttttgtacttatatatgtacatatttcaaacgtatgggaattaggtatatttaaaaatgagccctcaaagtcatacagataggaaactacattaatgactctccatggatgtggttgacaaaagtgaatcatttaaatgactgttttctttccctctagtcttttttagcactggtgaacttgttatcctatcctgctatttatgagcttgtaaggaatcaagatcttcctaataaaacagaatattctcttcgtgaagtcccaacatgtgttattgtaagtcattttctttaaatctttctctgttataaatgctactatttgagattggtagtaaaaaggtaatttgaccaaaaagagaaaaaagaaacattatgtaatggcatttaagggctgatttgattaatcatgcatgaattatatcaacttttgaattttctatgcgtggaatctttgatccaggtcacctaacattcccaagacctatcagaatacaaggct

SEQ ID NO: 122671 - DNA, 1050 bp, Homo sapiens
tcctttcccagtgggacaaagttctaagacttaaatgggtactacagattcttttcttctcgtagatgaggctttaggttaattttccttacatagactaacactctttgggagttattttaaagtaatttttagagacagctgggtttttgttgtggatactagagatcgtaatgtagcaatagccatatatgtgtatatcagtggacaactaagtcttttccccccatttgatatggtttatttgtaaaatatgttatatgatatttcattaacaaccaaataatttaaaatttgaagataattttgattttaataacattaaggataaaacaaaaatgcaacataagaaatcttatgggtagtgctatcagtaagaaatataaaatataattataaatataattataaaatataattataaatataattataaaatataaatatatggctagtgctatcagtaagcaatataaattattctactattttttagacaagtttgctatcagaaagaattcctactccagtagagggttctgattctgtttcttcagtaagccaggaatcccaaaacatgtaagtacaattgatgaaagtcatgcatttattatatttgctgaaataaatttaaaattattaaaatgtaatagaatactatggcaaaaatgttttacaggatggtaaatgtatatatacagcttcaaggaaaattagtttggaaaaactttagagatcatgtaatactcataacctttttaaaatctaacaatatttattatacttgtttcattctgtttttacatcttagattaggaaatgtgatattatcgtgtttccagaaaatttggagaattaccaaataccaaagttggaaagttaactggagagtttagtagaaataatatgttctcaaatgccaatgaagtctatttatatttaaaatattatttttctaaaagtggtgggagtacatttcagttaggttttggctttggaaaattatttaaatcaatatttatatcaaattttaatttatatgtctccatg

SEQ ID NO: 122672 - DNA, 1024 bp, Homo sapiens
atttttaaatatggttggcagaaaatgattagggtactgtcactttggagcatttcagtgttggcacatttctgcacatgtagaccgtacagtatcctcttcagtataagagttgtgctttttaattttttttccccactatgtatctttttttggattctgtcataggtatacttttttggtggtggttttaaaatagtttagcatggaaattggacacaatcgatggatagaatgttcttctactggtcagtcactaaatgatctgcaagttttttgatacgatttgcattcttgtgattgctttgctcctaatacaatgcacacataaacacctgtctgtcattgactataagggtttaaacctaagctattgtgtgatttatgatgttgtcattagaaatcatgcaggaaaaatagattttgagtggcacagcttgagtattaaatatcatttccttttaattttagcatgcacattatagcagaactacagtattaagacttcttgaaacgaaatataagtctctggtaagtctgtaattctgtttttatgttgagaaataatatcaccagaatatatatgatgtaataacttgactatgcaaagttgtgtggtgataattaatattggataatgaagcaattcgccttttatgtgatcttaaactaccatcctgtgacacataaagggataaaaatagagacttaaaatgaatgcagtcaggataacaattagaaaatatgttttatatatatagtaaattggcttctatatataacaagctagtttgagagaagccatatttttaagcagtagcatgtagttcgattcacatcaagtattcataaagccattacttttataatatagacccatgtttttcagtgaaaattacatggaaaaactcaaaatgataaatacttttgcattttcaataattggtttgagttataccaaatgtagacttaatactctaaaatatgttaccaaaatcatctacatttgttactattagtagaa

SEQ ID NO: 122673 - DNA, 1053 bp, Homo sapiens
ttgttttgtgagaattgttcatatatcctagaatggaaatgctttgccaggggcatatctgggcaatgttttgaaattaaagccctcaaactgtaggaacggcctagaatagggaaagcctgtaggacaaggctactggaaaatgttgcattggtgattctgattcaactaccattcttcctcccattcctcttagacatgatacctaaaatctgctaccacatttagtattttaatttttgctttacacaaacagcaactgttttttttctctgcttagcacttagtttaaaaaatgatttctcaagagctttttaatataaaggcatctgataaatcattctttataaattatccagactttaccttttagtagtttgttaaatattgttttggaaaagtggcattattttagtgactgagtgttaataaaagtcttttaaaaaaattgtaggtgagatatgaagccttgcaaacattatgttcagctcctccatctgatgtcctcaactgtgaaaattggactactctctgcgaaaaactgaccgtgtctctttcagatcctgatcctgtgtttagtgtaagaaaatggttatagaaatattaaaaataatttgttttcccaccattctggaaataaatagaatatgatagttacgatagttttcttttcttttcttttttgttttttttgagaccgagtttcactctttttgcccaggctggagtgcactggtactaccttggctcactttaacctctgcctcccaggttcaagtagattctcctgcctcagcctcctgagtagctgggattataggcatgccaccaccaagcctggctaatttttgtatttttagcagagatgcggtttgaccatgttggccgggctggtctcgaactcctgacctcaggtgatccgcccaccttggcctcccaaagtgctgggattacaggcatgggccacggtgtctggccgatagttttctttaatagtagctgacacatttatggaacttcagtttcagctttctaattgtcaaaatttttctt

SEQ ID NO: 122674 - DNA, 2297 bp, Homo sapiens
cttcacacaccttggtcaatgtgaaacaagcttgaactggttatatgcttccccaccatttttatttattgtaagctactttaaaaattttagacaatgttgtaataaaaatatacacctttttcccccattatccctggtcttctggtgaagcaagcagtgtaatcaatgattcttatgtgtgaggagcaactccaagtagaggcgttcatgtccctaatgcttttttatttttcctcatcagcaaatttaaactacaactttatcctgatcccactgctgctctttgcctcttctccccccagcccttccacatttaccagcctcctccctacctcctcccagcctttccctttgccctcccctttcttctagcccctcctcccagttgagtcagtggcttgaaacttttaaaagctctgtgctccaagttacaaaaaagcttttacgaggtatcagcacttttctttcattagggggaaggcgtgaggaaagtaccaaacagcagcggagttttaaactttaaatagacaggtctgagtgcctgaacttgccttttcattttacttcatcctccaaggagttcaatcacttggcgtgacttcactacttttaagcaaaagagtaagtttttaaaaaatgagaacacgttacctattagtttctttttctacaagtaaaacttttctaaagttttaaaatgtgttaaatgtaattttgaattatgatactgtaaatggattgatggatttgaaagtgtttctatagttttaaagttaaaatttattgtaccaaatatatattttgactgttaaaaaagtttctattaacattgcaacaggtgaaaaggttcaaacctttccgattagaataaaggattagtttactggatgtttggtttttcattttagagtatcattttattttgttttttttttgtaatcagtaatagtctaggtgctatcatttgttgggtggggggggggcggttaggcgcctgggttgggggatttgactgactacatcggaaaaatcaaagtgcaaatttgcttagcgtgcttcctatagtattctacacttcatagaataaagtgcttttttcatatggaaatcttgattgatgttctatagctttgcaaagccaacttcttttgtgacgaagtgctttgttaaaacatcgtggttacttgacttccacgtggttccttcctagaattttccccattaaacaaaaaggtataaaattcaagagtattaatattatgctttaaaaatcaacagtaaattgttactttgtgttagcaaccgctatggaaagatttgagaccctcaggagagacagcttttactcgaccacgttggcagtttaggagatgaaatctcttgaatgggtggtggctagttacagagcattagagatcagacgtttaaaaaagagtgtatgccagggtacttttccaaaaccgtctcctaaaacgggagctcctagaaagagcaggaaaaaaactttcttaaacagcgctttgggagctccccccgccaacacccgccgccccgcaccttccctctgctcgaacctgtaacagaattcagaactctggggcagttctttggagttggagctcctagggcaaagataacgctaatgcgttgtttaaaagggttcaatttttaaaatacttttattggtaacacccattctgttcatcagaaatgcagccatgcatttttgtgcccggtaaagattttctgttctgtgtaaatctacaaactaaaataattagtttagattcttgacgtgaccctgcagtggaagtatttgcaccagtgaatgctgaaaagcaaataaaaatgaaagctttgcggaggccgtgggccggacgggcgcggggcgcctcctgccatcttagcgtctgccgggatccttcccgcgccttcgctgcccgaaccagctcggtcttgggacgtttcccccaaatcctcacaagtcaaatcgaactcaggtccgagttcgtcactgcaaaggaacccggggtgcggggtgggagggataggaggagagatgggctgggtgccaaatggtagaacaaatggttgatttaattaaagttgtcaatctaatttcccatccctctcacaccagccctttttttttttctttttcttttttcctcttaaacttgctgaatcccactatctccgcgttggtaagaaaacctgaataccttgggaattgtgcttaaattgcacttgcaactcccctggaagttcctgaaacttcccgagaatgaggcggg

SEQ ID NO: 122675 - DNA, 2095 bp, Homo sapiens
tggtgaagaccaggaatgtatgtttttaacaaatgctgccaagtgactgtgatgcagttcaggaaaggggccagaggagcctcaggctggtcacacttagtgcctgtagctttgggcatccatccagtctagggggccatgaagagcaatggaaatgtaatctaacatggtgcatagacggcaaaaagcgtggtccagctgctaagactctgctcttaacaagaactttgcacaactcctcttagacagaccttggtctacatataaagcaccaactcagtatcctagaggtgaaggcatgaatatatgtgatatgtccagctgcgttggtcttctcatgtatcaaataagaaatatacctgtttccccctggtgaataaaagtgcagtttatagtctgtagatcaatgccagggattctgtaaacatataattatgcccttttattataagagggtattaacttaccatacaagacttggaaaaatgaagatattaaactagtttgggaaggtgcagcagggaggaacaaccagttgccaaaatttgattcatggcaaagtgagcaactaccaaaaaaaaagggaacaatttttgttacctgtttttgggcagctgtcacattaaacattatttgatggtatctatgatagtggagatcgacaggtagctacatgttacaggatactcggtgtccaattcgataattcgtatcttattaagatgaaagagtataactcattaatgcaaatgacaactgcatgggtgcttaaagaaaagacaactttgcaattaagttactagagtattaaaaaagaactaatgaagagctgtctgatgacttagttcacatactatggaactgtggagtgtttttgtagaatctcaaaattatatgaaagtcatgtatcatgaatttttttatagaatgtaaataaagactatactttcagggatcatttctatagtttgttactagaatgtaaataaacttagtgatgaattactataagcatctacacaatcatattttactttgagtaatgatgaaatcctagctaaaataacttctgttctgcctggtcatatttctagatatgataggtttgtcttcagctctatcgttgcatgaatgtgatgagatgtatgcaaagtttatctttttatacttgattgtttttgttatttttcccctagcaattgaaatatgtgagcaaaagcagatgacactggcaaaatactgtaattttttacaaacagaattagggccaattttacacatcatcacatagaaactgtctattgatatagctccaaagattctgtttgtctgaccctcatggactatacttcttcatttccagtctagtattttctgctaaattgtagggtttttttttctttcacattctctcaccatcaaactgtccatcacggctaaattactccctcacttcaagcctttccttggctattcaactgtctttgtcagcctttcaagcctttgttcttatttgactgctgttttaaattgatgctgttttcatacatcaatttcacttcctaacttgtcacttcagaatctaaaatgacccttcctaagtaaaagggaagctccctttcttatgaccactgggggagtgttatttctgtggccttcacacccacctcccactcttactcagcattctttggcactagtccctgggctgtcatcaaatgtacccatgataccgtggtaccatctagctggtgcatagtttagctttatggctcagccatctcttctttgttcggtccaggaaatcccaggtcaggtgcccatttcattttttcttgttctctatggccagaagatgcagtcattagacagaaatgtaatgttgcttactgaggaagaagactcccctggatttcatttacttcctacaaggagatacagctcaatagttcaacaccagaagagaaactcctttatattcagatagtgaacatatttctaagaagcctaaataatcctacctttagatactctatttagaattcattactaagctcctgcaaagtcttagctttgcttgtttttaattattaaa

SEQ ID NO: 122676 - DNA, 3816 bp, Homo sapiens
gtttataggtattcttacctggattcttgatacctatgctttgaataacacacatcaggattttgcttagcaaacacagatctaccaggcaaaaactgtcctcatttatcagacaaataaaaggagcagaggcttagcacaggtggcttctcaagtcacacagcaaggcagtggttgagcaagcaatacaccttcccaggttaaagactgcaactcatcatctgttgcttctaagacttactttgtctcaacaaacaaaacaaaacacttgttagatcttttcttcgttggcaaaaatgggacaggaagagtttgcacttggttttttgtgaaagaatgttagaaatacgtgaaaccgttggtagtattttgactatcacctgaaaggtactaaatgttaaactagtaatttgcaatctgtgatccttgaattgtctctttgtttctttcaggtggtgcccaggcaacatgggtgactggagcgccttaggcaaactccttgacaaggttcaagcctactcaactgctggagggaaggtgtggctgtcagtacttttcattttccgaatcctgctgctggggacagcggttgagtcagcctggggagatgagcagtctgcctttcgttgtaacactcagcaacctggttgtgaaaatgtctgctatgacaagtctttcccaatctctcatgtgcgcttctgggtcctgcagatcatatttgtgtctgtacccacactcttgtacctggctcatgtgttctatgtgatgcgaaaggaagagaaactgaacaagaaagaggaagaactcaaggttgcccaaactgatggtgtcaatgtggacatgcacttgaagcagattgagataaagaagttcaagtacggtattgaagagcatggtaaggtgaaaatgcgaggggggttgctgcgaacctacatcatcagtatcctcttcaagtctatctttgaggtggccttcttgctgatccagtggtacatctatggattcagcttgagtgctgtttacacttgcaaaagagatccctgcccacatcaggtggactgtttcctctctcgccccacggagaaaaccatcttcatcatcttcatgctggtggtgtccttggtgtccctggccttgaatatcattgaactcttctatgttttcttcaagggcgttaaggatcgggttaagggaaagagcgacccttaccatgcgaccagtggtgcgctgagccctgccaaagactgtgggtctcaaaaatatgcttatttcaatggctgctcctcaccaaccgctcccctctcgcctatgtctcctcctgggtacaagctggttactggcgacagaaacaattcttcttgccgcaattacaacaagcaagcaagtgagcaaaactgggctaattacagtgcagaacaaaatcgaatggggcaggcgggaagcaccatctctaactcccatgcacagccttttgatttccccgatgataaccagaattctaaaaaactagctgctggacatgaattacagccactagccattgtggaccagcgaccttcaagcagagccagcagtcgtgccagcagcagacctcggcctgatgacctggagatctagatacaggcttgaaagcatcaagattccactcaattgtggagaagaaaaaaggtgctgtagaaagtgcaccaggtgttaattttgatccggtggaggtggtactcaacagccttattcatgaggcttagaaaacacaaagacattagaatacctaggttcactgggggtgtatggggtagatgggtggagagggaggggataagagaggtgcatgttggtatttaaagtagtggattcaaagaacttagattataaataagagttccattaggtgatacatagataagggctttttctccccgcaaacacccctaagaatggttctgtgtatgtgaatgagcgggtggtaattgtggctaaatatttttgttttaccaagaaactgaaataattctggccaggaataaatacttcctgaacatcttaggtcttttcaacaagaaaaagacagaggattgtccttaagtccctgctaaaacattccattgttaaaatttgcactttgaaggtaagctttctaggcctgaccctccaggtgtcaatggacttgtgctactatatttttttattcttggtatcagtttaaaattcagacaaggcccacagaataagattttccatgcatttgcaaatacgtatattctttttccatccacttgcacaatatcattaccatcactttttcatcattcctcagctactactcacattcatttaatggtttctgtaaacatttttaagacagttgggatgtcacttaacattttttttttgagctaaagtcagggaatcaagccatgcttaatatttaacaatcacttatatgtgtgtcgaagagtttgttttgtttgtcatgtattggtacaagcagatacagtataaactcacaaacacagatttgaaaataatgcacatatggtgttcaaatttgaacctttctcatggatttttgtggtgtgggccaatatggtgtttacattatataattcctgctgtggcaagtaaagcacactttttttttctcctaaaatgtttttccctgtgtatcctattatggatactggttttgttaattatgattctttattttctctcctttttttaggatatagcagtaatgctattactgaaatgaatttcctttttctgaaatgtaatcattgatgcttgaatgatagaattttagtactgtaaacaggctttagtcattaatgtgagagacttagaaaaaatgcttagagtggactattaaatgtgcctaaatgaattttgcagtaactggtattcttgggttttcctacttaatacacagtaattcagaacttgtattctattatgagtttagcagtcttttggagtgaccagcaactttgatgtttgcactaagattttatttggaatgcaagagaggttgaaagaggattcagtagtacacatacaactaatttatttgaactatatgttgaagacatctaccagtttctccaaatgccttttttaaaactcatcacagaagattggtgaaaatgctgagtatgacacttttcttcttgcatgcatgtcagctacataaacagttttgtacaatgaaaattactaatttgtttgacattccatgttaaactacggtcatgttcagcttcattgcatgtaatgtagacctagtccatcagatcatgtgttctggagagtgttctttattcaataaagttttaatttagtataaacatagcttctatattccgtgtgatttgtttcccctgccgagatggagtcttgctctgtcacccaggctggagtgcagtggcgcgatctcgtctcactgcaacccttgcctcccgggttcaagcaattctcctgcctcaccctcccgaatagctgggattacaggcaccgccaccgcacctggctaatttttgtatttttagtagagatggggtttcaccatgttggccaggctggtctggaactcctgacctcgtgatccgcccacctcagcctcccaaagtgttgggattacaggggtgagccaccgcacctggcctatatttaaaactcattgacggcatctatttgagattatttaaacacatttctattggttatcagaacttcagcaaataacagtcatgttttcagggacaatatttatcattagctctgttcagtgcaacataaattgtaaacatttttggatat

SEQ ID NO: 122677 - DNA, 1032 bp, Homo sapiens
atggtggcacacacctgtgatcccagctacttaggaggccgagacatgagaatcacttaaaccctggaggcagatgttgcagtgagctgagaacacaccactgcactccagcctgggtgacagagtgagactcagtctcaaaaaaaaaaaaaaaaaaaagaaagaaagaaaaaagaaacttccaggccaagagctggttttttactttattttatgaaaatggctgaacctctcaatttgcctagggtgctagttctctgcccacacgtggcctcttctaaaaattccaaacttcggattccaacatgccaaaacatctgtgctttgtacttggagggagagcaaaataatgaagtttggggacttattaaagtctgaaagtaagttctttttataaacagcacaccaacagtgtagaaaaatgtttctaatctttaccggctccaagattctgtttttaccttttcttggttgggcaaatatagcttagcccttggcatgtcagaattggcagctggcaattttcagaactgaagaggagacgtggaagaaataccacagaaacactgcttcaagaagaccagaaaaaagaagactattgtatagagaagaaagctaatttcttttaacattaaggagggaaattatgcattagtttcttggtcttcaaaagtgttgaaattttaattcggattatttcttctggtctccggatgtttccttgcaatgactaaatgcttatttgggttatgacgtgtagtgtaatttcaatgcccacacactttcctgttgaatataaaaacagtctcatgaggcaccgactttagaaggtaaaccctatgcccaagtcttattgaatgcaatgtgtcatctgtccctatgcatatggaacaaaatggagcctgatctggctttcatgctggagtcttttgtcagtcagttactctttacaaaaccgttcatcagaattagtaaagacagtaaaatagtttctagaggctacattagcagaaaccctaagtgttattttat

SEQ ID NO: 122678 - DNA, 1037 bp, Homo sapiens
gtgggcaagacctcaaatgaaatttctgtagtatatctaaattacctttaaattattcattttaaggtgatttaatgcttttttttcccctgattggtcatattcatcaggtttagatgagaagtaagctctctgggccagggtactattactacattgtaattcctaagttaaaaagaaaaaaaatcaacatttaattgaccctggaaacctaaccaacctaaagaatatttaagtttatcccatctttggcaagtatttctaaaacctcggaatcagagcagaacctaacctttggaaagtcctctcttcactggccaacctgaaacctataatattgtttttaatggcttgtagttaacaccccgatggttatgaatgggagatttcataaaggtatgtttggggagatgcagtgaagtgccaagtgtctactaagaattacttatttattcaaacattattttattgttagtttcattggacatttatacctaacagttgctacatgaatctggaaattaataaaacaaaaccccaacacaaaagagcaatcagtttacatgtctttcttctaaaaatgattgaatgtctctgggtatataggaactattttatgagcagacaacgtgaatggtctatttccaaggccacccagtgtattctgcactttaatgtacatctgatttaagttgtctccacctgactaacatcttttaaaaaacgagtagtttagaattgcttctcagttatgagctggaaagtaaatattttcacttaaaggaattatagcatgtgaaaataaataagttttagaagtacaatcaattttgatgctttctgcaagcctgccatacaataaaggtcagtctttcagaatttttagaaagcacaaagccctttcatttgtgatgaaataaagagagaaaaatgtcaaccttctatacatatatatgttcctgaaaactctgcaataaatcttcccttttgtaaataaaaatcacaatttaagtatttccaaagagctttctatttga

SEQ ID NO: 122679 - DNA, 1019 bp, Homo sapiens
aaagtcttgattgcagtcaggaggctggattaaatggttcctggaatctcattccaggctgattgcatggttctcagacatttttggtgatgtgttttattctccctcagtatgaatattaacccctaccgtcaatagagctttgaaaagcttctctattgaaggtgggggataatcatactgggggagaataatggctattataaaagcttctcttctgccttcagaaaaagagttactcttttttcttcccagagccttgaaaaatgaatacaaagaaactttgcaacttcttctaagtgaacagtaaaccttgagtgttttgtctatggatttttaaaatcattggattgactaacattctcaaatgatgcaagtctctaccactaaagttttaattcaaacctaaaatgctgccattattttgggtaatgatatataattaagtctgccgactgtgttctcatgcttttctatcagtgattcatggctgctgtcacaaagcagcagcatatcggagcttattttgtcaaagcctttgtttgaaatactcagcaaacagggttttcttgatttatcagatcgtcaaggtggttcacgtgcttttgtgaaaacctgagtctctgccaggtccatttatattcactgcaacctttttttttttctagaaatgtttatgatgttaccataaaattgaataaaaagctaagtctagttttcagctaagcatgttgactactgtatattccataaagcaaggttgaaaaagaaaacgggttatgggatctaatatcttaccttttccaaagattatctgttggtatcctgttactgtcactcattagaggataaatacctggagtgacttgcttctgaggagctgctcttcccaacacttttacaactgaagattctaatagcatatgccagtttctcctcacataaactgttggaataatgaatgtctattttttgggtagtaagctaatgcagcagactagcagaagtcaagaacaaaa

SEQ ID NO: 122680 - DNA, 1025 bp, Homo sapiens
aaagctaggtgaaaataagaaagccagccactagcatgtacttaaaataaacacatgtctcatgcttttcatcagttagaaggattaaaagttgacaagaaggatcagtacagactgttactcagacacgtattcgtgttagagattggactgagattctctccccacgaaagctgactttatcatacctttttgtcttttatgggccagaaataggggctatatatattggcagttgcttttaatcagagtatcatgtcagtggtaggcctattaaattctgattagcaacagtgttttaataacattcttattttctgagtactgtcaaatgtggagagtttcgtactgatccgtaaatgcatcattctatgagttctaagccaaataaacaagccacttaaccattttttaatcccattattaactttaagcttatgtgttaaccaattttctaatatgccagtgggacaatcaaaatgtaagctcagtgagatcactgtgccagagacacactaggtgtttaataattgtttgatgaataaatgagatccctcgaaaatgtaatggagtggtaggaatgatgaagataaaattatatttgaaatgactcttagagatcatctaggttagccttatcattgtatagatgaggatttgaggcttggacaggtgagattatttatccataattatacagctcgccaagattggagataagaccctaacataagcttgtccaacccgaggctcacatgtggccaaggatgggtttgaatgcggcccagcacaaattcataaagtttcttaaagaaacatgagatatttttgcaattttgcttttaagctcatcagctatcattagtgttagtgtattttatgtgtggcccaagacaattcttcttccagtgtggcccaggaaaaccaaaagattggacacccctaccctaatagatttctgagctcccagatcagtcttccaccaatagaactagacttaatgcaagttgacatcatatttagtt

SEQ ID NO: 122681 - DNA, 1020 bp, Homo sapiens
agtaatatattttttaatgcataatatcttttggtaaaataagatattttactaaatctgtaaaaggggtggaccatgaaagaaaatggcctagcatgaaccttttactgcataaatttaattaaatgtggaatgtggtaataaagaggcttgggggaaattgcaaggagcttggcataaggggagaataaaagactctaagatattcctgcttgcggaaactttttaacattaaaaaaaaattttttttaagtagattattccttgcgttctctcccattgagctctgaagtttattctttccctagcatttcatcccgggcttttggaaccagatctcacttcctgaacaggctacgaaaacctcttctaatagggaagctttgaattacaatcatgggtgtttactgtttctttgattttctaaatttactttttcaaaggtttcatcttcaaaaccagaagaaaataaaattcgtcaggaagatttaacaaaaattataagtagtgctcagaaggttcagataaaacaggaaactattgagtccaggctttctgaattaaaaaggtaaagtgttatttccaaatataattttaatctgggaattgggtatgtgtctatgtgtgttgagtttggaggttgtctgatgttttattgtaagtactcagatcactttgttgaagccaagatcaaaggtcatttttctgcaagtattggttccctttactttgatttgtggccactgactttactctaatattgttttaattatgatagtcagaagaagatataaacctaagcgtatcaaaacagtttgatgtataagtcttagcaataaacagtaggtctttaagatgatgtaggaaatatgattctatttaggttagctcatatggtgctcatagacaatgagggcatacgacataaaaaccctgtatgttacccatcctttgtttaatggctgtctcttaagatttctttgtgtggactcttaggaaaaagtaggacacaaaaaaatc

SEQ ID NO: 122682 - DNA, 1715 bp, Homo sapiens
tagtttggattaaagaagatgacttgtggagaataacaaaagatggaaaattaaagcatttaataggtattcagcattctccgtgctgcgaacatttaacaacataatgcagtttcaattaaaaaaggtgaacgaagaagaagctattcatatttggcaagttattagtttattattggatatgctttttcagaataacattttagtggtttacatatgctgttgtttgagatagatcttaagatagttttagaatctgacagactttagtttgatttcaacacttaccaaattatttgtatgatcttgagcagttcccctcaattctctgtacctcagtgtcctcatctataaaatagagatgatgacttatttcttggtggtttttagagaaattttaaataagtaatacacataaaatgtctagcatagtgcttagagtatagtaagtgctgggtatatatcactaccctttatttcctaaggtgattaggaaggcctgaattcacttggtaaccacagttgaaagattagcttatttttttttaagcaaaaaataatgagccagattgtcaaaagtagtaaattgccaactactatattgatgtaggcatatgtcttaagtttctgtgtatctattgtcatgagtagcagatactacacttaggaaggaatgattctggtgctgggtgcggtggctcatgcctgtaatcgcagcactttgggaggccgaggtgggtggatcacctgaggtcaggagtttgagatcagcctggccaacatggcaaaaccccgtttctactaaaaatacaaaaaaaattagctggttgtggtggcacatgcctgtaatcccagctacttaggaagctgaggcacgagaattgcttgaaccctggaggtgaaggttgcaatgagccgagatcgtaccactgcacttcagcctgggcgacagagcaaagctacaccttttttttaaaaaaagaatgattcaggagttgtgtcaaggtagttgtcattcctatgtaattgaaccaaagttttcttggtctcataaatacatatagtaaaaacaagtgtagttcagttgtctggtattcttaattaaagatactatggtctggttttttgattgattttttttttgttttgttgcttaataaattataacatagtgagaatgagtccctttggaaggaggtgtcagaattacgagcaaagcatgcacaacagcaacaagttattcgaaaggtaagaagctcttttccccaggaccataatttgcatttgtttaatgagtactgtttgtgacccaaaaaggtctttattgagtgtctgtgattgatcttagtttcttacatattggatgcacagatagaagtaaaaaatgaaatgaaattaagccaagtgttacacatttttaataaaaaatttctcactagctaaagatggttattccatactcgcagataatgtctcagtagcttttagtaaatgatcttttgcctaatataacaattttgaaatactttatttttatgagcataatgaatacactaccaatttcttttaaaattagaaaacatagccttactggttttttttgttggtttttattataaaaggcatagttaaggtctcagaagataaatgacaaatattttcaaatcagttgaccaaattatgagttcagaaaatgatttctcaatgtatgctgt

SEQ ID NO: 122683 - DNA, 1085 bp, Homo sapiens
aaggctatgaattttcagttaaccagattttcaagaattcctactctagaataagatctcttaagattaagaaccggtaaggatgcagcagctgctagaaatatcttgcctagccaagttgtaatggtgatttttaaacataaaaacaaggatatctaatatttgattaaaaaaatttttttttccttagggttgagctgttggattatcttgacagtattgactgcagtttagaggacttccaggccatgctatcaggaagacaatttagcatagacccagatctcctggttgatgtaggtactttgggtaatctttgctatactggtagtttgtgtgtttatgtatattatttaaaaaccagtacgtcattttgttttgtattctacaggttgtttttgcatttcttttttaaattaataattttgtttatcagaaagaatgaaaaaataggtttgggacattgaaggagtatgattaccacctgccttggagtagcaattgaactaatttccctgtgagaacatatcagatcttttcagcagtactgttaagttcatgtcttgtctggacttgttgctcttttctgttttgctctagaatgaattgtcagtaaatagaaatttgtggaaattagtaatagaggtacttagctaggaaatagcatggagacaccttttgatactttggggattaacattttttactcaaatatgttttaatatatttgccttattttttacatttttatattttgagttacaaggttcccctgctccagtccccaccaccatccctatgaagttgacttcaatattgactggactgagaattcttatctaccgtttctgccactaaccacctttcttactctattctctcttgttcctgctattcctcccttctttatctaaagcttcctacgtggtctggtcgcgcttagatgaatcttgttctgtctcctatttccattttctgttgtgaacagttttctctctttatcctggaaaattttgttgtctttttttctgtgtttctttccttacattgcagcttctcttacccttttacaagcctctcaggct

SEQ ID NO: 122684 - DNA, 3656 bp, Homo sapiens
atagaggagcttacagtgctggtcctcctcagatgccactctctgtagggacaaaatttgggttaggcttcttaggcagtgataagctaaactggcagagattgattattatgagtcactatctactctcaaggatctgagctttcttccttttctgaggttagtagttggtaagaaaggagaaggaaataaaaaggcaaagccagggaattttataggactaccatgaatatggaactttaaagagaggaatcagtgtctagagagaatggaggaagaatctgcctgtggcttttttgcacctcattctatcctgtgaaccatttggtgtgttcattctcataaaaggctaactcagtgagtgcatttcatcattcaggccattcccaaggctcttattgctgacaggatgtggcctctacttttcgaacctatgtatataacttattcaacttagaacttctgtgttatttctatttctggaacatatcctaccttctttgttgatgccgctagtattatacccgtgtgttcttcccctagtcttctcctttccaagttctaacctaatattctccaggtactgatatatatcacatagttttatcagcccttttatttcattatgtatgtttctgtgtgcgctttcctcccttcccattgtcttaactccttagtgcttttgagcgccaccatcttctgttaaaatactggattatatctgaacgtgtgttgctatttgatgttggtcttaccttgtcctttagattgtaagctcctagagagcaggaatgatgtctttatgatgtcagttatttgttaaagatactcagtaaatttctatggaatgaatgactttaaagcttatgacttatagttacatctgtgaactggctggactgaggagtgcagtaagcagtgatcttagcacttaaaattttccttgcgaggtgtggtgaaaagaaccaacaagtagatatgccatctgtcagagggcttcacttgaggcatagtttaggagccactgtcatagagcagattctgtaaattttttacctaaccaggtattcagtgaaggctcagtgtcagggcagaggtctcaaccctgcacaccacttaaggccaaagacatttagagaaaaaaaataaaggaaatgaaattgaatgataaataatgaagaagggaggaggtgaaaaccactatttgtctcaagtgatttaccccaatgttttttagagaaattcttaccacatgaaattttatctaatgcatgggctagcttgttctgcttttgtttgtttttctttctgcttttctctttcaaacttgtttaactgtatagaagcttcctagtgcaggggctacatctcttcacccaacatggctgtataaaattttgaacacacaattatttttaattattttttaaacttatcatctttcttgtttggtctttcagcttttcactagttctgtgcagatgaatcccacagattacatcaataatacaaaagtaagttttaattcatgttgctcaggacccatagctataaaaatctacaaaaacgtcctaataagtagagagcaatgtcactcccagccacaaaaagcattttatattcttacccagtatgtgtgatcaagataataaaattctagttgaaaaattagcttttggttatgtggtgaactattacccacttttggcacttgtgggattaactaccagtatgaaattaacttcttttggtgctgggagatcacctgactaaacttggtatattgaaaccaataactaaaatatgatttcttcatgttttatgggcagcattttacattcttatttttcctattctcaacttttttattaaaaagttatagtacccatattttttgtgagttctatcattagcataaagtaaaaattcaggaattcttatttattgcagaaaagggaagttgaaacgtatgaatatttgactttttttaagtaataaggattttttttttgacatataggaactgcacttgggcttagcaagtgttgacaagagattttgcggaacttgtttttaatgagtagtaaggacaatttgaagttattagagcaggtgttttatatcattgtattttatataacttaattgtcatgaataggtatacactccctttatcttttatttgtaccaaattgtttagtaagccttgttaaaggtaaatcaagtccagattccagattagtgaagccagaattttattttgattctttttctttatagtccaaaaatgagcacatctcaaataaatataagtgattagggtgaggggtggaatttatacgattattgtcatgtgtaagcctgaccagactgtctatatcttcaaagttacattgtggataacttagagcttaaaaaatttgtgaatttgtgaaataggaagttgattatacattcagtattcagataatttatattggaggttggcatactttctccataaaggggcagctagtaaatacttttggtttttcaggccatatgttctctgtcataactatgcagttctgcaattgtaatgtgaaagcagatacagacaatatgtaaaagaatgtgtggttgtgttgcaaaaaaacttcatttacagacaggcagcatgctgaatttggcatatggaccataagtttacctggatttatattacaagattttatataacatgctctgtgtttcagtaaatatattactgaatgttattctcatggaccatttaagttgaatggacccatatcatttgttcatgtagtgaatgtgctttgttgtttatttgcgactggacattgagtccttatttgtggatcatcatcttattcctgaaaccaagaccttgattatagttttcaaaaactataagcagttaagcaacaaattgcattttgctctacaatgctgtagaaaaattacatttgagagtgacttttcattatagttctgaatctagattttaatgttttcaaataattggcacatcagctgtccttcccttgctcatgacaggtattacataacatggattacaacactttcctaataaatcagatgccttatacttctcagtacagcaatcttaattggccactatgaatgaataagaatttgcatgggaaatgaaatctcattcagtatgatactggctatgggtttgtcataaatagctcttactgttgtgagatatgttccatcaatacctagtttattgggtgtttttagcatgaaagagtgttgaattttattaaaggcttttctgcatctgttgagataatcatgtggtttttgtcattggttctgtttatgtgatggattacgtttattgatatgtgtatgttgaaccagccttacatcccagggatgaagccgacttgatggtgatggataagctttatgatgtgctgctggattcagtttgccagtattttattgaggattttcgcattgatgtttatcagggatattggcctgaaattttctttttttgttgtgtctctgccaggttttggtatcaggatgacgctggcctcataaaatgagttagggaggagtccctctttttctgttgtttggaatagtttcagaaggaatggtaccgctcctctttg

SEQ ID NO: 122685 - DNA, 1030 bp, Homo sapiens
gtaagcttgttcgcctggagccattgactgaagctgaagctagtgaagctacactgttttatttatgtgaacttgctcctgcacctctggatagtgatatgccacttttagatagctaaatccccaggaagtggactttacatgtatatattcatcaaaatgatgaactatttattttaaagtatcatttggtactttttttgtaaattgctttgttttgtttaatcagatactgtggaataaaagcaccttttgcttttctcactaaccacacactcttgcagagctttcaggtgttactcagctgcatagttacgcagatgtaatgcacattattggcgtatctttaagttggattcaaatggccatttttctccaattttggtaaattggatatcttttttttacaaatacgaccattaacctcagttaaatttttgtttgttttcctgtttgatgctgtctatttgcattgagtgtaagtcatttgaactaatggtataactcctaaagctttctctgctccagttatttttattaaatatttttcacttggcttatttttaaaactgggaacataaagtgcctgtatcttgtaaaacttcatttgtttcttttggttcagagaagttcatttatgttcaaagacgtttattcatgttcaacaggaaagacaaagtgtacgtgaatgctcgctgtctgatagggttccagctccatatatatagaaagatcgggggtgggatgggatggagtgagccccatccagttagttggactagttttaaataaaggttttccggtttgtgtttttttgaaccatactgtttagtaaaataaatacaatgaatgttgagtactagtgtctgttatgtgtcttctttagaggtgacactcacatgaaacaattttttcttctcataggaagcagtagctttaaactgtctgtggttcattattctcaatatgaatcataccaagatatttgtgcctcatctcgaaaatatattgtatattgcaacaagggaga

SEQ ID NO: 122686 - DNA, 1015 bp, Homo sapiens
aaatgaagacactgaaatacagacttaaatagctcagatagctaattaggaaatttcaagttggccaataatagcattctctctgacatttaaaaataatttctattcaaaatacatgcataattgattttacacctcattactggtggataatttatgtgatgtggattgctggtgtccagcatgacccataaacaggtcagaagaatgatggaatgttttagaataaactcctgcttatagtatactacacagttcaaaagatgtttaaaatgcttttgtatttactgccatgtaattgaaatatatagattattgtaacctttcaacctgaaaatcaagcagtatgagagtttagttatttgtatgtgtcactagtgtctaatgaagcttttaaaatctacaatttcttctttaaaaatatttattaatgtgaatggaatataacaattcagcttaattccccaaccttattctgtgtgtagacattgtattccacaattttgaatggctgtgttttacctctaaataaatgaattcagagaaagtgtgtagtgtactgattatttagcagcttaactttaggtggccataataacatttagacctttcttcctatgtgaaaaaggacctggcactagaaagtaactgcctgttttctgtaatgataattaaattgcttaggagattgttaccctttggttgtctgtaagtgaccccagaagtaggatctcaaaggtaaagaggcattcttcccctaaagagtcttcagtatatggatcagtttagtttggagaatattaatatattttcagtggatattctacatctactatgtcttccagctattttttctggttgccagttttgatgcttgtcttcttccacagatacttcagatagtataaaaatttcccttactaaaaaagaatgtacttttactgataaaatactccaactcatgttagttaccaagctttagtatattttattccataattcttgtgaagtggtc

SEQ ID NO: 122687 - DNA, 1607 bp, Homo sapiens
tttttaaggagatatctctgagtcataccagtctcttaattctgagaagggaggggcgggggagggggttgggggagtggaaatcaggtgaggagttccatatacatcttgaacaatcttatgtaatagtgacatctcatttatccagaggtcacattcagttcctcttctgtctaataacatggcagacatgcataaagtgcttcagagattatgcaaaataactatttcagaggcctgtatactttactccattaaaggaaataacagatttttaccttcacactagcagtgtggaaagaaagggagcagattagatgcagcaatgatatatctgaaatcacaaactgtatacaaagcacgcttctgaattaatgaagcttcatagcttggtggctgataattcaacccccttgcccctttttaataattttccctgaaattttaggtatgaaccctctcgtgagatgaaaagtcagtggacagctgtctgggtgaaaatctcttccagttggattggcatcgtgctgtatgtttggacactcgtggcaccacttgttcttacaaatcgtgattttgactgagtgagacttctagcatgaaagtcccactttgattattgcttatttgaaaacagtattcccaacttttgtaaagttgtgtatgtttttgcttcccatgtaacttctccagtgttctggcatgaattagattttactgcttgtcattttgttattttcttaccaagtgcattgatatgtgaagtagaatgaattgcagaggaaagttttatgaatatggtgatgagttagtaaaagtggccattattgggcttattctctgctctatagttgtgaaatgaagagtaaaaacaaatttgtttgactattttaaaattatattagaccttaagctgttttagcaagcattaaagcaaatgtatggctgccttttgaaatatttgatgtgttgcctggcaggatactgcaaagaacatggtttattttaaaatttataaacaagtcacttaaatgccagttgtctgaaaaatcttataaggttttacccttgatacggaatttacacaggtagggagtgtttagtggacaatagtgtaggttatggatggaggtgtcggtactaaattgaataacgagtaaataatcttacttgggtagagatggcctttgccaacaaagtgaactgttttggttgttttaaactcatgaagtatgggttcagtggaaatgtttggaactctgaaggatttagacaaggttttgaaaaggataatcatgggttagaaggaagtgtttgaaagtcactttgaaagttagttttgggccagcacggtagctcacccttgtaatcccagcactttgggaggctgaggtgggtagattacttgagcccaggaattcaagaccagcctgggcaacatggtgaaaccctgtttctataaaaaataatctgggctttgtagcatatgcctgtggtcccagctactgaggaggctgaggtgggaggattgcttgagcccaggaggcagaggttgcagtgagccaaggtcacgtcactgcactctagcctgggcaacagagtaagac

SEQ ID NO: 122688 - DNA, 1052 bp, Homo sapiens
gcaagttttcttcaattatttttgttatactgatgccttttccagcaattgtttctcaatttgcaggggtatagagagttaaaaataacttttgtttgctctgaaaaacatctttttaatatattctaacattttaatttggctttatattacagaaacaaattgcaacccaagtctactaagcataattggctacaatacaacaagcactgtcccaaaggaagggcagtcagtccagtggtggcatgctcaaggaattataggactaattctctttttgttgtgtgtattttattccaggtaggaaaaactatggaatttttttctttaaacaagaagtctagctgtttatttatgaatcatttcttttaaaaatgttcttttttttctctcctcctaaactctctttcatacagcatccgtacttcaaacaatagtcaggttaataaactgactctaacaagtgatgaatctacattaatagaagatggtggagctagaagtgatggatcactggaggatggggacgatgttcaccgagctgtagataatgaaagggatggtgtcacttacagttattccttctttcacttcatgcttttcctggcttcactttatatcatgatgacccttaccaactggtacaggtatttatatttcatgaaaactctggatgtgtgaattctgatggcattttatgattctcttgtgaaaccatgatgtgatatgaagtactttttatcctctgatatatttcaaaatgtacagctaaatgaatagtgagatcagcatgagaaatgcagtctttacttccttgctttaacagtaacacaaacattgaaatagttccaaatcttggagagattaaaataaaaattttcatgaaactaatactttttacaaaaatccatgttgatagtggatctaacattttttttttcaattctgtaaagatagtgaagtaaaggatacatccttttttctcttttgtttgaactgtcattaaaagctctgaaaatttttaaatttaagtatgaattcattaatgtaga

SEQ ID NO: 122689 - DNA, 1338 bp, Homo sapiens
aatgacttacccttgcataatatgtatcttttaagattttagttcatgaggaaaagcatcattgttgtgagggcttaacattaataatgaaaataattttcttaatgcccttgtttacaactgagtgataatggttctttaaaaaccttaagtaatattcctcttatagttatttttctttattttgaaaataatggctaacatgtaaacatagtttgtaaactctaatatagatattagtattaaatcctattagtttcttactaacttgccatccttgcaaatacataatagctatgtgtaaaaactagaattcttcagcaataaaggtcagaattaattttctttcctgcttttatagcctttataatgctgacaatgttagttgcttaaaatatattttttgacaaaatgacagattgtttataaaacaggtcccatttctaattgctaataatttctgataaaaagctaattatccaattatatttctttcacagccttgttatcagctacagctctgaattatctgctgtctttagttgctatcgtcctgttctttgtctactacactcatccagccagttgttcagaaaacaaggcgttcatcagtgtcaacatgctcctctgcgttggtgcttctgtaatgtctatactgccaaaaatccaagtatgccctttaaagcattagtttttatgaagcttatacctttttaagttttcaaaaatctagaatgatgtcagactatttacctgtgttgctatatatatatatatatatttttttttttttttttttgtaggaatcacaaccaagatctggtttgttacagtcttcagtaattacagtctacacaatgtatttgacatggtcagctatgaccaatgaaccaggtgtgttttatttatattacatgttcctaaaggttctgcagttgttgtttttccagaaattgtctttttgtgagattaaattacttaaaaattaggcttctagaggaataaagtacaaagttttgatctttgatgtattatttatttcacttagtttcttccatcactaacaaaattataagaaggttacatgtatacctaagagaaactgtgagttcagtttcagagcaccacaatgaaacaagcatcacagtaaagcatgattttttggtttcccagtgcatataaaacttttgtttatcttacactagtctgttgtgtgccatagcattatgtctagaaaaacaatgtacattccttaatttgaaagtactttatttccaaaaaatgctaacagtcatctgagccttcatcaagttgtaatctttttgctggtaggaggtc

SEQ ID NO: 122690 - DNA, 1184 bp, Homo sapiens
gaagtagaacattcacataaagtgtagctatttgttaagatgcagttaaatgatttcatatatgaaattatttgatgaatgtctattaataaaaaattatatttctttttgttttagattttggttctttaaatttgctgcagcaattgcaattattattggggcattcttcattccagaaggaacttttacaactggtaagaaatcctttttaagttgtttgacattgatattttataaaggaatctgaaataattgtcacctggaactataattgtttgtctttttgtttgggggtgtgtgtgtgtgtgtttccccagttggcaaaatcaagatgttcatataaaattttattttcctttttgtgtactgtgattttgaaaggaaatgataaaaatcaaactaaccaatcacttatgtatgctttctttccctttcagtgtggttttatgtaggcatggcaggtgccttttgtttcatcctcatacaactagtcttacttattgattttgcacattcatggaatgaatcgtgggttgaaaaaatggaagaagggaactcgagatgttggtatgcaggtaagctttcgtcgcagaacaacttcagtatagttgaactttgaagtcgagaatagatatgtagactaggtaaatcacttaggatttttatggtctactttcctatgatgaggtttttaatttaaactttgtgagtgtcaaaatatcacattgtatcagcaacttggtgagcagatcttttagcagattaactgggaacataacccaagaaccaggaaagaatccaaaagaacctgaatagctaaaataaatgttccaaagcatattactgaaagcatgtgcactttatagcctaattttctagcctacaatgggttaaaagcaaaatattaaagggaagaggattgctaggaatagataaacacacagtgatacaattcataaacagcagcaaataaaaaatataaaaagcaactcggatgttttattcaagtgcaaaggatgcttttatgtgcatcaataacaactaaaggaattcctatagtaatgtaattaatgattatttataatgatgatgttgagtcctttggggttatacttgaaaacagatatcccaattcaaatgcttacagggccaaaccaggtaacaaaaatgagggaacagga

SEQ ID NO: 122691 - DNA, 1607 bp, Homo sapiens
ataagggcattaatcccatcctgagggctctaccctcatgatttaattaccacataaaggccctatctcccactatcctcccattgagggttagagtttcagcatttaattttgggtagacacaaacacgaagtccataataatatacagcagtaagtagaaaacatgaaggaatttaaaagagaaatcagagctagagactgccttgaggatagaaattgaatgttgaaaccatggcagcgtatgctgaagatcattcagagtgagcagagctagaactctgccaaaatctcttacttaagggagttagtggagaaaggaaaacctgattctgatcctagaaaactgggagggaagggataacagaaaagaacaaagaaaatgtataggttctaggaagaaagttttaagaatgacagggatagtgtctatataaaaatgagattaaggaatgtgattaagcagtagcctttgggtttggaaaccagtacatgactagtatcctggaaaagcagtttttttagagtgctgggactggaaagagtgggaggaaataatttattcttatatatatgaataatagatgtattaatagttctgaacagtagtctcagaaatagcacttacactactaaaacaagtctatcgtgctattcaagtagaatgcaagtttttaaaatgtaggataaatctataactcaaaataagcaaccagcatagagttggtattgtagtttatgatttgcgcagatggggatttaactcttttttccccactgtatgtgattaaaatgtatcagactcatcttgagtacatattcatcataaattgtaaagcaaatgccagttttctaaacctttacttaaactatttgattacatgtaatttttatttttacttaatgaaaaaaaatgatggatcataaactcttttgtttttctagattcctggattttgtgagaatgagaaaggtgttgtcccttgtaacattttggttggctataaagctgtatatcgtttgtgctttggtttggctatgttctatcttcttctctctttactaatgatcaaagtgaagagtagcagtgatcctagagctgcagtgcacaatgggtaagtttttaaataagcttcaatataaaagcttgggtagcctcttcttgataattgccagtttatccaaggaaactttaaggtaaaataaacttatacaatttgcagaattactttattcatgaatgacaggataagaaaatcttgtttttactggagaatgtcagactttggatattaaataatagctgtgataacctctgatccacagtgttttatattttcatactaaaaaagaggctctattatatttgtgactactaagggaatagctatttctccttctactgttaactttaggtggaccagtccacttacatagaactctcagttccctagacccagagagcagatttttctaggttggttgtattggacaacccagaaagaaacttcagggtttcttttatcaatcttccttcatatagagcactacttctggtacccttatttgactgttttaatatctgctgttgcttatctagttatatgt

SEQ ID NO: 122692 - DNA, 2529 bp, Homo sapiens
gctgatttttctccagtattaattgccttctgatatctttacccaatgcctcatggattacaaagtttttcacctctgggtggtaaaattctcagaccctccctgcagtgaacattctccctaggcagaaataagggccacttggctgggcgcggtgggccacacctgtaatcccagcactttgggaggccgaggtaggcggatcacctgaggtcaggagaccagcctggccaacatggtgaaaccctgtctactaaaactacaaaaaaatacaaaaattagccgggtgtggtggtgcacgcctgcaatcccagctactcaggaggctgaggcaggaaaatcccttgaacccggagtgggtgggggaaggttgcagtgagctgagatcgcaccactgcactccagcctgggtgacagaaggagactgtgtaaatcaatcaattaatcaataaaataagggccagtcatagggctcacattgtctcctcttagaaattgctggctttacattgcctgttgttcattgtctgaaaaacttattttttccattgtttaagtcaggaggataagtctggtcatggtttctccatcttgacctgaatttatagtaattatcccaagccttttttcatcagtaattttatgtttacctatgtctgttttgtttcttgatagttactagttaagtccgttttttcccttctcatttctttagccctttgatttccactttccattgtgttctgttcttacttcatttttgaggtctccttttttaacaaaaaatattttttatttttctgtagctcaaatgaaatactggtaggggatttccttttcttactggattatatttatttcagactgaattcttcatatgccttatattttcttcattcctttttctgaggggagatgtttatgtttaacttttgctaaagtatatttacatagttgccatgacatgtatttccgttttgtggacgtttaatataaagcagctttattcttaccttatattggttggtgtagtggtctggcttctacaacattcccttactgtgatatctaagactcttttcccctagagctgtaattctagggctggaagatctggttcatccaccttctagaagtctgacatctcagcccaggttatgatattatgagaatatttactctgtggctttcttagatactgttaaatactctgtaccagtgttcctctctcctagacaggaagatattctgttcccttgggggcatactgctagtttagtgtggtggttactggagaaaagctagccccagttgtattattatcctttttgcctcactctagttgtagttttcattattatcactatcgccaggtcaaaagaaggaaaatatatcaattcacttttttttccctccctggatgtatttgagaatcctcggaattttttgtattcatcagtctagtatctgggggctaaaggtcaggggctggaggtgggcttagcagctgtgctactcatgaatattccatttcttttcctctttaaactttggttactgctgatgattttttcccctttttgttttagctgatttgtccgttttacttggcatagagtccaaggattttttttgtctttactccttcttagaagttgctaagttttgtggtatatagataatttatatgaaccaaataccgtatgtcccttgatgtaattacttttagtcttttttcttttttaacagatagaatgtcaattttcattgtatcattttaagatatagtgatttactgattcttaataatattttcaataatattctttttcccagataccatgtttgtgtggaagtgccccgtgtttgctatgccgatgctgtcctagtggaaacaactccactgtaactagattgatctatgcacttttcttgcttgttggagtatgtgtagcttgtgtaatgttgataccaggaatggaagaacaactgaataaggttagtctcgtttcttatttattgattaactgaggctatagggtatatatgtatatgtataaaattgattcggggatattgtaaacagaataatatagaataagacagtatgtaatcctagttgtagttcataatcttttaggaaaaagataatatacattagtttgttaagttctatgatggtggtacaggaaatgtactgtggtaatacacagaaagaagtataattctaaccaggtgtcagaatctcaatgggtcatggaaaaaaggatgttctaagaatgattagaacttgcatatacagagattgaaaaatagaaagcataatgagtataaaagagcttttcaagcaaagtatctatactttaggaagattaatcttacaattaataaagtataaaagtcaagcagttaaatatggaggctgttgcagtggtataatcaagaagagaatagcggacctgaaataagattttctggatgtaaaattgactgagcctagcactgaaatattggcagtgatatggaatc

SEQ ID NO: 122693 - DNA, 2059 bp, Homo sapiens
ttccgggcagcgggctgcaggaatacgttgcaaacgcaagagcaaaacaggatgcaaacgtgggaaaaatgggaaataagtggagttaggacggacaaagactgagaaagaggaagcaatcccctaaaaagcagagaggttcctcagatgaaggagggcaaaacgtcaaccaccacctcagctctgttctctactaatgcccaaatgcaagtgcatggtaggtaaaggtgggttttgctcacaccgttttcttaatttggcaaactacggtcagatccacattagccgttaagtttccagccagcagtccttgagaaattctccaggaaagaagacagccgtgtcgtctagtgacgcgcatgcgcagtctcagcgctgcgcgctccgtgttttatcctacccaggcctggaaggaagtgacgcgaggctgaggggcgggttgcgctgtgcgtccggaagtgtctcgcagatagtaaataatctcggaaaggcgagaaagaagctgtctccatcttgtctgtatccgctgctcttgtgacgttgtggagatggggagcgtcctggggctgtgctccatggcgagctgggtaaggtgctttttgcggcctctggggtgctagtgtgagagaccaaagagaaggcgatccgagccggggctgggtgagcccggcgggaatgtggtgccccacccaacagggagtgccctctctgtccccgttttcttcccgtctcctctcgtcactcagactcagcttcagagctttgggtcttgcgaagaactgatcactggccgtaaggtttagtggcgatgggaagatgactcaaattgaggaagagaactagaatagggcccctcccccacccctgcttcgtgaacgctgtctcccattctttgaggtcccttttcgtggttttgtttgtatctgcgcaggccatctctacaaaggtctttgcccctttccttcggtggggtacccactctgttgtcatctctttcctggcgacctcagactgccgcactgtcgttcctggattcatgtcgccctctttgttcagtggcgcagattatgattaaaaagtgcctgtcgtcatttggaaccgcctggcagtaatgctaatgtagtaatattgtttttgaaacaaatagtcatagctctgccgtaactgtttgaagtgtcaatttcagatttcaacttaaaattgaaatttcagatgacacacgcatgccttgtgcctaatgacaattttgtctttaggcacaaaacatgcgtgtgtcatctgaaatttcatgcttaattagctgtacattgcattttcattaaagagttgttagagtaaaactattttcagtatagtggcaagactttggtccgtgtggcacaaatttcagtttatttaagataatctctgccccctccaaaatagtaggcaaaacattggcagtgcagttaataaagatatttgtaattttaggcgaggtatttggactcaaatcacttttctttagtctggaatttgttaattctgtttctaacaattgcttttctgacttcccaaatgattccgttatatatactcttaaaggttttgatatgtcttgaactaaaaatgttgaattttaatcaaataataatgtggggattgttactccagccagtctgttcttttgattatatggtatttcttcttgcacggaagcctggaatattttatctcaagatattagagagtttaattattgacttttatacaaaagaggcatatttagtgtgataaacagttttgaaaactgataattgattatcatataagattgttttcatcggttttttattggaagatgttatgcaattcaatttgtaatgtcgtatcttgtccagttatgaagtgggcgtgctgtagttttttgtatataatagagatttaaaagatgagatacatgttttcccttttacaaaatagatcgccacctttattgattagaagaatgtccgtgataaaattgaccctgccttttagtttctgtgttaatagcgaagtacattaaaaaggtagaagc

SEQ ID NO: 122694 - DNA, 1048 bp, Homo sapiens
aagaagtcatactgataaagtttagagaaacgtgagttcacaaaaatatttgaaaagcacttggaaaaacaagctaccgctggcaaaatttagcagaacaacaaaatgaagaatcagattcacaaagtggcatatatttgaatgtttaaagacaatacaaaataagggtttaaaatatttatcagaatataagaggatagcttcagggccttgaccagtctcctttccatagataccaagataggaaatattgctttagagagtagtgggtttttttgtttttgtttttgtttctcaagtccttttattattcatttttaacaacagcccagggatagggaaccaggggaagtggaaaggggagaagggagcccctacaacccctcccaactcaccccttcccctattatgtatttataatctatatgtaagccccaggggtgagaggaaaagggaactccctcactggagtggggtaacccatagagtgaagttatatttaggctttgagtgacattcattctatgcttctgtgcctgaggtctttgcaagagtaaatggtacagtttgggtgtgattttttctctcttggtgtgcttatagcgataaactaacagtaaaactattttacttttacagctggtattagtgtagtttcttataaattcatattttttgggggaagaaagagtaacgcacttaagtggacattaactcataaaatattcaaccctattacacaatactaaataattttccattttctgaactataatttcatgataaaactctggatttgaaccgtttattccaggtataaataaacaataaaatacaaaaatgtgttttaaaattatctttcttctgtttctgacttcttcaagctcaataaatattaaacattaagagttgtcacttgcaaagaatgaaacattttaaatgaccagcttaattttaaaaaatactttataatttataaaacagaagctcattttcattagaaaaattttattagttcagattcacacaagtttaagtataaataaga

SEQ ID NO: 122695 - DNA, 1041 bp, Homo sapiens
ttttctactttggaaaatctgcttaattgtttttctttttgtattgtacaagcaacatgatgtatggtgcttaggcatccccttcttctattttctctgggatcctcccccttgctgctgacactgcttcttttgtggcatacacatttaggggaggcctccatgacaacatggcaagaggttttattttttgttttattttacataatttattataattggaaggttctcggaatgaccctggaaagatgctgatggtatctattcttccagtttacttctacaaattgaaataacactttagggacaaaatgttatatatatacatacatatacaagtgtgtgttatattttcattccataacaatggatatgcatatatccatttgaacatccctactccaaaaattcaaaatcccaaattctccaaaatccagaactttttggttactgacatgatgccacaagtggaaatttttttttttaattttgacaaatcttatttaattcagatagcagtctgatcacacatggtccaacaacattcaaataataaatcaaatataatcagatgttaaatactggtcttcaaacatcatagccaatgatgccacgcttgcctatgatctctccgacataaaaccacataacacctcagtggccaccaaaccattcagcacagcttccttaactgtgagttgtttgaagctaccagtctgagcactattgactatttttttcagactctgaatagctctagggatctcagcaggggtgggaggaaccagctcaaacttggcgtagtaccaaaatgtggccaatcaaggctttgagtaagtcacagcagcgttcaccagcaccagggtcttttccacaaggttacggaaaaattgggccaatggttctgggatggaaagtctgtcgccctgaatgccacaagtggaaaattctacacttgacctcatgtgatggctcacagtcaaaaggcagtcaaaactttgtttcatgtaattaaaacataaggaaattttgtgtttagag

SEQ ID NO: 122696 - DNA, 1049 bp, Homo sapiens
tcccttcagtgaaaggaagagttgcatcctctgtcgctgagcatgcctgctgacactgaaaatgtacactgactggtgtatgtgtcctacacctgccactaatctaaagaatctgtctcctgtctcatgtgatttttcatcttttggaaggaagtggaaaatattcagatgtgtcagttggtggactttttgagctcatgtgctacttaatagagaagaaataatattctttttatctacattattatagaaaaatgcaggcaatgacacttctctgtcctccttcagaactgttttctcagactgaaagatataagaaattataaaaggctcttgtgcaaggtagtttcaattaagttcaaagttaaatatatttcatgggacttaaaatgctaccagagctatgaatcataagaagctgcttgttaaaacattggtgtatttttagttctgtgaatggtgactttcaatgcatctggttagtttaaatcatctctggagccatcgtacaagacatttacagttaccaagagggcttatggatcatagagatttccagataggcttccgagtcttggtatcttagaatgtaaattaatatttttaattattttttctctcattttattgtgatttttttccctgtaattctaggttgacaatcactccaatttttttaggcaaatagaaagacaaactactacctgaagattcataatgctaagaaactcatacagagttagccattcagagggaatggagttttgttacttactttggccagttatagagatgttattccactttttatcaggtagctgaaaattttaaagaattacaactttttattcattgaccacaatttttgtttaaaaatgttttcttttcatcctaaaagtacattgtaggatcatgcaaatcaatgactgtgtataacagaactgaaaaattttattcaaggaaaaaactaatattctgtatgtcagattggaactttgttaattgagctatagtgaaatggaacctggaaattttatatttatataaat

SEQ ID NO: 122697 - DNA, 1067 bp, Homo sapiens
cctggcactgaattttcagaaacgtttcgtcagtcctagggagccaaaaagggattaactttgttaaatttatggagcacagatattttattgctataatgagaatgtctggttttaatcgacccatttgtaaaggggcttttcttctgaaaagtgtctttcaatgtttaataaaattcccaagagcccaatatgtgctcttaggcactgcaaagcctggaaggtaatagttccacaacctttggtaaaactgaagccagttatctagtggaaaatgtttctcttagttgctcttctgtctttatacacgttagctgtcctgtacctgctagggctatgggtattttgcattgccaaacagaaagctgtaagttaattgactgttgaagaagctgctgccatactgtcaaaagcattctattacctcctcaaattaatcataggaacaacacatttatatggatccctccgtaatcctgcagaggtttccctgcaaccagcaatagcctgagtaatctttaggttgtataggaaagcagaatgctatctgtagctgactccagcagtgccccaccatagttcttggactgtgccctttcagtccatgcttgcgtttttgtaatcacttgggacagtctgttttctagccattggaggtgcttggctgaacaataaggttccagccctaagagctaccctcacgcaataatggatgggaattggaggataaataccccagcttcttcaatcctcatatgggaaaccgtcagacatgttctagtctacaccattaaggtccccaccgagattgagccctaggtgtccacagtagtaactggctcattcatgcgctctgaattggcttccttcccttccatgcctcatctccctgctttcataccactgcttcctgggatcacctctgaaataaaccactcaaatccttgtgtcagagcctgcctcttgagaatcccaacctaaggcagtctccaggggcttttatacctcatctgacgtcattggcacagtgttctcagaagtgtgaactacaaacaatgttgagactt

SEQ ID NO: 122698 - DNA, 1044 bp, Homo sapiens
cttagaacttagcactctataaatgatattttttgacattatgaagagttttgaaatctagcaaaagagtttaaattttatgtgataagtaacgtacagccaggataaattccttattatatgttcaaagcagcatttaaggaaaagtaagtagaaaacagaggaccaattcaaatggaggaggctggggtgaggaagaccacctactaagctgtagtattcggaaatatcaggttttaagttaatgagaggctaggataatagctacaacaaatataatgattaataaaaccgaaacctgtattttctttacaaaacacttttgacataacagtacgtcctggatacaacagtatctctaatttggagacaaagaattggaaacttagtgctggcttctatcattgtggtaagagtgaaaataatggatacaaatcagatacctgaggatctttagagaagtaattgttgagatgtgttgacagatgggatagtttgacagagtggttgagagggtgctaggtcagttctcagagagggaggagtaaggaagtgacattactgttgggaggtaattgagttgggagagggaaaccagttaagtgagagtgataggaacttgttttgaattcttttgtacttgatgtgaccgtagcaaaggtgatggaaatgtacctagacagttgtagaatgtgtgtagaggtcaagcttatcaactcagtcttgggccttatcaacaagtgggaagcaagaagagggctgggactgtgtattcagaaatgccactcaggggatttgaagagaagaagaattattgaagagaaaagaagtaatttgagtagttggagaaggatcaggtagtgcatcatcaagagactcaagaagaggaaggagcaaaccagaagggtgaaacactgaagagaaattcaaggaagaggaggaagactgggaaagcatttggatttgaaattcagggagtttttgatagggtagtttcattagcattggaaaaatcaatgtgaaggacttaagaagaaataagta

SEQ ID NO: 122699 - DNA, 1017 bp, Homo sapiens
gggatcaaaaagcagaaaatagtacaataagactacatttcattatcctgggatttgtatgtattagaaagaacactttcattaattacacttgatatttttatagtttatatactatttatatatgtttcctgtagggatgttagaaaacttttcaaagtgtagtctagataggattttacagctttctgtaaaaggaaaacaaattgtttctttgaggccatcaaaattattacttttctttctatttcacaattgcttaaggttgcaaaccagtaggacttctttcctctgtgttttttaaatgcaatgtagatctgatacaaatgtccaaactcaggtacttttgaactatagcacaactgttattctatacctgcactaagcaaattgcctagtctagaaagtgtgaatagggcggtatatgtacacaaatagaagaagaaaaagaagcttaaacatcttcttttttcttttgcaccgtatctttgggaactttaacatagctctctcattggaaccaatttgtaggtatgattaactgctaacaagtacttgagatattcttaattcaattatcttggatgaggtccaaagtaaactggcctaacatctataatcagtgttacaatcgtgagatgtcagagtatagtatatgtgttttcaaggcatagtaattaaatatggagacataaggctgaaaggagtgacttgctttataacactatatattacagtccctttgaaaagtaagcagaccactgcccttatcactgcagggacaaattcagttgtgatggtaatttacacctcataactttcttttatgacatccatccatcatcaacaggaagtctgtacacagtctaaggaagtttcccagatatgacattctgggtagggctcccagtctcctgaagagagtaatgcaaccaatggtcacgggaaccacttcaccttaacagctgctgagtcggccctacataaccctcaacgtccaggatgctatggattttt

SEQ ID NO: 122700 - DNA, 1009 bp, Homo sapiens
agataaaagaaatagcaagcagtatatgcacgtggtcttcttgtcatttcaatattcttcaaacccaggcttcctgatgagggcgctaatgaagaatactgttggaattatcttttctaaaggcattttcattctattaccaccccccacgccaccgccacacacacgcacgcgcgcacacacacacacacacataacacatgtctcttatttcctctttcattcacaaatatccactctattccaggcactgtactggagatggagataaacggatgaacatgtccttatcgcacattcagtccagtactatgtaagatggctaagagcagaggaaaattgttgactaggaatacattctttatttcagaattttatgtcttggttgaaaggctaataaattctaagtgtgcttttatctcttcctaaatcagcctgtgtcatctgtcaatacatacatatccacagtagtgaacacgtgtatatttttaatgaacatgtaccaaaggaaacatattctgccatctctgaagacatttttatcacaagctgactttggggaattctgaatatatgcagtgccaatatcctgaaaggtggtggaaagggattagatcttatagcagtaatggcttcattttccttagctcatattaaatctttcagccaaacagaaaaaaaagtaacatatacaaataattgtattgctcagcaaagggatctgaaggatgctgtattttgattcatcaaaccaagtggcatgtatcccggcggatggaactttctgcttggaattagaagactagtgttctgaggcctttgggaagaaaagaagaagaaatggaagatggatgtcttattctactgcttattattatgaacttgagtatattacataacatttgaaggatttgtttccttttctttaagacgattaaaataaataccagttttgtctcatgaggatcccatttgtgagaataactcataaacagatgagaatgataca

SEQ ID NO: 122701 - DNA, 1030 bp, Homo sapiens
ctataatgtgatgatgtttgactagtttacagtcctggtgatacaccattggaagacatttggaagtgataaaataagggcagatttttgtcgtttctttatagaaacagtaacctgaaagtcatactaaattttattgagagtccatccctaggtaacattaaaataagtgttcgtctctctaattctgtcattttcgggagaaaatctagaaaatatgccaattaatcatgtagttagataattcattttattatcttcatccgtgtagaaaacaccagagtgtgaaatgtaacctgcaagttttattttttattttttcctagattgtcctctaaactggactttaagcatagttatattttacattcttggttaaatttcccctctggtttaattttcctttaatttattttgatacctgttgtatcaaaatgttatttgtactgtaatattgccagttagctggagatgaggaaaattaaataaggttaatagattaaacatacatgcatatgataatttgatgtcaattaatttgtatatctgggaacaaacaggatgaaaaatatattttcgttatcattattattactaccactgacattcttctaaaggctataatataatcaagaagttttcaatctagattccagctttgtcacttactacagttcaaattgaccattttctcaaatcctctgtttcttcatgtataaaatgggagaattgtttattaatttgttatagtggggaatgaatgccagaaaatatatgaagcatttatggggttgcctcatgctccctcatgtcactgaagttcactatctcagaggtgtcattaaaatgtccttctccagtgaccctgcagccaatcctttgcaaactcagttttttagtttttgactctatcttagttttattgctcttgcccatgttatcattttcattccagatctttatcacagcttacatggactatagtagctgcatcctgatgagccactctgtctcctcacttcatcatcca

SEQ ID NO: 122702 - DNA, 1014 bp, Homo sapiens
tttcaatgtcaaataaatcatctttccatctttggactgtaaatgtaagatttattcattgagtagatgtttattgactttattcctcctaccaagtactgttgtctgagctgaagatacagaagtgaacaaaactgagtccctattcttatgaagctaacatccttgtgtagcagacagaccataaacaaatatataacatggcaagaggatagttagagatgtggatgtgggaaggtacattttcatttagagcggtcaaggaaagtatttgtggtaaggtgacatttgagcaaatctgaattaaatgagcgagggaaccatgtagataactggagggaagaacattttgggcagagggaacaataaatgcaaagccctgaggtagaagtgagcttggctaagttaaaattttaaaatatattaagaataaaaattcaataaattgagtgtaatcactattcaagtgttctatatttgcctctaaagctaaaaagtgtgctaactgaatctcagttaacctcctagaaattaattggttatttagaacaattagcaaaaacattatatcaagctttaatcattaaaattttacacagaaatatcttggttaattatctgtgcttttgttgaggttttattgcatttttatagtcatctgtgctccaagaatatgttcacattttttctctaatccttctaattaagttaaaaccactgtccttagaaaagaccattcttttagtctaggacccttttagtaaaaaaagaagaaagtattctttagaatctcttaaaattgtcaataggtctaacacagcttctttcaatgtgagcaatacattgctactgacaaattaatatataaaaagcctattgtattatttatgaaacaagtctcttggatattttggtaattttatcctggtgcttgaatttttttcaaagagataaatattattaatagtttttggacagttgttcaatattaacaaaaagctatatctgatacta

SEQ ID NO: 122703 - DNA, 1024 bp, Homo sapiens
agttatttgtaagccacaatgatggcagaagatgacataatttgtatgtaaggattgccactcatctgcatgtgttcagtgagaagaacctaccactcatctttggttcacctcattttcttattcatatttgaagtcccctgcaatggtcacagaggaattaggatgcttttgttatctcatactggcttaaaaaatagagcagtttattacctcatgtaaaaagacatccactggtggagtagactccttggttggatgattttgcattcattatatcatcaaagattctgattttcccccctttcttccctgtcatctttggagtttcagtcttgtcctcaggctccttcctcttttagttataagactactcaagcagaaaactaggacagcacattctctatttatagtagtggaggatgaggtggaaggaaaaaaggacatctttcaagtccttaaacatctttccttttgtctgattgactccatcctggaccaaaatcagtaatggggaatactatgagccaatttgctaagtagcatcaccaccgagagctggtaatgcaattgataacaaaatgaaatgggttctttagaaaagaggaaagaagaaatgcatgttgggtaagtagccatcagtgtttatttcaatccgaggccttatgtgaaaaatagtacaaaccattttatatccattaggatggctattattaacaaaacaaaacaaaaaatacagcaaacccagaaagtatcaagtgtgggctagcatggggagaaattggaacactcatgcattgctgatgagaatatgaaagggatagttactatggaaagcagtttggcagtttctcaaacagttaaacatagaattaccatgtgatccagcaattccccttctagatatatacttataagaattgaaaacagggactcaaacaaatacctatataccaatgttcatagtaggtaaaatagctactcacaatagctaaattttgggaacagccccagttgccatcaa

SEQ ID NO: 122704 - DNA, 1048 bp, Homo sapiens
cacacacatacacacagcaacagcagcagcagcagcagcagcagctctgcttgtggttctctttgcccatagatttcattgtttttttactgccagctgactacatcctccttctttccatgtctttttgggtccctccaaattttgtattacacatggcattatttcaccattaggttactactgactggcatagtttcttgttttttcccttgatatattttgaaaacaaagaatccagctagcttagcttactctttcagatctacctataaagtacatcctatgctatgaatcagctgtccatccatctagtgctgattcttggtctacttacctagggacaggttagggtcacaggaacatgaaatgtggatgcttagacaaagaagactgtaactagggtggggagttagccagaagagatcctttgacagctctaatgcaaacgtaagtttaaaagtattatgagatagtagatgcaaatgcagtgaacagagctgtgttgtagaatatggtgtggtacaacacagattccagacttcatttataaaagacaaggccagacgcataagaaagttatgttagctataagagaacaaacagacattggactcgagaggttgatgaatcgctataacattcgttcgtctcccttatatgatatcaaatcttagaaaggcagctgttcacaatttttttgtgtgtctggtaaatcatctcaagctgctgcagattcagtatcatgcatatgacaaaattaggcaagtcaactgtgtgttacatgagtggttcatttcgcctgatgttctattacatttgcagctgcatctgcatctcagacacgtaacattaactgatgttcataatgataaccctgagtcattaaggaaatgttgtattatgtctggtacagtacacttgagaagtaaagagatgaaatggagaaagaactgagacttactgaatgcttgctgtattgcagatactgagagagatgagctacttatgttactgcccttaacaacagaatcctgtgacataggta

SEQ ID NO: 122705 - DNA, 1038 bp, Homo sapiens
gcacccccatttacccagtcataggcgtagcccttaccttgtactcactttgagtcttgctgaactcccacttattttgagctccctggaattcagtgctcacgggtcattttgtactctacatgtgaatggagtaagaaggaatggcagcagacaaaattactgataaaattattaagaatttcatgacagctacaggagagtattaagccaaacatggggctttgggagatggcacagtctgaatgcccatgaagccactactgtttgtatggatcctttaaaaaatagtctccagcctcagcctctgttaatcacagtctccagggaggggtctagacatatgtatctgaaatcaacaacaactactgcaacaacttcacaagtgattttatgagctgatataaaagtctgtaatctcttaggctagcattagaagatctttataatcaattccttaactacttgcttaattttatcacattactgtctactttgagcccttgcctatgactccatagaattatttgatgtctctggttatattttgtgttttggtccaccctgtgatgctcatgccattatcctcaatctcagtgctcattctctccttactacttatgggaattatgctatcatttctcttaaacacatatcaaagcctaagtcctctctaaaaccttcccccactactccagcccacagtgaatcctccttttcctcagtttttataggacttaggttctagccatttattttatgcacattattctgtagtgtgccattacttattcttttatgtgcatgttctttcttcctcactagactcagggtttctttagtacttggtattctgttgaggcttaaaatggccatgctaggatctaagagttatgatagttcctagaaaatcttaaggaataaataactctaaaaaataagctggcttctatttcctaatttgattggaccacagtacttttcaggaaggaatttacattcaaaatgtatttttggccagtcaccgtgacagtgctt

SEQ ID NO: 122706 - DNA, 1801 bp, Homo sapiens
tttaaaaaaatgtatcccttggcctttgcctacttttcagtttcctttttccacagtaaagttgaagtacttttctttcactgaggttttaagccagcactctttaagagggaagcaaaacagaaagagcaaaacaaagcaaagagaggctaagaggtttctcagaacaagcactggtgaaactttcctcctctgcttttatttgaaaacttggttttttttcttggaaagcttgagagtgcaccagaccagctttccttcactgacggtgaatgcgttcttccagcagttttcaatctgtgatgtttctgccagtgttttgcacaatcctggatgccctttgatcctgtgtccaattgtcctaggcctattcatctttcaaaaccctgtgtgttcaggtgccaactcttctgtgaagcgttgcctcaccctccaagtcactgcttatatactttcacagtatcttatattatcttacatgcactgaagttgtttctttcgtgtctgcttgtcttgttagactgtctggacaatgtcttagagtcccatatgtggtagcttcatgttgagtcccttgcccatcatagtgtttttaataacattggctgggacaaactgaacagggctccgtaccatgtgattcctctatgttttttggctaactcatgcttgggtctagactgaaagtgtgtacagtccctaactaaaaatgcaaacaaagacttaaaacggtatgttacataaacagtaagttggctaaaatagttgggattatttaaaagcctctgagagactgttgtttctttcatgctttatctacagagattcttaaaacaggaggaatgtctgctgctggttgtggtagtttctgtatcatcatcctcaaaacagatttcgctgccctgcgatgggattcagacatttccaaaatataagcccgcctccagggaagtcactgtgagagcagatgtgtacaaaagaacaatacaaggtagcatgggatgagatgtcaatagagtaacaattccagatagcacttcctgttaaatgctggatacacattccagaaattcaagggaggtagtcattgtggcttggggtactttacctagcagtttgatttccttatggtgggccctttccccaaagcagttttctttttctttattaaacctcataagttagttttaggaagttttagtaatggtagtagggagacagagggacatagtcaagtggtcattgcagtgtacagtacaaccactaaaaactcctctgcagtgacacagtatctgaagcttgtctgcagcatttctgattgtatgtatgtgcctgaccttcttccaaagtatttgctgggactttcaataaataataatacacattattggccgggtgcggtggctcacgcctgtaatcccagcactttgggaggctgaggcaggtggatcacctgagatcgggagttcaagaccagcctgaccaacatggtgaaaccccgtctctactaaaaatacaaaattagctgggcatggtggcgcatgcctgtaatcccagctacttggaaggctgaggcagaagaatcacttgaacccaggaggcagaggttgcagtgagccaagatcacatgattgcactccagcctgggcaacagagtgagactcctctcaaaaaaaaagaagaatatacattatttaaaataataaacagcaacaaaaagatgagtcatagataccgggcatgctttcacctcagggcttttgtacttggttttccctgttccaggaaggttccctccatg

SEQ ID NO: 122707 - DNA, 1710 bp, Homo sapiens
catctttaaaatatatctgtattcttctctactgattctatttctgctgtcatttccctctctcaggcctctaccatttctctcctggattcttacaagagcttcctacttggtcccagtgatgctctcttggctctctccaacttactctccacacatatgccagagggttctttataaaatgctggaccagtcttggcactctccttcttagcctttcaacacctgcttcttgctaatagattagaatttaaactttataacggtatctcatgtccctgtgcattctgactcctgtgtgtccgtctgagctttctttctcaactgtcccactacacctatagagatattaaatttttttcttctttgaatgctccgtgactctgaattatgagcctttacctttagtgatatgaagttctgtcttaggggaatcctctttctttccttgctgccctaactctctttgccccattcacacccattcttctagttcagcttagacattcttctgggagaatcttcttgaccccctatatctagattaagcatccttcctatattctttgataaccctctttacttaaggttatcaaactatataggaatcttctatacaattattcttgtttcactgtatttaaattgtctgtttcctgctctgtgcttccattagactacaaagcttgatgcatgtaaagacattattaatctgttttttactaatttcctaacactttgtgtgttatatatactctataagtagagtggatgtttaagtttattccacaaataattaatacagtaggagctaatatcgtcaatatgtaaactatttgaatagataggcaaagtgatatttttaaatgaaaatttcagtatttcattttcttgtttaaaaacctgtaagacctcctcattgcttcacatagagatcccagctcataacactgtggataagatttggcctctgcatcctcttcagtcccttcttctatcactccagctctcctccttcaagccatagagtgttcttctcatggttaatttcgcttcactgactcagtcttccttatatcaccacctgagttagtcctgctgttaaggttcttagagtccttttcactctgccaccactgtatttacctctttttattaattatatggtatgtgataatttgatgtttattaccttggttctcccccattattctttgagctactttcataactagcacctggcacaaagcccagaagagaataggtgctcaataaatatttgttaaagcctgaatgaatgattgaaaataaattataatatgtttgctataaaaagtaaggtaactatttgaatcggaacttttgacatcttattccacaattcatttatttagattggtgcaaaagtaatggcagaaaccccaatgacttgcatcaatccagtgaactactgtggcctgagtctttatgctagcatcccatctatcactgaggtgtgtcttctttaattacaatacctgttctggttactgtctcctgtttaacagattcttccagaacctaggaacataaaaaaaaagaacgattttattttgatgatgacattgtgggtcaggaatttgggaaggcctcagccagtcagttcactttcggggtttctcatttggttgtagtcagatgtcaggtcactcacttggctggcagctgatg

SEQ ID NO: 122708 - DNA, 1761 bp, Homo sapiens
tgtgagccaatgtatctggcctcaggtgtagcttaaatcaaccagaatagataacccttgggtttacctttcttttgttcttagtttttattatatcaccttttgactcatggaggcttttccttcgagatgaagggaaagcttagaaggaatgctaagcaggaaaaccctgaaaggatagtaattttttcctgatactttgctcgtttttttgtttgttctcaagatttgttaaaacaaactgttcatacatgcttttctctttaaaatcactagtatatctacaaactaaaaacttggaatcagaattttccatcctacttaaaaatcatccaaatgaagagcttcagagggagttattaactctttttaaaaataatataaaacattaacactttctgactagttgccagattaacatcagggaaagtacaaatgtactagctgaatttcagccacaacctttgcatacttgacagatgagacaccaaagtaagtataatgatttagaaagcacaagcaacagtgcatacttgtgcatctctttgcctgtatgaggtgtcttttcagttacaataattgttaaaacaaagtattaaaataaattgaacatggacctttgaagcttaggatcactaaatgctgaacaaagattataaaataatgaagccagttctaaaacaatgctttcacaattactggtgtcagcaaaatgttttatatcattaattcatgtattaaaattaagatgctgaaaaaatcatgggagcatttagattgctctgttctaatatgcttttggcttattacaatctaaatggatttgacagagctctgttggtttgcttagggtggtaaggaggtcaaggtcaagcaggcagtctcctcacagcctcattaacaacatgctgacctgtggccataaattacccttaaccgtgcacagtcatatcataaagtgtctgcttctggtcataagactgtgactgagacaagatggaggaattactgttaatctcatcacctcttctgaaaaaacaaattgaagcacatgttcaggttattagggagttgcagagattttacatagagaaatcttttcttccactggctaagactttccttctttttactgtggtcaaaccttggtagatctgttctctagtatacagttggtttaagaaaatcaaaagggaggagagctggcgtattcttattctgttaaagataaaatgatacaaacattaaaaaaatactgagcacaaaatatttgcttagcaccatgctaatcattatgataaagataaacaatgtgtccctatagaatagtccatggtccagcttcttagaaactttagagctttagtaggttaaaataaagctctccaggcaaatatggggccatgtatatgaataaattgtgttacaggattccttctgtgctgcttcaccagtcagaaatctctttggccactgctgcctctgcctggacctcgctcagggacttctgggcttgctccacctgcttagcccggcaggctgcattccgcttgtgccccagaccagatcctgtgcccaccgtggctctgcgctcagcccatggatcaaccaggcatgctgtgagcggcttccaccttgggtgccagcaactagatgaggggaatgcggtggtgcctgataactcagagatgccagcagtcgtggagccccaaggggggttacagttctcgcttgtggagtcccaaggtctgagtccccaag

SEQ ID NO: 122709 - DNA, 1933 bp, Homo sapiens
tttaaggacacataaagccacaatatattgttcagagaaatgtgtatagtatagtaaaaaaaacataaatcagatttatgaatgtctagctctgggaaggaagagagaggtagcaaggaattatattctttatctctaaggttgtactttttatataaaaaaccaggaagcagaatgataaaatattaacatttattaataaaggggtgttgtgaacatggttatgttacattaatcaactttttggtatttctttgatttttggcaaataagtgctgcaaagatctgaatgtttgtttcctcccaaaattcatgtgttgaaactcagccatcaatgcaatagtgttaagagatgaggcgggcctttgggaggtgatataggtcatgaaagctaatttctttcattgccttttaaaatgaattctagatatgtcacaaaggtagaaatgatcttctccattagaggagtataattcagattgcattcctcaattacccttccaagtataaataatgcatttgttttctctgccaggctggcattagtcttgatttgtaacttttcctatttacaaagccaaagattgctatttctataaatgccttaccttcttttgtgaccttgttttttggtgattgtcaggttgacccttttcctcccacatcaagaaagttttgtggttagaagaaagggagggcaaccatcaggcaacagacttcctttgatgtcatattcaagtactgatcttaagctgtcctttgggtttttacaaagatactctaatgcatggcttccatctgatcccttcctccagctgtcttcagcctttgctttaatgtattttgattattgtatgccctatctttatgttagtaatcatgcttaatcatttcaaatagactttttaaaagttgaattaaaccaataattggtgcaatagctttctttttgtgtttattcaaaagaattttataaggttatctcttccctgtcttatgtgaaaggctggcagacattttctgtaaaaggccagacagtacatattttaggttttgtaggccaagaggcaaaatgaagaatattatgtaggtacttgtaatacaagagaaaagacaaatttccacatattttattgagaaaattgaaaatataatagtattagtaataataaagtatcttgaaatttgtaatatagatttactaatgtaaataatagaattatttcttttgagataatgttttgcttgcctggggttgaacattaatgtttcctgtcatcagtgttaattgtaaatattcatctgtcgtactgatctgtgttgaaatgttacatatttcatatttaaaacatcttttcacacatacaggttttgccgaatatagatattagtctactagcatgtatgcacattcataatttggacgttttttatacgattctttagattcatctcttgatatttgccttttagaatttcattacagtgcagaatacttccaattgaaaattaggtggaagctcctcagttgcacagtcaaatggattttttaaaaattccttattgaaatatgtttcacatatcgtatagttcacatatttaaagtgtataattattattttgtatattcacaggatatgagaccagtatcactacctaattttgaaactttttttattccccctaagagaaatcccatacccattattcatcattccctgccctcaccccaggcctcctatccccatcctaagaaaccatgaatctagtttctgtttctatagaattgcttttcctggacattttatataaacagaatcatgcaatatgtggtcttttgtaactgacaaatggattttgaaataaggaaatttcaaggtccaaaaaatgctgttggaatgttgaaatcataaattgagctcagaaaatgtgt

SEQ ID NO: 122710 - DNA, 1007 bp, Homo sapiens
caccccagaacaattgtcttccaaatttttgagcctcaccaggtgactaatccacagtagagaatctttgcagtaaatgaagcagaaaaccagtgaggctgtggcagtagttttcatccttgtcattacagcaaaatggcaggatgaagtggtttcaaaggctgtttggagtcatctccatttaaggtaagtttctggtcatgttccctttcttgagagcagcagttacattattcattttgtagctttgaggggaccatggtttagcaggtagtttcctctgctgttgcagttataagctacagtattgtaggttagtcaaagcttcttcatgagtcgttgttctttgaaactgcttggctctcatagttaatttatttactgtttttatgcaggccattctctatcaggtataactgttagaaaaaaatcctatttttctcttctataaaaagcattatttttgaggttacaaaaattgtataactaaagtactgccctacagtggtgttgaaggctaactgaacattaatagaatacttttatttcatgctatatatccttagattatttttaagttattttcattgcaattgtatgttattgtataagatcaggaaattactagttttagaaggactcgtaattccataaattaggatattcaatttttttctaatatatgtttggacttagatacatagaaactgagactatactaatttttaaaattgcagtaattaaaacatgtacaaaattgaattagagtgggaataactgagtaacttttaaatgtgttgtttttatgaaatgggtaaaggagttataatttaagtcacaattatggcaatagtgaaatgttttacgtctcatttcatctgaaatcaccaaaatcatgttgtgatgagcataatgtatcacaatacacatgtattgagagtgaaatatgtaaaaattgacaaatagaagattctatatttgtgtaattttgagcgagcccatggtat

SEQ ID NO: 122711 - DNA, 1039 bp, Homo sapiens
ttctgagcacgcctcttctgagaattgcttggactgtctttgaactctgcacctccttccaggccatcttgtgagacttggtgttaatagctgaagtcctatctgtaccaacaagcaaggccacttttcagaagataagagttcactgaatgcacctattataatctgtggccccagcagtataattcttttatctttcaaatgttataattgcaaaaaatctcaatgtccaaaagggaatgagtgaaactaaattaatgagaagaatattaagttactgaagtgtatatgcgtaggggcgtgaatgtgtgtgtatataaatatgtattaaaactaggcccagtaaccttgtacttacccagttccatgccgctacactatttttccacattttcatagacctattgaaagatgatggctcctttgtggacataatttagcaatgtattaaattaaagtcaatgtagacaacaggccatttcgatactgaacttttctatttcttgctctttctttttgtcacacaaacacagaaatttgtgcaacgtcaccccaaggagtattaagctttgtaaactgacaaaactggctgcttttaggaaattctcaagacacaaatattcagtctttttaaaattcttacattttggaaaacatgcttcactctatagatagatccttcacattgggattatttaatcccaaaaacaagtttgctgtagacaactgcttaagcctttaaaaaattcctattctgctaattttttaaccaacttgtaattatagataattctgctttaggtcaaggtcttacatcatttaatatcctaaccttgttatctcttgcctcctcctctctgtttttatttgttttcaaggtttttcataaaaacaaatactagttttgaaggattttttcttacatttaactgctcaaacataatatttttggggacaccttcttatggaggagtttgaaaactttttatgttcttgagtttgtccaatatcagctgcttttgggaaaggaaacaaaaaa

SEQ ID NO: 122712 - DNA, 1045 bp, Homo sapiens
gctgggattacaagcacgtgcctactatgcctgtcttcaaaatcacattgttaatttttatagccacaattattaatttgataaaacaaataattttatagaagcattaaagtattatcagaacaaaatcagagttccaaaatttggggagtattttaagattgtgaaatgttaccttttggatgcaaaccaatgatacaaatctttaagaaagaattacagtgggactcctttgaaactctgattttgaaaatagaacaaatacacatttcatagccaaactttgtgtgggacttctattgttactaattgtaaggctgtaactttggttgacttcatccaaatccaagaaacagagtcacagtagtgagactattctcattgcttctttggagcattagctgaagctttaccatatcacataccttacaaaatccctatacatattgccagttttaaaagaatgtaattatgcatgttacaaactatatatatctttttggctagagaagtgactattttagaataacagtatgaatgtaaaaggcaataattttttttaaatacacaaaacattgccattgcccttttttgtcacttccttttttcttctaaaaattttcatttggtgtatctaactttgtatcacttaaattattcagacttactaagataaaaaatactttttttcagttctgtgctatattctgtcactctattccattattaatactaaatgactttccttgtgaaatgatacccacatactacaacatcaagctcctttttctcttaaatttcctaattatcttgatttttgcctctgcagtcttcttcccatcttggccaagtgtgggataaattctgtctcgcccgtaactcctttcactgtaatgaaatgaattcaacactgaacgcactccagaatttagctctggtagtgagcataatttaccttggcttattttatttgtaaatggaaatgtatcaggagtgcctggaacacttttccctcttgataggagttggagaacactgcctagcc

SEQ ID NO: 122713 - DNA, 1330 bp, Homo sapiens
ttttttaaccttttctccatttcattagttatactattaactttgataatcacaaaactatgtggaagaaatcattctgattatattttatgaaagagaggggtagagtaaattttttaattagacaatgttgatatgcagaaatctctcaaaagaaattgcaaaggaaaaattacgttgagatgaaatgttgagaaataaggagtatcttaaaaacctaatttcttacactttttagagcaatcaacttatttccaaattattatttcatgctgttgtttccatgaattgtgtttttagcatagtatatacttttctaccacgttagcatttacactctaattactgaaaataaaggaagaagttggtgaataaaagccagggaaactgggtttattctcattttccaatagcactaatgtataatccctttaaccttccatatggtgctttgtgtgatgagtatataacattcatatacgttattagtgccttatttttttcacttgactttatttcttatctaaagagccatatattttttgtgagtgttctttggtccctctatttaaagtgctaaggagaaagcatatctttagggatgtatataggctgcgtttgctaccttaatctactgtattatctctaaaacaggttagccaatgtatttttcttaaattcattgttcatttttaagctaacctatacaaatggatattaaacaccagaaattaaagccattaaaattgaattgtactttaaaaccataaaaaatgctaattaagtttagaacaggagttgaaatgactctcagttttatctatagctccaattaggacaaaattactttacaaaaagcattaaaaataaaagtaactgtatggtacttcaggaatttgaccagttccttacaacttattcttggcaatattttgtcagtaatatactttcatacagatgctagagaaccatggtgtctgctatttacatgttatttgttcccagtgagctttatcaacatcaaccctgtttatataatatgttattttgctcttcttgatctgtgccttttgttttagctttatacaaaatgctaggtttgttatattctttatgtatcataatatataattcaacttttcctgatgaatgtatgctgaataattaaactaaaccatgtgcttagaaaagacaaagacaggttgtatatgcagttatgtgtaaatatttgacaaagaaaaaaaaaggaaaagaatcttcctgccaacaggtaggtcctgctggacaggacctgaaaattaagagatttttttttttaagcagtgaaatt

SEQ ID NO: 122714 - DNA, 1001 bp, Homo sapiens
tgcccttatagcgccgggagtgggtgccttccgccggctgtacagagcgccggcaggtggcgcccagcggcgagcttgttccagcttggtttgggccaggtggactggaaggggcggaggtaaccagaagcggctagtggcggctgcctgcgtccccaaccccctccgcgcagcgctcgcgacacgcgtgccaggagtgggagcgagcggcggggccagctgcgttctgagcctgggcgcagctgccatctgctctgggaagcaccagggtgtccccgccgccctcagctcgaagtcagccaccatggaggcgcaggcacaaggtgagtggtcgccgatcgccccgagagtcaggtcctggggcgcgcataaaggctcttttcctgcaccacctaacttcgctctcggacagaacagattggtgccgtgttgcacatccagaactccactcccacccgcgcctttggtataatgcctgctgcccaaactcaggatttgctgtgggtctggggatcaataaagtgacaggggatccgtaagtggagaggcccctcctcaggaaatgcgcccgtggaatgctctaccctcttccgcagccagtcgcccctggccttcccaacctcgcggctgcccgaaggacctgttgtgccgggtccggaaagcgtgtttcgctccctttcccttgagggagtggggagggaatgtgactcttttcgcccagcgccgtggactcgcggcttgtggctcccaagttagggagtgagaggatcgcccgccgagggggtggctccgcagcccggctgcgcgagacgcttcccgctcggggacccgccttccgaggccaggtgaacgttaccggccccctgacctccagcagatccacacgtgagtcccggtttccgcgatcggggagcgacctctgcctcccgtggcgcgcggggcccccggccgcccagctccctgctcccggggctgcctgctggaggagcctgcggtggctt

SEQ ID NO: 122715 - DNA, 1035 bp, Homo sapiens
ggagcaacgcccagaagggatggcttgcggagttcagcctttaaggcaatcaaagccaccattcttttacacagtaggaaactctgtgttggctcttagtatagataaaatctcattaaaaagaaaaaaaaaaaggttcatgacctgatgcgctcgccctctaggggcagaacgccctgaatgagagtgggttggcgattgcgtgggcctggagtcgcccaacaggtttgctgccaggattacaattgtctgaacagcacgaaccttactcgtttgttccatcctcctaagtcctgcccgtaaagctgccgcttcccatattttttcctctattatgtagataggaaatgataattcaaccaagggtgagggcagttggtcaaattcaaaagcagaggtcaggttggaggccttcacgccagaactgaagctggtgggagcagcaccggagctttccaacctgacttgcatattagaattatttagagagtcttcattactggccttggccaaccccatcccagtcaaactggaatctttggaacctgaacatgggtatatttgaaagcttatattagtgaggatggagaagaactatagcagataggaaacattcatacaacttctgaagacatccgaaactacagactggtaaccactggtgtcactggtttgctttattgctttgctttacttccaagatttacttaacaaatatttcagtgctttcctttgccaagcactgtgctaagaagagcaaagacagacttggtatctgcttcataaaatttacagtagaggaagagacaaatattaatttgatagctatttgaaaaataacatgtaaaatcactgccatgctgatgctaagaaagggcctcatagtgcagcgagagcctgaaaaactataaccctagtatgcaataatcagaagagcagattgtttattgtgtccctgtctctgttcttcgtgctttgcatgtattgatggactcatttcctgtgcgcagcagtcccatgaggtagttcatattc

SEQ ID NO: 122716 - DNA, 1241 bp, Homo sapiens
aattttatcaccagctcaaacaaaagtctgttcagatatgttattccacttggtgttcatccatattcagtcatctcaggactttaaaataaataaaagtcacaggctctgcatgcttctttccagaaagtagaatctgtattctttagatgctggctgaaagggctaatttcaatgagtaccccaaaaaagaaagcattttattgcctcatgaacattataattacttgtttacacgaatatgttttattcatttaaccatctcccaaccatactagcagaataactactttaagaaaatacctagtaaaactgttgaaaaaaatgagccatcaatggatttgtccttaagcgactctagccatctctgtgttgaattttcacggtttgaagcagcaactgcagaaaagagggcatctgcctcagtcattgatcagctggcatgctctccatgcaggcagaggttcaccattacttctgttgcgaaatgtccccaacaacaccgtaaagccagtcacttcttcaatttactgagttaagctgatcatggtggtgagtgcttatagtcccagctaatcaaggtgctgaggcagtgggaccacttgagctccagagttcaaacccaggctaagcaaaacccctgtctcttaaaaaaaagatatatatatatattttaactgtatatatatagttttgtatacatatataaaactaaaagaaaaaagtaaaacaagaaaaaatttactgagttactacacagttaagaacacataaaaggtgacctcaaaatgtggatattcacatctgtcatcctacttttcattgaatatttaagcaataaagtgtaatgatttgaaatatatgcattaaattgagaagcattgttaatgtaccagggaaggcaggagaatattttaatgaatttgaaatggctaaaaggaagctttgggtcctcaaggaaagatgaattttaagcaatttctcacagtgtgaatcgtttataagtgatgcattttgatgcagaggaagtgaagttcccagaataaaaccacaaatctccaagaatacccttagtcaccaacatattgcttctttctcaaaaggcaaaaatctagcactttgctgtagccagatcatgtaccacacatgaaaaatgcatgtatatgttacacctcatctccaaacttacctatggttatttgtatcttatacaaattacagtttccctgacatatatctaa

SEQ ID NO: 122717 - DNA, 1050 bp, Homo sapiens
gaagcctgtttaaactccttcaataggtgatgctttttaaatatatatatatgcgtacatacatatatacaaatacatgtattaagctattccttaaactatgtttgcttttttatttcctatgaggaaagtctgcagtcaagttagatattttcatttttttaagtaagtcctaaaatgctattctagatgctgatacttctcgtttaaagaatgactctgcatactcacataagtaatttctccaatctgagatgactgtggtcatacagaaggaagtcaggatgaagaacacagaagaaagcaaactaaagggcctgtcacataaagggatcctagtctagtgacaaagagcctacatgttgtcacaaagatttggattcatttcccagtgcagtcccttattagcgatgtgacctttaacttcctcaagtctcagtttgctcatctacaaaatggtggaaatggggggccctcgatggatcttgtgatgattgagtggcatgatgcagatgaattgcttatgactgtgcttgggtactattatggcaatgaaagagaaaagcgagattcatttatcaatttctcatgaaatatgcatttaatatcccctgtgctgggccctaaagtaggcactagtgaaacagacacgaaagaaccaaagtcctttcctttgtgagtttaccaccctattttcgttatagcagttaggtgtcaagtaactatttttaatgcattcttttacccaaaaatttgttgtacttttgtatgctacctaccacaaagttaaaaatagctttctggagctaaggaaagatgagtaggttgaagatagaaataaatatgtaagttgacggaatttggctatctggcctgcatgcaaatctgaagcatcaattgtacctactaaaaaagaccgaaattttgctaatgagacaataaatgttttaaatggttgctgcttttggtccttctttatttactaggatgaaagcttaaagatttgcatagcagatatacaaagcaatgttcattgtttggttacatttt

SEQ ID NO: 122718 - DNA, 1791 bp, Homo sapiens
tggatgctaaattgtatcagcacagataactctgaatatctaggacttgccagtttacattggcgtggtgcaagccatagatctttggacatattgtcttctcccagatcatcaaaggccaagattttccaggataactgggagcaagtcagtattagattctgcactgactccacgaaccaaggtgtttcagggatattaggataattttagggcaatggagtttgatttggaaagttggctttgcacagccactccccagatggccctggtctagatcaccccttcatgtcagtttttatggacaaggcttcccctcggatacctctggcattagggaggcacagatgtacttctctgcagctgtactttctagaaaccaggtaaggataatgaccaagagccacttgaaaggcaggtaggtatagatgatgagtaactgcctggggccttttaaaagctaatatttataaacatatattacttggctgggcatcatacaaaccaatttaaaccaattctgtgctttctctagggcagatgtgcaaacatcagaagcatgtagagcccagggaaagcatgcaaacactgatcaagtgcacagcgctgtgtgacttttgtcacttttcatgatgtataagcacagctgccttttttaggaatcgtgagctggagtcgtgagcaaagtgttgcaggagtagcatttttcaggagagtgaggtgctgatgagtgttaccctctctggtagtcaggagaggatcattgagggggtggtttttgagagttggtttaaggtagaaagggagggaacctgccatctggaagtgtgatgatgttccaggcattgggtacagcttcttaaagtggcctttgcttctggagtaaatgaaaaaaggggacatttagttaacttgactgagagaagctgagagagccaggctgttgagagcacttgattagctgtcagataccattctccctacagtttcttggcctcccagccctgaagaactgtcagtaaatattgccatacaggatcgattccatttaatcttttccaaaccacaactgtgcagtaggtgatggcatcatcatttcacagacgagtaaacagaggcccagggaacttaagcagcttgtgtgccaagtatttaaaaattactgtgtgtttacatatcacatatgaattcacacacacatagatggtggggattacgaatgcaaggaatgttattttttgagtcctttattccagtcacagtattataaactgtgaggacagccaaaagacaaattccccttttttgaggaatttccaatatgaccagtctttatacaataagtaggaatgaaaagaataaaagcaacattaaaaatgcatgaagaacactgaagcacccagaagatttcagtgtggccagcctgggacagggctatgcaggagaacttttgagcggtgagattggagccagtttttgtagttagaaatggagaccaggtgtggtggctcacacctataatcccagcattttgggaagccgaggtgggtggatcacttgaggtcaggagttcaagaccagcctagccaacatggcaaaaccctgtctctattaaaaatacaaaagatcagctggacatagtggtgtgtgcctgtaaacccagctacatgggaggctgaggcagaagaatggcctgaacccaggaggcggaggttgcagtgagctgagattgtgccacttcactccagcctgggtgacagagcgggactccatctcaaaaaagaaaaaaga

SEQ ID NO: 122719 - DNA, 1027 bp, Homo sapiens
taaccccagttgggcatattgactacttaattcttcataatcagtagagatcagttgtacactattctaaatacaggatttgtgtgggtcataagaacagaggtgacttatgtacaggcatttaaagtggaagtgtttgaaaatctggctcatactttgactacaaagtaaaatgatgtgtgttatatctaactggatttgggagcaaagaatttcaaaaagccagtggaaactggactctgcctgtggcctcttttacaatatacctaatttaagatgtgtataagacacatttttagatattcactaggaaaacaaaggcttttctatcctgtcatttacttaatttttttaacctaacttatttttctgaatgattaacattgatgcctttgattgtgtgggtgttgtcaaaagagagttcatcacatggggaaaggttggcaacctctctctgcttggtacttttccatgagcctcctttcactattctcattgttatttccttttcactctgaagtagttccaaatctgatactgaaggaactcgattttattttacatgaatatttgaagtaaattgagccacttgtgttttaaggtttgtttagtatgcactacacagagaagaatataaagtaaaagcaatagcaataataacttaggtttgacaaaacacataacaaaaaagggtactttgagacacagaaagtcaaattataggtaaccctaaaactcacctttccactttcctttctttactagaattctctaccaacattggggtgtcggtggtggttaggacagaaggaagtatagatatagctatctgcttctaagacatttgccatgtctttctatggctgaagacaacttcaaagtaactaaaagtgccactggaaatagtttctgtgaactatattgatcataatttgaagaatttctaccagctgtgactttgtgaatggcaggaattcttagtttgtaggactgtcaaaatatgaccccaattttgtgaccagaccca

SEQ ID NO: 122720 - DNA, 1028 bp, Homo sapiens
gagcttctatctttgcacagtcaccaacatttagtaatgtcagacttgtaaatttttgctaatctactgagcgtgaactaatttaatttgtatttccctgagcatcagtgaagtcaagcatgtttgcttcagtgaagtcaagcatgctttcctgggtttattaacatttgtgatttctgtctataaatcatctgttcaggtcttttgacccatatttctattggattatttctggttttaaagtgggtctgtaggaattctgtatatatcgggaacaaatctttttagttatatatgtgagagatatcttcttccaattagtggcttgtcttttcattttccatatagcgtctttgataaagagccattattaatcttgttcgtccgtttttcatggtttgcctttttgtgtcttaagaagtcccttcctaaccagaggttcataaacacaaacttctagattgtcttctaaaatgtttatagttttgtccctgtgaatggtttaaaggtgtccaatgtgttttttctatagagataactgttctaggacaatctattaaaaactcttctgttgtaggactttctccttagttcagctaaaaacgggtccttgtcacacgaccatgaaagattaggcttgcagacactttgaagggtgagaaaaatggaatttattgggtgaaaaggaaaaaaactcagcaaagcaagagagcttcctgttaacagatccccatctcacagatagaattcccagttaccaccccggaaaaagaaaggacagactcctaccccctaaaaccggcagaaacttccatggctcaacctgttctcccagtgctcaggccggtgggagtttctccagggacccctttgtatttgaatgtttcattttctttccctacagaggtgtaaatgccagctgactggaatcatgtcatagatgaagtttctctctgagtgtggacctgtttcctgggttccctggagaacacaggcatttgagtcagccagatgttgaggggccctac

SEQ ID NO: 122721 - DNA, 1075 bp, Homo sapiens
ctgatatgattgatgactaagataaattttcacactgggacattttctgcctgaaggtcaggcttaggtggcctggtcccagagttgctgtttctactaggacccgacctggtaaaaatagaagatacagggtagtgaggcagatttgaaaagaatgcagcatgtgcaaattcttactagctgtaatataaatgataaattaaaacatgcatttagtggaatgcactcccataaactattctagattgcatatttgtatacatccatctagtatattttttctgtgttaaataggtacatatttatccttttattccataaaggtaccacacatatacacttctggtagttttctttcttcattttctaactattttgtgagtatgttaaatatttattgcaccttcatttttaatgaatttatctcccagtgcgtagctatagcaatgcttttagataagtaaccttgcacattttcattattttcaatatttcactgttacataaaataagggtgaccatcaaggttgattttgacttgagaaccaaaagttctcactggaggcaccaggaaaaaaaaaatgtagtattgcccatagtttttcatattatatacaatattatatacaatatattatataccatattatatagaggtattactcttagtttttgcttatttaaataccagtcatagttttattttgcatttggctgatatgccttggaggatttttctttagaaatcagtttcatttttccctctattctttaaaaacttttcgagcacattttacatttcttctttaaaaaaaaaaaatctctgcgtatttattttactggattcttaaactgttacttttttattaaaaagaaaaagctttgggctgggcacagtggctcatgcctgtaatcccgtcattttgggagactgaggcaggtggatcccttgaggtcaggagttagagaccagcctgaccaacatggtgagaccctgtctccattaaaaaatatatatatatacacaaaaattagccaggcatggttgtgtgtgcctgtagtcccagctgctgag

SEQ ID NO: 122722 - DNA, 1172 bp, Homo sapiens
gaggcagaggttgcagtgagcccagatcacgccactgcactccagcctaggcaatagagtgagactctgtctcaaaaaaaaaaaaaaaaaaagaaggaaaagctttgacactgagaggcaaatatcttcctaactttacacttatagatacatctttataaattatattattaaattttatttacttcaaaaattgctggactgtccacaatattcattcactattttaacaactaggcattcacaaggacatgtgcatgaatctgagtacattgttttatcttcatttttactaatgccacaataataaaaagtaattgaaattcttcagaagcaggtgtgataaacaggtaaaccttctggattattaattacccctaattttattacaaataaaatttgtaataattttaacggcgttataacatttatctaaactaattaaataatcctttaaaataggaaaccctctataacctgttatacccaagaaaacatattttcccatgtttataaaattgattctcttcatactgtgttgaaatctttcacttgaaccctgggaactccagcatgacactgctaactagaatagtgcttctgcatctttaggagatcttacaaacacctctgaagcttgtttagaatacatattcttaggttgcacctctcagaggttgtgctcagtaagtctgaggtggagtctaggaatctgcatttataacaagcttccagataatttggcttcagagggtcagtttatgaggaagacagacatagcttagctcacctgtatctggggttttcactaataaaatggagataagaataacaatgtcactggactgttataaaagtagcagaagaaagtctgacatgtattatgcactcaaaaaattgcagttttttatctttaagtgaccagctcagttacaagatggccccacatggtagaaattagggagagtacattaacaggagcccactgtatttcataaaggccctgctcattgtttttcccaatagtgaagaatgaagactgtgtttcacatatgcaatatgttggcattcatattcaaacactaattgggtacaatgtcaaggttgtattgactgcctttcctcccgtttcaatgtggctttgtctagtatagtggatggcctattttcca

SEQ ID NO: 122723 - DNA, 1910 bp, Homo sapiens
aaatctcttaaaattctcaggaatgtttgtgtttgtaccagatgttcttgacagtcatctagtacaaatcaatcatcttgacaatcaaaccagaatggatgcagaagtccctatggcctatgagaactgtgtttgcctggcatgtgcttccttgaaagtcttatgttaacttcttgctttcctctggccagtttctctaccatggaatgattagcttctacctgcctggctctatttcctggatactgccttttgctccttactgttttcctgagcagaagggagtagagacctaagttgggcctggagaagatgcccatgggctactgggctcacctgggagaaaccagacattctcagatttcctggcaaaaggaggctgcagaaagtaaaataatatgcaaccacggatccaccatctacttttcatttatacccttgaaagctgactatacccattatacccaacaaaaacaaatgtcatcttggttagatgggcagggaatatttcagatatttggaattgctgttttagaactacgaatagggagtttttcatgtacttatgtgtgctctcttcttttttcttttttcccctttaatctgcttttgctctgaagttactccattcgccattccataagtatgcctgctatgaggtaatgtgtgtaaaatattttatgtaatattaatatgaaatgtgtttaaggtgttattttatttatatttacttatggggttcctctgctttatgtgaaaggaaattgctgatggtcttcaaaagaaaaggctgacaattctgtggaagaattgcgtagcttgggcttttgaccagacatcctggcttaaatctagtctttcctgtgtgatccaagacaagtgacttaacctcaattcttttatccatatattgcaagaaataagacctacttcatatggtgtttgtgaggcataaacaaaggaacctacataaagcatttagcacagtgtctgaacatgccaagcaatcttgcaaaggtaaacttgggtttcttatttccgcagaattaaatgctagcctgggggcaagtttaaatgcaaggctaaagttctagagaggatatcattaggatttttaaggtggatattaaggtgagatgtttgttaaataataaaatgtcagtataattactgaccagataaaaactggtgagaaagacattcttaacttcaagtttgcatggcatagtgatgcaatcagataaaattaaactaatagcaagacaggaatgagtgttaaattgaaaatcagaaaatgcaggctctagcccagctctgccaaggattaactttgcactcttgggaaaatcacctcaatggtatcagcttcatcatatttaaaataagaggctagaaccagattagctgcttgtcaaagatgcccctccacccaccgagccctaaggctgcctagagatgaagcctttgggatcttcccccacttcagtcagagctatgcctcttctacctgctttatattgatgttgttgtttgaaggcattatagaaggagtttagttactttcaatagtttgagaccgccgaagccaaattcttcatatatataatcttttcctctgttttttaactgtcatgaagagaaattcttcctagggtcatttgcagtgctaaaaaagtttgtacatctgattaaatcttattaaagttgtacatctgattaaatctgattaaagagcttctccctgttctccagcatgtattctagtataatttaattagataaatgtctgttctattatattttatgaaggaaggctcttctacactggggttatgtggttaattggttgatttggaaattcaccctcagtatttagttctctgtatttggtggtaaacagagagtacaga

SEQ ID NO: 122724 - DNA, 1008 bp, Homo sapiens
tcgcttgaacctgggaggcagaggttgcagtgagtcaagatcagttcactgtattccagcctgggtgacagaacgagactatcaaaaaaaagaaaaaaaaagccattaggctgcaaaggttctatttggtaagagaacaagtaggtatatctatttgagaggaaaaataacgcatgctaataacctccattttgattgggcattaggtaggtaatgggtatgtttcatcttaaaataatgaaagcattaactttccaaaacaccacttcatgtaagttgtcaaaatgattatttttttaaggcatggaaaagaaaaaatatatgaacatttttttccttgcactatttctgaattgtctcacatttgctgaaataaataactttaaaaaatgccaagtggcaaaactcaaacatgacattcatcatatggattttccattgcttactaaaaaacctgagtcaggaagaggagtgttgtgatagaaacaataaatgctaaatgaaaacttaagctacccattgctccactggctcattggaaatgatttacagtgtaccatggaattattacagttgtgtcattgccaaataccatattatttactgtattgtgtactgatcattttacctagaaaaattccatgtcaggttatggtttctgaacctaacctaacagaagtgacatacattttaaaacgtggttggtgcaggtggcaagctgacaggtagctctgtggcagaggccgtgtttacagatatgagcagaaaaccaaacagcatggttgctaagacagctaggcctttggagctgacctctctctttttgttattttaggaattctcctactttcaaatcatttgaggagagggttgagacaactgtcacaagcctcaaggtacagatgaagtgaattctgtgtgagtgggtccattgactcaggacagcttagccattgctgcggttagtttaaagtcgaggcagggccaagaaggcaggcttgcatcaag

SEQ ID NO: 122725 - DNA, 1032 bp, Homo sapiens
tctcctgcctgagcctcctgagtagctgggattacaggtgtgtgccaccacacccagctaatttttgtatttttagtagagatggggtttcaccatgttgctaggctggtctcgaactcctgacctcaggtgatccgccacctcggcctcccaaagtgctggtatgacaggcgtgagccaccgcacctggcctattagccttttaaagtgagatttcagagataaaccatttaagaaaaaaaattaatgctaacaatttcccctatactcacatgtattttattgaatatgaactaacagttttgatcagaactgttgtaggctggcagaatataactactttagaaaatactacattaaaatactctgtgagggtggagaaaaaatatatatattatataactttggaagagtatagagaaggaacttgtagtaaatataattctgtgtaattattcgacatttcttgcctgatcagatgtgtacgcctagccctggttcatgatatggcagaatgcatcgttggggacatagcaccagcagataacatccccaaagaagaaaaacataggcgagaagaggtcagtgttgactattgactgtgcaaaaaaccaccagaaaaacctcttgctgaagcaaagctaagtttatgagacctgttacagttagggagaataccgccttgatagtcttagtagtgtcttaggaaggggaaggtcaggggaagatatttttagagattcagggcctgggctggagaatattaagatggatctgacaagttaggcaactagctgggattgcacagtttaggatataatagatttagattggtaaacatgtgaaggaaggtcgtaatgagttttgaagaataaactgttagtgttgacccagttttagggggtttacagccttatcttccagaagcagggatttcctggaataagcagcagattggattttgcttgttgtgttagtctgttcttttgtagcttttataaagaaatacccgaggctaggtaatttttattt

SEQ ID NO: 122726 - DNA, 1032 bp, Homo sapiens
tatttttcataaagagtactgagtgtcaagtatgtgccaagcaaggtgtctgccactgacggagcaatgcccaagcagcggacaccaaggccaagaaggcgaaggctggacagaaggtcctgagaaaaccgtgagaatatggaggagggggaggaggaataagaacaggaggaggagggggaggaggaataagaacaggaggaggaggaagaggagggggagagaggaagaggggcaggaggaagaggaagaggagaaagcggaagtgggggaggaggaggaggagttggaaggggaggaggaagagggggagcaggaagaggggcagaaggaagaagaagagggggaggagaaagagatagaagagtaagaggagggggaagaaagacaaggggaaggggaggaggaggaggacggggaggagcttcgccgcggcctgctccgcccagccggggtcggtggccgcatggcttcggtctcctctgcgaccttctcgggccacggggctcggtccctactgcagttcctgcggctggtagggcagctcaaggtgagcgggcaccaggccgggaggccgcggccgagcgggcgggactgtggggcggcggagcttccggcctccccgctcggccggcggtctttgcccttcctgcgccgcgtccgccacgccgaattccggaaaggccccagtcctgcggatgcggccgcgcgttgccgacggtggacggaggaagcagccggcgggacaggctggccagctggggcggcccggagtctgagcctagagcctggcgccgcgaggtccgcactgcagccgcgccagttcccggagagcagccggcctggccctgcctgcactgagcttttccggggctcacgaccccagaactcgtgtgtgtgtgtgtgtgtgtgtgtgctcacgaccccagaactcgtgtgtgtgtgtgtgtgtgtgtaaagcgcggctgcttctgagcacgggtgggaagaacagaatctgtcggctcctcagattttaagtggagcttttta

SEQ ID NO: 122727 - DNA, 1041 bp, Homo sapiens
cttatttggacatagtattttctgtaacatccacatacaatatgtgtatgtgtatataaagagtatatccagtctaacacttatcactgagattaacatttctcaagccacagttacatgtaaaccatggaaatgtaggttttaaaagaagactctgctagatttcagtttcaaatctaataaagagagctatgatagtgcagaatttctcaaattgcattctttgggatataaatacatatgacatgaatagtattccatggtaataaattttggaactgtagtctaagcacatttctttactataggacttctcataccctttaaaatgcaatgcaaaacttcaattgaatttttcaagtggaagatcatcctgaaagactaggtgttcataaaccaaattcggggcatactgctatagtggaaagtgcactctagttggggtaagaagattcagattcatgccttgattctgccatttacttgaagtgtgacgttgttattttctttattccctggaggcctggcatagtgccttttcctttgtaggcatttgataaatattggttaagttgatcatagccttttaatttttaggaataattaattcaggcaaatttttactagctgtgttatgttaaacaagttatttactctctctgaagctcagttccctcatttataaaatttaggtatttaatcattggatttcaagtccttttgattattagttaatattattattagttaatattattaatattcatggtaccacatggatctttcttcaaataaaaccttatgtaaaagtccaacatgcaacacagatcaaaagtggaactgctcaactcaaccagaggtgagttcctcacgactgcaagagccatctccatcctcccccatcccagtctactctgatatttttccttgcccctgtcctcaggtgtctctgaggaattcctcaggctcctcacagcataatcagaacaatactgatagaaataacttcaaaagctgctttgaggtaagcatcttagattt

SEQ ID NO: 122728 - DNA, 1047 bp, Homo sapiens
cacttaaagttaagtgtcagcctggccaacatggtgcaaccccatctctaccaaaaatacaaaaattagctgggtgtagtggcacatgcctatagtcccaactacttgggaggctaaagcaggagaattgcttgaaccctggaggtcaaggctgcagtgagctgaaatcatgccactgcactccagcctgggtgacagagtgcacccctgagactctgcctcaaaaaaccaaaaaaatgttaagtgtgatgtttgtgctggatagaggcaaaaagacttccccaccctccaccactttcttccacagcaaagcttttagagtaaatttcaacccatatctgaggctacaaattgagagggtttctccaaattgtctaattacctgactttttcatctttggaaagatacatggttagagtaaaatcaatgatttccacttgacataaggacttctacttatgcattgagttcttattttcatatcattgtgcaaagggatatgcaactggtggtctatgtcaaggctggaattctttgaaaatacatgcaaataactggaaaaattacaacaaagtcttggacgttgtaggttaaaatcccagtgaaagactgattagtgataatttcaagcatttattgaaataatgatagctccacacataaaactaagaatatgtggcataaaatgtgctataggagaaatgaaaaggaagaataatattaatacatagttcttaagatcaagttgccgtgattctaatggggatataagatgaacatcctcaaggcaatagaagaccaagtatggtgcattgatgagaacaccagtcctggagttggtgatctcagcttggtctctgattaactgacctcaacacagctctctacccccacttgtttgcagttctcttacctgtgcaatgaggggttgagctccagattctcttctaatgctaaattgtattttctataattacaacataaaattcaacttctcaagtggtagtaacattgttagaaatgcgttatatatgtgaaataattgt

SEQ ID NO: 122729 - DNA, 1522 bp, Homo sapiens
tctgtgattcttaaatgattcaaaatgtgtgatatagatacacaatttaaactgttttctcctcggtatagaaacacatcagtttccaaatttgacagccaggggattgtgaaatgagggtttgcaagatacagtgtcttcctgctttaaaatgttatatcattttgaaaaaaaaaaagaaaaacaaggttaactgcatcaaactttatttgctttatttttacactatgacattttctgttttgatttcatcttttttccatcacatgaatttcatgagtcagtgtgaacttctttcagtctctgcttaacaatattatctgggcatgctcccaggttttctttctgacattttaatgcatctttaccatcttcacttcatattactcaaatgacttatttttacacaatatggtaggccatactttattactattgcttctccaacctacttattttcttcctagatggataaggaaataaaactttcctataaaagttaataagactgcaggaaccaacagtgggagggaacttatgaaaaaaattaatttgttatgatttattaaaacaaagccaaaattccctcctgtaataaagataattacattttacacttcttaaatttgtaacccagggtattgagcaattaatttacctggctcttccttgcacactttaagcttttcaaaaaagccctcccctttggttacagtaagctctctttaccttgttacttataagcacttatttgttcattttacaagtaggagttgagcctttaactgctcagtttaactgctattactttggctttggaatcacagtcaaataaaagctctaatctcagatttgaagaggtatttttctcttctgtgtgtcctacaaccaaatgcgcagtgcctctgggattggttgactcacttttgggtcctacctcctgatcccccagcactccgcccccacaagcaccaccagaatgcaatccaagacctggatttcctctctttatcttcctaaaggctgtattttagaaacctctattcctttcttgctaaatgccatttactattgtttttaaaatcccagcccataattttttgtttgtttaaattcaacaggatccactcaattcacttgtgctaaaatcagaattgttgattgcagaaaaaaatatacagaagtaaatttgtatgaccttgaatttcagatatagtgaatacataaagagtgattgttgtctactggtctcccctcaacagtgatacaaaatgcatttgtttctgtacatgccagagaatatgaattttctgttgctaaatttgatcagaagcttaattgagagaaatgatgtttacggggggttggctgaacaaaggccatgacgtcaacctattcccttccaatactagctgttagaccagaagtctagccagatcttcagaagctgtactttggtaccttgttttgcatccttaacacccccccatatgcccacactgagggattttattaatacagt

SEQ ID NO: 122730 - DNA, 1009 bp, Homo sapiens
gcaaaccaaagagaaaagaacccccttcagcctataatcagaaaagagccatccaaagttatacatcttttcaaatgccttctgacttaactgtggaattaccatgtggaactagcaacagaacttacttgaaagctggtttctgacaatgtagagcagagttctctggagcagcgtacttaagggcagtccaagcaagatctctggagagaaggataaaatgtcaggccaagggtgaggccaaactgatgcaatctcagttttctctaaactaaattataccaccttacataaatctcaactggtgttctgaggaagtcaaaaggaagatttaccctgatgctgtgcctgctgccacaattacatatctgaaaccctaaaaactgctttttagcctgcttcccccttccacctaggaaaaactaggaacacctagtttttcctcctgagtagttaaatagccaatgttttctttgtgtgctatcttatcatgtggtttcataatcgttgtgtgactgtgtttgataaatagtcctttgccaaacctgttttgttgacgtttcgctctttaacatcaaaatagagtttaaaataccctattttaataattttggattgaaattagtgatttgagggtcacccagtctttcctttcttataatttatcttgaaatatgcctgtgtaactctaaatagaggggtggattaatactgctactagatagagtaattctggataagacctgatgaattttttggattttctgaccctggtccaactggttttcaggtgcttcaggatagttttataacagttgttaaatctagattgaatgatttgtgaaactttttcacaaatggttttgcaaataatttatatatgcaaaattagtatatgtctatattaatttcttgatccctgacaggtcttgaaaaccaaatgaaaaactgaattactaaagcaaattatactttctgtactatttgtactgtgtacaatttatgctat

SEQ ID NO: 122731 - DNA, 1062 bp, Homo sapiens
tgtgtttgttgagaatagttgggtgtgctgcagcatcctctccagcaaaggaagccactagcaaagatgttcctgtgttttctcaagtaaacaacctgcggtgaagtggttatgtctgtgtagatctgataacaactagtaaatttcttttcctgcattcaaaattctaatttagtgcactgtttcacagtggctttagctgtatagtcatatcatatgaggaactaacgtccccctctaagagtatagaagcaccaggtaatatagtaatcagacaatgccctggaatcctagaagaagtaattgagagattagaaagaaaacacagcattttcttttctaagtgtcaggttcatgttaacttgatatttttcttcttccacttaacctccttaatacaggcatcatgcctaatttcagaattataaaatcttttagtcgaaatatggaggtcgtgtgggctaccatgctaggtttggaatatctactgcctttgacaaatagaatgttttcagcctggacttgaacttttcgagctataacaatgtctcaaggaccctcaaggctgcttatttcttgcttgaaaaactcttgttagagggaagttgtttttaaatttttggttaaattttatttcctttcagcttattctatttattccttgttacttcgaatccatacagaataaatcaaatccatctttcatatattatcattgcatgtgtttaaagacaacatcatgaaccttttccaggatgagtatcgtacctttccatccctgaaccttttccaggatgagtatcataagtttctaaatctctccacctaagatggagttttcagattctttgccatcttgatatgacctgattaatgcaaatataagaatattaggccaggcaaggtggcttacacctgtaatcccagcactttggaaggctgaggtggaaggattgtttgaggccagaagctcaagaccagcctgggcaacatagtgagaccttgtgtctacaaaaaatttttttaaattaccaggcatggtggtgagtgcctgtagtccca

SEQ ID NO: 122732 - DNA, 1050 bp, Homo sapiens
ttttggttgcttttatccccctgctagggagcccccaaatactttactctcttttaactacttaagggatgaacaaaacaagcagtaaattattttattatttgccaggcaagaggacacacacatgttcattggtaatgctacttagagattgaagtttgtaccctggataggggaaatgaagtttgcagcctggatagaggaaatgagtccataaggccacaaatgattggttttaactagtcccatttgtcatggggcagtgaagagccttcacttagggcccttaagggcctagcataccaaggatgctcaaagatcacagttttatatcagctttggctggtgggctgttcagaattcacagccagttacagtgaaactcagcaccaagcttagctcctggggaagtgctgctacaaagtggatgttctttggcaggacacaggaggaaccgctggatctctcagccaccttgttattttctgcagcctcggctgctccagatttcaggtctgtgggacatcgccacactgttgtgtcacagcatggcatggtctccagacctcctttctcccctgccatgtgttctgcccaccaaatcgtttcagtttctctctggaacttcagaatagttttctttcttgcatattatgtaagttatttttcaacttccagaaatcatgcttaatgaaacatatcttcaaaataaaacttctgctccagtttgtgttgccgcagagtgaaactattggcactagaaatttgtgaatttgaagtcataaattgtaagtgatttgcatagtttaacctcattaaagagaaaatgagaaattaagaaaaaagtggaaaccaggacagataaatttgcttattatgaagatcaaacataaaacagttgagtaggcagacagctaaaactcttggaaataatggggctggccgggcttggtggctcacacctgtaatcccaggactatgggaggctgaggtaggtgcattacttgaagtcaggagtttgagaccagcctggcctcatggtgaaaccct

SEQ ID NO: 122733 - DNA, 1054 bp, Homo sapiens
ggcaaagtgttcaagcagtggggaattgttaggtcttggggtagttatctcctcacaaaataccttacattattctttaaattagataaatgttgagtgaagtttgatttctctcattgtatgtgtgtaaagcgactttgcttgagaaattagcctaaaagtctatgtaacatggtctgattcaaggtttatatcaatttatgaaatttgacatagataacttataattagcctgcttcatctttcccggattgaagtttgtttctcattcattcattcattcattcatacatgctccacctttaaggcatcttcagaaaagtacacgtgtgtcacctgtgtataaccagccatgccttggtccagtcccaggattaagtcacattcaaagaaataagtatatcagagaaaataattgaaaataaatatttacttcacctttcagaaaacatccaagggggtaataaatgccatatatttgataaaactttaaaatcctctttctccatctctctgaccttttacatgtctctcagctacttccccaaactctttctcctttttgaaacccttcccatatccagtcagtgtatctcctcatgtccttaccttttccccttctttccttttaggtttattttcttctatttcttctctcactatatttctttttccacttctccccctaattcatttcccacacctgtgttcataagctcagaaccaggaaaaggaaacaaacccagagttcccttaggaggcagcatgaggaaggaggctgagatcatccatatgctattatattttctcatcattgcacttattaaagaaattacgatatactatttaaaaatggaaagtccagaccagggaacatataaattggcatgaaaaatgggacagtaaattgcatgctgctcttagttgtatgactgatgcagaactacttcatggtcggtgttaaaaagggactccttcccatatttcttcctcttaatgagtagagcacacgccagtccctttgataacaaagcccttcctagtccttaactct

SEQ ID NO: 122734 - DNA, 1054 bp, Homo sapiens
gaaaaacgacagcagaatggagagaaaattatgacttcggattccagaccaatagtacctttggagaagtccacaggacatacacctacaaagccctcaggcagctctgtgtcagagaaattaaagaaactggactcctctagggagacatcccatggttctcccacagtgactaagctcagcaaggaaccttccgacacttcttctgcatttgaatctacagccaaagaaaactttctaggggaagatgatgattttgttgacttggaagaactttcttctcaaactggtggtggaatgcacaaaaaagacaccttgaaggagtgcctttctcttgacccagaggaacgaaagaaagctgagtcacaaataaacaattctgccgtggaaatgcaggtgcagtcagccctagcctttttgggaacagagaatgatgttgaactgaagggggcgctagatttagaaacctgtgagaagcaagatataatgccagaagtggacaagcagtctggttcgccagaaagccgagtagaaaacacactgaacatacatgaagatttagataaagttaaactcattgaatattacctgactaagaacaaagaagggccacaggtatctgaaaatttgcagaaaacagaattaagtgatggaaaaagtattgaaccagggggaatagacattacccttagtagttctctttcccaggcgggtgatcccataactgagggcaataaagagccagataagacctgggtgaaaaagggagagcccctcccggtaaaactgaactcttctacagaagcaaatgtgattaaagaggctctagactcctctttggaatctactctggacaacagctgtcaaggtgcacaaatggataataaatctgaagttcagttgtggctgttaaagagaattcaggtacccattgaaggtaagctgtttttctttaatgcctttatattctgttgcataattgcctttctacaatttgcacatgtaatacccacattagtacatttatttgaaaacagtattttctcaatagagt

SEQ ID NO: 122735 - DNA, 1050 bp, Homo sapiens
gacccgttgtagtattgtttatctttgttcctagctaaagcttcagatctacatttttttcctcaatgaatacaagtatccaataaatgaagactcaatgaggaaaaaatatttggtataaatatttcattgtgtttttcagttttacattccatctcttgatctttccctcaaattgaaagacagttttaacagtttcgcagtgcctgtggacttttactttatttgttggctcttaattttgagtatggaagtagagataaccttgataatgggaaattttcaaattagtaaaatggatttgccaagcagggaaaagatggtttatgtactgaagtccacactagcacctgccaagaaagtggacatggtgttaacatctgtcacaaacgtgtttttcagggtggatcatttgtacacattctttgttcagtggtctcccgatgtctatggaaaagatgccaaagagcaaggctttgtggtggtggagaaggaagaactgaacatgattgacaacttcttcagtgagccaacaaccaagagctgggaggtgagcacttgggcagggttagaccgtcgtagttcctaaggtacagtaagcagtctcgcattcagattccatgtaacaggctggtaagaaactagagtccctgtgcacctatgaaattacagaggaaaataactttattcctccgtttgaaaaaaaacaccaccaccagcaccaccgctatgtacacaggcacacagttcattctgaccacactagatgaatctacttatattcttactcatagctccatgccttagttcagagctcagcaaatttttttttgtaaagggcaagataataaatatatttggctttgtaggccatacagttcctgttgcaggtactcatagctgccattatagaacagaagcaaccatagtatgtaaatgaatgagcatgactgtgtttcatttcacatagttattatgtgtcacaaaatattgttattaatttttattgaatcccttaaaaaatatgaaatctttcttagcttaagtgcc

SEQ ID NO: 122736 - DNA, 1013 bp, Homo sapiens
aagggcatgtgtctagtttatgcctctttatccagcttgatctgtgtcttcaaatatatagcaggatagggactccatagtcatgtccctgaatgggaagacacctcctggccagtatccttgccaaggtaaacactgtcaaatgatcattttcttggtttagaatagcaaatatttgccagaataaggaggggcactatgtgagtgtatgatactgagtttgaataacaggcatttgttttgtgccacatgttcgtgagcaatttgtgggtgaaccttctgtttacatctcttcctttggctttgtagctggcccgacgccttcctgcaagggtgcaagggtatccatggagactggcctatagcacgttagagcacgggaccagcttaaagacgctctaccggaaatcggcatcactagacagtcctgtcctattggtcatcaaagatatggataatcaggtgaggcctgtccctctcataaagaatattttttaataatttttcaaaattcccaacagtagagagactagtaccatatacttccatcacccagattccacagttaacaggattttgccttctgtgtcttttatctttgttttttctctgctgaaatattttgaagtaaatcccaatcattatggcatttcacccctacatatttcaggatcatctccaaaatgcaaatggatcatacttccaaatacagtcacattctaaggagcttttttctatcaccatgaagtggaaaagtataatgatatcccacagcctaaaaactggaaagttggggtggagtgagatctggatttggaaacagttgcagaaataagttccagtgccataccagtgcctttcccaggtagccaaagtagtgcccacaaaccttgcctgcattttggatgtgatggagagtcagtcaaggccatagtgtgttgtgcctgaggggcccaattgttaagaaaccacagagaatacactgtaccgttcttgattgtacttttgcctgt

SEQ ID NO: 122737 - DNA, 1034 bp, Homo sapiens
tatatatacacatatatatatatatatatatacacatatatatatatacacacatatatatatatatacatacatatatatatacacatatatatatatatatatcacacatatatatatatatatatcacacacacataaccgtataatacaaaacgtaagatacagatgcgtgtataatagtgctcccaaaggttgtgtatctttttcaaattgaatctaagatgacttgatgtacaagagctcactcattaaagggtaaagattaatctttttaaaaagaataactacataacataattcgatggtttacatcatacattcatatactcattcaaatatattcattgcaaacatttagaaactgttgggtttatataaagtgtaattcaggtacaaaagagaaaaatttccatttggaaaaattggagttaccagcatcatgaggggttagtctggcaaacctttccagcaaaagctgtagaagattcttcactccataaacctccatatggtgttgtctaattgtatactgcagatttaaaactaagcaaaggctgaaccatgcattcttaatggggcagatgacactcccaaaggggtgaaaattggttcttggtggtggtggggcaatatcttactttttcatgtatgaggcacagatatacataaacagagagtgtagctgtggtattaaaatctcatggagatgggattagaagaaaaaaaagtcttaaaaggctcattagataaaaaataatgaaaaagtaattgagtaacactggactagaatttaccttgcttggaactatactgaggaaataactcagtgccaatttaacttgaacgttgtcccctgttggaagatggttagcatccccgatctcggcgcaccaaattttagcagtatgcgtgatcaaaagggcgtctatgtatttccacctctggttgagaaacactgcttcagagccacactccatctgctgggtccacgctggcagctttttcccaacaaaaaatagatgtcttgccat

SEQ ID NO: 122738 - DNA, 1353 bp, Homo sapiens
cccctcggcctgcttaaacttttcattcttttgcccgtgtatcaagtaccggagttaggcaggtgaatatgaccggtcatctcactcccggagctcttcgtctagcggagaatagagacagctaacaaatgctcaggctggtgtttgaagtattggaatctgcggatcaagctcagtggaggggatggtggtggggattagatgatggagaagttgagaagagtgttttatttattcaagaaacgttttcagaatgcatgtagtcgaagatcggtacgctgggcatgtaacgatgatgtaagcaatctctgccctctaggagcttactgtttagagtaagggctgagcagacacataggcgtagaatgacaaaagagcgtcggtaagtgcagtgatagatgcacatggaaatatgagagcacgtggaagggaaatctaatctacctgaggggttggggatgttggcctttaagagggcttccagaggagatgacacttgaaataaaggatgaataggagttagagggccaaggagataaatcagtaaattagaattacaaggtgttcattattactggatcactagttatgtggcagagtggtaagaagagagcaagggaagtagatcgaggccagaaaatgaaaaccttgagtaccctggagcttggaagggggatttattgaaaagccttaagtaaaaaagtgaccacaaaattaaatcagtttgacaacactatggaggatggatttgaaaagaataagacttgagccagagactaggagtctgtgggaatagtcttgttaatagattaagaaggtctgacctagggcaaggagtaagaggatgggatagactgggaaaatatttaggccatacagtcattaaggctggattgattgaatatgtgggaaaggggcaccagtcaggtatgactcctggggtgtatataggtaggagtgtctccatttaaaatagagaacataggcagatgtaagatttaaattttgtttacactgaatttgatgtggttgtgtaacatcaacctgagatgaccaagaggcggtggatatatgaatatgcatagagtatggcagagtgatctggactagtgataaatatttgggagtcttcttcatatgaaaactaggagcggggaagaaattactcaaaggataaggtcaaaagagtagcgggccaagtatagatgcttggaagcattgatattaagggaaagtcggaggaggccatgaagaagatgggcaagtgccagaaggatgtgagaccgcagaaatcagaagggtaaagttttaggaagcagggacaaatggataaatgtcgaatgcagttgcttt

SEQ ID NO: 122739 - DNA, 1055 bp, Homo sapiens
ttgtaggagagtccctgtttttccacagtctcaccagcagagtatatttcaggcttttgaagttttgcttgttctgttgggtgaaaaatgatatctcaatgtagtgttaatttgtatgtctatggttacgaatgaagtatcacaattttttatattttaagggccattatgactttctttgatttgtctttttttgtcttttgcccattttttgatagcatttttggtctctttccctgatttttcaaggtcctttgtaagcttgagatacaacctcctcacactccccttatttttctgtgatgtatgctgcagtattttcccttagcttgtcatttatcttttgactttgctactaattgatttttgccatgcaaaagttttccccacactcaagttatagaggaattcatttgtgttttcttctagtgcttttgtagttttacattttttctttttagatctctggttcatttggagattattctccagtatgatgtgaagaatggatttaatttacctttttccaaatgctaaagcttttattcttaatcttgttcttggactttaaaaactttttttgtcaattgagaataattcttttagatatatacatgtagaaaatgattaatatatatacatacacatagactagaccacagagttaaaaaatatggttgccagtatgggtaatatttttttgttgagtagatgaggctagattttgaaattatcttcacagctgtcaatatatggaccatttatagtgtgttgaggggcaaggagacctgcttctgtttgctttagggcagctcctcacagtgggtagtatatttggaacgtctgactgttcatatagtacaattaatagaaaatgagaggaggatctttgcaaaggtgctgctgaaatatattttcgtaatttgtgtttgtagtttaagtatagctttaggacatcagtcaatttttggtgcttttgttttgaaacataataaccaataattgtgaatagacacaggtcttaagcacagtttgtcctctcttgggccttttgc

SEQ ID NO: 122740 - DNA, 1086 bp, Homo sapiens
aatttgtatttacagtttaaaacaggagataattacttgattggttacaggagtaactatattaaaatagttaattcttacaaaaattaaaatatgtcctaaccttttaatttctgtaagaactaatgtctcacatagtaattatgccctatttgtttgaaactctgacttcagtgggaattgagcctagtcatcagaatttattctgtttattgccagctctttgtataaacagccttatatgctcatttttaagaaaggagcaaaatgtttttgtgtagagctctaaaaataagatgaaaatgtctaaatatacattattttgaccaaaaaaaagataaaatagtgctgtttaaaataatgatgccagggtatacattaatttctctactttgttaccagtttagtgactatagcttaggggtttgttttttcagtcctgaggcttactaaatatgttacgaccaatgtcattccaggatactctgcctgcagctagtttctaagactggatgaagttaaataggaacaaacaggagtttgggacttactggttaacaggtcaaaattgtgtgatttttcaggtggcctgctgatagcatgtgctcattttggtgcatatgtgtatgggacagacatagactacaacacagttcatggcttgggtgagtagagattatagacagtattatagtcattgctgtggtgccaaatgtacctttaaacatacagttgaccctggaagaacacaagtttgaattgcacaggtccacttatactcagatttatttccatctctgccctcttgaaacatcaaggccaatccctccacttcctcttcctcctcagcctgctcaacatgaaggtgatgaggatgaagacctttatgatgatccacttccacttcatgaatagtaaatctatttttactgaataaagtaagtataacagtaggctgttagtagttaagttctgggggagtcaaaagttatatgcatatttttgactgtgtgaggagtgggcaccccaaccccatgttgctcaagggtcaactgtagttttatatggcattattttaatcttcaa

SEQ ID NO: 122741 - DNA, 1176 bp, Homo sapiens
gttatatccttttatattaacttgtcacccgtttttcccttcagcttatttttttgaggcatatatttagtatttgtttttgtattgactataattggttattataccaactggagctcacatgtcatttgcaattatggtgtcaaattttgaacagagtttcagatatcacacatttctctatgtgtaagcatttgtgtttttgtagtgcctgttttcactggcatctcctttctagcattacaagaaatttggggttctgtggaaccactgggcctgtgaacctactgagcttcaggaatgtgcatgaaaatttattttcccatgcctcatgaggtcgtgagttttttaggcagcctatctaagaatagatctgccttttctatagtatttgacagtaaatctgtaaaaagtggcaaagttcagcccttctatctcagctctctttagttctttactaacttagattttgtcaaatgtaatgtaacaaaagaaaaattatcaaggccttatggtttcagtgtgaatatactttatgaaaatttagttttttttaaattaacagtttgctttattatttgctctcccactctgtgtttacttatataaaatacattttttttttccgatcaacttgagagtaagtggtatacattgtggccttttactcctatacttcagtgtgtatttactaagaataaagatagtctcttagcaaaaatacagttatcaagttcagtaaattgataaaatactttcatctacagtttgccattcagttttgtcaactgactcagtaatagcttttatggcatatattctccctctaggacaggatctactctagagtcaggtattgcatttcgtaatgatatcttttaggcctcctttaatttgtaacacttccacagcttttctcaatgacttttatgacattgacatattttaagaagacagttgctcctctcccaagtctttatgttgtacattttcagttggatttgtgcattggtgatgttgtgttcttctcagggtgtcacatttgaaggcagcatggctgtttgcccttgatccatgatttggtgacttttgactatctgtgttacctttgttttctgtctagctccatatggtatcagagaatctacaagaagaacaggttcacagaaggagata

SEQ ID NO: 122742 - DNA, 1033 bp, Homo sapiens
tttatagtggtatggagtcatggattcctatattattcattgggttgtaatttattagtagcagtattttgttgctcaaattgtcccagatttgaccagtgggagtttgtttgagctggctcttctgtccttttgaaatatcctcagtagttttttatgtaagtccttcctttttagcatatctgactgttcactgttttgcagtttattatttaattataatcaaaatcatatgtggttgagaatttattttggagttcttttattcctttataaaaagtaatattggaggttctttaaactgaatgtatttctaaagactttaaaaagtggccactggatatttcttcaatgacttctctattttagtaattttagatgagggaagatttccaaatacatataaccaaagtgatgttttagaaagggaaaagggagacatgttttagggatttttttttttttgtcttagatgttttatcaatggatagatttcttctagttacgtgtctaacacatgtgggaagacaatggtggcatttatttccctgagtttttggcccctggagagggttattttcagatcccctgatgttcattattagacctcaattgtgtcttctctctttaagcctaaagcgatcttattaattattaatagtgaactaaatttgtcttgagtttatgctagaaacatgaactgttttcatattcaaggtctttactcttttgaaaattctttactgttttgaaaataacacagtatcaagatgaatttgagtctaaagtcatctgtaaaagtttgaaataatattcatttgaattaaacagtttagaatagtttaactatgttatattgaaaatgtagctttatattggaccgggaataaaaaggaattcaatttacaattgtaccttagtgtagcttaattttaagtcttttgtatttttggtgtggtgaatgtaggctattagttctattaatgaattaatttactctcagccaaaccctgttatatgattcaagttacac

SEQ ID NO: 122743 - DNA, 1015 bp, Homo sapiens
agtgagtcccctcccttgctgttctttcacattctgttccatagctgtttctcccacctctgttacctatttctttggccaagattgatgctaacaacctgtcagatgccagattctgaactcctgctattgactcctgctttctagacattgtcatcatcttcatccatgtaggacatgtgctgtacagtagcagtctccaccactcattggcatattttcattttgtttcctggttcatatgaccagaagactgatgtaatctgtagtgtttattttagttgtagtttatttgaataattttacaaataactttagttctgtatttacaaacgtaatagagatgtttttaaattagacgtttaaattttaacaagacgttattaaaattttacgggcacttcattttagaggggaaagtatatgctgtagtggattatacacttcgggaatttataaaaatctacagatgaatcagtccttcatgaatgtcaagggatgttgttgagtgtatttttgtctactcttgtggaattctgtagggtggaatcatcttgtacttttgtggtttaaatgtttggcattcttcaacaaaatgtacttacaatatttctctctctcttattctacaggtaaaaaatttaactgcatttttgggatatgataaaattaagctactttgcttatagatagtttatggatcatgtggacagttagcatatgtggggaaaaagagcatgtagtggaagaacatcccacactacactggacgatccccatgattctttgtggcccacacatgtgagtgttcctaacagtcagctgttctttcttcagatacactgaagagatggtgccttggcacccttgcctggaactcgttagcaactgcgagcagaagctttccagtcacacatcaaggcgcttgatcacaatggaaaaggtgaagaaatttgaggtaaattgcttcagtatttttgggataaattctgaaagaatcaaaagtagttgtttc

SEQ ID NO: 122744 - DNA, 2009 bp, Homo sapiens
tggtgacagcatcactggttttcacttatcatagaataaatttcataagccatttgtattcaagcgtttgcaatgaagctgctgttttgtataaactactgtcactttgagactataaatgacttaaggttaatactagggaggtagaagaaatcattatatcattatcaggaactgtcagtgagtaaaaggacagcttaaacctgacctacaattaaaatagaagccatttggttttctgctgaatgactatagagctctgcaacttcatcctctagaaagtggaaatatcttatttttaaagaatagtgattttataaattgatgaccattgttagatattttcactgaagtttcaggaattctattaaattaactcttggcaatgaagggacaccaggagagaattttgacttgatcattatattgatagggagcggtgcaggagatgagactttacagtgaagcgagtaggagccagtttgtagtagaggatgggcatggtggttggggcaaggaggttgaggaaattcatatctgataactgctgtttgctctgtaaagaaggatgcaagtttttttgtttttgtttttgctgagtaaataagcagatactaaatgtaagaattgaggacaggtgaacttttagaaaaggtactatgagaaataggaaaaaaagccatttgcttaacaatttttacattcatatacttttcctatttttgtatactttatttctcttacttaattacctgttccttgagaggaaggccatagttttcatcacgcaacatgtgtttatgggaccattcgtgtcaggtgttggggctgaacagactaaggcttcttatccttagaaaacttgcacatcaggagaaatggccactcaaaccatattccaacatagcatcttgtgttctgtagtgatctgtgagaggtgttgtgtgaacataggaaagcacctacctaaggagatggtgcttgaggcaaaagagatggggaatttggttggaaagccaaaaatttaagcaagatacagaagcatgagaggcattgtggtatatgtggggaaccctggacttcagtgtagctggaaatactgagcagtgggggaggatcagctggagatgacctggaagactaaagagagggaagcccagtgttgagggaccttacctactgaacagtttcaagtttatcctgttggtaaaagggcaagcccatagggatgtttggagagtggcagaagctctgtgttctgtgaaggtcctcctagcttcactgtgttagtgaatttgagctgtggaaagttagctgtgatactactgagggggctcctggaatagtcaggcaaagatggtgaggctataaaccaaggaagctagaatagagattgtaggggacttgttggaattgagaattttgcggggaggtagatatggcaggactcggtgactaattggataattggggtgagggagatgagctaagggtgatgtttcagaaatctggcttgggacaactgagcggatgattgttttcttgtatatgtttttattccccatccctactcccaggaccatggggcagtactgctttcttaggctgctgtaataatcttctactgatttctctgcttctgcagtttctccctccattccatgccctacatggtggccagagtatctttcagaatataaatagataaggaaactcctctgcttaaatctcatcaatggctttctgcggaatttagaataaaattcagaatcctttacataacctttatgtcagcctgatctacttctggcctgtccagtctcatcttgtgccaccttcccttttgcttaccagttgttatccaccctggccgtagtctttcaggtcccagaatggatttacctccttttagtctcagagtcttctcacacgcactgtgtttcctcttcctagaatgttttcttcccctcttttcatatgagtaaatttaattcatcctttaggtctca

SEQ ID NO: 122745 - DNA, 1130 bp, Homo sapiens
caccttccctttatttaagaaggaggtgataaaagagaatagcaaatactgggagaaggcagtaattaggaggatcgttttatctaagtggaattctcaatgaagaatctttcgtatgttggaagtctgagcagtttatgatggtcagtttgagaaactttttttatatatgtattctcacagtataatccagagggtcatgagttgtgtttaaagcagcagtttcaaatgtgactacagaacatacagcttgatttattttcttgagaatgaattccccattagattaaaatttattataagtggctgaaatcgctttagcatctttttgggttctttttaatgctgtatttttgatatatagttgtaaacatagattgacttgaataaggtcacgtttatatacctttctttcttgttctagagagtagtttggaattttaggtcggacactgagacagtgttacacgttagaatcgctgaggtgaatatgtagttgtctatttctccatcattatttaaaaatgaaatggtgtgaataaatgctaacattccctgaggaaaaggccagcctggtcatgttgggactgtgggactctcgatgtttacagcaatccgggactcacaaacagctatcaaaacggtgctcctggcagatgcatggtctgctgtgctgtaagctatttcagttcacatcaggaagtactctaaagaaggattgctatgctccagccagcagagggtagtgtacacatgaaagttaactaccaatttgtaagccttcctttggtttctttggcaagtgtgttaaaattcctcgagtggtttatgtttagaattagcagtactgataggacaggaaattggctgggtgggacagtggttaaaggagtcctgcctaaaactttagatctgaaatatgtgctaccataatgttgctgttcagtgaggaatgtcctctaaatgtcaaactctattttgaatgacccactaatccaccatgtgggaaattaactctttagccattgttttgatgtaatttctactaaaaaaaaaagagaatcacaatgggaaaaacatgagttttgaagtctgatttaggctacaattctggcaatgctacttaccag

SEQ ID NO: 122746 - DNA, 1061 bp, Homo sapiens
actttggcagaactcgggttttatgatacgtaggtgatatcacaatgaatagtggtagacagatttagaaatgttagcgaaaccaaaagtcaaacactgggatgagcttgagttaatggggagatcaaagattgtgtttgctgaggatactcttctccttttaagtaagcactttggcctttgagatactgtgctgaaaaaaaaacaacttgcagatattcctggttgagacgcgcagggaatgtgaatagagaagagtcatgaaaaggtgatgaaaaatatgtagagttgaatatcatcgtctcagatgtaagccctggcaaactaaaccaaagataggatgaaagagaggtagagagaaaagagaaaacaaaaaatgagtttgccatttttttttagcattaaggtaataaaagttctgaatgctgcatagagtatagtatatttcgtatggtctgggtatattttaaatgtgtattgttcatagatatgtggtatttatatgtatgattatatgtgatatgtgttggaccatagacatactgagtgtttcgtgagaaatattttatgaactatggtctttccacttaagtgaaaatagtagccaaagtccttggaatgtcttactcgaagcaggacttgtgctgctagataatagactggcgcctgccagatctctggctgtgtaagggatttggagcttttgggttttccagagtttctgttataaatgatagatgttgtgttttgcaatcaggagtcatttggtcttctagaaaggggacattttagcacagaacccaaacatacacttcacactgattctgctctactacctgggaaataagaaaatagcattttctccccaggagttgcatttctaaggttaatgatctttcccaccttctccagtagcatgtatgtctttgccaccgtgtccccatagcactgaatagaacacatggtcggttaagggcttattttgcctttattctgagaggtctaaactattacagaaaagaatgtcttaagtagtgagtgttttctcaataatcgttagc

SEQ ID NO: 122747 - DNA, 1177 bp, Homo sapiens
gcaggaatttggaactgtaatatacttgggtgccataaaatttcagtagctacctatttctctttgatgaatcaggaaatctgggcatgtttaatttttgataatctgggtttttggtgtgattttaaaaatatatgtggcaaaaacagtttctgaataaacaaatgtgccaacattattttggctaaacctggattttttttattaatgctaggtatgatggaaaaatgaaggtactcattttatacaggcaaaaatatttttgcaaaaatgaaaaaatattttgaggattgttatattccagatatatttttatatttttagctaccattttgatactgaaatctggataaaaaattaggcttcatgttttccatttaagtctccatacctgtcctcaaaaatcacattaatccaggtgtaattgaatatgaatttatagaagcacatgggaaatgaaattttatgtctaattagatatttttcacagttggatgagaagccagtgtttcagtgtttcctgccaggaacctcaattttctaagccaaaatatgtttgacattaacccaggttgctattaccattagacgtcagtctgagcagtagtccttacttgtctgtgaagtctacaagtatggaaatctcttgtttagcctgtatcttcatctactatgttcacttaaagtttccacgaattgtttatttcattaactgaatatagaaatacccccagacaattttgtgtgtctgtatgacctcacacaaatgcattattttgttggttcacatgtttttcttgagtagaagcttccttgtttagtactttttatccataggcacagatgacttcagtgtgtgctgaactgggaatcagaagaaagttatagccttgactctgttacttggaaccactctctttgccctgaggcaaaaaaaaaaaaaaaagaaaaaaagaaatttgtcctctgtacagaggtcttttgtgaggctttaatgaggtaaatgaaaacactttggatatccaagcatgataaggatgtaaagtgatggtatatttctaattcaagtagtgaaggaagataaatatgcactagagagtgagattttgcttaagattttgcttaaggtaaacaactgctttggtataagctaactaaagaaataatttttacattt

SEQ ID NO: 122748 - DNA, 1062 bp, Homo sapiens
tactttactaaaacattgagatcttctctaaaacagagtggtttgagaacatagtgtctagagtgtaaagaattataatggaatggtaaacatactgtgattctatctggtcatagaatcatagagaccagcacattcctgtctatcctttggggtgaaaaactagggaacctgacccctttcccttaaaagagatctgccttacgatgttcatatgtttcactgtgtgggataagcaagttgacatttagacataactgaggccaacctggaatttggctcttatcccttcctttataagcccttgtagacagggctctttgggggatggaggtttaattgtaatggcagtcttttaagcctgggtcatggaacaaaatagggcttaatagatgaatgttaagataagtcagcttcccttatgtaactgctagccctatttcttgtgatattaagatgtgcttagtatatttttgttttaaaatttggaagttcttactaagataatcatgttgcagtcatgccaaactgaattgcctaaaaaggaacctgttttgacctctatgactttaaaaatctctcctttaatcaagcttccctggctctctcctgaggatttatcggaagaactctattttggctaacatgcagcagtgaagattagctgggcttatgtgtgaagttagtcaaattaaaagaaaaggaaaaaggctgaggagaaaattaaaattgaaaatgtaaatggtacttatgatattggagttgtgctttgatggactgccaaagtaatgtgttgtaagttggtgaagtgggtcaatatgggctgagttgttattgatgagttttaaaaatctttaagagtcccttaaaatttgtgtataaatcttggagtatctcaccacaagttggagtgacttctgcacaaagagccaaattgcctttgcatttttccatttttcttttttctttttttattttattttattattattatactttaagttttagggtacatgtgcataatgtgcaggttagttacatatgtatacatgtgccatgctg

SEQ ID NO: 122749 - DNA, 1167 bp, Homo sapiens
gaagctctttcatgatcctaagtgggttcctaaggaaacaagaagggcaggactggtgctgtgtgatgaatcagctttctggggaagacctgacccatttctgctaggggtaaatggcccagaagacttgctcctatggcgggggatgtcacctgatgcattggaacctaaggctagaccttgaagtgtaccaagttcatctctgtgtccttttttttttgcctctcaacaaggaattagacatagtcctatcctcaatgagctcatggtctggaggatggcggtggtatgaaacaaagaggtaagtagtcagttaaaatagtgtgatccgtctttccacagggcaagcccagtgtgagtctaagaggagcacctagccacttctaacagtggtagtgtattaaccatgtgtttctgatgttttgacatctggggctttgctgaccctggagagaccagaaccagccaattcctagagataaaggtttcaccttccttcaagtgtgtcttttatagaaactaaacagtccagagtccactcactctatttcctcttttatacagcttttatgctttgggtcactatttctcagacctaatcacttttgggccaggtaccaggtaacttagggacaacccctataccccagagcctgctgagattattcaaactagctaatcctatgcctgcttatcctgccttacctgttccttcctctggaaaccacaataaaggctcttgtccacattttcccctcccctctgcctcctgaacgaccctggtccttccccacatggccctgcatggcgtggtgtgtcctctcgagagcttcgaggaacaaactgtcttttcaattaaaattgtcttgtgatctgttggtctcaccatacctgaataataataaaacctacatttaaaaacacgtgagagaggactggatcaaggaagaagcctgagagatgacatctaagttaacccctaaagaagtggaagttgcgtgatcatgtcagggggtgagggcgggaagggggattccaggcagagagaatagcactggaaaagcatatttgggtaacagttcaactagttggtgtgccaggagctaaatgcattagccaaagaggagaaatgaagctggacaggtcatgagagccagatcctaaagg

SEQ ID NO: 122750 - DNA, 1028 bp, Homo sapiens
cctggattgaggctgtgtaagggtaagtgaggcaggagctattagatcacatttcctgactgacttgcattctgaactggaaagacagtctcacaggaaaaaattaatttgcctccaagataaaaaaaaaagtcaccacgaaagattagagacaattttgaaactgtatttaataaccatgacaatttatggcaagataaaaacgcccaaaccataaagtgcaaataccaggtcagacacagggtttctgtaggccaaaaaaaatcatgtaagttaggcccagattcattgaaaaggaaggagacagctcttaggctgcagatttatcctaaggtcaatgtttactttaaaaatctgtgataatttgttccacccagaggtggtttttgttttatgttccacatcttaatcatttgtttagcagccttgttttatgtttgtttagttagaaccttctggtgtggagcaaggatcattaaaaagtataattagctgtaattacttaatactagaacagaaactgcttttactttagatgtgtgagctgatcccccaggcagcgttggtgatcctgctttgagtctaggagcatttccattcacagctgagtccttatcagcagaagtgtatagagccaccggataatatctcactcacaaaacgtgaaccatttgcctatgaaaatgagagctaaaaaaccagagaactgaatatgaaactttttcttttattgttaggtatatagttcaacaagtctacctactaaaaagggaatatgttagctagagtagtgtaaaggagagaagataattggtcaaataatcttgttcttctatcacgtgtccactgctggagaactcctgccacgatgacgaggcagggctggagtgggagctgagtcctgcaggctgagaggcaaccacagagagccacgccttcaggcagcatgtaggataccctcttcgtgtttcactcactggtagtgacctgcttttggtacatctggagatttcaaacttcaaaacctt

SEQ ID NO: 122751 - DNA, 1031 bp, Homo sapiens
aacgacatttgtctccagatttcttttcatattgcatatttcttttcatatttcttttcatatctgtctccagatatcttttcatattgatttcttttcatattctggtctttatagaccagattacagaacctattccatcaatattaactattagaatttgctgtgaaatcaacaaggagaaatatagcatttaataatatgatcctttagggtgaataaacttccagccagaagaccctcagttgccgatctttaaaatatcatttttctatctttctcactaatgtattcagcaccacttcctacaaatatgttgtgtagttttatgtaactattggtagttatctggtgagtctataaatgatcttctcaattaattccaaaggagtttgattgcctctgtagttgacctttcttatttctccatagttgacctttattaggttatttcattcatttactagcttatttcattcatttattcattcaacatagttttattatattcttactttatggctatgcactgtactagggcctaaggattcacaactgaatggggtactgtctctctattgtgaaggtacaccagagtccagtgaaaggttgagatgtttaaacagataatcacaacatcgtagaataagggagattatagatgtgtgaactagtttaaagggaacacagaagaggacactgcaaacttgaacattgcttatacaaaagagaatttgggtcacctgtactttgcaaagaaacatccattatgccaaaagaattggccatcactaaaagctataaaacctgtttctgccattctaatcaagtagttaatgtgaaaaaattcttgaagacatgggttatttaaagagaacttcaaacttttgtaaatttgtaggaggttttgattaaaacttagtttaaggaatgaaagctggctagtgaaaaaggccttttggcatttgttaccaattaatttaaaacatcttagattttaaaagttggatttggaagtcaaatatttcatc

SEQ ID NO: 122752 - DNA, 1636 bp, Homo sapiens
ttgacggctgttgaagcatcggaacaattaagagatctcagaatatcccttgagcctccaaaccctctgcatcttaaaagctgaggctgttgctttgttctgattgttgggtggggagttctcttcctaccctccatcccgtctgaaggagtgtgggtcttccattgttgtcgctatttattttgctaaggcttctaaagaatgtaaaattgttttaagagtggagacggaaccgtcctctccacaggtaaaacctacaggactgtaagtttacacacacatcctggcaactagaatcttttctcgttaatcatattggtatatgttttaatttattttctctaagtgccattttagtgagcacttatttctcaagttttgaacattttgtttaatatttttgtaatatcgaaacagtgtagaactgaggagagaagaaagcccaaagatgatagggtacgctttgttctttgtatgattggcatttcaggtagtgggcacatcccccccacctcgtgtgtgtacttttcaaatgggatgtgaacgtataatattggcattcaatccagtatataattatagaatttggaagacttaggacattttagtcagtgaatctatatttagacttttcaaagacatggcacgtaaggacacgtggagaaaatgtcccacacagataacaggatttgtgattttggctttgctgttttatgattagcaaatattgtttgtatagagtgtctgggtgccctaaaaacacatgaaaataggtcaactaaatctcgttttaaagagaaaaccggaagagtgaacaccactctaaaaatagattttggatgtgtttgttttggtgccttgtatatcttaaagtggaggatgttgttcagcccaatctttcatttagaatttatgtctcaaatgagccagtgtatcatgtgggcagactggaaatacatttaaatattttttttcttcgctggttgttcagaacttggtagaattataattatcaggaaaactctctccaaatagctggtcttttagacaagagaagaaaaaagaaataacttcttttaaaaggagatgtcaacttacaaagtgttttgtttcagtctccaccaacctaacttgtcagaggaaaggaacagacttttttttttaaaggatccaaaacgatattttgagtcaaaagaagaaaaggatattaaatcttttgttttcacaatatcgatctttttaaagaatattattttatatgttaaccatatactaccaggaaacatctaacagcactgacagttgggaattcgaatgcgtatttttctcccgtgttagtaatagaaggtactgagccttttccattctcttggttgccttgtgcctgaggaatctgaatttgtgaaacaacatctttgtggatatagaaactaatttatgtaacacttggctacaaccacctgtgcttacttacggactatctttagttttcatggcgtgttaccttttgggttaattcaaatccaaaatgttgttaacggactgctaattaaagcatttagaacttagaattacagaattatagagtaggatgagataacaaaagactgggggttatgacttgaccaaggtcaca

SEQ ID NO: 122753 - DNA, 1248 bp, Homo sapiens
ttgaagataaaaaagactagagactaattatttacagtttagatctttaaaaccttttaatgttgtcctaaggagctttgtctttattgtgtaggctgaggacccaatattgtgcttcacatatggaagaaacctggtccattttgccttttaaatatatcagtcagtcctagctacttgggaggctgagatgggaggatcgcttgagccaagcagtttgaggttttagtgagctatgatcatgccacagcattctagcctgggaaacagactgtagagtgagtgtatgtgtgtgtgtgtgagagagtgagagagagagaatctcactcaaaggcttaataaatgagggtgatactgacacaagataatcaggctgaacaatagtccaggtgagagttatgtaggtttaaactagggcactagcaatgggtagagagtacaggatagattccaaagggattaggaataaaagttgacagaatttatggtgtggttggttggggtgggggagcagggggctgtgtggtgagagaaaggactttctctttttctccatgaacacaaagtagttaagacatgaaacctgagatgtcatattgtaagaattatgcagaaatgggggtttgtaaaatgtgtgtatatgagataaagatatgagggggccaagggttctgttaagaagtaaaaaagattgggttccagaatgggcaggaaaggaaatgagatcaggaactggataaaggaaaggagatggtcaagagatggtaggtccccatgaaattgaagagcaggtgtgggaatgagtaggctggaagaaccagagcttgtgatctgagagtcggattaagatttcagagaggcagcagtttaggtgacaactagctttaaatgtgattataatatttggttgctggagagtagattaatttcttcaaatttaggatttaaggaactgaaaattgaggatggtgtttctcagattgtatttgaaggactaaagcatgagtaccacctggggtgagattcctaggtttaaacctatgtctactggcctagaatttctaaggaaaggggctgagaatatgtatttctaacaagcaatttcagtgattctgatgaatagaagttgggacaagtttaagaacctgtgcaataggtgttggatggttcattttcaaggctatttaaataggctgatagtcatgtcaggagttaggatgaagaggatgatcagtagtgaaaagatga

SEQ ID NO: 122754 - DNA, 1040 bp, Homo sapiens
attaggcaataactctccactttccttccttcactctctggtaacttctgataccttctgcttctatgaatttgcctattcttgatatttcatgtaagtggaatcatacttttctgtatgtggcttattagtatgttttcaaggttcatctatattgtagcacatatttctttttattactgaataatgtactgttgtatttatagaccacattttgtttatccattcatctgttggtagatacttgaattgtgtccaccttttgcctaatatttccgcagtgaatattggcatacaagtgtctgagaacctcttcaattctattgctatatccctgggagtggcattgctgtgttagctttttgaggaagcaacaaattattattcacagcagctacacccttttaccttcctaccagcagttttcaaaggtcctatttttctacatcctcaccaacacttattatttttccctttaaaaaagttgtagcctccttatagatgtatcattgtgattttgatttacatttccctaattactaataatgttaaggatctttttgtgtgtttattggccatttgtgtatcttctttaagttctttactcattttttgctcactttttaattggtttgtctttgttgttgagctgcagttctttacatattctggatattaaacctttatcagatacatgatttgccaagatactctcccattctgcagtttgtctttttattttcttaacagtgtcttttgatgcacaaaaattttaaacttatataaagcccaatttatttcctatgtttctcatgcttttgatgtcatatctaggaatccattgcaaatctaaggccatgaagatttgctcctgtgttttctattaagagttttatggttttatttcttatatttaggttattgattcattctgagttaacttttatatatagtatacggtagaggtccagcttaattattttgcatgtggaaatccagttgtcccaacaacattagttagaggtgcctgttttccccca

SEQ ID NO: 122755 - DNA, 1050 bp, Homo sapiens
tacaagtccttcacctcctgggttaagttgattcctggctattttattcccttagttactttatgaatgaactgttttcttgatttcttttttggattgttgtctcctggtgtatcagaacacaactgatttttttgtgtgtcaaacttgtaacctgcaactttgctgaatttgtttattagctttcttggggattctatgagatcttctatctagagagaatagacatagttttacttcctccttacccgtctgtatgcctttatctcttttccctaatttgctctgctagaacttacagtcatgttgaatagcagtggtaaaagcatgcatcttgtctttaatttttcccacttttaagataaagttttccactgaattttttgaaaggattatacataattaactgattctcttgatcttaattactctttttttcttttgcagcacaaagaatgaaccagcagtggaagagaaaatactgtaagctggctgactgctggtgaagaaaatgctttatttttgtggcaggcatctgtgggatctgtaatagaaatgtaagtgtagcatcatggtttttttcagtgctgcagtaaattaaatggattggtttaacgtgtggtaaattgagtatctgtcatatgtagttttaattatattaaatgagcattttcttttgacttataggtgctttattaacaatttatttacattaagttatcgttaatgtagatttccaagtctcctcaaaaggaaaagtctctataagaaaaactgaagacacaggagtttgctcaaagaatgctgaaatagatctccaggtcctctgggttctaccttctttttacataataattttcttaaataactaagctaggcaagtagtactagcttttgtaaataagacagactactaggttataaaaactctagttactaaaaacttgtttcactaaattaaaggaatttctacataattgatttttttaatgtaataatacatcactgcattttattcatatcacttcactctgatccccagttttacta

SEQ ID NO: 122756 - DNA, 1553 bp, Homo sapiens
ataggtttggaattatgtatttaaaagcatggcattggtccacgtgacatgttgggtgtcttgttttcattttaccagactctgtttttatttatgttttcagtttatgatcctgtcctttgttcataaggtacttagatggtttaagatgtagacttcttatatgaagatgttgctgttgtttttccaaagtaatggtggtcatcagcccatttttctatttagtctcatgaatagaatcatgagtagaatctttcttaaattattacttgtaaatggatcactttcttgttttctttttcttaattggagctttaaataaatatggaacttggaacaaaaagattttcaggaattttatggaaactaacttttttgacctaaatcgaaagggatgaaagtttctgaaaacctaacaaaatgtgtgcacagccaattcttttaggggaggaaataggcagggaatgtgtaattggctattttaaaaacatatgccttcttttgtaacttattgttgtttcaagttacaagatctttgaaggcaagtgtttatctcaaaatatttgaaagcttttatagtgcttaacatactaagacgtcctattagggtttacttagaacaagcttatccaacttgtgggccacatgtggcccaggatggctttgaaagcggcctaacacaaattcataagctttcttaaaacattatgtgatttttttttttagcttatcagctatcattagtgttaatgcattttatgtgtggcccaagacaattctttttcttccagtgtggcccagggaaaccaaaagattagacacccctgacttagaactttccataggttaggagaaagttgtactttcttgatgtctataacctagaatttctggtaaaggaattgattggaaatgttattaaaagttgaaaataatttggaaattaaacattttagtgatcagttcttccattgagactgtgttggttcctttactagatatgtgccatctttttaaaaacttactgtgttgcttcctttactagaaaattgccatctttttgagccttgtctattgaggaaccaagaacacagaaaaggcagtaaaaagaaaaaaaaggattgtttgaagattgaatgtgctgtgatgatagcctaggattattgtttttcaatttttgatgagcgtaagcattcttgttgactatatcttttgtaactactgacccatttagaatggcagaattagctggcagagagattgtcattcattttaagctttcaatctctgacatcttcatctttatttctcagtcttttttacttatcagtggtttactccattattttctccccttttaaaatgtctttttttttttttttttaccatggggaaaaaaattagatgtttccttggcagggcacaataacacaataaggctttcatgacttaacttttgattacctttacaccttcatctcctgctcttccattgcttgtatgactatttgactcagtgtcttgcatgtgcttctgcctggaatctgctccac

SEQ ID NO: 122757 - DNA, 1103 bp, Homo sapiens
tgaatattgaagatcccctgaagaggaagaagaaaaaagatttgtcaaattggatgtatctagcttaaacactgacataaaatttataatttctgccttattgattcagataaacatttactaaacacctgccatgttccagatacaatactaagtactgatgggtctaaagataaataagacacacaactactctgttaaataaggaaacatacatgcagataattacaatatggcctgattcctgcgtaatcaaaatgtgttaacatacttactaaaataacagtaagagagagatgagaggatggacataggttagaaagtttagtgttcattcagaggggctgggcagtggagcagattccaggcagaagcacatgcaagacactgagtcaaatagtcatacaagcaatggaagagcaggagatgaaggtgtaaaggtaatcaaaagttaagtcatgaaagccttattgtgttattgtgccctgccaaggaaacatctaatttttttccccatggtaaaaaaaaaaaaaaaaagacattttaaaaggggagaaaataatggagtaaaccactgataagtaaaaaagactgagaaataaagatgaagatgtcagagattgaaagcttaaaatgaatgacaatctctctgccagctaattctgccattctaaatgggtcagtagttacaaaagatatagtcaacaagaatgcttacgctcatcaaaaattgaaaaacaataatcctaggctatcatcacagcacattcaatcttcaaacaatccttttttttctttttactgccttttctgtgttcttggttcctcaatagacaaggctcaaaaagatggcaattttctagtaaaggaagcaacacagtaagtttttaaaaagatggcacatatctagtaaaggaaccaacacagtctcaatggaagaactgatcactaaaatgtttaatttccaaattattttcaacttttaataacatttccaatcaattcctttaccagaaattctaggttatagacatcaagaaagtacaactttctcctaacctatggaaagttctaagtcaggggtgtctaatcttttggtttcc

SEQ ID NO: 122758 - DNA, 2393 bp, Homo sapiens
tgattgttacctttatgaagctttagtgattacaaagcactttttttgtccatttttacctgagctttgtaaactctgatttgcaggtaaggaaatttagactaatggtttaactgagtgcctaagagcacataattaataaaggactctaaaactcagatttttagatttcttgtctagcattcatttcactgtataatagctgccatgattcaaggtatccttttcccctcactggatgcagcttttcattatatagttcttcagtgtgtttctccagggctgatctgttaagtgcactgatggaatttttatacattcccaaggtatgtacaagtagatgcttacaaaaaattttcatcggttggagagtttttcctctactttcatcttcatatccccattgtctagtatgtggcttgcatataatgcacatcataggtggttagtgttttcataattgttaaattaagatattgcaagaattaaaacatgactttaatattatatgtattttttcttaggatggctggctgtggtgaaattgatcattcaataaacatgcttcctacaaacaggaaagcgaacgagtcctgttctaatactgcaccttctttaaccgtccctgaatgtgccatttgtctgcaaacatgtgttcatccagtcagtctgccctgtaagcacgttttctgctatctatgtgtaaaaggagcttcatggcttggaaagcggtgtgctctttgtcgacaagaaattcccgaggatttccttgacaagccaaccttgttgtcaccagaagaactcaaggcagcaagtagaggaaatggtgaatatgcatggtattatgaaggaagaaatgggtggtggcagtacgatgagcgcactagtagagagctggaagatgctttttccaaaggtaaaaagaacactgaaatgttaattgctggctttctgtatgtcgctgatcttgaaaacatggttcaatataggagaaatgaacatggacgtcgcaggaagattaagcgagatataatagatataccaaagaagggagtagctggacttaggctagactgtgatgctaataccgtaaacctagcaagagagagctctgctgacggagcggacagtgtatcagcacagagtggagcttctgttcagcccctagtgtcttctgtaaggcccctaacatcagtagatggtcagttaacaagccctgcaacaccatcccctgatgcaagcacttctctggaagactcttttgctcatttacaactcagtggagacaacacagctgaaaggagtcataggggagaaggagaagaagatcatgaatcaccatcttcaggcagggtaccagcaccagacacctccattgaagaaactgaatcagatgccagtagtgatagtgaggatgtatctgcagttgttgcacagcactccttgacccaacagagacttttggtttctaatgcaaaccagacagtacccgatcgatcagatcgatcgggaactgatcgatcagtagcagggggtggaacagtgagtgtcagtgtcagatctagaaggcctgatggacagtgcacagtaactgaagtttaaataaaaatgtcttcagctccatgctcaaggttgaaagggttacctgtaaatttctgcccacataacattatactcatccctagtagtgcattttgggagttggggtgggaaggggtatgggaaggatagactcataattaaaatgtctaacatgtctctgttgagaaatttatttaatgtaaggaacttgggtgttaatagttgagagctgtttagtaataacccagttttcttgaggtctgtttactttatactttttaaaaacttctgtagttcttttggccagtgtgtttgtattatctgtgcattaatggtcctcatctgactcctgcattgtgtcttatttttctgcatggattggcataagaccattactaaaatttggcacctgtgagatgtttgatattatgaacaggaaacataatttaatgtatgaatagatgtgaatttgggatttcaaaatagatgaataacaactattttatagtaaagttattgaaatggaaatgaaaacagccagtaacttatgtttcagaatgtttgtaacacacttcatggtgttcccataggctttgctgtctagtcttatagtttgaggtttttttggtctgcatttttctttttgattacaaaatttataatttaataaatactagagtttatcaaaaacagtttgtctcttgtttgagggtggaaagggtgtggaaacattttgacatttgtgaccaaaggtcacttaaaaagtggtggttttaattggttgttttcagcttaatcacctgctcagaaaa

SEQ ID NO: 122759 - DNA, 1064 bp, Homo sapiens
ataaattttgtaatcaaaaagaaaaatgcagaccaaaaaaacctcaaactataagactagacagcaaagcctatgggaacaccatgaagtgtgttacaaacattctgaaacataagttactggctgttttcatttccatttcaataactttactataaaatagttgttattcatctattttgaaatcccaaattcacatctattcatacattaaattatgtttcctgttcataatatcaaacatctcacaggtgccaaattttagtaatggtcttatgccaatccatgcagaaaaataagacacaatgcaggagtcagatgaggaccattaatgcacagataatacaaacacactggccaaaagaactacagaagtttttaaaaagtataaagtaaacagacctcaagaaaactgggttattactaaacagctctcaactattaacacccaagttccttacattaaataaatttctcaacagagacatgttagacattttaattatgagtctatccttcccataccccttcccaccccaactcccaaaatgcactactagggatgagtataatgttatgtgggcagaaatttacaggtaaccctttcaaccttgagcatggagctgaagacatttttatttaaacttcagttactgtgcactgtccatcaggccttctagatctgacactgacactcactgttccaccccctgctactgatcgatcagttcccgatcgatctgatcgatcgggtactgtctggtttgcattagaaaccaaaagtctctgttgggtcaaggagtgctgtgcaacaactgcagatacatcctcactatcactactggcatctgattcagtttcttcaatggaggtgtctggtgctggtaccctgcctgaagatggtgattcatgatcttcttctccttctcccctatgactcctttcagctgtgttgtctccactgagttgtaaatgagcaaaagagtcttccagagaagtgcttgcatcaggggatggtgttgcagggcttgttaactgaccatctactgatgttaggggcctta

SEQ ID NO: 122760 - DNA, 1064 bp, Homo sapiens
gaaggactgttcagtgagttactacttcttgatgagttaactcttaagtttcaggtcttgaacaaatgtattcaagaacattctaaaaagaaattaccaaattttactaaaataggaagtttttagtggaaaagttgcaaaaaaacagcctttttgtaatgttgattattaaagcaaggtacttctagtaaattctgtgatgaaggatggaaatataaataattgaattggaagagtgtacagctttgatgtgaagtgcatacactcagaagccagactgctgggcttgaaatcctaggatggccactagactggctacatatccacacattgtaaaatacagcaaaggcaaaagaaacatggtacaaagaggagaggaagattcatctctagatcttaggaagttacttaacatctctgtgtctcttgatagatactttgaacatatgtactccacaattcttttatagatagagtgtgtctgtatgttttaaaaaattgtgtgaaattgcctcaaacacatctacaagagaatacagtattacctacttttatttggaaatataaaagttgtatatattttgtagtctgatacataataaactctgtatactagcttttaatactattaagttggtggtattgataggtccgtaaaaataacagtagtgtttctgctagtgaagtagtataaagttgtcccctggactaaaatcccataatctctaaaatattcagagtaaaagagctatactcaacactgtataaccagcaaatactcttcttcttcgatgttggttttataaatggagagcacaagaaatattcaatttttatattgccaaataaagttagaaataatactgtattctaatacagatatggttgaagcagaagattgcaagctgatcttttttaaaaaacaggtaagacagttatccctctaagatttcttagaactgtccaatacaagtaacaagataaatatcttgaaattttaaagaaaaccattgatgttacaaaattaacatgatgttatacatttaaagtttggaatcactgat

SEQ ID NO: 122761 - DNA, 1032 bp, Homo sapiens
ctacctcttctttttaacttctttcttggacttctttttgtagactggattttctcatatagcagcatgagttttcttatatatttccatcatgtctggagttatgctgttctttacgtactgaaagaactgtttcttgttaggatcttcatctccttccattaagtagtgcatgtaatctgcaactttctggcccatgatgtacttctggtgtacttctgcattaaattctttgctttcagaatcataaccagggaatcgtttggtactgtgagggatagacaagccttcatccacagttcccttcagggcaccaaaaacttgattgccagtggtagttctggcaaggcttgcatccaaatagtaggtaaaggcacctggctgaccatcaatgctttccacattgtattcatcaccagtcttctccacttggctttcatagatcttgtccacttcaaacctattgagaagcctgcgggctagcagcaggccagtacaatatgctgcagcataatttgtcaggccaacattcacaccatattttggcagtttgtgcgcatatgctgcgcagactatcatatccccctctatacggacataagcaatctgacaaatgatacgtctttttgttacatgaactatcatcctgtatttgggtgtgttgtatttatttttatcctgtatcaccaagcattgctgagaataataatcatttttaccctctcatcgtcttctaaatttcacttggtatctcttaaagtaggccttattgttaacaactttaataaaccccatcctgcagaacagagacctctgcttcccttttaaacataagttccaactttttttttttcttttttttttgagacagagtctggctctgtcgcccaggctggagtgcagtggcgcaatctcggctcacggcaagctccgcctcccaggttcgcaccgttctcctgcctcagcttcctgagtagctgggactacaggcgcccaccaccacacctggctaattttagtagagacaggttt

SEQ ID NO: 122762 - DNA, 1077 bp, Homo sapiens
tcttttaattcttatttccttcaggaagatccttttccacaggaagctatcaaagaaaagtaaactagacaccaagtaatatcactctcataatatgctttccagctagaggggagaaaacaccaggaaagaggaaccctgggtcataaaatgacggacctgttaggaaaatgctgttgtgtgacaatggagagcctgcccaaggactgtgcaacctatctgttcctctccaccagtgtatcccaagtagtctggtatgatctgtggttccttagaatattgaggatctctttaaaaaatgaaatttctgatctcaccccatattactaaagcaaaatttccaggggtagggactgggactccagaaccattaataaaacaaaacaaaacaaagcaaaatattgatgatcaggcagatttgaaaacagtgacattgcttgatctctgaatggatggatgcccttgggtggtcacttttcttcctaggacttgcctttgttatctgtaaattagaatggctatactttcagacttcacaattttaagccacttttttctattaacagttgaatgaaccagtgggacacattttaacgtcttcttatgttgactaaaattatagttagagctgagaaaaaaaaaatagcatctagtccaactccttgattgtaaaactgaaaaactaaggttatttgaatgttctgttttctctttttaaatattttataacttttaaatggaaaaacctattaggtaaatggaaataatccttgaaaatagtttttgatgttttgtgatttttaactggtaaatttctactttaggtgggcattttcttccctagaatatgccctttattatgctatcattgctagatttaaagggacttgtaagcatttctggaaatatttgatttaaaaacatatattaatagatgttttccctagcagacttttggagcaaaaatattattttagttcagcagaggattactgatattatgggctgatctcagaaaggaataaggatgaggcagagaggagtacttgagtttgtgtgtgtgtgtgtgtgtgtgtg

SEQ ID NO: 122763 - DNA, 1021 bp, Homo sapiens
taagaatatataatcaggttgcatcagaacagaaagaataattttattgcagcagaatctgtcacagtgtgtagatgtgagcatacatttgaattgtatacttacactcttattcatgaaaaaatctatttttagagtaagtggttaaagggatgattacatctcacatgcgcatttaatcatcttgtccactataattttgctgtctggtctcagaaagggaaaaaaactttggacaatacttattactttattgactgtgttagtttcttcttcttaagtagactgttgtcatctcttttcttttgagtccaattttcctatagtttgtttatgtcaatggctcgacaaaatgataaaatatatttccagaaagcacatggatttggaactctctcttgttatgtttatattaggctttattttaaaggcaagtgagactgcttcaaataaaacaacttcaagcttccaagaaacagttaagaggaggcagagaagagcagaaacacttctttgctgacacttacactgttgccatggacctacataagcagtgggagaacacagagactaactggcataaggaaaagatggaattactggaccagtttgacaatgaaagaaaggaatgggaaagtcaatggaagattatgcagaagaaaatagaagaggtacactttaatttgttttggatatactgtaatgtttaagtgcaggatgaaaattctgtgggctgttttgtattggaaactgtttttgatttccttattcgacctaagaggtacatttctcagtgacatttactagaacaaaaatagcataatcttatccaatggtattgtaaggattattttatatcattgcatgaaaattaagcatttgaaatgtcactctataatgtttcaacttattattttctggctagagagcttttttatcaaaagtgaggtatgtattttgcatgaattttcaaataccaggtccaggagtaaaatgcaagaaagatatacttggtgggaca

SEQ ID NO: 122764 - DNA, 1022 bp, Homo sapiens
gctggctgggcacagtggctcatgtctgtaatcccagcactttgggacgccgaggcgggtggatcacgagatcaggagttcaagaccagactggccaatatggtgacaccctgtctctactaaaaatacaaaaattagccgggcatggtggcatgcccctgtagttccagctactcaggaggctgaggcagaaggatcacttgaacctgggaggcggaggttgcagtgagctgagattgcgccactgcactccagcctgggtgacagagcaagactcccatctcaaaaataaataaataaatactcagctatatgattcttatgtcatacttgaaagatagagtatcttctctctcatttggacatagaagaaaactgaatttaaaatttgccaaagccagaaatcaacttctcagtctcctctcatatccagcattcttatttcgattttcttcccttgcacttcttggaattttgaacttcaaggcactccaccaggaatgaggagacctggattctattcttggaatggccactaagtggctttgtgaccttgagcagatgagttactctcagggcctcttccctcaactgtaaaatgagaaggttagctagatgatttcagaagttctttctggctctaaaattctgtaagtctggaaacacctgctagtgacatttatgcacgcattagttctcttttaccctttttaaaatgtttttgattgtgccttaatattattattaatatagatcttttccatttctttttagaattttcttttttgtttcttgacagcaggcagtgtttctacatttattttccattaagtgttattatgtacatttctttacatatctgttatacattgaaataagattagtatgtcataaggtatgaatgatgtaattctttctaaaacatagggcaatcatttgtgaatttcatatttgaagatttaaatgttcaaatggtttaaagaaaaactgcattacaaaacaaattgcatttttttcataag

SEQ ID NO: 122765 - DNA, 1077 bp, Homo sapiens
acaaagtgacctttttccttgccatcttttccctataacttcaagctgttcaatgggcgcccagtatccagggtgcacctatctcttaaagcgtagaacatagacttgggaagataagttgacaaagatggtgcccaaaacctcagaaagagagtccccagcatcttcccctttgatcctgttgcttgcattatttttgttatattaagctgtttctgaaagaggaacaaccaggcttcttgattcaccaagagagcaaagactcttaattattaagacaaggcgtcatcttttgtttggacctttgaagctgtgctatttaaacatcacaccaaagtaaactcaacagagcaagccttattctagaaaattcccttgtatgcacattcttggccataggaagaagtgtcttcttgttaatttggcctagatctaagaaaaaaggaattcagttggctatttttaggcataagtaactaaactcataaaacaaaggaaaattcagtcctgagcctggaatgtgttttggcctgcattctccaatcttcactttagtttgtgtgatagaatgggatatggttatttaatcagctgccaacgaagtttggagtgtcaatttggtagctcagccctaattccaaatattcgtgcagagtttgtaactgcattctgatagaactacagtccagttcatctagtagagtcatgctttgggtcagacaccataactgaatgtagaaattgaagagaaggtagtggagaatattaccagaaagtaagaaaagtcgaccatttattaaactactgggatatggtacagttaaaacacagtatgcatgaagacataactgcttaaatcctagttgtaaaccaattaggtctaatgaaagatttcattctacgtttttaattttgatctggtttttgataagtaaagtaatttcattcatattttgatgaaactcacatttcatgggtaggtcctgatattctcagcagtctacttctagaatttcagatagaaactcatacaaaatagaatgtttcatggcctggacatggcagaacacctttgta

SEQ ID NO: 122766 - DNA, 1012 bp, Homo sapiens
ttcatatttgtaaaacacttttcagcacttggctcagtgtaagtgacaaaaaagtggccgcaaatgcatatgaaccacatgctcgttgaacagattttatatttattactgcaataatgaaacaaaagaaacactgctgaaatgatcaccaaacagttgtatgcagttacaacatataataatctctgaatagtgatgccacagttattctcttttcatattccttttcctttttgcttccaggatgtaacattgttctaatctttaatttgccagagaatttaagtgatctgaagaaaatacacagtatctgcttctgtttctctctgtcattaaatctggattgcaagaaaaattatttatccaggtgtcctcttttggttgtttccttgatttacataaaaatgatctcctatccttttccctcttttcccccaaatgaggaggacaatgaagatctgaagtgccagctgcagtttgttaaggaagaagccgctttgatgagaaagaaaatggccaagattgataaagaaaaggacagatttgaacacgagctccagaagtacagatccttttatggggatctggacagtcctttgcccaaaggagaagccggaggccctcccagcactagggaggccgagctcaagctacggctaaggctggtggaggaagaagccaacatcctgggcaggaaaatcgtcgaactggaggtggagaacagaggcctgaaggcggaactggacgaccttaggggcgatgacttcaacggctcggccaacccgctcatgagggagcagagcgaatccctgtcggagctgcggcagcacctgcagctggtggaagacgagacggagctgctgcggaggaacgtggccgacctggaggagcagaacaagcgcatcacggcggagctcaacaagtacaagtacaagtccggcggccacgacagcgcgcggcaccacgacaacgccaagaccgaggccctgcaggaggagctgaaggcggcgcg

SEQ ID NO: 122767 - DNA, 1015 bp, Homo sapiens
taaaaaattatagatatttaaaaaattgatagaaaatatgcggcaaagataaaatgtctttttaagataaatttcctttttcttaaatggatcattagactcaagtataaaatatgtatgcctagatattaatctcatatatagaaaaaataaattgtaatccttgagtaatctaaattggttgtcaagtttcatttggtaactgttattcaacattagtctctttcttaagttttctcactctttgtgttttgacatctttcaggagcaataccgtttctgctatgatgtagctttggagtacctggaatcatcttagttgggtgagactctttaaagtgcatccatgaagaaacctgtccatctattgagccagcagctgttgtacctgttacacttgtgcagaaagattttaatgtggggggtgggagacttttacatttgagaggtaaaagtattttttttatgaagttgtgtatcttaataaaaaggactgaattagtttttattactatattaaagcatcaacatttcatgccacataaattatatttaataagaaccagattgaaatgagaacgtattggtgtttgtacagtgaacatgccaccttttttctcatggtttcagtagagcagctaccacatgttgcatgagttcatactttctacgtggcatttttctccctttctaaaatgaaagctgatgaatcttaaaaggaagaagaaaagaaaagctgtgcaaattcatagtaaagttcgttttttatatgtttccagtgtagcagatctctatataaatatataaatatatataactggcttattttcttttaatgtgcaatgatggctggatcatttaaagttctttttagaaaataacataagccaaagactcaagtgtaaatatgtctatatggagaaagcacattatatttattggttacttacattccttttttgatggctaaaatactaccaccacacaatcatcttttttttcctgaagaaagctt

SEQ ID NO: 122768 - DNA, 1013 bp, Homo sapiens
caatggactgtgatgtgatcaaccggatttttaggatatgcaatctaacaagagtaagtcactatcggatcctttgagctgatctagaataggtcagtcataaccaagatgtggtataattttattcagacaacagggagactacaattaataagcactatatcatccacctcaaagctagtaaccatcttatgccttagtactcgaataaaaatacaggaaaacagaaatgctggaagctaggtttttcggtcagtcactagactagcatattctctcaggaaatacagatgcactggctcagtcaagttggacagcctaggcctggcctctgagtgtatgtagacttatcttaaggatgactgcatgttttattagtattgacatccagcccagaaatggcatgtgataaaaaaaataagaacattgcaataacaataatgacagagaaactgtactgcaggaggaaagagacatgttggatcaaccattatagaagggttccatgtcactgttccaagttcattattgattatcctacctgcaatttcatcttcctaaacgtctcaacctatggctctaagcagatctaaaggtagaaccagtgctgctaccaccatgccttttcccagcagcaaagtagtaactgtatcgtctttctctgactcctcatttgctttccactacatgacaaattcaatgtgggtggggaagatcttaaaaaaaaaagtgctaataaagcccgggcacagtgcctcatgcctgtaattccagcactttgggaggccaaggcgggcagatcataaggtcaggagttcaagaccagcctggcaacgtggtgaaaccccatctctactaaaaatacaaaaattagctggacatggtggtggcatgcctgtagtcccagctagtggggaggctgaggcagcagaatcatttgaacccgggaggcagaagttgtagtgagctgagatcacgccactgcaccccaggctgtatagagcgagacttcg

SEQ ID NO: 122769 - DNA, 1141 bp, Homo sapiens
cggattttctgacaaatgctgattctcaaaaattaggtcacaaagatttagaagcatgaatagatggtagaagaaaataggatgattgttattatcattaaaattgcactatggttttaaagttaaagttcctttatactttaaggaatagctaatatctatgttttaaaagttagcataatgtacttggaaggctgaggcaagagaatcatccgagttgggaaagcagaggttgcagtgagccaagatggcgccactgcactccagcctgggcgacagagggagacactgtctcaaaaaaaaaaaaaaaaaaaaaggttagcataatgatgataacagaatcagataaagatagcattctctggagctctcattccctctttcatgatgtctttcttctctctcttcctctcttccccctcttcctctcttccccatgcacacacatattgcagaccaatttcattcaagaacatgaaaaaattcaaaataagatattgaaaatttggatctagtagtgaattaagaaaatatcactacatgacctattattttttccctaagaatgcaagaatatttcaactgtagtgggaaatcttaacaggatatttcattatgtcagtacattaaagtaccaaaactgtatgactttaatagattaatgcatttaattttattttcaaaatatttatagtaatactctaattagggaaattaagaggcatcctaaacatgataaaggtgattcaacaatacctagtagcagccatgttaaggaatgaagaactaacgactattcatttatcataaaaaactagtataaagattatattactgcttctacaatcatgaatgttatgtggataatcagtgtcactaatattaaacatttttggaagttttagcaaatgaaataaggcagcaagaggaataaactgtgtaactactagaaaagacaaattattttaagatgaaaggatttataccaagaaaagtatggataatatttttaaatgggatgtataaacatttatttaaatgaccaaatctgcataaatattcatgagttatagcttgtctttatattagtgataaacagaagtaagaaaatattactaaataatctttaaaaatacaaagt

SEQ ID NO: 122770 - DNA, 1022 bp, Homo sapiens
aaaggccatccaaaatacatccaatttcatgaagaatcttttaaactccatattttatctatggattacctgtataccttaaattaggagtgttaattatctctgaattttgaaagttgattttagatatatgccagaaacactgccgtggtaacaaaataagtacaaggaattagactattctgccagagctggttctttttgttcatttcatgtgtactcctgtgtaccttgcttcaaagaccactgggctctttgaagaccccgtttcctgtgttgagcaaagtttaagttcttttgcaaaatgaaatttacacccgttttaaattgctgcatatagtaattaaactagtcaacaaattcttctgttcccagattcttgaagaaggggactctattttaatttttatatggtcccttgttgtgaagactcactctttttcatgatcttcaaagaaactcagatgcgatgtattgcacacaatttaatgaataattatggagggaagcaggttttctttctactgttataaatgctaaatgatgcacacttgaaagatactcattaaaagcttttttgcagttttgatgcattatcattcaatacgttttgaaaagaatgatactttgctacttctacttctcattatagtgatcttaattttaaaatactttcaaggtccattttttttctctaaagttatttttttgtctttaatttgacctgaatccaatttaagatgaacaagtatgaatccaacaaagcggctttgaggtctgagaatgaaacttgtttactactgtaggactgctttcctctctgagaaagtggtttttactatttggggcttcagaacagataaacctgatttttaaaaaggaattaaattcagtctgcttattcgttttgttttcccagagcttttttgaaggacagtcagcatcttgggatgtagctaaaaaagatcaaaatagagcaaaaaaccgatatggaaacattatagcatgtaagttcccattca

SEQ ID NO: 122771 - DNA, 2209 bp, Homo sapiens
ttagatgtagaaatgatttgttgtatttttcatcattcttaggattgtggtctttagagttttgcatccaatcatttttgtatttataatgcagtttctgaaatcacttcaaatattgcttaatgctaatacttactgatttaaaagggcttagaaacttttcatactgattcgtatttttggtttttgtgttttactgcttcattgggtttaagttcctataacaggtaagtgtattgcaaagaactctagaaaacctttcaatcaaggatatatttcaagttattattcttaaatgtataataaggataatgattagtacgtgtaccctcactactagtcacattattaggtggtttaatgaggtggaaatgtattgagattaataatgcatatgtgattattttaaagaccttactgctcattgtactactgtattaaagcttaatgcaaaacaaaaggcactgtctattttatattgggacacaatcatctgtaagatttggaatatgggtgaattctgtgtttctcactgagcctttttcaattgtaaatattctgctactccagcaggtaaaagtgagctctggggctgctccactgagccctggctaccttcttccagcttgagtgattgcattttgcctctctgacgttatctgttctctttacttctcatccttaactgtatattctgtggcagtgcccaaatcaattgcttctgaatttaatttttctggggagatgtatttattctttatgtcggtctgttgattgtaatattttaatagaagtagatccattgactttggtcgcatagtgagaacaggaaactctcatgaatcatgtttgttagccaatgtttttgtgtagaggggtgggcaaaatctgagtaaaagacatgaattcacttgagtggttaggtcacaacagaatctatcagggattttttgattcagtgtatttttaggaatgaatgctacaaaaagagcattcagcttaataagagggagtaaagataaatgcaatcaagctaaattacagaggcacacaaatctgattgtagggttcttttttttttcccttctccaggaagaaaaaatgtttatcatggggacaacaattcattttttgctatatcctatttgtagagttggtgatagaacaggcaaatgtactagcacttgaaatatgtttatctgttaattaaatatcattctctacagtatgcattatcattaaaaaaaaagttcccctaagagtgtattttctcttctgttaatgagtatgacggtataatgcttttcaaagtaacaccccttaaaacatttgtttttttttttaagtggtaagtttaaatgtgataaatatgagcatgcttctcgttgtaatgtttagtacttcggtcattaaagtactgtttattcttcataggcaaaaatgttcttgttcttttcttccttcttatgacagaaaaagaatttaaagtttcttttctttttaagctaataacacaattgggaagggacttacgcttaattgtgagtggtcagggattcagttgactttttaattcattcattggaatatttattgagttactgttatgcatcaggcactaggaatagaaagaaaaatattctgtctctgtactgggtgttcagaatttagtgaggaaaatagccaagtagataaatcattaaaatatagagcaagtgaaatgacatgtaaaaatgaataagaggtcatgggaacataaagaaggagctttgtaactcaacctggaggggccagaaaagacttccaggggaggaacccacattttgctccagaagcgcgccctgatttctctcgcagcgtggccaagagactcaaaatacatttgcaataaaaacaataacagtaataagtcaaggcggcagaggttgaatataaatgcacgtgtagtctggctagcagacagagtggcatcagggggtgatcatgtggaatgcccatgtttcccagtgcagagtgtgttgtggtaaaaagccccagagaatagggccacgagaacaagaagagcagccctttggggatgggtcacctagatcgggtatctctgagggaggttgggatatggttgggaaggagtttggtcgacttaatagaccatgaaaacacctccacttgacagctgggtcctctggtcccactctatactgctatg

SEQ ID NO: 122772 - DNA, 2594 bp, Homo sapiens
cagtaattctttttgggaattattgacataggtaaaatcattgcattaaagtagtatattgtagactcctggaaaattgcaatactaaaaagttaactcagggaaacattagtctacatgctcttaagtatctggtgtgaagtccaaaagtatacttgaattgggggttttgcaaggcatagtgaaattcatccatccatctgtcttgaaaattcctaatgttggtctatgaaggcaaggcttttaaaatatttccgctgaagtaccatttaaaagcagatgattttaataattaccccagaatcaatattactgtttattttcaaatttcatatgaatgttatattctgttctatagtgcatctgtttaagttaattaaatttaagtgaaattgcctaactttgtttcttcaaatcctcaagtaaaactgatgcttgaggcaggcaaatcaggtatatctcttgagtatactggccttgtataacttgggccttatggcatttggctcagatcgcagagatatgctcaccccggtttggaaaacatgggtataagcaaagaaacaatataagtattatctcctgtacaaactatgaacatatgtaatagtaagattgaaaacaaagtatttgtaggttgtatgcttgtatgtaaagagggaagtttttttctgaattgttcagcttggagaaatttttcagtaactattggatctaaaatgaagcccatcattttctatgtatatatgtataccaaattagtagttaaggatgctatacatgagtcattttggaatttagttataatcatgacagggcctttcagatctattttatttttatttcactatagataaatgatagagaaaaatgtaaaatactattactgttgaaagtaagttttgcggaaaataaagatgtatcatctctttaactacttaatttaatatttaatcaattaaggttttgaaagcattcatgcctcccaaacttgtctatctattgcctaccttagggccttatttgaaagtttgaattcagcagtgtaactataaatatccacttatgaacttagagaaaggattaaatctatttcccacagataactgaaaaaaattatttggaatgaatatgagataattatttctttaaataccttacacttgatagatctaaaatacatgggtttttttttctttaattttttaatgtcaagtttaatcttctggctttttaaattaaacagagttctgaaccataattatagatacacctctcttgatgtttagatataacccaagctgagagagaaaattttacatttgcagaatacagtaatctgagaaagtttaataattatatttcttaagaaagcataaatctattttaaagaaaaaagattttaaaaaacaattttagagcaatatattccttcatgagctttgttttcctgcagtgcccaatgatccacttgtaccgactgctgtgttaggtgaggccctaaatctttatcatcttttcattgcatggatcacacctccttgcatgggtttgcccacatagagattatttacagtgcaggaggcagcttgattttgaaaatagacagccatggtattatcaaagagagcaactgtgttcaacccaatatcagatctagtggatttcaaattagcaaggcatgctatttaatgtattcttcaattcttggttgttagatttggagcaaaagtacatggcccttaatgtctgactaatattaatgtgtcaaaattagtagaatgaagccaaatgcatacatctcagggtgcaatgttgcctgaataactagtttatatgtaaaagtctacctaatggaaagggatgtttctaaatcctcccaatttataaccacgaaagaacaaatttacaagtaaatattaggattatgtgcatttgctctagcttttgtctttattaagaatgttttaatgtaggtaaagttgctaaaatcttgatgtggggtttgacattctacatgaaccttacctgataagtaatgttatctttcaagaaatttagaacaagctacttgggttaccactgtataacatctaagacaatgctattactaatgacaattaacgcttttacagatgtaaaattatattaatttttaaacctacctatatatttaagaatggaatgggtttcatttttcatttcactttgtaccctgttccttgactaattatacaccaatgattagtaatcagcttgcctgtatgtttacaggttccatatcaattttaccagcgtttctagttaagctttaaccaaagaaatatggaaactatcaaataaatatatcttgtaaattcccaaatgtcatgtttgttatttatatttaacatttcttgtgaacaaaaaactttaacttatattttatgcttgtatttttgttatacatacaatcaatgttcaattgcatttttaaaatattttggaacaacacaactaactcagttatgtaaaatatacctcttatttactaaaataaatatttaaaattataattttataattactataaaggatatatattctaaaataat

SEQ ID NO: 122773 - DNA, 1011 bp, Homo sapiens
tttaactgttgcattagttcttcatttccttatgaagtctaccatgacttgtaaaacttatattaataaatttgtatttttctcttcttaatctgtcttttgtaataggggtcctagccatgaacttttaacatcttgaaaggatggttttcatcccttatacagtctgataggagaagatatttgtaatacaaatttcagtcaaagctatatactgagcatttcagagaaaaaaacaggtagagatatttcaggtatctcaaaaggtcattttagtagtaatcaaatatgtattacatttcattttctactactgaagtgacaaaaatcaagaaggctgataatacaaagtggtaagatataatttaaatggggttggcatacgctgctggtgggtatgtaaattggtaatagtttggtattatcttgtaaagctgaatatttacaatctttgttttatcaaaatgggatggataaaactcagggaccacagtttgccaactcctaaaataaagagtatttgagaaatggtgaaaggattttaatgataagagtatatgaatgaaagtgtctcagaagatgaggttgaaaatgttgattggcacctgcttgtgaaaggccgtatgtgtcataacttttgccttttcctcttgaatgtaaagcagtgaagtcatttcttcgcatttaccttttagaaaactcatccaactagtaatatgtaggataaatctgaggtagccaacatgggaagcaggaggactagtgaaaaaacaagattgggtcttgaaggcagtcgaaggtggggtggagaattcagaaccaatttcagagagaactaagcagatagaatcaactgtgtttaagaagtaagacagtgcactaacgctctattttacctaattgaatgaatttagtgggaagcttgatgaaaaattaatatgcacattaaaacatttcttcttcattactatgaaacaaaataatattttactttttttaccattatataca

SEQ ID NO: 122774 - DNA, 1131 bp, Homo sapiens
gccaggctggtcttgaactcctgacctcaagtgatctgcctgcctcagcctctcaaagtgctgggattacaggcgtgagccaccatgcctggccataggtctcattttgtacactaagaaaatgtcaaattactaattttcatacttagtgctaaatttacatttatcataaatgtaaacatgtaatagagaaccagtaattttttattttccttaaaaatgatcctggtaaataagagaattgattcataagatcatggtttgttgatgccatagcaacataatcttatattgagaacatcatctgttacaatgcaagtagttgtggccatgtgcctagaatagacttagttattaaagtacattgtgatatgatagaataagatttgtccagatgtttacagagctcttacaaggaattattttagtctgtttctaaattattttagtgtgttcatctgggttgaaatgttatgtgcttaaaggattgagttactgtgatgacttggaatatttaagtagctttgaattgtgcgggtatgttaaatgcctgtttgggaaagaaaaataatatgagtgaacagagattaaaatttgtgaattatctgattgccctagagatgtctctatttgagtttaaaataagagattggcctggtgtggtggctcatgcctgtaatcccagcactttgggaggccaaggcaggcagattgcttgaacccaggagttcaagacaaacctggacaacatggaggcacctcacctctaccaaaaaaaaaaaaaagaaagaaagaaaacattagccaggcatagtggcatgtccctatagtcccagctactccagaggctaagctgggaggatcgcttgagcccaggtgggtgaggctgcactgagccaagatagctccattgcactctagccctggagacagagtgagaccctgtctcaaaaaaataaaataaaataagagatcgaatagttctgttttaaaatagtctaggtgagaaatgatagtttggttttttttgttttaatcatattgtttaaaagaatacttcccagcagagttttattgggaaaccacaccaaaataaggaacatgctgggggcaaattcagtggtgaacata

SEQ ID NO: 122775 - DNA, 1055 bp, Homo sapiens
aacaacaaaagataattaccatagtctgttcttacatgaaacactgagaaattttatgtagacattgaaattacttcatcagtttcttctgtgaatgattcatttcacatttcccagtcttatgtaaattactctgcagcatttatatagcattagtgtcatgcaatttgtatcattattgaacatttattttcttttcaaacaaagtgcaaagtgccagaggatgggaagtatatctttagctgcagtttgaaagaaaatgtaccaagcttggtgtcggatgacctgggttctacaaagcagtcgtgtacgtttagccaaatcacctgttcaaatctaggttgcccaaactataaatgcacttgaatgagtgatttttcaagaatgtggggcaaaatgaagtcagagcattcaaggctgtggtatcttatttctgtttcagctactgtgtctgtgctctcagtgtttcatatattgggtccctacgtatgattttattttttaaatttctactgctaataaaagtttcacagatgtgatagtgtccagtatttctttcaaatttgaagtttcatttgatttaatcattttatctatcatgtcatttagtgtaatttttgaacctagtaagtgtctaataaatatttgctggggaaaaaaatgaatgctatggttcaatcatgcaatactcagatgttcgtaaccatttccatgtgaaaagtttagtataggctgtagagaatgacattttagacttttgaggggaattatttttatgtcagcttgaaattcttcttgaacttgatttctgacttgggggaaaaaaagcaagcctgatgtgcacaagctttatacagagaatcaactgtttttaaaagaataatccagctgctatctgatcagccaggtaggagttgttctgtggaaatgaagaagccctccattttcagtcagagtcacgcatataaaggctttgataagattaaaataatccaagaatgcaatttcaagatgcacagctagaaacagcaactaagaaatatccatatcttaca

SEQ ID NO: 122776 - DNA, 1038 bp, Homo sapiens
atgatagtgtgtaataacattcagattctatatattgataacatgcaaacaaatagtacattaaatagtttctataatatcacatctatctttctcttttttttttgccccttcaagcaacaaaatgcattatttttaaccctatgcaaccatctttcttaacctttggtttcaaatttagaacacttcttttcactgattggctttatagtatgatattggtcataagtgaatttaaacttataaagttattaataaaatagttatactccatttcatatttctttttcaaaatgatttcatactaaaaagtttggaatccttgacctaagtcaatgccctcttcctatggatgagaagactgatgtttattgatgatttgattttctgaggcagtacagacagttgaaagtgtgggaacagaaatcaattccctctacttttttcaatgcaccacatttatttcacactgtccatgtagaatcatcagttaaaatgatcatatatgttcaatccctattttcatatcaacaagaataatatgagtatataattaccagaggtctatcgtaataatttctctaatgtgtttaaagaacaagccagagatttttatttgatagagtatactgatagcatcaaactgaggatgccatttgtttattagggagaattttataatttagagtttttttcaaataatatcaacagtaaagtctaaattacttattgcctttaattctaggaatgtcgcattaagtgactaatgaaacggaaataactactgcccatgtaacttcataaatgcccttcatagacatttatgtcagagcaaagatggcaaaatacttgataatgacattatctccccctcacaacctttattttaatgctgtcaatcaaaactgagccagttaacatttctagagaataatattttatcaaatagataagttatttgtaatcatgataattcttggttggggcctctgtgataggctgaataatgtccccccacaaagatgtctacatctaatc

SEQ ID NO: 122777 - DNA, 1016 bp, Homo sapiens
ttgcaagccgccctttccaagaatttcagtcttagtcctgctacgttaactcttttctgtacaatatctatatcaagtgtctcaagggctagttaaaagaatatttgaagaaattagagaaaattccaaaaattatacatacaattaaggaagtagaaaattggatgtagaaaaataattagaaaattaatcattattgacactaagagagaaatctgagggataatttaaggacttcctttagataatgagttatgacataagataaagtcacccatagcctgtatctcccccaaatccttccctaagtagagaatatgggcctactttatttgaaacacttctgaaaagtatttcttgaaaacactctttagaaccttctaagaaatgacagctcatttagtcatttgccattcagattgtataccagcttatataataccttgattcattaattatttgctgaacaatcctaaaaattatgtttatccattacccattcatacttttactatctttctacacccaatatgtatgcagttcaggttttcaaactcttacttgagtaaaaagggagaacaggtatttaaaagcatatttctagccaggcgccgtggctcacacctgtaatcccagcactttgggaggccgaggcaggtgtatcacaaggtcaggacttcgagaccagcctggccaacatagcgaaaccccatctctactaaaaatacaaaaaattagctgggtgtggtggcgggcacctgtaatcccagctacttgggaggctgagacaggagaagagcttgaacccgggaggcggaggttgcagtgggccaagatcacaccactgcactccagcccgggagatagtgagagactccatctcaaaaaaaaaaaaagaaaagcatatttcaggtatgttcaggtatggataaagaaaacaacagaaagattaaggaataaaaatacatgatgacgtgaggtctttgaattgtggtggtaagtagatatagcattga

SEQ ID NO: 122778 - DNA, 1039 bp, Homo sapiens
actaacctgtttcattgcaaggtaaaaacaaatatttacatctctataaaaactaaaatatttttcaaagttcttactttagatttttaagtatccctaggggggcatattttttaaagttttcttaatattaaaattctgttgtttataatccctttttatgaccccagatggatcttcataataattatagtttatgaaacaggaaacattatctgtacattgactcttttttttttcatttttactctatcaggaaactaaaacccagtgcgtacgcattgctacaaaaggtaagaggtttgctttttttgcttgttttaactactctcaccccctttctaaaatggaaggactttgttccctgcttcagggctaaatatgacatttctgttatagttagttctgtgactcatgtgggtgtctttaacaactaatggggtgctacttcccatcctctagtacttgactgaaggaatcttgttatgataacaggaaagatctagaaaaccttagaagggcttatttctgccatttagtgtctgaaaaatcttgtgctgctgatcaaccaatatcttaggaaagcgtcagcaatagcagatgaaaatagcaagttgcttgtttaaaaacctctattactttccattgtagacaatcaaacataaaaagaaccaagctaattcatgtttacataagattatagggatagagattagtccatatcttcatcagtagtgcagttagcttgaagatcatttactttttttaaaacttattctgagaaaccagatctgtgatggctagctcataaccagggcaattcctgctgacctggcatattatggcttagctgcctagtttctttgacaagagaaaacatttgcatctttgaatgaatatttagagttccaagtgggggaaagtctcctacattctctgtgtttttaattcttcatttaagagttacttgattgtgccaacaaagaataaattgctacttggtgtattctagcaagagaaacatgaaaaagctgtctgc

SEQ ID NO: 122779 - DNA, 1035 bp, Homo sapiens
ataggaaattgctgggtttatgtaattgagtccctaaggtgagcacctgggagtgatacatgatatacaattacatcagtcatattatatcttaaagagtttaattggaagacataacaatccttttgcatttctgcaggggccgtgagagctttgggtattgattggctgcttttgaatcaaagctttgttgtttgcttgcctgtatgcttggcttgtaggtagcaaagaaaaaggccacagcatcttctaagatgtgctccagagtcagaggctgctcatggttgaagatgctcttctcgtttacctttaaagaactgaggtctttagagagtagtccagtgtccactttctgcctacatatcattccataccactgttacaactgggctactataaaaacagaacacaatggaagttattagtccattctgggtataatatagcattgagtaggaagcatagttttgtgtgagggttttgatctttagagaggttccaaattaactttggttatttggtctattataccagaggagtgttaatgaatgtctgttacttataaaggattttctctgcattctttaaagctttttgatatgaattttctcttccaattgttaatatatctgcactgtggtttaatcaaagtacagaatagcaacaatatatttcacagttatcttggcaaagagttttaaagttgatgtgacttctacaagtagagattggtaatgccattagaaagttaaacagcaattgcttttaagaaatgaaaatcctttggggcctttatgggaatgtgaaataatctcttgcaggttaccatgaaggtctcaggccacaagtaatagaagtgcaacattttatttttaattactaattcccccctcactgctttattttaatttaaaaataaaaaaataaaaaatgcttaagtggaaattgtaaactcttttataaattatcaacatatagaactactcaagatagagttataaatgcatcttgcaaacagatcgcctctggtttgtt

SEQ ID NO: 122780 - DNA, 1085 bp, Homo sapiens
tggctcacacctgtaatcctagcatttttggagaccaagatgggaggactgctcgaggccagaagtttaagaccagtctggacaagatagtgagaccctgtctccacaaaaataaaaataagtagccccaaaaaataaaacaaatcaacatggtggtgcatacctgtagtattagacactcaggagactgaggcaggaggattgcttaagcccagtatttccagattaaggtgagctatgattgagccattgatttccagctagggcaacagagcaagagcctgtctctcctcctccccccccaaaaaagtagtgtgtatacacttgctttacttatgagagaatcaattgaagtctctgttttttcatcctttctcattttgggggaataaaattatcaattatatcatggaaaatgttttgttcttgttctataaacagttgtttgctttactacagaggttactgggcttgttttgaaaatggtgaaaaagtcaatagatttagcccactatttcaaaatattttattaccaacagttcactgagctctaggtatgaatggatcaccagtataagaaaatccaagttttcaagtatttaagttgtgcttcctttcttgtctttctatcactgcttgttctagcacaaagagattcacattatattttgacactggactctgtcgttatggtaaggagctagcttatgttcattaccatttttagtcttgatgaaccaattctgagacattgatacctttttaaattgttgtcatatagcaagaaaagagtattaagtttaaaaacacatttaacatatgtaaataatgaatacaacttaaaaataaggtagataagacaactgtatcagaacaatccttgtgcaggtgtgagccattaataatgtaacaattattaataatgtatgtgggttacattgaaaatcataattaattttacatttcaaacttttgaaacttgtaaaagggcaagtatgacaagcataggactcatttagaaggctgatgaggctgttcatttgcattttgctactctaatattgttttacaagctattgttttaa

SEQ ID NO: 122781 - DNA, 1536 bp, Homo sapiens
gagataagctgtgattttcacatataagcaatagtctgtgagtagttttggggaggaatgttaaggagggctttagtgaggattcagggtgaagtggagagggtgtttacttgtgaatgtataccgctctgtgtgttgattttgcagataaaaaacacattttcaagttagtgactagtatgcattaaatatgggagagtaaaagaaggatgtatttaataggaaattcacttattttccatctgtatctgattatcttaaaataagacttgttcactgtaataccatgtgaacattaacattcaggttttaattataagttataaactaataataaaatgtatatcatatattactttttgaaatcccttttatatctgttattctaagtcatttaaaccttgaaagcttgtaatatagggattagcattcccattttaatgatggaaaaaagcatctataaaactttagtgtgaaatttatctcttcactcccttaattactcttatatggcttttattatataccacttgcttcctaattttatttttatgatcagctttttataataaaatcattactcttgtggctgtatacctgtctatatgtttttgacattctgtacatttttacataagtgtctgtttcagttgtaccaaggagacatgtgtgggaaagtggagaaagggtgagcacttccaattttatatgtggctatagaaggtacatttcctagaacacttgctacagaagtgggacattgcttctgaatgtcctacatgtatgagccagaggatcctaggggacatatgtgtttgacttagaaaccaagagtaaatgactgtgtccagtcaggtatgctgagctgttcaggctggctggagacctgtatgattttggggtatggtgctgggtgcagtccagtagctggaagttggccagaatgccaagtgcttgatatatgtcctgggatgattggcattaccttgaatgtgacagagagtagaggagtgacataatgggattgcattttaggaatatcaccctgggggactgtgttttggtttaattttttttttaatcgcagaataagacacatgtataaacaaaagaatggctgaagaaaaacaaagtctgtgatacttacatatatagcacaagttgacataaatgccacttatacctgcctttctttttgctcctggcatgcctttatttcagtggcccctctgggtctgctctgtctctgggtctttactctgagctgtatacctgtaatatgttttgctctgtgtccccacccaaatctcatcttgaatcataatccacataagttgaggcagggacctggtgggaggtgattagttcttgggggtcgtttcctccaggctgttcttgtgatagtgagttcttgctagagctttttttttttttttttgagactgagtcttactctgtcacccaggctggagtgcagtggcgcgaccttggctcattgcaacctccacctcctccctggttcaagcaattctcttg

SEQ ID NO: 122782 - DNA, 1024 bp, Homo sapiens
gcatttattgctattaaaactgctaataaaatgtgtatcaaacatttgcagaaattctgaatccttctatggaacctgaggattctactttaaggtttaaagtcatgagagagagaggtttacattgaaagagttttcagctccttggtaagaagttttatcagtctcttttgctgaggggttcttgtgatagaactcaatagtgctttttcaatttataggatttcaggtaagattccacctccgttatccagctatcttctaatatactcttatcttctctattaaatgtttctctctgaaaatgatttaccttcttattcaggcttcctcctcagtagaataaccccaaactcctccccacccctatacatgcacacatgtgctattttatccatttaacttgtgtcttcccccaaagacttaaaaattccttcttaataatgtaaaaacttataaactctgctacaagcatacgtaacatttctcgaggctattaaaaatatctagatgtcaggtaagtgtatatgatgaagtaagtgattcaaatagaacaattaacagatggcagcaacaattatatattcatattcctggccaacagcatttggtagatataattaccttacaggtgttaactgccctttatggaatgagacatctctgaacactagagaaacatggttaacgatggtcacaaatcagtaaaaattctatattgactcatttttttagacaagaatcagaaagctaaattcagtttttggagtatagtgctaagttcagaaaaagtgaaacttaaacaggagagcaggtgtggtgtaatcttcaagttgattgctgggatggggaaaaaaaaaccccgcacattaaaagacatttaaaattcactcaacatttggaaggtacagagtccaaaaaggcaatcatttagggagaaggaagcagctgttttgacttattcctttgagtttctttaaattaccttagtttcatatgcaaaatagtattaacatgctttttt

SEQ ID NO: 122783 - DNA, 1002 bp, Homo sapiens
attctcttcagttctatttagcagacatttactgagtattctgttgttgttgttgaaggtagtgtgcaatatgtttctaatatgaatgtaacaaaaagaacctgagaatatcaatgaaatttaggtgaatacttaattcctggtgatcaaagctaatgggtgttctaatgaaaaaaagtctagcactatcatggaataacagcagaatctggagcaataaggcaagaaataattttatttttcagacaagccacattattaatgaaaacatgcaccacacatgaataacattggaatattacctctttcttgaatagcagtgatgagatggcctactctgagaggtactgaaaaatcagttgaggagattattgagcttaagtgtgtaataatcagaatgaaaagaaatacatgtagtcagaattacaagccaacttaaacagataattgataaggcaaattgtataatattcaaagcaagaaagaagacctagaatacatcaagatctctatctgtacaaatcgtggttcacataagcagtatgtgcaattagtggaaatatgtcctgatgaaatcaataggcctgtttaggccttacttttcaaaatgggcactagtaacatctttgatagaaagaattcttgttgcagtacattgaagtattggttcatgtcatttctgtgcagcactcatttatcatctgtttcaaatgaatctttttggtacttcatattagcttgtgaacgtacaaaagtatccttcctatcaagtaactctagcattagaaaagaatgactgcctcttgagagttgagtgtatagcttgatttattcatctgcaacagaaaaattccttcaaaagtttttactgtatcttaaaattttgttggaattctgtattctttcttctggcatgttattgtgatttctaccttaactctttagaatccagaggaggttcaccagagttttcttgtggtttctcctttttcctgtgaatac

SEQ ID NO: 122784 - DNA, 2065 bp, Homo sapiens
gtcagcatgcacgtatcttttttatggtggaatttttgactaatgagtttttgttagaaatgtatcagttctacttcattttatagttgaggtgttcatatgagtcagtctcagtaatttttgagtgactttctgtagaaagttgttctctaactagaatggaagatgctgacacctagatgttcaaatggggctgatggaaaaaaatcaggacaattttgtatcttatatgggcaacaaagcattataaaaggacatgaaggatggtttgtcatatccattagtttttgccgttttatctattagacttgcagtagcatatgtagaacacaggttgtgtatggtgggaataattttgtggaggatattatgagtatgatattcacatgctaaatgaaagtcaagtatgccataaatttaactaatgtcacttatgttttgttcacatagtagtggtgtcatcagcgtaatacaggaaagatttacagtacagcccaacatgactgctgttctctagtgtgggccccggtggggaaagggagaatcagaggaagagactattactgatggcactagttttcatttttaaaacacacagcctgggctgggcgctgtggcttacgcctataagcccagcactttgggaggccgaggcgggcggatcacgaggtcaggagatcaaggccatcctggctaatggtgaaaccccatctctactaaaaatacaaaaaattagccgggcgaggtggcgggtgcctgtagtcccagctactcaggaggctgaggcaggagaatggcatgaacccggcaggcggagtttgcagtgagccaagatcgcgccactgcactccagcctgggtgacagtgagactccatctcaaaaaataaaaattaaaattaaaaaataaaacacacagcctgtaactatttgaccttttgtcttttatagtattttagtgtgcttttatttcattttatttcattttactgagcattttatttcatagctttaggtacaaatgtggaaattttaggagcaaagcagtttgtaattatttgtctcaaaaaattgatttgacctttaaagacatagtttttgtgcatcaatgggactaatttgtttaaatagtttataaacaaactattaaccagtatgatatttttcttaaagagatcagagccaagaacaataacaaaaaagtgatgactcatttttcaactttcaatttatgttacaagacattatcacagcattcattggctctaatttgacattaaataaacacagtgaaaaaacaatctttgaaaagttattcatgctttcgtataaacagagagatggtggtttggagataccccttttaaaactgagcctcgttaatttaaaacaagcacaatgatacaactgtacttgacttgaaggagggcatattgttctgcaggcgtcctaattttacttctggtcagagggacactggaagattttcagccagaactgcagtgagagatgaatttttattatatgctgagatgctcagatgcctggaaacagaaaagagctaattttactgttgaaaagtagttaataggctacctgtttccaaatatgcacctgccatcccccaccactaccatcccaagtagatgcagactagagcattcatagtggtcgttcatccgatgtggctccgcatagatttttattaagtcaggcatggtttgtgtagccctccccgctcctggaactgatcacccatgttttttgctaccagagaagtagtttttcaagcaacacacagcttgtatgtggaagatttccaaagtcacaattgcttctttatcttccagtgactttgaaagaaagccatggcatgaatagaatgctcaaagctctgtccctgcacaatctgtagtcctttatttcagctatgctttttactgcttcttgggaattgatttttctcttcaatgtaccacacccctttcaattctctctccttaaaatggaaaagagaaagaaaatggtgcacaaggtgtctgagaagtagagcaaaaagtagacatg

SEQ ID NO: 122785 - DNA, 1054 bp, Homo sapiens
agtggtcagaaacatcagtcctctctgaggtgattactgaagtgaaaaagataagaaagaagccatgtgactctctgggggaggaatgttccagcagagtaaacaacatgcattagacctgccatgggcaatatttgatgcagtagggcaaggcaactcgaagtgtgctcaccatgttgatcatttattacaaatatacaacaagatttaaagcaatgtaatgtaatatttgaatacattgaactggcaattgatatgagttgcatgtcttttttatttcattatttggtaagttatttttattgtattttacaaaagtttaggctcacactcaattcagggaaggggcttgtccttcactatagataatctgagaagcatcatgtttgaggaagggaagagggccacctgggtgagttaggaaagagaagaccttggttcacttagctgtggtgggacaatgaggatattctcttctgaatgcaaaaagaatcaagctgggctgctaaaagtgagaatgggatgaaaagtaattaagagaggagatataaaatagagtaaatagttcaaggaagtagagtttcctgactgtggggagcacacacctcaggtttgtagtcaaaaattgaatgtgaactagtcattatagttatacgtttgtcattgttgttaaatccagccactttcagctgttttattacaagtgcagagtaggcagaggataaaatttaactcagatttgggtttctccagcaaaatattaagaggggaaaaaatagctgagagtttataaaaggatgagattagaatgattcacttggaatctaagctggataaagagtgaagtgaggacaggggatggccaatgaaaggccagcagactagaagtgccaatgaggccagtgaatccctgaatgggagcactagagcccatgagctgaaaggtaagggcaataactctgtgaaagggatgcccaaattggtgtttggaaatggtgcaattattggtaatgactggggtggaaaagaagtcatctcattgtggtaatattct

SEQ ID NO: 122786 - DNA, 1071 bp, Homo sapiens
ttcttaatatgctaactgtaagatacgtatgttgtaagataatagaatacacattatacctaatgtaatagaaaatattcaaggcataaatataatctgaaaaagcttatggttaatttttttagtaagtaatcttttttgatcatttttaactcctcaaaacaatacacttggcactgttgtttttaaatctcaagaataaggactcaattatttcttcaatttgttttcttcatattctgaatttcacctatatatatttattttttcatgggggagtacacaataattcagttttgaaataaattaaaataaactcagatccctttgtaaatgaaggagcattaatgtctttattaaaccacattattgaagcaagattgacatgtaaaagctgtacattttaatatacacaactttatgagtttggacataagaatatactcatgtacccatcaccacaatctataccataaatctctccatcagctccacaagttttctctcaccatctacattattattattattattacgtgtgtgtctgtgtgtgtgtgcgtgtgataggaacacaagaactaccctcttaacaaatttttaaggaacagtagtattacaaattcacctctagctttcttgaaaggcagtgccttttaattgtttatgccttcatttcattaggagtttcttctgtctaaaagcttattctgattgattttcccctaagcagcctaaaacaattgaaaaatcttgttattgtgtagctgttggaaagtcaactttgttttaaacaccacatctgacagttaaaatttactgtcaccacagtattgcccttcctgagagagatttgttgttgatttcctccctaattttgggtcacatggtagagaagcattgaacatatgttattgtgacaaaatccacacatggatatttatgaaactatagaaaccttttgcagttctccagaaacctgtgatgataacattctagttatctttggttatatttttggtgcaatatatgcatttattcagtactattaaatacctactttgtggcaagtat

SEQ ID NO: 122787 - DNA, 1013 bp, Homo sapiens
agggttagaaaagagaacaaatataagcatataagagtacagtgtacttcttgaaaatcaaactttgaaatttatcttattaaagttggtaaattcagaagcattatattctgtcagcacccacatatacccttgtctggctttgagagagttttatttttttaattttataagagttaaatttgaattggagctaatgtaactgacaagagggaaatagaagcaattggcttgcactaaacaagtttgaatggttgttaatgtgaatgactttcaggcagtgaatgtcagagaacagtagattactttctttacctcgggcattttaaaccatctcctgtggtaggattaacataatttctctctctctttcttgaatctaggaagcaaagtaattggagtctggtaattttggcctgtgggtgatgaagataaatcataacaagctatggaatacacattgacaattcacatagggctactagaacatgaactttcagtaatgcattaaacaaatattgtttctttctgatttatattcaagaaagccacagaactgttaattatgaatgcagttatcgtttgttatttttgactaaattcacatgcaaaacaaattgtttcaaaatataagctattgtgttcttaaacatgggctaagaagttgtatcttttatatgattttgagtgatcatatttgtttaaccgaaattatttgagattttaaaagaatagaggtggaagagaatacaagaccatctggtctagcccctctccttaaggcttataaatgtatacatcatcttgagcagatggaggtgtactcacctaaaattttatacaaatataggttctacagttccattcaatatcttattcttgaatttggtcactaaagcattaaaggatcctattttatattcagattattttagtattaagttcatcttgtaacatgttttaggctttggaagattagccttaatgtttttatttgtcaatataaatttata

SEQ ID NO: 122788 - DNA, 1015 bp, Homo sapiens
gtgcatgtttggatgttgtgcttttatttggggtggggggcagatactgatttagagttttctttctacaacagccaaatcctttctgtttaggtggataaaatgtgacatgggtgaactagctatccttaagcttgatttctttggagggcccttgctggaagtcccatattctgtaaagactgcatagagcttacgtacccaaattatttttttaaattatgtatatattaaaataatacatcaaatgttgcaactagaatttagaaaaaaactcattattttagaatgtttacaaaactattgtcatttttgtcaatgcactattatttttctctgttcctgggagtattttagttgtaaagtacaaagtatatacagttctatattccgcttattgtaattgccatcatgccaacccatttcctttgtttctacagaacattatcaccatcactttaaatgactgcttaatattctgttggatatatatatatatctgaatgtatgtaaccattcttatgttactgaaagtttggactaactcccgctattggccattgtaaaagccgcggtgaagatcatgaatgtaccttttttccacataactgaaaagttcttgacaaatactattcaactactttttgaaagtattatatcaatgcgctttactgacaccatcaaggccaatcatatggttttagtgcaagtaagtgctttataattaatcaagtccaactcctttattaatcatcattctgggcatttagtctcaatagggaagtgatttgatcaatatcaaacagctattgtaggagaaaaaccaagactatcatttgtattgcatttttaagcttttcttttacatgagtatctcctgtattctagactctgtctaaattactggatattctaagataaaaactctgttctctagctactcaaagtctagagaattatgattacagtagctcacaagtactgagtaattgctgtgtgtcaggcactagtgtaa

SEQ ID NO: 122789 - DNA, 1984 bp, Homo sapiens
attttagttcaagcaaataccgaatacttttttactacgtggaaattctctccctcagtaattttgttacagtcagtgtaaaggccacatcttataatatggataagaaaagttactctggacaatgcctcgttgagataactattttcttcagaatgtcctgttgttgaggattacctcaggagcttgacacccagctgcagaacacagagagattttccttacactttaagcctttctgttgccttcctcatgactaaaactgagtagtgaaaataatagtgtatggagaaaacacaaaaaaaatgaaaattaaaaaattgtatataaccacacatcctggttctttaccatgttataatgggaggaattgttagctattaattaaaagccaataaaaagtttaaatatctaatttacttgactacatttttagtgtagtgtttattttgtcttttgtttcttgagcatctgtttatcattgacagtattgttgggctacccaccaggagtactgagctaccatccaagcaaaacccattcagttacctgatgtatcgtagaacatattttttagtccagcatcatatttatatatcaaaaactcctgctgaaagatgtttactaataggaaatttaacttctcaactattagcctgagacttagatgatagagagtccaataatttgctgattgctgtatatatttatctggttgttgaaaaggagcttaagctagaagatgttgggtaaatttccatggctcagcctaaatctcacaatttgcttttcaaatattctgtatgtctatgtcctttcaatcgaggtcatgtgacaaattgtttctgtgatagaagataaactttctgagggagaggcaagttgaccccataatctcaactagtcagagaaatcatttaaagaggaagcaatttggaaactaaaaattagttcactctctattccaaaattaatatcccatgctaatgtgaaaaattgaactatggagtccattttactaagaatactgcatacatgttttctaataaaattacacttttctacatatacatacatttataatgtacatataaattttaacaattttgacaatttggtattccagtgatttccctcttgacttcctgtgcccaaactactttcttttaaatatctcacctgctttatttttttattttcgtcaaaataggtctttaaaaaattagcattaccacacagtgtattgttaatataatgtaatttttgtttaacttaggaattatttgaaattggttccagatgtgaaagccatggagattgcatgtaaataatattgtgttttgaagccagttatactgtgttaagtggataaaaacatgttactgaatattgatttatccccatacttatgttctgagtggactttggactgtttaagtaaaaatattactataaagtgctttgaagtgttttattctgagaatagccctatctatgtgagagggaatgaggatagttaacttacactcatagctgcttttttgtcttgctctattgtccaggctagagtgcagtggcgtgatcttggctcactgcaacctctgcctcctgcgttcaagcaattctcctgtctcaacttcccgagtagctgggattacaggcatgcgctaccatgcccagctaatttttgtatttttgtagagatgggtttcaccatgttgcccaggctggtcttgaactcctgacctcaagtgatctgcccgcctcggcctaccaaagtgcttgaattacagctgtgagctaccgtgcctggcccatagctgctttctaacttataaatgtcttgatattttggaattatactgtctttttatctgattcttttttctgagaaacatttaatttgtgtattctttgtggcataaaatgctttcaggctcaatcacttgtagttttactcccaacagtattaagtttatttgtt

SEQ ID NO: 122790 - DNA, 1149 bp, Homo sapiens
atgtcagacttttaatttaaaacctggacatagacatttaaagatagctaatgcatgaggggcttaaaacccagatgacaggttgataggtgcagcaaaccaccgtggcacatgtatacctatgtaacaaacctgcatgttctgcacatgtatcctgaacttaaagtaaattttttaagccaaaaaaaaaaaaaagaaaaaaacaaaagagattaaaaaatgtaattgtatggcgctggagcaggaattgatacccttcagttacaatatggagatctctcagctatcaacttatattagtgcatcattttacaaaatttcataccaaagaaacatggtaccttcttcttttttctataatgtttaaaatagtagccttcctttctcaattctttattcgtcttacatccactgattgaggtaatattttcaggaatcttcaatatctatgaaaatattagtgccattttatgtcttatggttcttttctccagcaaattttcagctgacctggctgagcgtggaaaaggatagggaatttgaaatttacagaaaagagtatatgaatagtctggattggtagccattttatgtccttattttttaaaggcatggtatttatcaaagtagactaggaagctctcttgttacttaggaacagtagctgtgaaagaagaacccaactccttagctgtgtaattgcattacttgtgctctagaaactattttactagcctggaaatttctcttgctgtgcatgttggattatagaactaggactcccttccagtatttcatattttggatgatatgacttattttgatactatgaatgtcagatgccccattaaggtgtgaaagtgagtgtgttcaaggggagttgaaataaaaggtcttttgctggcttggctgtcacactggtataaaatgtctttgaacaggtaactatttttacatggttaagcatcttaaaaatattattaacttgttattttatcagatgggtctataattattgccaaccttcagcttccatctatttataaaactaggtgtggtgattttgatagcactttgattattgaggacaggtattttggcccctaaaggaatggtaatagaattagatgattaaaatattttttcaga

SEQ ID NO: 122791 - DNA, 1147 bp, Homo sapiens
ctttaggaatgtgggtaagccttaaactaatcatagggcattaagtaaagactcaatacaggatgaattgaacaataggtgcttagtgcatagaaattatttgtatttcctaagtttccatttcatagcctttagcctatattattggaatttttcatgttgtttaactgtggatgaaagcacagttttttaactaaatggaaaatttagaaagagaaaccaggcagttaaatatgatgtcttttttattgctgacattatctgcatataaaaacacatgtaagatatatcatgtggaaagatatcccccactgcttcatgtagattcctgactgtattttggttgtcggttaagtggaaatctttttcctcttctttgtaaaactttttacttcatagaaataaagcaaactctctacaggcttctctactttctcttcagaattttattgctcctgataataatgctcctggacctttttcctacatcaatgttttaaagggttgggagagggaattttttttttttttttttgagggtgtaggacttttggctaacagcatttctcattctcaaagaatgtcattcactgtagtgggtggtttgaaaatatttacttaagggtagataaagagttcccacctgacataatcttcctgtgttaaaatccccactcaatttggcatttctgtgtactgtgcaggattgctaaaaagcagttaccatgatcagactggttgatgcatggtaaagatgtaaagcagggtgtttggaattcaacatggatggtagaaatgcgagatgtcagagaagccatatattaaagagaatttgaattggaaactgaatcccaatctgccaccgagaacattttgatcattttgatttattaaacttttataacaacattcagatggagctgaattaaaacctttagtcttggatagtttatgggacaccaaccactgtgttaccggtatcattttgaaggatctcttagcgtcagtgaaaaggggaaaaatgggtgggtaagatacttaatttaaaggaagttttcacttatattcttgcatctaactttaaatccctcttttgtttgcattgtgtcacttaaacatattttataatttcaacatattagatacc

SEQ ID NO: 122792 - DNA, 1012 bp, Homo sapiens
caggtgtcactgaggagaattaatctatgggaaaactgttggtgccttcaaccttggctgcttctgtaacttctggctcacaagacaggagtgtgaggagtgcaaaccatgtcccttgtgctttcctagtttcttgtcacctgctctaaactttagctgatagatgaatagtagcttgctatttaattctaattttctctgcttttgtctaagcagtagtgattttgccatgtatacactggtttacagttaattctgatccacttaagagaccgtgttctctttcgtagctaagagccaacactcggcagtcctgcttttcattgggccattggtatattctaattcacagcattatcttctttctgcatagctttatataaagaattctgcttataggtcttgagataaagtcaccgatctcatatcatggattataaggtttttcttctgctttctggcattttggatatgtaatgatgagcatcagaaagtttaatcatatttactttttagaattgttaaatactcctgaagtcattttggttgattttatgtggcttcctaccgtaaagagatcaatgccttgcagatataaagctttcttttccttctttaataatttataaactctgaatttaatgtttacagattacataactgatcataaatgaataatgcgtataatattctttaccttccttatctattcttggaacaggactatacaagcctggcagtcatggaagttcaaggattgctttttatcgatatctagaaataatttacttctctttctgtgcaagaacaatatgctctcctgtttgcagagctgccccttcagtgtgtttctaggtgtgtcacgtcaagcactttgtaactttcccattgagctcctgggatcagtattacaacatggatcactggcaggcctggtttcttctttatgaaaagtagtctgctagaaagatctaaaatttacaaaattattttattgtaaaataaaacgtag

SEQ ID NO: 122793 - DNA, 1054 bp, Homo sapiens
atgttaatgtcatatatattgactggggtcttgatctatgagtgtacagacatttgtcaaagattaagatctgtccaatttactaattatgtttacctgaataagacacaaatgaggaaaaaatgagtaagtgacacattttatcaaataacgaacttactggcagtgctaatcaagccatagatggtaatagcctacaggcattacttgcgtttttatccatcttgtccatttcaagtgatttgattacattcaaaggtaatttgtaatcattagcctaacttgaaataaacatgttctgagtttctgctttaagaacaccttataacttgaggatatgaaagggttgtaactggggttggactgaaagttatgcattagtattctattatgaaggtccagtataagtggacacctacagggtaaatcaaatagagcctattgctgcaacatctgtcagaccatatgctttggcttcaagttcggtgtagaaactaaaatactaatgactccatccatcattacagcgcttggcaggcctgcatcattgaattgggcagagaaattcaacagtggagttattgaaagtagggaattgtgtgggtagatttggtggcaccatttgttttggtgaattgaaatgaggctgtttaatgtgtgactggtaatcctatgcagattgtcatcaaaactgtggcaattgggccaatctgtcagtaatcgccgcaggtgctggcactgtgcctcctccgtgggcctgccaaaacaggagagtcagccaccgcttcgcccttggtgaggctcatcattgctagaatagtgtgatacagctagttgctcagccaaaggaaatgtcattccttatggagcaacacataatttaagcaatggcttgagagtactaattggagagtgaaatcagtaaaatgagatgcaaattgctctcaaaaacaaccagagcgaggctgaccccctactgtaccaaccgttctcagtgaaggggcagtgaaagcggttggtctaaaacttctgaccacatagtgcgttacctgtc

SEQ ID NO: 122794 - DNA, 1061 bp, Homo sapiens
ttgtatttgttcctttggcctggaacatcaataatctgttggttgacactcatccttgaaaattcagctgtttaaaactcagattatcttactaatgtgttcagtggttcacatactgcttggcacatagtaggtgctccatgtatgttaagtaaacaacaaaaatggaaaaaatcaatatgcgaaagtttacctttaaagagattttctatgtctgcctatatattgcctattcaggatatataacaatacttggtaataactgcttaaaaaatttaagctgcttaacctctgtaacgtaatttttcttcaaattttatattttgatttgtttacctgtacaagagttaggaaattacttacattataaggttaaatttttaattcttactgaacaaaaattagatttacttttgcatatatttagctattcccctccactgtagaaattccttgaaaactattgttgtaaatattttctgtttctttttgacaggtaatatttgaagctgaagtctcaggagggagaagtggttatattgccattgatgacatccaagtactgagttatccttgtggtaggttgtgattaagaattgtatttttctatgtcctttccacacttgccttatattggcagtgactattgattgtttatcacttggtttttgctgtctctcttgttattgttagtcctagccttctattgagttttaaaaggaaactgatatctttctagagtttttgaatcaaatatttttcaaacttgtaactaattgtatacctattaggagattcttttaaattatttcattactgagaacaaaatatacatgcaaaggcagctgttagtaggacttgttcatttttttggcatcattaaattgtctagaaaaacagagaagaatagcaaatcagagttcaacagaaaggaaaatataaagaagcctcatgaagttatttgatctgagttgagggctggggtgaaatgaagagaaataattagttcaccttattccaaatttaggactactttttttctcctctgtcataataaatgt

SEQ ID NO: 122795 - DNA, 1003 bp, Homo sapiens
taaagctcaatttaaatgaacacatatgaaactttttctcaggggtgtagtaatcttgtttaaagtacaagaagttaaacaactcaagaaagtgaagctaagatagacctagaaattaaaataatttaatgaatactgacaacaaaactgaaataaccaacaatgatgtgtatttattcattagaatgtcattgttttcaaaaaaatgatttttaaaaactttttttctgtaacttctctttccttaaaccacaaacaagcaaataaaacttattttcctaggatacatttatacagacttcaggtattacactgttgacaatcacaccttttagtttagatagcacctttctatatgctgctatttaatccttagaaaactttttttgaaagctgtattatattcatattatggggttaagacttagctctaaaagtttcaaatctcaaatttatgtgaatcctcaagaatttgtaaacaagagggcttggagtataatacagggtttttttcacccctgagaaagtggtctgtaccagagttgtctcaagttatacattatttaaagtttttaatactattttctatttcttgctaagcccttgttccagtatttacaaaatgacatgggaattatgttcccaccaaatacatttatgtgaaatgtaaatcatatgcacacacatattgcacaccctcctgtgttcatagatggccacccttccatcatgaagcattctgcttaccacaaagaccccatcctccatctcactttcagcttattccagtaaaatcaattgtcacaaagggtaaacttggagtagaaaagaagtaatgcaggtagtttatgattgggacagatggaagggagatgagccatccattccagcggcttaccttatctcattgttattgactttgaggtggttgtagtgtgagaatggaaagggtttaatggaaccatgctgccatcttgtcaatataatgtctagtcagtgtgct

SEQ ID NO: 122796 - DNA, 2399 bp, Homo sapiens
attttgtggtccaaggatgaaaattcatagaagaaggaattgtggtctggagagagtaagtagcataatcaagattcaaatcaggcttgacctctaaattcagtgtttcttagcaaattgcacgtaaacttattcttttaaaactgcctaatccagtgcttttcagactttttccacgttggtatactgagcctcattaacccatctgtctgggtccccagtcactgccagaccactggaaagtgaagggaaacaggtatttggtagacatttgctatgtgccactgtgcagcgtttagtgatattgtcaaaagttcaagcaatagcacttacttctgtgtcctttcccagcctcaggaccttttgctcttctagtagctttagccttgtttgattcttgttctgtatccacaacctactgccgtccttcctgcaagaaaatgtgtgtgctagcttagtcacttcagtctgctatagcaaaatgccataaactggatgtcttataaacaacagaaattgatttctcactgtcctggaggatggggagtccaaaatcaaggcaccaacagacttggtgtctaatgagggtctattttctcgttcatagacagtgcctactcactgtgttctcacagtgcagaagaggcaaggatctctcatgaataagggcactaatcccattcaccaaggtggagtccgcatgacctgatcacctcccagaaacctcacttcctaataccatcgctttggggattcaaatttcaacataagaattttggagtcaaacagatattggaccatgacatgtatgaatttttaaatttttaatgtctctaaaatacactaagaagtaattaattaaatgttgtaccaccttagagattcaaatgctttcaaatttcaattcttagttcagggcaaaattttgaaaggtaattccatttgatgagttcacttatatatcacactgcatagtaagcaaaatgcaagaactgtggcaccagactatctgggttagaatctggtgctgccactgaatagctgtgcgaccttgggagagatacttacctttctttgcttctatgtcttcatcagtaatattgcccctacctcatagggttgttacaagaaccaaatgaattaatatttaaagcagttggaagagtttctagtacatgatcagtattatctatgtgtttgttagcaaatgactaattaaaaagttatttatatttatagtaaattttctttaaattgaaagtttcaaaaattagttatcttagcagaatgtatgtatatttgccacctcatgtataataatcaaatcagtcctaaatcatgtagcttttgtggtgatatgatgatatacggagtaggacaaggtatatcgggtaattgtgtagatctttgagtgtattcaaagtttggcttttaagtgagcttgtcacttcgtttctctcagctccatttttagtatctataagatgtgactattaaaatctgttctacacacttgtattagtctgttttcacgctgctgataaagacacacctgagactgggcaatttacaaaagaaaatgctttaatggacttacagttccaattggctggagaaatctcacaatcatggcagaaggcaaggagaaacaagtcacatcttacatggatggcagcaggcaaagagagagcttgtgcagggaaattcccattttaaaaatcatcagatctcgtgagatttattcactatcacaagaacagcatgggtaatacctgcctccatgattcaattatctcccatgaggttcctcccaggacacatgggaattgtgggagttacaattcaagatgagatttgggtggggacacaaccaaaccatattaacacctagcaagtgttttatggggatcaaatgaagtaatgttcatgaatatactctgtgagccaggtatggtggtgcatgcctgtagtcccagttattcactgaagtgggaggattgcttgagcctaggagtttaagtttgtagtgcactatgatcatgcctgtgaatagccactgcactcgagcctggacaacatagcaagaccctgtctctaaaaaaataataaaattaaaaatactttgtaaactataaagacctatccaaagtaaatatattcttaatgatgacgacttatgtatttaaagcactgtacagttttttgcatttgctgtaaatatatgatggcaaaatgcttacctagaagtaacagaactgcatgtattactgtgtatctgatatcaatatttaaaatagtgggctgttcttctttaaagaaaaacttatctttgcttatttttaatttccttgttagcagtgggtgcttagtacaatactccaaataatatcactcctgag

SEQ ID NO: 122797 - DNA, 1053 bp, Homo sapiens
tgattcctgagatggttttggctgagaaataaattaaaattttctgaatagcattttgaagaaatgtgtactatctgaaaaatttgcaaaaatacattctaaaagttaagactactggatgctgcgtattgtacattatctaaagacgcatatataattgatgtttctgacattgctagtatctgtattgtatatggaaaatgcttggaattgaatatggtggaattgcagttttaatggaatatgcttactttgtaatacattgactctccttttatattcaatgtgtactaattagttatggtcactgtatgtgtcttcctaatgttaggggttgaagtataatagattgtaaaataccttgacctttgagccagtagaactcagttaaatttttatttgtcactaatttaatgaagcatttggaattctatttaagctatatgtgtcacttttctcatcccagaaaatatgttgatccattttagatactttctaaggtttcctcagtaggaaaatcctaggagaggacttagaatataatcttactgctcaaaatgattatatttatgctgattgcatatttacatttttcttttattttaataacacatggttgatattgttgtaatttattgatgtcaaaaactctaccaaaattataatataactatgagaaagtataatcccctttacagctatcttgttttatgaagtggtttccaggaaacgatcttagcccaaaagccagaactgcctattatgggataaggataatcgactagcaggtacaatcagcagaaaggaaagtgaatttacttggtttaaagactttcttgcagtcacagaaaatgctaaattgattttgtttttctccatagaaaaactgcagcacgttatataagaggagttgctttgggagactataataccttttacagactaatcagtgattttaggaaatgttgttgttggaattagctggaaactttgtaattggaattgactcaactttcatcacaatctctctctcctcctttttttcatattaaa

SEQ ID NO: 122798 - DNA, 1046 bp, Homo sapiens
aacaaacagttttaagtacctcagatgggccaggtacttctgcaaattttctccataccttaggatattctttgtttggactagaagactagaattaattcaagacagctattcaaacctaagccatttgctgaggtcgattcataaatcatgttaaaatgttagtctaacctcacataaattaatatgcgtcctttccccaaccttcacttctttggccaggagatgaaagctcaacatggacttcccaccccaggtattgatctcctttcagaatctgcctctgtattactgtttcgagagtcagggtcagcaggaatattgttttgggagaacaggtcacatattgcattagagtaacatatgattattttctgacctctcttctctttaacttaattctcagtgttttgacagagctcttgcatgcctgttccctaataaaggacaaaagacaatcattttcttatgacagtttcgtattttatctcaatctaacagcagcatgaattgataactacttgtacaagtaatgttattttatttggttcaatgtactatgactgacttttatttaaaagacccgttctgcaaattaccttggtttatacttaataggtagtttttataagcttagctccaagttaaacgttcaatgtttgttttattgaattactttctatatgaacttgagtagacagctgttttcatgttagtgagacttttttttttttctttcagactgacactgttgtgccaagctataaggagtagattcttcaggcagaggtcactcattgtctttcagttagagatttagaaaaacttttctaagctagtgctcctgtggtattgcatgctacaaagtggggaggccctttgggacatggtcaagtctttttaaagatcaaatcctcaatttttggaagagtatatatatctcatatacacagtttcttaaaatttagggtttgttgagacacatggaaaaaaatttaaatgccactgttgagtaattttatgctgtatactttttcagggaatag

SEQ ID NO: 122799 - DNA, 1067 bp, Homo sapiens
taacctcagtagaaatttgggggacttgttctcccagggatttgtatgatttccagctctgttacagtcaacttctaatggctcacagtctgagcctctacataagtgcttaggctgtatctcagagtgattaatgactgagtaggaaagctaaacacacagcactttgtgaactaaagaccagatcaaaccagtctggattctacccccatccctggcctctttgctcaggaccccatcctggactgttattactgattaaaaatcatctctcttttgatgtctgaatgtgttggagtgtaacaagagcactgacctgaaatgaggaggttggtatttgaaccgaacttgaacattgtctctaatacattttatcttattggatgtgtctcattatcatagcctgttaagaattttttatagtaagtttttcagacagtgcattcgatgtgttttatagtcttgtgtgtttgagaagtattagttagttatgttatctttcaagtgtttgataataatattaaataataagtagactaaatctaaagaccaagcccagtggccttgtgcaggatggcatctttctggttgataacaatgcattagtcaatttttttccagtatagaggttagactagtcataaagtgacattactttgttattatccagctctcatttctgcaccttgcccataagtggagggtgagagattctttcaaatgctttattgaaatgtagacatattaagacctggccaggtgcagtggctcacgcctgtaatcccagcactttgggaggccaaggtgggcagatcacaaagtcgggatttcaagaccagtctggcaaacagagtgaaacactgtctctactaaaaatacaaaaaattacctgggcgtggtggtgtgcacctgtaatcccagctacttgggaggctgaggcaggagaatcgcatgaacccaggaagcggaggttgcaagaagctaagatcacgccattgcactccagcccaggctacagtgcgagactccgtctcaaataaataaataaataaataaataaataaata

SEQ ID NO: 122800 - DNA, 1026 bp, Homo sapiens
tgacctgttttaaccctttgtggtgggggtgttttgttgcaatactgctgtgggaaggcaccaccctttcttgttttccacataggactcatatattcatattttttatacttattctgccctctaatctctttctgcagccatctcattcattttcatcccaactaccattccgttttgtacacttatagctatattattgcctctttatctcacaagttgtggtatgataaataagtgatgtttgtacactgtttttgcaaaaaagctcacagtgctttctgggggtatctactaattaatctttacagaatccctatgagatagatagggctggatagggtattcagcacacaattcactagaccatgctgtctctctattatgataaaggattattattatgttaaaatgtttatacactgaatacataaatttgtagagattgatgtaaaccgaatcccttggcaaaaatatgaacatgcctgtagcataaaattgcaattgtgaagcaggttttatcaacttctggtgtttaaagaattattccagatttgcacattaaacctctgttggatagcttgttttcgttatcttgcctcttggggaatgacagggagcagtgagctactgaacttctgggatttcagcaagtgacaaactcagattcttgatagcgttatttaaaaagtatagcaagctcctctggcttgtgtgtgactcatctacatgtatataatagcttgattgacttatataattagtacttttatgtttatatactgataatatttgtggaaatctagtcaggtattttatgcttttgcagagtttgatgtggattagctgcattgccttttctacaaaagcaaacaccctgaagagttgtctcctttagggagggagcttcactcttttcagtcaacagccatgtatagtcctaagatgctttagtagtgtttcccccaccgtagcatatggattcactggggaaaaacacaaataaaccaggcagcagaaaagaaa

SEQ ID NO: 122801 - DNA, 1051 bp, Homo sapiens
agactgtacttagattttataaatttgatttgtggctcattttcttgaagaatagcacatataacaaattgtatttggtgtagtgttaataatgattgaaatcttagtaagacaatataattggacatttctggaccctgaaacagacactgcttctaaaactttgctgtgaacaagaatttcaagtccattctagtggtttataatgtcagagtctttaagaatcacctggtatgcttttcaaacatgcaggtccaagggccctaccactcagaaatgatgactttccatatctttagtagaacttagaaatgttaatttataatatatattttagatgggtctaatgcaagtagttcagagacaccacttcaagaagcactggtgcacgctgtagccatagtgaccatagatttggtggaagtaagaatggattgctgaacatgggattcagatggaaaatggaagaaagccaatgcagtaataagaaagaagaaaggtcaggagcttgaggaaacaattataccaagagaaggtatttcatacttttaaatttaaaagtgctaaagtggtatttgctaatttttaaggaattctcagttttcaaagctaggttccactaaattatataacatatacttaatgttaactgactatagagtgtgaagggggagagtatttcaagcatatgaggatgaataaacagttttttcctaaaagtatttgtaatttaatatagtaggtttcaaatgttcttgtttcatcatttttatttgaggggtatcttacttgtaattctaacatcaaaagcagaaccagatgtctaaaatctttggtttgatttctaacagagctgaatcccatgcccttttatcctctgtttcatgtattccacactcttctaaagtagagcattcttaaagcatcactatggaaattctaggattcttcagcacacaaattgaaaatgattattttagaaagttctcaatacaaaattgagtatgcagatagagatattttcacatgaaatggggaaataatctagatt

SEQ ID NO: 122802 - DNA, 1174 bp, Homo sapiens
atttagcgttctactgaattctcttgaacaaataaatctggagatgcttttctttgtgcaaagttgcatttctttaaacaggtaatcatcgttattaaacttagcaattggtagagttatatatgttttaatttcaagggctttaatgattattttctctaacaaccagattttagagactcataagaagccacttgatttgcacatatcacacacagaaagggttcttagtgagcctttccattcaactactttcaaaaaaacttaaatgttttatgcattttacaaataactttttctcttaaagtccaaccaaaggggtgttttgtgtatttttatcctttacatccattgaaattacctgttctgtatgatataatgaaacatgggtacttatttaagctaaaatatagttgctaaagttgggcctccctgatgttaaatgctacccccttcagtagtgacattaattaaagaaaacttgttaatttgtgagttattctaaaatactttctctcataaagaagctatgtttctccttctaactagtatacttaggttttgcttggcaagactatgtggaaagaggtcttatgtcaccccagcttagcagtgaagagcagaaggcactactgtgcctctcttggtctttttaggtaaaccacaggcaaaatatggagcacatttcagaataatgttaatgctccaaaattgcataagtcctgggctccaaaattgcataagtcgtggggctgtgacacaaccatcttccatgattgtgtttcagtctgactgcagtgttgcttttgtcttcgtagggtaaactctgttgtttcaacaggtatctagacttcaaataattgttaaatgagtgttgtaattgaaataatcagcccttggaactgcaatcattatgaaaattgtatgctctttaaattctatgtaaaaatagattgttttaaagaaaaaaaattcattttaaaaacagaaatgtgcttgaacaacttattttaatggaataaagttaagcaacgaatcttcattccacagctttaacaagtcttccagcttaaggtaatcaactacagcagatattattttaagatattgaggtagcaaagagtcctatctacttagagaatgtatgatttataatagaataccatgcactaat

SEQ ID NO: 122803 - DNA, 1041 bp, Homo sapiens
ccaagtggttccaagtcggacaagttctgtgtccaatatgccaagtaagattcattgtgccatagaagggcatgctactccccaagatctcctggagaataaagtgggttgctgttcacaaatggacctgctggttttaatgcagcccagttaataaatggcattcactcagcatacagccaagagtactccattgattggcagcaggaagctccttgttcatgttgagagttcctttttgcggtgccacttgcctctgagaattgtcagtgggctgccttcacagtgcagcaaaaggtcctttctgctttttcattgccatttgcttcccagtttggagccagttgagttatttagctatgggcctgagttgtgtaaggtacagcatttttaaatgagtttgtttttgtgtcttccttgttcggagttttttgtttgtttgtttttttggaaaaacatccagcaaaggatacggaaggcaacgttatcctgtgcttcttagttatcactatgctaactgaaattcagtggactacccttgtcaagaggttatgccgtatattgagtttcagccttgggtctcactctagttcagagagagctcatgttacagaaacaatcctctcacctcagccaataaatcctaacaaatcatctctacacccagtgagaccatgtatatctatcagctatcttatggagtgaccagaaatcagagagaaagaaggcacaatctacttcccctgttatccaagtaaaagcttagtcatctataactaacttaataaagcatgtgcttgttgggtaaagacagagtagctcactaagcttagaaaagaaagataagagaaaggctattcattgtctagtacctttgcatttctgattagcctgcatataagtggatggcattttttttgtaggcaccgagactggaactttccatattatttttcaatcttattacctctactagaaagacagtggataagggagattacttaaaccattttttgtgatcatattgttgggagggagtga

SEQ ID NO: 122804 - DNA, 1167 bp, Homo sapiens
aaaaagcttagaaccctgtgaaggtgacctctctggttcctgatggtgatttgcttttattacaaaatgtctgctctactttgactttaaatagttgttgttgattcattgatgaaacttatggttgtgtaaataaattttaacagatgaacaaaagagccctggtagttaacagaacaattaatgtaaatctgtgacaagcctcttttcattctgctcagtcatacctgcttttatgtagggtggtggcagctgccacagtacccttcattgtttcttttgagaaatatttccataaattagtccaattccctttcagtaactgattgaaaaataatgagcggtcaggagaaataagcattgtttgttcaatgcatgattttttcttacttaggagtttgttttatctaaggggaatgaggaagacagatgctaaaaggagcagtggaagagataccagttctttgcttatgttctcaactagcactcactttggtttgctgaatctgaaaaaatacatttctgatttcttgttttgcatacttctttattaattatttagcgtacattgatcaggcagataaatgtgagaaccatttccgtctaatcagtttaatgatgtttctgacaatgctatactgtttcatataatacatgacaaatagataacaatttaaaattatttttgtcttcaattatgttgtctgctgactttgatagttaattggaattggtctagtttttagggctttccagtttttgaacaacttgaatttttgtgtgaactctgtccattttcatttcaaagacttatttttcttcacttcagtgtgtatataatatgtgaacaaaatattggtgttataagggacaaacaaaaacgaatacgttttttatctaaaatttaacttttgtgctgtggtgatttcagtttcaattcttagaaaacaaatacatttttcatttgagagaatgtgggaagaaggaaatatacagcaaatgtcagacatttgtagtcttttcaattttattattcattacataatattacatagaatctaattattctgttgttagtggggttggaatataaacgaaaacaaactttggacactaaattttactcatgtaatctagtggacaatttatagttaattttagctgtct

SEQ ID NO: 122805 - DNA, 1005 bp, Homo sapiens
tttaaatctcaaggtctaacacaaaattgaccttttaaagaaataacagcatccagggacggaacctcatagtgagggttactgaacaaactctccaaactagtaaatgaaccttttttttgttaagagcatataaactcagtcacagaatcataaagtgggtactgacactattgattgtctgatttaatcataattcaatgaatcatttctgaaacaaacatccaaagctttgtgaataacttatcctttttggcttatttttatatgtcatttaatttattcaattaattaatcaaaattaaaataattaatgaaaatgcctcccccttaacatagttcatgaaactctacatcacatttatttcccaaatgttactttcaaaaagtcagtaaatcagtccagtctgaagattacaataaactcaaaaaggctatttcttcctgaacaaagctgtaggaaagaatctgtcaataagtagctctttgtcaaaccaccaacaaattttggacctaaacttattttaacacatagaaatactttctctagtttgaaggttttgtgccaatgtctccaaacacttcctcatcaacagggtggggaagaaagaggggcaatctctcattaccatgggatgcatatgtatatctatgtatgacacttccccaataatgggggtgggggaggcaagagggcaatctctcattaccatgagatgcatatttacatctatgtattacacatatagtgagaactgatgacatcaaaacatacaccagaaaagtacagatgattacctgatattcattgggccaaaaggtgctcactgctagctcagcccgaagccaatctctacccgtgaatccagtcacattccaaattggattggcaagaggtcctttattcaccctaactaatatgttcaaagtgccaggattcagtcctttctggctatataataggtaactgaaatcaatgcagtgagtgtcgttctccttcattgt

SEQ ID NO: 122806 - DNA, 1053 bp, Homo sapiens
ttttactggttttattttggatgggggtggggtgatggtagcaattctgacctttggattttagtccaaatattgattctgggcaactagaacagtggccaaaactacctctcttactcaccctaagaaacttggttgtgggactacagctacctataaaagaagaatcagatgtcctgtggtattattgatgtcccttgtgggaccttttctaagtctaaataagtccttagggtcaagctgtttctggaagcctggcagaaagtttatctgcagcaatttgtcaccatgagcttacttgttagactctcatttatttacttatgttcattttcttaggtacagaaggatatttttttttctgtgttccaggaagcaatttttgccaaagctaccgtggggaggaaaattatgattgtgtttcaatcacaattagttgcaattttgcctctccagatacatatgtgtgttgtagcagcttgtcagttttttcttaccccaaacacattgtcttttgaattgaatgctgatcaggataaatatataacacactcaaaggggaattttggtcttatatttgggaaaaatacattagtagatggctactcagattcaagatgtgtttagtgagggtcaagaggtgaatatgcttcagatacctgaattagttacatgggcttgttagtgcaagattaaatggctttaatttaactgccgatagagtctgttgtgggttcctggaagtcacccaaattgttaatcactattgaaataacatattggtaaaaaataagaaaatttattaattttaaaagttagctgtgtaagttagaagcttagaatgaattttatttcccttgtcctctgtagtattttactgaaaaaaggtttgtaatcagattgctacattccatgctccataataaaatacagagcagcattattttgataaagtaaattgactcttatattttatttataaaatatttaagatttttttgaaaacttttcaaaagcaaaaaacataatagcattatgggatttatatgtgta

SEQ ID NO: 122807 - DNA, 1003 bp, Homo sapiens
aaatgtttgaaagtttttgcccttagggttttgggagttcagactggtaaattctaattttaagaaggggaattttaaactctggggtacattttaaggaagaactaggtgagaaaatgagctaccaggaacattcatttaatcaatttacttgtgaaaattacatgagaaactgatgatctgtattttatgatattttttctttatttttgaggctgaagttctttaacaaacttttcagttatctatcaaatgttccttcagatatttaaggaattatagtgatgattttctctctctcctttttgtctgaacatgtcctgtttaaattcgcgttcattttctaccacatagtacacactaacctctctgcctctataaaataagaatactgttgatgtggatttacagatgtctttttcccgtgtttatatcaccaccgcttattttggcacagtaatgccaccttttatttacttaaagtgctaagattaggtttaaaaatctcatttatcaggcccttgctcttcaaagagtagaagatggtagaagttataactccaagactgaatgagtcatgtttcatctgtagactcagggctgtctcttttagattcctggctaatttcaggctttgcctcacttttatgattcatcagcacctagcgaagtatcagacatacttgtttgtagaggtgcttagaaattgaagaagagttgaagtaaacttgtcactctttttttttgcttagcttcttttaggttagagggctaagagtatgacattaaactggagataaaagactcaatttagtggctctaaaggagttaatatggtttgcacattgaaagctctactagctaacaggtaatataagcttgcttggtgataacttttcattttaagagtaaatattaaattgtgttcaaatcccacatattttggcctcatggacgtataggcccagtgtttgcattactttaagttattctagagtaacta

SEQ ID NO: 122808 - DNA, 1060 bp, Homo sapiens
atagaaatttattttttggtaatttgataaaatggtttgctaggcagctttaccctttattctcacttttggacgttgcataattactgaactcagttgttctgcatgtaagtgtaagaaaactttcatcttcacatcagaatatttggattgtaaacaacatttaaagaatgtttaggtgttgtaaaacaatgaagtcaatatactcttaagaattttagagttagctgttaccataagggaaaccagcttttttgtttctgtgaatataattgtaactctccagtaaagtgttaacattcattaaaacttttactagttgagttctggtttctgtaaaatatttgttgatgaaataatttcctttaagaacatgctataatttgcatgtaattacttcagcctgaccttgaacagataagggctgaccattggaggctgaaagcatgtgtgattaaaagttagtctagatgaaagtggcctaggcttgaatgtgagcttcatcatgtattagctgtgtaatcttaagcaagttagtttaaattcctacgcttcatagtccatgtaaaacaggaataatactagtgccctcatactgtcataagaattggatgagttaatacttataaaatgcttagcacattgccttactctttctaatcatgttaaccattcttattgccagttatatagatgcttatgtggtaaaaaagacatgaataaaaatacaacaaatttagaatgtgtgagatatatcgtaacattaaacatgtaaaggaggctgggcgtggtggctcacgcctgtaatcccagcactttgggaggccgaggcgggcagatcatgaggtcaggagattgagaccatcctggctaacacggtgaaaccccgtctctactaaaaatacaagaaattagccgggcggtggtggatgcctgtagtcccagctacttaggaggctgaggcaggagaatggtgtgaacccaggaggcagagcttgcagtgagccgagatggtgccactacactccagcctgggcgacagagtgagactcagtctcaa

SEQ ID NO: 122809 - DNA, 1083 bp, Homo sapiens
gtaaatgctgacaaactggttagaattaaatggggagggtttgggatggagtcctggataattcagcgtcgccaattgtcagtgttggaaaaccagcatgcagaatatagtagaactgcatttaaattaaccatacatcaacagatatttattaagggcctaccatataccaggcatggggttagaaaagtcaacagagtagtagattattcttcgcttatggagtttacatccttaaagaaggtggcacatagagaccaaggtactataatatagtaggtccaacccagctagcttccctgcagtgctggggctgctgagcatcaaacgagaagtttgcttggtgttgggagcctgtttctatgaagatatctatcttctaacgctggagtcatcctctgaatccaaagaagctaatactgtgagaggtaggagggaagtaacatgatgaagggaatagcagatctgtgtttgcaatctgacttgcatgctcattaagtctaaaagcaggcaaactgtcaccatgattttaattcactctcttttatgtttcatgaacccacacagttggttttatatatgttcaatgcacacttgacatgcctccacatcctcattgtgtgttattaatactgtaaatatgtaaggcattgttgtcacagtctctgggatcatagacttgattgatttctcaactctgtatcccgaggtggataagttaccttaaacttaagagtttatttactcagccataaaaatggatactgtgatatccactttgtagtagtcttttgcatgtctgagatgtgtaacccctttagtccagtacttggtacaaatagatgcttagtaaatggagatgtttttgttagtataagaagagccacaatttttatttaatacttaaaattgagaaatagggaaattattaaaactttaacatacaacaacagaagagatgtgaaacatatttatgtacattctttcatttagagtttaaaggttttaattacatctgttgtattagttgaaactttcttgaataactacagtgtttttccgtaagtgatccaagttttctat

SEQ ID NO: 122810 - DNA, 1040 bp, Homo sapiens
ttttgtatgtcaagaatttaagaataaagaatagtcagttttcacatgcagtattttgtttaccaggtagaagcctaacttaaactcctatttatcagaccaggatctgatatattttgaatgtcttataaaatatctatattgttcttgtaaaatgtctatctatattgttcttatatctgaggttttacctggggttccctgcctttaaacgttatttacatatggaatattttcatttttctcttcaaagttaaactgtactttggaaaagagctcactctctataatcattactgcacttctcaaaactgccaccttttcttcaggaatatagaagtgggaaatgattctgtaaaatttcaaggaaagagtggtgggacagtaatggggaaataacctctttcccttggtaaaatgtgtaatatatcttttaaaggcaggaaacttgacttgtgaagtgatggtagaatttaaactgcatgcaaagccaaggctctttaaaagaacgtgaattaagtcaactatgtagtttagctcttgggtgatttttttgttgttattgctgtgtgtgtgtttttttttttgtttgtttgttttttgttttgttttgtttttttaaatagagtgaagagttttattcttctatagcctctgaataatggaaagacttcctggtgcctgaattttaaagaccattattgtagtctataattgtattgtactttggaactagagagtactgtagaaacctagtccaaatgccttactttacagacatggaaacttagttgcagagaagtagcagtacttgcttggtgaagagcacgtagctacttggagttaaggtgacaattgtcatggctcacccctcactctaggttttgtggtcctaaagagttaaaggaaaataatttctgactcagatactcctcattccagttagtagcaatcttgagttagtagcatttattttgtgttaaaaataaattggaagtgagttgacaggaatgataaagtttcattgggggaaaattagg

SEQ ID NO: 122811 - DNA, 1025 bp, Homo sapiens
aagataaagatggtgattggttgggtgagttagtagttagggttctttcagtatcttagagttgactccacaaccacagttggaaggaaggaggctctttaaccaaagtatgaactactgttgaaatatgctgatgaagtgtgagaatgacagcagcagattgtaatggattttgaagtgttccaggttttaatagtaactaatagtagaactatagttcaaatctgtaatgacaacattgaaactgtagtcaaaatactaaatctagattgcattaaacctttttatgagaatacgtaaaattatcatatgctaacaagctatcaatctgagttagaaatgcttggcaataaaagtgttgtttcatttgattgatattgaagtagccgtttgttttatactaacttcacattatggtacagatagagtccaaactgatgaaacagatgtaactaataaaatgaatcgacagtataataattgtaaagggaaataatcgaagacaaagaaagtgttttttgagtttttttgctgattgggtggtgagagtggaagagcgtgggaaagcgtggtataattcatagacaaatcctagtatttctctgtattcagtttcatttcactgagttgtctgattgtaattgagttgttcatattgttctcttgaaatgttttgaggcaaatgaaatcttctaagaattcaagtatagtgaaacaatagccacaagacatggtaaacttattgctgatgttaacaaaggacaaaaagggaaaacatgatttgtatttagtagtgttggtgctattgcttggaaccaaatatttaaaattatttgcaaggcaaatagatttgactttaatgatgaattttggtaataaatcatgaagggaatcttttaatctttgaagtaataagctaagcgtgcttttttgtgagatgaattgactttaaaaatagtaataacaaaagtctaaaacatatttacaaatgatgatttttgataggacttttatataaaaatttg

SEQ ID NO: 122812 - DNA, 1093 bp, Homo sapiens
atggactacttgaagggtaagccacttaatgaaggctggtttttaatgtaaggactgttaccctcgcagacataaatgcaacatgaaaaatgtctaaattacagtggacagaaatggcatgctgagactggaattttttcctgatatttcaggtacataatgcatctaagttagatatgtcctaatatatttcaggggaaaagaatagcctagtattaaaaaaaaggaaataaaaatgaatataggtgtcagtgctagagaacttccaacctcctagatgaattaagataggaacacacagcaatttcaaagactatatagtcacctttaacatataccttaaaatcaatacatagtccaaagactcaaaatttcttttccctggtaggagtgtgaccgaaaatacagttatgaccttatacttctcctctccaaaaataaacttgactcaagataggtaggtactatctcagtttaaaagcttattatctttcaaacacaagaagaatgccagggaaatacatacacacacacacacacacacaacaaaaaaaacaaaaaaaaacaaaaaaaaaccgagcaaacaagaaaaggtaggtaactaggaattattaaaaatatatatgatattaattatctcttataattaatgtgaaaaatatggagttatgattatatattagattatcattacatataaaagatgctttaaaatcttggaagaatgttagttttccaacctagtttctgccaagagtggtatgttgtaaagacctctactccctcaccaaagaggaaattattggctgagatgtatttttcaatgaaaagtgaacattttctaaatttagagcatatgacaacttagaaatgctcacagcatcatgaagtctccacctagccatgctgattaaaaagacgctggcttgctttttctaggtttatgagaataaaattaaataggacagttttacaaacttcatcaagctggttatgtatttctgtatgttcctcccacctcagttatttaagagttggagattaaataggaaagtagggtggcaattttgactattcaaaagttatgttttga

SEQ ID NO: 122813 - DNA, 1038 bp, Homo sapiens
gtggctcacgcctgtaatcccagcactttggaagaccgaggcgggcggatcacgaggttaggagttcgagaccagcctgagcaacatggtgaaaccccgtctctactaaaaatagaaaaattagtcaggcatggtggcagctgcctgtaatcccagctactcaggaggctgaggaaggagaattgcttgaactgggaggcggaggttgcagtgagccgagatcaggccactgcactgcagcctgggtaacagagtgagactctgtcttaaaaaaaaaaaaaaaaaaaagtccttatgaacatagaccatatttttttgtgttttatttctcaaaaaaaattatttttcttagacaaaaatgtcaacttctgtaatgtaagttttaaaatatttttgtcaagaattaaacaagatgtttttcctcttgttagaaaattaattgaattcaaaaataccccatttaccaaacattatattgagttgagatttttatgtaattagacccttacataattattaagatttgaccttagtctttataaatattacctatctatattggatacacttaaatgttgttaattctatcaaaaaagtgttctcttttcatatttctttctctctttttgtttttgacttttgcttgtcaaattccgatcttctgtccctcaaaagtctattgtatatatattttcagaacccatagagaataagagctgttgcatagaactagaaatcattctttgatctcaaagacatgtgtgttcttgacattgtttgtcaatttttttatgcttatgacctcatgaaataaatttatttgaccattttactatatgttctctcctagatctgagagtagggattgtgactgacatctcaatacatttatctttgactgtaattataactgctttttatttttaacaggtttttgcaaaatagctaattgaattttagtttagagtctctagagaacttatttgatagtatttaaaattatgactgaattgtatcccaccttcagtctagtgtttt

SEQ ID NO: 122814 - DNA, 1035 bp, Homo sapiens
aaacaaaaacaaaacaaacaaaaaaccccaaatgtttgggaactctataaaagctggctctccaaacctaacttgttattgaactgtgtgatacttggtgctattaactggcttctgtttattaactttttggactgaaagccaagagtgagagaaaaaaggatgaataaatagattagaatgaaagaagactgaagatagatagtagagaataataaaaaaaattgtttctattcatgaggagatacagtaccatcaatcattgcttaaaatgttctgtagcagttcctacttactacttactacacagttccacatactagtttggtcagattacaatgatgatgactgaaaggtctgccaaatagaataaaaaatagcatgcagaagaatgagtacttcataagacagttctagtgtccccaaatcatatgaaattatgaacacctacttaactcagtcatcaaagaaatgcatatttaaaacacagtgagaaactactgtacaatcagtggaaaaatgaaaattttaattccaagtgttggtaagaatgtagaataagtaaaaccctctaatactactgttggagcataaatctgtacaaccttgtgaccagcaaatccattcttgggtataagcccagcaggactgagtatgcatgttcaccaaaagacatgtgcaagaatgttgatagcatcagcattcataatagttccaagctaaaaacaacccaaatgtctgtcagcagtgcaatgtataaataaatggtggcatattcataaagtgaaatattgtactgcaaataaatgaaagaaccattgctttatacaataacatgaatgaatttcgcaaacacaatcttaagggagagaaaccagatgcaagagagtatgtattatatacatttatataaattatgtaagtttcagaaacaggcaaaactaatcaatgatattagaaatcagcatattatttacttgaaggagggtttgggtaatgatggttagtgcttgtcaggtggcatgaaggagtctt

SEQ ID NO: 122815 - DNA, 1052 bp, Homo sapiens
aaaaagagtaagtccttcttgagtgtgaattttagatatgacaattttagacatagccattagaaatgaaaatgttaattctgcttattgaagagagaaaattctatcagcagcatccctgaacttgctgatcaatgtgatttaaaaaaaaaagtgaaaacatcaacaataaacaatttatcacaagcacacaaagtaaataaaacctaaaagttacatttctaaatgtaatttttagtttgtaaatgaatatggtaaatatttccttgaaaaattttgtgttggttcccccgtgatgtgtacttttataatagaatgaattaaatttgctttttactctgaattgtcactctccgtgattgagtaggaaatggttatttttgaggctgaactgagccataatttcctttgcagagggaaaactggaactgtgtggttgacactctttgtttcttatatttgacccctactttgtcagcagactcatttaattttgtgcgtagatttgtattttttctttcaaaggtatgtaaccttattttcctggtgcattttaattaaactactgtaatttttcacctgaattttctctgtggtatatttagactaaacttttcatataaaattaaaggatgtgggtgggctgggatgcacacattttgaatgtttatcatcatagaataataagaaagatgttgatttatggaaatgttaccattgctaattaccattgatggtgggtaatgaatagttgaagaattactgctcagatgaccttgttggctcacctttgatgaacagcttaatcggtggttacagtacaggatgatatgcacagaaaatgaaagcatttgaaattcagccatatcttccaattaataggacattaagtaattaatcatgcagaggagggaaaaaggtcacggccactttgccgaatgaaacagtgtttagtcttcagagaggtgagagaaagcactcatgtatgttattcttttagtcatctctttttataatagatactatttttttcattttccttctgatattcc

SEQ ID NO: 122816 - DNA, 1050 bp, Homo sapiens
agcattgaagatgattggaaagagatattaatttaccagcaaattaacactccatctcatagaaagagcactaataaattaagatctgctccatatcaccattactaatattgttttagaattttttatggatttaaataattttacacacatacagaggaaaacaaacagtattatttagacattatgaatttatacttagaaggcccagtagcatcaattgtaaaattactagatttagatcattagcaaaatatttgagactgcaaattttcaaaaagaggtgacttttccaaatatcatcaataaattataagaaagtataatgtgggaaaggctagaaataaatataaaccaaaatattagcacttactacttctggtttttgggaatatatgtgatcttttaaataaatttaaaaagccctattgtttacgtagtatttactgtgtgctgtgaactgtgttaagtaatttttgtattttaaaaatagctattggctttacacttcatttgtgttctgaccaaatattttcattagtcccctttgagatccataaagcctttctgagttttgtgaatgtaatgcagctaaagattataattgtaaaactgcattccaaatggcacgtattgtaatttgctgctacttatatctgcttgaagctgtcaatatgtagagaatagatttgatcattgaactgaagtaaaactgctctcaatttaggagtgaaaaattttaaggccccacctactttctctctgggaaaagatgtttctgttttctgtgtgtgtttatattttctctatttaatgtagatagtaatgttgactagtttacatctgacttttcttccaggtaacattgagatttagaaaaagtacaatatggctggcaccctgagtttttggagagcttaactttgtgtccgaaatgcttaagaagaggagtgtgttcatttgctgtggttgtgattatgattataaacttaaggctggtaggccgggtgtggtggttcatgcctgtaatcccagtactttgagaggctg

SEQ ID NO: 122817 - DNA, 1044 bp, Homo sapiens
cagccgggttcctaacaagccacagacatgtaccagtccatgacctgggggttagggacccctgctttaggacatgcagaacaagtttgtaatgaggactgcgacctctaggtcaagccacatttttcctaaaggtaacattttatttggagtatttggaattttgaggagtgcgagggtggggatggtttgaaggaactgtgattatgttaaaaattaacacctaatggattttagatggttagacctttgtaataaatggaattcataaagcctagcattggcaaaaatacatatcaattttttttgacgagatacagtgtctaatagaatgttagcgtccatctttgcatctaaaataatttaaaaacaaataaattcacttgcacctaggcatttttactttctctttcatctctctgtatatgggtgggaagtaatgtgatacattgcccagaatgtgaagagtgtgagaggaacacacacaaagtggttgccaagaatgtgtctgggaattagacacgaaaaggaccacgttcctttttcttctcataccacgtaagattccctgtggaattctgcttgttcctcagggaggaaaagcaaaccatgagttcctggcaatattattggctatgagaaagttaaggaagagatactgagtgacaaaaataccatgatgatcgaacaaattttcttgttattaagcaaatcaaaatggaaggcccacctttattggctaattattatatgttagtgaagtcagaatgatttataatagtgatagacccagaaagaacctttaatgatatgcaaacacattagttttcttgtattaaagtgatctgtacctgttgacattattaaatgactcccatgctttccattctaacatgattgcttttgaatttgcattattaaccattatagtttttctatgtacaaatggtgtataaacttctctttggaggtgctgatatttaatggcctattcttgggaaaggttgcagggagaatattatgatccatagggcaattttgaaa

SEQ ID NO: 122818 - DNA, 1039 bp, Homo sapiens
tgaaacagggacataggcatatttttgtatgattcacatcagagctgataatcttaatggtttgtaaagggcctaaatgattctacagttttatataaagcatgttaaactatcaaggctcattattacataactataaatggacagagttttataataagaaaaatgtacatttgtttagccattgtctcctaggaacttctctctattattacactattgcatttgcaaaggcaccaaaggtgcagtttggtttatatactgcagtagtaattcctaaaagatttaattgtatcaggttttttaacttaaaaatggaatcctatttaaagtatatccaaatattcgtacaataagaagttatcacagtctacctattttgtaaatgaggtgcagtgtttagttttcattggggtttttgattttctgttttgagcatttaaaacaaaatcctttgaaaatagtagttggtgatcacaatggtttatgacaattttaacaaattgtattagaagactctaaggagctgtattttcaaccgtgctttttctcttccttccttcctttctcttccctcactttttttcttcctcttccttccttccttccttcctttttgcattggggtaagaacataaataatattacatctttccactatgtctaaaaaagttggaggtggagaacagtatattttccatgaaaatgtcagcctgccacatagctctgcttagtaggcaaaccgttattcatttggattctctcttggctttacatttggaaacagttttagtgttaggtacttatgattgaaaaggagatctcatgttgagcttttattgcgttggatgcgcttaaaggaggttttgtaaaagaccattgcttcattaagaaaggaagaaagaaaaacaaacaattacatccagggaaatgctaggatttttgatagtttaacatgaccatgtcttgagcattttcagttcataatgaggcttgccctaactaaaatggcatttcatttcggttgatgtactcttga

SEQ ID NO: 122819 - DNA, 1093 bp, Homo sapiens
gtggtgagatacatcacctggggatgggaatcgggggaatgaggaatttgatcagatgtataataggttggagggttctcactaaactgataagcaggattttgctaacattgggctattcacgtctggcattcttggggcctagttgagaaatgggcttagaagagcctgaataaattctggtctaggaaggctgggagtgctggctcacacctgtaatcctagcactttgggaagccgaggcaggtggatcacaaggtcaggagttcaagaccagcctggccaacatggtgaaaccctgtctctacaaaaagtacaaaaattagccaggtgtggtggcacgtgcctgtagtcccagctactcgtgagtctgaggcaggagaattgcttgaacctgggaggtggaggttgcagtgagccaagagcgtgccagtgcactccagcttgggcaacagtgtgagactccatctcaaaaacaaaagaaaaaaaaatctggtctaggagagtgtctctgtcaagccccggaaactttcactctttccatatctctatttgcttatttcccaggcatagcaaactgaaatcattacattcctgtacaaatatgtattttcttcctccaaccttccctgctggctttgactcagttagtgattaatatcagaaacctgggagtcataattccttctctgtctctgcctcaccttcaagtattaagctgtatttagtttaataacagatctttctactttattgcatttcaccccaacctcaccgttttagtctctgccacttggatgactatacttgctccctaatctagtgttccctcaaatccaggctccagacaacttgtacctttggattataatatgataattttacttttcttttcccactttgttcctcctcctctttcccctttcctctcttctttcctcctctatttttctagtctccgcatcccttattccctcctacttttcttcttctcaattcacttcctcacccctcttccctcatctccttcttacgtctccctcctccaggtacctggcagatagaatcataaagacttgtgtgtttcagtaat

SEQ ID NO: 122820 - DNA, 1055 bp, Homo sapiens
tatgcagtagaatatactgtatagttttgaaaagaaaaagtattacttgactttgtcttatttaagctttagatattctgaggggtaaaaaacacaagattgcagttgttagaaaagctgttttgagcatttttcccctactgttttccttagttttatttgcaagctggagcaggtattaaagatgaagtgttctggtgggagcggtagcccagagtgcttgaagcattgctaatttcaaaccttataatttagttaaattgaaacataactgcatttagatgaatgggctgctagttttccttcccaaagcaaacatgccaacctctcattacttcttgtctgtgctacggcttctgtgctattcagatctgctcgtttacacataattgacatgtaacagtgtcacagactttttattttgcagaaagaatttttaaaaaattaggaatgctttccatagcatgccgtatcaattattctacattttgaagtgagaatgacagagtgatccagaaacttggtgtttctgtggaaagcggtttgtacagtacttggctcatgcttttacagacctgggagtaagtgacacagtaggtctgattacaaatacagtttatcttcatttggaatccatgacttctattaaatttaattacttcccccgtggcttctattaaatttaattaattccccctgcagctggcatggtagaggtgctgctgctaaatgaaggtgattgctaattgagggagttttctgaaagaggttttaccctttctcttgtttatctggaaatcgcttatccagccagacatctgagaacattagtgagaagtgcaggttgcaaagtcataggtgagttcatcaccgttacttagagaatggtagattttttttttttctttttctcttggatctgattctgcagttaacatgccttttggtgagaggccagtgtaggattctaattgaagaaaactggcccagtcttaacctatacaagatggaacatgttaggtctatatacttggaattttctagcaaccctgtcg

SEQ ID NO: 122821 - DNA, 1051 bp, Homo sapiens
gcgttagaggtgaaatgcataaaggggcatccaacatggctggtggctggccatgtgaacaagacatttgcatttgccacagcataaagaaggatatttctgagtcatggagtattttattatgtttatttggccccaatatttccaaataaaaagaggcctttgcttttgtgctacaggcgtttcttatctttaggaagaatgggccgggcgcggtggctcacacctgtaatcccagcactttgggaggtcaaggcaggcggatcacaaggtcaggagttcgagacaagcctgaccaatatggtgaaaccccatctctactaaaaatacaaaaattagctgggcttggtggcacacgcgtgtagtcccagctactcaggaggcgaggcaggagaattgcttgaacctggtaggtggaggttacagtgagccaagatcgtgccattgcactccagcctgggtgacagagtgagactccatctaaaaaaaaaaaaaaaggcacggttttgaatctgcacactcaaaaatggccacagctttcccgctactttaagcactcataatagattaagcatgggtcagatctcaccactcattagctattgggtctgaccactaattatttagtggatctctagatcagttatgtaacatctctaaatcttactttcttctactgtaaattagagataaaaaaagtagccaactcctagtggttttgtgagcatttaatgaaatgatctatgtaaagtgctcagcatggtgcctgacatatggtggagacttgttatatgttagctattattattttctcttaaagtactttaataaactgcatataatttaatcctcagaataactccaaaattaggatttctcttatttcacaggtcaggtagaaatcttggcattctggcagggcttttcactaccaaccaagataacagcttgcttattcaaaccaggagctgcttttagtgttggtaatgatttcatagagagtgatgctatctttttttcattaaagtgggatgataaacattttcgtacc

SEQ ID NO: 122822 - DNA, 1050 bp, Homo sapiens
aggtgttcaaaagtattgtgtttgctgtataaattgtgtctggacattttttctatccaggtacctgatagccatctctaggaggaaagtattttctaactcttaactgtgctggacaaataccaccagaaattgtgttcttctctcctctaaaatgactgtatatcttcaccctcccattaaatattacataagacattagagtgtgaatattacaaatgtatgacctttggtatccctattaaaacaagagggaaggagaggtagagaaatgggcactaacttgcttcaaatcgcactctgaaataagtggaggagttgggatttgaatctgattctggagtcaggtcacttgcttctgagctcatatatagattgatagatcatttctgaagtaggatatgctgcttatgctttaattttaactgttttcagtattaaaaggggagcgtctttccaaatttgagcatatctcactgtagcccctaagtgggaatgatagttttctacctgcaatatacctgctttcaaggtcaggaaagcagagaattgacatgagactaagaagaaaatgagtgtatttaatgataagaatttataatgagatttcaaatcagcaaatatacccattttggatctatttatttattttttctgtgcaacttaatagcattgcagtaaaaacttgctaatttagatgacttgtgggcaacacctgtttgaattaactgaaagtctgaatcacataataattttgtatacaataagttttattatttttctgatacataattaacatcatttaggagctagaaaaactaagcttctgagttacttagaatagtttgttttatatgctattaattgccttttaaaatatttaatattttctacttagagattgactctttgcaaaaggcttttatatacagccctacatttaatccccagaggaatccttatttttcagattagtcaatttggagtaaaaggagagcattaaaaaaatttcttcaggaccagatgtctggttatataattctatatcaa

SEQ ID NO: 122823 - DNA, 1048 bp, Homo sapiens
agagattacataatttaaggttgaagtaccatatactttatttatatacattactaaactaaaagtatgatagttctgaacttggactatggacaactgcctgggtctttccggtttttaagcaaacattagatgagattcaaagttttacttgcaaccatcacagagaaagaaaatgtccttcattggctttttacagatagaaagagagaagagcattcatttattcacttcatgtgtggttttataatttcctctttaaaggtaagtctaaatttgaaaaatacatttcccaaaatgtttctatttccctttcttaaagacttatgtttcaataacagctcccaacccacccctgtaatccaaatcctatttggtcctgcagtgaagttaaatgtaggatcctgacatcaatttgttgccatggaaataattgagatgtcaatgtttccgcattatgactgtaccataggagcagatgggctgacaagggggaaaatctgcaaatatctctctaataattagccaaaatatgaggtaatattcaaaatttacattattataaaaatctgagtcatatctatctaaatagcacagaatacaaccaatttcaacttccaagtttactatggaaaatactttcaaagtatacaaacaggaaggtttaccatattcttttattcacttgattatgttttcttgcttgttgcatcactttttgtgctgcatctataaccaagttcagaataaatcagatttgacaaaagcaaacctcattccacacagagaagtaggtaacaatattgagtaagttgaagagacagacagacttagtccatcaactgctttctctgtcttactaaaaatattccccttgtgaagaatactggacttggctaagtaatcatatagctaatcacttgcaataaatttttgccaggtcctatatttgccattgtgcttatgaatttgtcccagaaaactgactacttgaatacaaagaccaaattcttttctgcatcctccacaatacttagccacatctccc

SEQ ID NO: 122824 - DNA, 1147 bp, Homo sapiens
aaattgtgtggtacctccccacttctttctcttggtcctgctcctgccatgtgagatgctgtgctccccctttgccttctgcatgattgaaaactccctgagccctctccagaagcagatactaccatgctgcctgtacaacttgtgggatcctgagccaattaaacctcttttctttataaattacccagtttcaggtatttctttatagcaatgcaagaacagactaatacaacctctttgaatcttttcccattaattatggacaactgttatctccagtgtaatgttattattctgatagataagtaccatgattgtcttgtttattagaaatggcagcccatgaaggtttcttacttggaggaacttaaagaatgatagcaacagactatgagcattttcttgcagtctatagagtacagggccagacttctggcctgtgctgtttcactggttcaaatgactccatttgtatttgctgtggatgtctgtgttttagtagcagctttgggtataaagctgtcaaagccatcacttcagaattcataggtgatccacagagatccaggtggtgggagaatggctttcaaggtgaaacttggtgaggtggaacaaggtttccaggtggttgtgggtttcttgcctgtcttccttttttcttttgtcccattgtaagtagtgggcataaaagctatgggctataatgaactttgccaagttttgatgccatgccctgaccattatagaagcccggtaaattaatttagtgtgatcgtataactataagaagatgtttttgatttattggatattaaaacttgaaggaacatagggataatgaaatttatcctactcattttccaaatgaggagcctgccaaagattcccaacacatttaccattaatctttttcttcctttgcaatagattcctgatacttttaacctgtactgctcatatttaaacattccaattttcaagccatgaggatggctttttaagtgtatatataattttaatgtcaatgcatgtatttccaaaattctgtgagctttaataatagaaggaatatttgaatgaccatgagaaatgtccgtcgtttgtgtgtgtgccttttcattggtgacagagatgagtgtaagga

SEQ ID NO: 122825 - DNA, 1043 bp, Homo sapiens
tgtgaattatatcttaacagcagttaaaacaaatttaccttatcctttattaaaatcaactttgctagaatttaagtgtgtgtttttgttaacgtcaattgtggccaggtgctttcatcttaaaaaatgaaaaaaaaacaggtcaatgtgtgctggaacttttgtaagcagttaattcctttttaaaattggtgtgtgtgcaaaatttattttaatgcagtttttcccccaaggggacttgttaggcaaatgtatttaagtgtccttttaatgcattttatagcttcagtttattcctttataccacagtgatgttccaacatctgatgaattctggcttttcattaggacatctggatttcacacacacacacacacacacacacacggaataacaaaagataaaacatttttcacaaggtggttatacatatctatactacaaatgtataaatatgttttttcctaacaaatcttgacaatacagaggttgatgtgctgaagagaaacacttcgattaaattggtccattataagaaatgaaaaaagatgaatgtaaaggagtattttaaaaaataatttctttccagcttcatttttttcttttactattcttccttaaagatgactgtaaactggaatatcttaggttaatattatttttatatttacacctctaagtgttcattattttatatctgtccttcattttgacatggctaattttaaccttcaaaataaatatataaataaaccaatgtaaaactaatatcaactttgatcagcttgaccttaactaagcaaatagtggagaaatgaaagtttcttacagaagtttaatgtcttaaaatggggagaagcattttgctttcatctgctccatcagctacactgggacagcagttgtgtctccattaaattaggtgtgctttgattctccaaaataaagaattttctagacacttgacttgtgtcagtgacttaatagagaaggaacacccccaaattggcaactctgtttatctttaatgattacttctttt

SEQ ID NO: 122826 - DNA, 1001 bp, Homo sapiens
gagctgttgtgtgaccatctgttgtatatatatatatatatatatatatatatatatatatgtgtatatatatatatatgtatatgtatatatatatatttaaactaaaataaaggctttagatggctcctggtgaaatatataataacatgttaaaaattcttaatttattacttttgatgtatggttctatcagcacagcagatttcagagatctgctttgttgattttttccaaattaactttttccttccttttatatctcctaaggcagatcacacaaatggatattttgggttgttaatgcactcttttcttactcaaaagtcctagggaccttaagtaatttactttgccttctgtgccagctttcatctagtttatgtcttcatattttctttccatctagagactagacgcctgtttgacttaatagttgaatttatgactttttacttgacttctgttgaagcaactgtttagctacatgaagagatttttttttgtgtattttttatagtttggctcattgcctaaaatattatgcaatagtgagtaggtgctttgcattccaggcataatttagtttatctaaaagtttgtcatgtaattcatggaggaatcatttatttaaaagtaaagtttggccgggtgtggtggctcatgtctgtaatcctagcattttcggatgctgaggcaggcagatcgcctgaggtcgggagttcgagaccgcctggccaacatggtgaaaccccatctctactaaaaaaaaatacaaaaattacccgggtgtggtggcaggcacctgtaatcccagctactcaggaggctgaggcaggagaattgcctgaaccctggaggcgggcgttgcagagagccaagattgtgccactgcactccagcctgggtgacaagagtgaaactctgtctcaaaaaaaaaaaaaaaaaaaaaaaaaaaccgtgaagattgacttttatagagaaggctgaattattttgca

SEQ ID NO: 122827 - DNA, 1034 bp, Homo sapiens
ttattaattttatctttgattttggttttataaatgaagccccatgagacaatgggccgagagcttgaggcttggaccctctgctcacatatggtctgcctcccatgcctcttgccttcctggggtgggttagtgggagcttgggcacaggtgtgggtatggttgagtttggtaagtatttactgagttatgatacagggccccaggtacctgtgagggtctctaatcacctcatggatagtcccatgcccaagagagcttgtcattcaatagcaaataaaaaataagtgacaagttgagagagacacctgggaagaaagataaaggaattcattttcctggtgtttgaataaaaggcctgcattttcattttgttctggacaagtgataaagtcagccctgacaattgttaatagtgaactagtgcttggaaacaagcttcacctttggaacttattgattcgtttccataatttttacattttttttaaacatggtatatgaatagatttggttgtacttagaaccctaaggaattcccaaatattttataataagaattgtctttccacagattaaattgtttgaaattgagctatttatagccttatagtagtaacaaaaggaatttgaatttaaaatatggatttgcaaaattaatatcaaagttttacaattatttttaccctgaaattgttgaaaaaaaagcaacttgtttaattaaaactcttcatgatcttttaaaattttcattttatttcatgatttagtgtgtgaagactttttttacgtaaagcttttctatatcttcactacctttccctgggtcccacgttcatttcagccttgtctttactctcaattggtttaacataccaaactgctcttgttggaaattataaattttatttgactgctttattgtaggacatatttgctttgcatgaggacttttaatacatcagaatagtgtagggttgtccttggcaaaatcccaaaccttttttcagagcaaaaaacaaacccgggagaga

SEQ ID NO: 122828 - DNA, 1044 bp, Homo sapiens
tctaatctaaatattcacattaaaataaaaatatgacttgaagcagccaaagtcttatttgtttggaggcatagatatcaagttaacttgattgttttactcttctgtttcttctcctatcctcaacacttgtgctagaatatctctttaaagctactccagggtgttagtaaataacaataatataaaaaatggccagcattttgtttcattggatttgaaatggatttctatgttggaatatacattattttggaggtatttttaggttattggaagccgagtgcatcaagcatgctctctttgtgtgcattctttattaatttgtaacagcagcttcccttggcatacatctacagctaagtacacaagctaaccttttgtttcttgatagatggcttaatatatgctttctagctagataaaataaatggaggaaagcacttccttatagtagtcatttctgtttcttcaatgttagatactggtttgtttttgctcatcttgccatggatatagtgatctttttttcctacaaatgtgaaaagtacatttatcgttgctatcacctaaatacttcgtttcaaaaaattgtgagatttctttatcaatgggaacttctgtggaaaagaaacttaccctatgttggtgaaattgaatacattaaggtttttttttttttttttttgaaaaggtgtttaatgtgtatattgaatttccctggcttgaggcagtgttttcatttcgtacagagattttaggaaattatttctgattgaaacagaaacattggaatttgtcaaagggttagagaaatctctgactaaagcaaagtgccaaatactagttaggttagagaaaatttaggagaaaataaaacagaaccaatggaaatttgcttcttgggtgggtggacatgtctaaatatgaattaccaacatggaggttttggtgttgtccaccgaagtcatggaattgctggaggttttggtgggaaattcttttctgcaaatctattttagaaaaagttttctactcatgaca

SEQ ID NO: 122829 - DNA, 3439 bp, Homo sapiens
gacagtggttattgcatgaagatctgtggcccgttaggttacatggaaaggagtgattcatgaacagactaaaaattcagattatacaaaatatgtcaggttttgtttttgttttactttgtctttaatgtttgttttctactttgtttattatagaaatggatgctcattctagaatgaaaataatggagtttcaaaaatgtagctttttaacccagtagtagctttacaagataggttttgtatgctgatcagcaggagattctggttatctgagtcttcagaacattcgttcaggcattctgtactctgagagactttaagatcatggaaattaagagttttgaaagttctcaagttctcaaaagcatccttgaaaaataactaggaggtgagtcatttaatatttctgaacatctgatttctgatcgtaaaaatcaattaggaaaattaccactttgcatccataatagtaaatattgatttgggaaagaataatcattggatactaaattggaattaatagaaatttgacagagagcaggatatttgcatggtcttaaagcacttccctacagacattttgttaattgcaaggcaaaaaaaaaaaaaaaaaaaaaaaatagtaaccatatagtggaaaaactgaatgtcaaaattaatatcactgaggggaggcagacagatatcatgtgctttcaggtatgatactataagaacacaaaaccacttttgtagcattctggtgaagaatgcattacctgaatctcatcatgaggaaatatcagacaaatccaaatagagaaattgtctaaaaaaatacctggcctatattctttcatggcagtgtcatgaaagagaaaaaaggctgaagaactgttttgcattaaaggagatttagagatgtgagttgaaactaaatgccatgcaggatcctgggttgaatcctagactggaaattatacttaaaaaggacattatggagaaacttggcaattgaatatggactgtgaattatatcaggtgtttgaaaaattttaaaataaaagaagaaatacatattttagaatttgcaggcaatactgttgtctcatgcaacaactatccaattctgctgttgttcacactgctgccacaaataatgcagaaaagaaggggcatgattttgtcccagtaaaactgaatagatgaaatcaggtggcagactagatttggttcacaggtttgtcaaactctggattatataactgtggtgtatcaatgttaagttttcttaatttggcatcaatattgtgattatataagagaatattgttacagttggaaatatatattattgaaatattggggttaaagagcaagttgtatgcaaccactctcaagttgttttaaaaatattaatatgtagaattatatataataaatggtaaatagatgtaaagatgggaaatacatagtagaagatgttgaaaattggtgaacttgggtaagggatattcaggagttctttgtgttagtctcgcaacttttctgtaagtttgaaattatttcaaaataaaaagataaaaacaaattcagggagttccctaagctaaagggggggggggtgtcaaaaattcagggagttccctaaactaaattggggagggtgtcaaaaaacaaaacaaacaagcaacacacatgtgcacacacccacttgccgcatgtagctcgggtgcaccacctgtgacataacgaaccatgtgaataaacagaagcaacacaaccgggcttctgaggcactattcaaataaaacacagaattaatgaggagaaaatttcagagaaacaaagaacagaattagaagcaaaagctcagcagaatcacctgatttcacttggctttatcctctctggagggaagaagcagccttggagagatggcaaggtgtggctgtgttgctgtcaacttctactttgccctcttgaactgtctccttcatctttccattctccaccctcttctttcccccctctcttttcctctctctctctcttttgtttctgcaaccgccttttttcagtcttcttattttctttggctatgttttattgcccgctcataagctggcacacagacttatttgcttctgctatgttcttattatacattagctcaattaaagtaattgaagagaaaccataatcagcatgacgatattcaactcatttgaaacccagccccaaatacagtgtgaaaatacccattgttaacttcatgcacactccacatacacctgttgggccactagcttataggtaaaaataaaaaagaatgtattttatcagtgagtccatttgcctggtccatttcacagccaggccacattctccttattaattgacctgcttttgttgtgagttttttttttttttttttttttaggttgttttgtatctagtgaatgcctttctgatttaaatttttcagtaatttataattgctttcctttaaggcttctcttttctcctctgtaatattatccctgtccatctctattgccccaaactgttcttggtaagtttctatcattattatttttttctggaacaggattgtctgagccttttcttctcatcttccctaatagctagaatcttctgcccattcacttttcccccccattcatttcctgcctcagtttctacttccaaatgtcttgaaaagtaaaattttattttgttgagtaaaatgtaaaaagaatctcacagtacttatatcagaaaactggatgccctgtaaaataccttgatgtgtggcatatttcttacagtggctgggaaaatgttgaatatatgtattctctgaccgttttcaactattggccatgactatcattttctcccaggaatattaaattcatttaaagcccagagaacagtgttgcataaaatttgcttttaaatgatgtccttcagtgatatttattgaaggcattatcatatattctaagaatattttgattctctaacttatagaaggcaacctagctcttaatgtaatgtgattttaactttccttgtcttgtttattttcagtttggtgacttactctctcctttaaaaaaaaaaaaaaaggaagaaagaaattcactacatggttaaatgcagtgaaaatgtgtactatagtttcttttttttcctttctttttaactgtggatgttaagctgtatagcccagacttgtaatagtttgcaggaaaggcttcttagccattaaaaaaaaaaaaaaaaaaaaagagagagatattgtttcttcttctagataatgcctcattgaacctgtaaaatctgtatgttaagaattatttaaaagaaaaattctgcacaatattgatttctttttttgtcttgcctcttctgacatagaaaaaagctgcaggcaagtattaactgaaac

SEQ ID NO: 122830 - DNA, 2689 bp, Homo sapiens
ttctaaaatttagttcagggtaatttcacaccaaaatgggtaaacatttttatccttcttggctttcatgattgctctgacttcttcataaaatttggaaatcacgttttaactttttattgcctctttattaagtgcttggaaaacacatggaagcctttttattttacatactgtggtaacatcctagtaagattttattcgttttcactctcaagattgattttttttttttagaaaagcagtttagaaagtacccatactcgttgaaatttgtcatcatctagaccttaatatcacatatcctaagttccccactaattatttgcagatttccaggacttaaatatgtgctaaacctgaaaactatgaatgcatttgctgaatcaaaccaaaatgaaattgttttcttaactatgaacgagactaaataattttaaaacactactcagccacagtaaaaagagtgttgaaataaaactaaatatatatatggtatacacttgttgaactaagcctgctttattaaaatgactttatgattctccagtgtattgtttatacatattatttctaaagattcatgtttagctgataattcatactgcttacatatttttggattggttgacctcagacaacaaggatggtttctagcacacaacacattctgaacatatcatgagcaagatgctacccaagttgttttgtttgttttcttaaatatttaaccaacaacaaataaaagtatatattcaaggtactaatatgatgatttgatatacatatacatgtctaatgatctccacaatcaaatcaattaacatatctgtcttcatccagagttatcatttgtgtgtgtgtgtatgtgtgtcccaagatattgttgagggtctgattttatgaccccagtaaaaatgatggacataggctcttgatatgaggggaaaagtgctgtaaacacaaagactgccttatggggtgagagtgtagttcttgggtgacagaagtaaatctgtactgtgaatgtcctctttggagaattacaaaatgacatgatgactgaactgtaatggaaaacttgttttggtaagatatcctttctaaattttttttaagaaaaagaattctaagtgctgagttcaaagacttagtagaatgctactgataggaggattttagtgtcagtattaaatactgcacaaatacttgacactgaacatcgtgtataatggatatggccatatactgtctttttaaaggaagtgcttcctgctttttctccaaaatagcaacatatttttctcattagtgaaatgatggctctcaaataaatatcccagcccagtcctctgtttttcagcccagcctgtgcttcagatttacctaagaccataacccacagtgatgcccaggagtacctcaatctcagcatacttaaaagcaattgtattatttgtgcccaaccttgtttcttatgaattttgcagagttttagttacctaaacttgaaacttgccagttggccttggttcttcctaccttccttacatcaaatcttgcactgtctccttaaaatctctcatacctatgtcttctgcatattccagtactgatgtagttaagaccttcagagtatcattcctagaccgtggcagtagtctcctgtcttccactttagttgcacagataacatcccctaaccaatctatctttcgctgttctcgcgaagtgatctatctgaaataaaaatctaatcatgggagtctgtcttaaatgttcactgcctccctattgccaacagaaagtagctttacctctcaaatgttttctatgcacaagtcactctttaaaaatattatattgtataatccaaacagcaactaaatgaggtacttacctttattatcaccattttataaatgaggaaacaaatacagagaaaataaatacctggcccaaggtcacatagctgataataacagggccaggattcggcccaagcagtctgatgatagatgccctgtgtgtaaacactatgcaatgatacttctaatttcttagcttcccacaaaggcagggtttgaatttcaaagtgaaccaagagaggatgggcccattttatatcatcctataccaatgaatgtggcctgccttgccacactgtgtaaaggagattgtttcacattttatggtataaacttaatgctgaaaggcagtagttcttatcgcctgagttggtacaagtactaatggttcttaagctatttattacattgtatggcatcagttttagttgagacattgggtgtttgtaaatgcattcgcaacacccatacatgatcttttccttttagcagcatcttttcctgcccttgtgctgttgacagtttggggcatacattttgctgcaaagaaaaagataatgacagtgagcattggtatgaaggtatttcccttcttgcttctgcctgaggcacttgtgagttttcagttgttgcagaagttctgaaaacttttatattttgatggacagagccattgaaaaccttgtttcttgaagttaagtttgatttgagaaaaggagtatacagatacttatatagccatatgttgccaactccttgccatttattcagtccacagcttgttcttgttctaagcatttattttattttctgaggtcatt

SEQ ID NO: 122831 - DNA, 1616 bp, Homo sapiens
aagaggaagtactataaggaattttgtatcttaggaattttatttcctagcaatatatcttaacctaaaactggagatgcttctttatttgcctgtaaattagcaaaactttaatattgtcttaccaattttatttttgtatccataatactgcttttctctgatatgggcaagtgaaaatgaaagtaactgaaaatgttctgctgaatagcaaacacccaaggcatcgtcatctttacttttgctaaaaaacaaacagaaaacccccaaaactcacatgtatttgaaatcatctctttccgagagtggcagagtatcataaaaatccaaaatggcctgtgcctatggtcttgttttgtaacattattttgtttgcatttgtcagcatgaaggtcactttagggctacctgaatatctgtattgcactctccagtgtggagagaagaccaaagaaggttagagcagttccggaactagcacatcaaataaaagtaccaagcagtacttgaggtgtggtcagctgcaactctttgcagccaccaatacttaggcacagtgatgggtccagaatggatccagtgagaaggcaaaaaaggaaggtctcatgtatttgctggtattctatcagaaaacaagagttaggaaggagagtgtaagtaaggcatgaaggagtccatgagccataagcaaaatcacatcaatttttaaactctttgatctttgttctgctttttttccccactgaatggtagatatcagaacactatctccaaagattgtctgaattaattaattcccaagtaggcaggaataccaaaccctctctttcaatgagtttaaatgacgttccacacatttgccctaagtaaggtgatacttaaattgtatctttacacgtattgtgcagttcctatcctaggcctcttcattttggtggcagtggcaatggcatatggagagtgatggctggagaaggagttgttaaattatcctcaaaggcctcagaattgaacattgtttcttatttctgtcctatgaaaaaagacggattttaattatgatctttttaaaatcaggttgggtttttactaataaaaaaagtcagtgtttaaattgtatatttgaatgttttctctctacatttttttaatcacaaatatcagctacatgttacacagtttttcatttcttagtctttttgaatgaaataagtagtcttttctttggtgcttttaaatactattagttgaaacttggtggttattcttgaaatttagcttttagaatttaatttattctaaagtgtacagaaaagagattgcaactttgtggtgaatgttgaatgcagctatgaaaacaatgttaccttttttcaagatctcttgcctagctataatacatctgctagttactaagtgtaactgtgtatagggtacagaaaagagattgcaactttgtggtaaatgttgaatgcaaccatgaaaataatgttaccttttttcaagatctcttgcctagctataatacatctgctagttactaagtgtaactgtgtatagggtacagaaaagagattgcaactttgtggtaaatggtgaatgcaaccatgaaaata

SEQ ID NO: 122832 - DNA, 1080 bp, Homo sapiens
tttttagacaggacgaatgttgataaagaagagaaagagtcacaaataactttatgagcctaggggtttgggaggacaaaagtaatactgaagattacagggaatttaggaacacttgcttattgttgggggaagaagagctcaggttttcacctatccaattttagttgacatgtgagtgagatgtcctgcaggcatctggaagaacaagcgcgaaaggggaatgagagaggtcaagcctggtgatggctcctgggtttcagccacagtcaggctgtcattagaacagaaagtggatgagaacaatgagctcactgaggaaggaatcagaaaaaagaacattggcctaaggtgtggtattggagtgggagtcggggcagcactttcgtgtaattcagagccaacatgtctggaagttggaagtcaagggcaaacatttagagaaatgggaaaggcaaagggaatctgagaggttcagaaagccaccactgagtttggttatgagatatagtaagtggattctgggcaactgccttgagccttgagctatttcttgaatattgaagtgaaagaaataattttgtggaggaaatgaagattataagaatagagtgcttattttaaccaaaaaccagaagttagacattctagcaagtaggaaaatagtgttaagtaaaattcaagacacttaatttgtttgctgtgagaaaagaaaagcttttttctccttttaattctgctttcaacgagcaattaactatcccctctaatcatttctctttcaaattctacctatactggtttaccatctatccaagtgaagcatctctctcttaggaaggcagagagtgaaaacctatgtgtgaaacctctttcttaatactcctattgcaattaaaaatgtaccccctcccaatctgtttactacaaagaggccctatgccagcttggtgtcatgaccaccatctgtaaacactatgtgtgaattaagatggattttgttacagtgaaatttggacattgactgggattgagtcaacatggaattttataactccatttagttcatacggcttaaag

SEQ ID NO: 122833 - DNA, 3544 bp, Homo sapiens
aaactgtcaccccctttttattagttttttttaaaaaaacaaagataacagaattttgtgcatttttggtagtattctgtgggttaatttttaacagctggattattgagaaaatatgaaactatttaatgaacatacattttagaattcaactaaaattgaacacaaatgtaaactctgccagtcactacttaagtggcattaattaaacaattgcttcttgatcaaaatgaggatagcttgtcttctgactttgttataaaaatgaaaagatggtatgtagattttaaaaagtgtgtttatcactcaagaaagacgctgatttttctttgttttacaattatttttcgtagaatcagacattgcttatctggtcattattaatttattacttaataacatatttccagcagaagctccattctgtttattcttggaacttgtcaacatccctcttctccttcgaaatcctttctttggtggtgattactttcagtcttggtccccttagaagagctactccatcgctcttccatgggctcttccttcattcgctagcattcctcatggggacagcaactgtgcaaaatagtcttcttttatttgcttcattttatttatcatagcaacacacatgagacacattatctctgtgtctcttcatgactgggaacttgcctttgtaataacagtgattgttatatattaggcattatctgtgtgtgtgtgtgtgcatgcattttcaatgaatgactttctaggtaaaacattttaatgatatagatctatgtaaggctacattggcatgagatgccaggagatttttccattcactctgttttcttcccagtgaaagaaatggttgaaaatctgatggcagcagaactacatgaagactaaatagcacaatagctggttacttacttagaacctgatgataaatttgtgatgtgtactaatataaccaactgttctaaatttttaaaactgattatgggttgattgccacagagtcataggttaacatttttgtagacaactaggtatttctgataattttcctaatcatacagttgaattgtaattatatagcttgtatttatttgtgggtagcattaaaactgcgtataatttacatttggtatatggacctcattcttccttttcattgtgggttcagagacctcagtctaatgcatttgatcccatgtgcctcctgttgagactgtctgcttcttaaaatggaaatttaatttttatgatatttgtatgtgttttgaagcaaattaaaattatagtagttagagttgtggatttgatttgcattttctgaaaggaaaggaaactattgagtttaaaaatgtgattcgatttgaacaaactatgctaattaaatttattttcaaggacactattagcagaaaaaatataaattggtgcaattttccattgcctcattttgtatttcagaagtataattcaacattttctcaacactttgtttttaaaataaagcattaacaaaatttacaagtgacttatttgtgttttaaaagtttactttataaaatattagtcaggaaatagtttcttccctagtttacttgtaaccatggggacaaatatatgtaagtattatcacttgataactggctcaacaacaatgaaattagcatcacaaactcagacttattcaaatttgttgaagctagtttaaagcctctaggtagaaatttattgaaggttaataatttactttaaaatttaagattacaaacaggattgaaattaacctgtagcaagcattatgttttcaaaatagttataattttactgttggggtttaaaatcttgctaagcatttatcattaaggcttctagagaaggaagtaaaaagaagggttggtggtactgaaacctatatttttgagaaaacataggtttgctaaaagatcactgtactttagtctgtcttcagcataatttaggaccaagggtgatgaataagtccattaataccaaatgagaaaaaaatgggggatttttgtttgttttatttgatacacgtggtaaccataaggtgtctatctaggatttaccagttaattatatttgaagggcactttggtcagtagctaggatatgtttctgaggaattaagggaaaccagggatgcataacagaaccacgaagaggggaaaatacatgggaaaggaaatgactgaccctggaaattattaggacatcctgcccaggatgtcattactaaatctgtgttccattattttcataaaaagatatcatctatacacaccagaggacaatggcaagcagacataattgggctgtgaacatttcatatcacgttagcctagtacttttaattagagtttcagtttaattatagtataattctaaactagttgcaggcactgactatctgatgagggagtgcagagattttatttgggacaggttggttcgtcatatcaagggatagctgtgattgggtgcaaaatgacattgaatgcattgtgcaatgtctgagacctgagattaggggaacgtgtcagttcctttagtcacattagagttccattactatgttttggaccttcccttgttcaccttaattaatacatagttacccagaaagagagtcaggttcaatattactacactttacctatgcaaatttataatatcagagggagaagaagatgaaaaggaaatgaaaaatcaaaattaatattatttttgaattaaattatttttataagaaacatgctgctttttgcttttaaacacacaaagtagcagatgtaaatgaattaataggataaagcaagttgctagaaaaaaatacctctcataggaagtaaaatcagaattgtattattgaattaaattattttaatgaaagacatgctgcttttttgcttttaaacatttcgagtggtagaaacaagatgtaaatgaatttgttggataaaaaaagttgtagaaaaaacacgacttttgtaggccttgataatgtaataaggtactactttgctcaaacttttgaaaataaatagataaattgctgggcctagtgttgttggcattactacactgttgagggcttctgtctaaatatttaagagacattcagattagtataattttattttattaagaatcatgcagctaaggaagttagccttagttggcccagctaagaaaaaaggacaatgttggtgcatcaagtggttttatgagcaggataccacctggttccgtgctctgacttcatttgttgttgtctggaataataactcttcattggcttaatgcctttgcttgtaagagacagatgctatctgatccctcctgtcagaagaattcccagaataagccattcaaccaagaacaattgctgtcttgttgattgcaaacagtagaagagggaattctctgtatttcctagcaccttgctgtttggttggtgtgtgttcatcagtagcagaaactgttcactgaccgacgaactgaagtggtacat

SEQ ID NO: 122834 - DNA, 1640 bp, Homo sapiens
tgtctttgagggtgttgccaaagcatatgaacgtttgagtcagtggtttgggagaggcagaccctatgtctgggtggacaccacctaatcagctgccagcgcagctagaataaagcaggcagaagaaagtggaattaacagagttgctgaattttctggccttcatctttctcctgtgctggatgcttcctgcccttgaacatcagactccaagttcttcagcttttggactcttggacctgcaccagtgatttgccaggggctctcagatctgtggccacagactgaaggctgcactgtcagcttccctactcttgaggttttgggacttggactggcttccttgcttctcagcttgtagacggcctattgtggaacttcaccttgtgactgtgtgagtcagtactccttagtaaattccccttcacatatacaactatcctattagttctgtccctctagagaaccctgactaatacaggaatctacacctcattgaatgcggttttgggggcagaaaagtttgataccttttcttactggtgataaggctctcatctgaccgctcctattacaaaagacaggttaacaagagaaaagcatagcaaatgtatttaatcaagttttatgtgacctgggagtcttctgaaatgaaggcccaaagacgcagggaaaactctatttttattcttaggattgatgaagaatggacactcccccatcactctgttactattagatcattcccttttgtgaacacctgtctgttcattcttcttggcctttctgtagtattgcttcctcttgggtatgctgctggacccgccctggaatgaggctctttagggaaggatggagaagggagagggtgacctttctgggttttatggcctgttttggaggagaggagttgccttggggaaaacaaattttgttttctatgacttgcttcaggggagatagagggataggagacagaagggcaggagaaagtcagaataaggctttgcttctgaggctgtttttgaggccttcccagtttcccagtgtgccacagtgccatacttctgtgtcattttctgaagcccaacacagtcctggagggactttcggtcaaggtgtcctgccttcttttatccaggaggtgggttcctgagctacaccaggaaaatatgagtcctacttcagaaagccatcctctcacaggtagtgaacattgtaaaatttaaaatgtcagcgctcacaacatgcagctttcctgccatgtgaaacaaacagtagaagagaattagggagaggaactggaggtactctgccatgttaacattccctggttcagttgttgttgagagctagcttctttcttgtgtatcctgtggtttaactattcaacatttcctttgattccacaagtcaatacattttttctttttttctgagctagtttcagttgaatttctgtcacaaccaaagtgatatctatgtcaattaaatattttttctgtgttcatattcataaatcctccctccctccctttttatttttttcctttcttccttccttccttccttctttccttccttccttcctttctgtctttctgtctttctttctttctacaggatctgcctctatcacc

SEQ ID NO: 122835 - DNA, 2752 bp, Homo sapiens
attccggcttctaaaatacttacattttggtggcacatgggacaccacactctggattgggggaaaatttggggtatgggttgccacaaaaatgagcaaacatcagtgtctcctgccctttccaaaaagcacaagggggctatccaagagaagggagaaagcaggtctaggcttggaaaggataggtggaaagtgtggcactagcaaggggtttttggaaggcaagggtttccatatgcaaagattgggagatggagtatttcagctgaagagaaaacttaagactattttcaggccaaacagtccaacttgaagagtgggttatattcaatagagtagtaggagatgaattagatactgagcatgaaaataacagctatgaacttgtcctcatgccaggtgctgcggcaagtgtatttacttattaaatacttcaaaatcccgtaaaataaatattattgtgtctccatgttacagcttctcttggggccatatgagtaataaaagacaaataagtttcaagctcaggtctgtctgatatagaaatacttgatctcaaccaccataatatattggaattttcatttttggatagttaggctacaaggttctcttgaaaattttgagtaggcagttgcttaaatatgtacaatgtaacagtatgatatatcccataatagtgttagatttggggtattctgggaacatgctgaagaggcaaactactcagttgggggtggatggatggaatttgcctaggaggggatatcagcattgagaccaaagacatagagcagttatcagagccaatgaggagggttttcttgatagagaaggcagcatgtgaagggcccagaagtacggtactaggaactgctactggtatctttgaagattctgtaatagagatgaatgtggcaatttgttgggactagatcatgaaacccttgggtgttatgcaagggaatgatgactttatcttggaggcaacctgatgatatggaagagttttaggcagataggcaggggagtgataggatcagacttccacaattagaagattatgttaaattcatttaaacaaatgtgaacagtagtgaatcaattcccaggggaagtttcattgccaagtattcttcctgccgtgaagattagcctgttagttaccaagccgctttcgttttcagtgtctgtgcttgtggtcggtaacttttgctgctgttgttctgctgctgtctgccattccattcgccatctatcacgcacacagaaccctggccaggatcatgaagggcgattgaaaaggtaacaagagaaaaaaaatgatagattaatgtaagcctgatgtttgttttagtggcagattttggtgttcacatgagtgcctgagcctgtctaaattaatctcatattctcaccacagtcttctagcttgagaattgactgcaggtaaaaataattggaaattattggtgtagccgaaactgcattacagctgccaagtgtggatacaccggagccaggctgcttttgtctgcttcctcataaacattctttccgcattctttatcagcacataatcctgagacacaaaaagcctttgtgtcccactgggaatgtgagaaaatcaaagctatctattggttttgctcctgttaggaaccactaacatttctatattaaccacccatgttttgaattgagatagatgttatcagcaagatgtgtcctccatttatccccaaagatatcactgtcccaatacaagaaatcttaaagacagactgcaaatgtctgttttcatccacttgatgctgtgatttgtggatacttgttagacatgtgaatttaatggggcttagcctaatagtaagcatttatatagaacttcccatgagccaggcacttgtatagtaatacatctaatcatcaccacagtcatgtgaggtagctattattgttttatactgtttgttatgcactgaattgtattccccaaaattcatatgttgaagccctaacccccaatgtgattgtatttggaggtagggactttaaagaggtcattaaggttaaatgatgtcataagagtgggccctaatctactatgactgatgtccttataaaaagaggaagagactccaagaatgtgtgttcacagaaatgaagacagaagaccagaaggtggctatccagaaatcaaggagagtcctcaggagaaaccagccttattggtatcttgatcttggactttcagcctctggaactatgagaaaattaattaattatttaagccttcaagtctgtggtattttgctatgttggccctagtatactaatacatacacattttgctgtgtgggaaaatgaaggcacagagaggttgagcgactgccccaaggtcacatggctagaaaatgacagaattaggatttacacatggggagtgtgattgtggaatcaatgctgttaatcaccatgctgtactgcttctcatgaagacagaacttcccagtattggggcctgggcggtatgaccatattctgcctctggcatctttcctccccttattttctgtacccagccctctgcgttctagtgtataatactcatggactgttcaccttgggctatactatgtaggaatgatgcatctgcagaatcctttactctcgtcatggttggcagtttgctctggtttgagcaatttcatggctcagaataagtagggtcagcaaacatgttaacatt

SEQ ID NO: 122836 - DNA, 1240 bp, Homo sapiens
aatgcagtgcattgcagcaactgagagaagcccactcactatggctggggaagaggcgtgaaggagagtctggtgagagtggccaaagcttcaggtaaaagccagagcatgcaggaccttataactaacgatgacgacttaaaggaaaagacatgatcaaattttcataagtatcgccctcagtatagtgtgaaaaagggtttggaggggccacgtggattttggtgagaccagttaggaggacattgttgcagtctaagtgactgtagggtgagagaagtgtacaggtaaaggtattttgaaggtgggagtgatggagcatgctagtagatttgtggggacttagagagagggaaggatgagagatgctgcctgagtatttggtttgaactgtaacatttaaggaggatttttttttttaggctcttgcctccacgaggatttaaaaacaaatttgcatattaccttttccttacagttcacataattccttttttaggcaacatggctatatattcttttatcttttccctgaaattgcgtctcttattaagatttaaagtatatatctatgtacatatgcatttgtttaaaatgtagtcatttaaaattcagttctaaacaactgggtccttaccccaggcacctttctatattgattctcctttaacttccttgagtgataagctttgctatttttgaagttctttgcctattcactttctcttctttagactgtgtatgaatggatagatacacacactcacccacacagtttgttttaaattgcacagagttgatgtataataaaatatgaagaaaggaagaaatatttttaaaattcttatattttctttagtggtttgtcttagaaaatgaacacataccggagagttgagaactgagatttttgtttattttatttatttattttttgtgagaatagcaaaggctttacaatgtgactgcttactaatgtcagaaaaatagcaattcagctcttactttctcccctatactttcagggcgttatgacagttttaatgtgagttgtaaaatgtagggaggtatactctaattctctttcacacacataaatcaagtttcaggctcttttggaaatgtttactagaaaaaacatcatgggcagattttaaaatgcttttggattgcatgacggcgtggtgccacttccattgaagtgttgtaatattttattttccttcccaaagcgtcaaga

SEQ ID NO: 122837 - DNA, 1042 bp, Homo sapiens
tataattcagtatatatcctgaagactttgagttatgcacattgtcatacttagacatagttctcaacctttagaggatcagacagttatctggacagaggagcattgatgccactgttctccagcattcccttagcctcatcttgctaaaagcagaagaggatattgggatgcaaataaagtagaggaagggctctttgccaagtgctgtttattgaactgagtaaacgtctcccccatgggttggagggagctggttcgtttaagtgggcaagaaaagccagtattcttccaagtaatgaggtttcttaaataaatattccaaatgtagattctctgggctgcatcaacaaggggcaagcctgaaaagtcccctcagtatccaggagcccaggttgagaagggttctgttttgaaactggaaactgtccgtagtttggatgggagaatgcttggaatggaagctaggctgtgatttgtctttttaacattcttgacagaaaaagggtgttaaggaagcaggatgactacagtttcaggggatttatttacagctcctaagaaaattaattgtttttttgcttttgtttttgtttttttttacaactcagacaaacattatgctaatagaaaagtatctaaatctactcatgagaaaaattctttaaggatgcatattagtcaacctgttcttaaaactacttattgttaaaaatacttcgtaatatacacaacatattcttttaaaatgttctacagttcagattttaaagtgattcgtagtcatctcaccccacctccagttaatgagattttactgtttatttgttagctacatctaatagaaaggaaaaaaaaaaacaacctttttgataggtgataattacttaaaaatttggatccaaattaagagaacagagctcatcaaaatatggatgtattaacactggaatgtataataatgggaaagaaggtataagaatgacagagtgagaaattttaaaagaggggaaataggatgaattcaatcaaaacaaggaag

SEQ ID NO: 122838 - DNA, 1028 bp, Homo sapiens
taggtagcaaccagcttaaggaagaaaaccagaccaaccatgaaatagaatataacaaaaacaataacaaaggtaatcatacattttgtagaggaagagagaagtattgtttcatgaaactttggttttaatggaatagatttatgtatccttatatgtctgtgtactgagtcacaatgcaaaaagaatttctaactgtgggtctggccaaaaatatgggaaagttactatacttctctcatacaatgtttgctataaatcctattcacacaactttataagctccaagttttttctcttaactattatgtcgtggcacttcctggtacagtgcaaagagcatagagtttgcgtaatttggtaaatgagtaatttaacttatatagcctgtttccttatcctcaattcgtgtataatttctggatatttacagggttgtgagaatcaaactgggtaatttatgttggatattcttttccaaattgagctacacatatgtaagttactatgattgtaatgccttgccctttggcccttcaaatactaattgactactgggtttgacttaggaagactggattgtcttttaaaatatttttcgaacctgaagatttacagttcagtgttttcacttgtagagatcagtcctgttgagtactttttacacagtcttttgtttcttctttatgacaggatgttgtgaataaagctaaggttttttttttatttacttttcctattttggtattactcttgacaaaagcaatggaaggcaaatgtactttggacatacctgtatgaactcattattcacatttgtcttcaaataaagctgcattttgattttaaaacaaaataacactatgtaaataaaactcgatttaaaatttacgttgaaatacctattgtgatactcaatggaacattgaaataattttgaccaataaaaatatatccaagacttaacaacaacaaaggaataaaaaagatacacaaaacctccaatcaactgtaaaacttgtgagtag

SEQ ID NO: 122839 - DNA, 3118 bp, Homo sapiens
ctctgccactccaagcagtgcccatcccagtaagtattatgtcctatctgggagtagcactcagatttagaatgagagaattagaattaatcaacaagataagagggatctctttaatgcctaagaatgttggtatattgtttccccaatggttatagaatgagaaaggaatatcactattgcttctgtttgcatttgacacatatgctaaacaaatgcactggcttttagaacgtgtttatgaattctatataacatttttctttttctttttggaggttgcctagctatttaattttccttagttcacaaaacaatgaggtagtttcaaatctatttgaaccccaagactttttcaagctgctgttctctgggtaaagccacttagtcctggcacatggtggaaaggtctggctaaagttttgacaattattagctcatttgcagagttgctctttgacctgtcaacacagaggaaagcttttctaagctgtgagaaggattttatgttagactcgagctttagatttcttttatttttccaactttttaacactatcttttctagctttaattgacacaaacttctcttttccttgtgtaacacttgtgcactccagatgttagaaatccctgttaactttcttaccggagaagctctttgcactgcaggcttgaatgtcactgagataatgtccttacaatatttgcaactttgtgttctgactggatgctcctactaacctaggtcttctttgtgattgcggtggcagcagctgtcttcataaactcatcttcatttattttttattttatgtgtgtatttattttttttgagacagagtttcgctcttgttgcccaggctggagtgcaatggcacgatctcagctcactgcaacctccgcctcccaggttcaagcgattctcctgcctcagcctcctgagtagctgggatagcaggcatgtgccaccacgcatggctaattttctatttttagtagagatggggtttcttcctgttggtcaggcctgtagtcccagctactcaagaggctgaggcaggagaatcgcatgaacccgggaggcagaagttgcagcgagccgagatttcgccactgcactccagcctggtgacagagtgagactccgtctcaaaaaaaaaaaaaaacaagtaaatttcttaagttgttatcattttggtatactgtttgaccagattcagtctcaataaaaggagcattaacaaaacttcaaaacttctatggcacatctaaatttaaatatgaaacagttctaaaagcagggatgtatacttgcttgtcctggaccccagaatcgtgactcacttattatttggaaagcagactgctacatattttggtcacaataatacctaaaggatactgaatcagaaaatgagtaactgaaaatgggagatctctataatgaaaacactagatagtagtatacttaaatatgatagtgtacatgagaaaccataaattttaaccagtgtgattcaggctctggctttcaatctatttgcactagggtatcggacaaacccacaaccaggaaaggtgagcgcagatattgccagaagaacccaggtgctctgattgcttactccttaggcaacgtttcagattttgcaaggtacattgtgccctttcccggctaattcttatcaggaatgcacatcccagttgaagcctgctaattgctctgagggctgttgtttttacctttaatttaggttcaggagtctgtagggcaatcctttgaagttcttagttacttactgttcactgaagtatccacttgagatctttcctggactctctccacagtttgttcacaatttggcacaccattggctgaaagtactctatccttgctccttgctcattgacagttatactacaggctgcttccagttgccaacacattttagaaaagcatataattttattaagagtttttcctgttgctttcacatgtagtcaagtaaagggcaggggacagagaaggggcaggatgtcatgtcagcatttacctttccagaggctaatgctttgaaagaataagaggggtccttttaggtcaagactcttattgttcttgtcacctgatttgttggcattgcagttacatcacgtgttgtcttttatgtgagcaatgacaaaaaggatatatctattctgtacatttttatcaaatatgatatccttcaaagcttgttaaaacaggtgatatcagtctgtgttcttaatatggtcttgttggcaacaccttattggggcgggaaccattgatttgtgcatttccaggattgattactatccctaataaagttagtctggtaggcaaaatagcaagaccttatctctacacacacacacacacacacacacacacacacacacacacacaataataaccaggcatagtggtgcatgcttttagtcccagctattttggaggctgaggctggaggattgcttgagctcagtagttaaaggctgcagtgagtggtgattgggcactgcactctagcttgggcaacagagcaagaccttgtctctaaaacaaaatacataaagttaggctggtgagctagggtctcttcatttaacaaaatatgtatgacagagtttatctgatttctttcatgttagtttggttaagttaatcaaatagtaaatgcatgttcattctgtgccaggcagtgtatatagcacagagggcaaaatgatttagttgactaagtccctgcacttaatgaccttacagactatttagaagatctagaaataagtaagatataattaagagtgggaggtacaaaaagtgccatcaggacgtggagaaagtacagtcactcactcctgggtgattagttaagtttctcggatcaggccatcaattggcaaaatccttatgaatgggcacaaaatgtacttgggaaaatgaggaagtaatagcgatggtggtaaatgtttaataatcagctctcaagccaaaaagttcaggttttatttgtttgttttgagatggagtctcgctctgttgcctaggctggagtgcagtggcgcgatctcggctcactgcaacctc

SEQ ID NO: 122840 - DNA, 2838 bp, Homo sapiens
tctttggttgcatcttggcagaaaatgtaacccagactggttgcaacaaaaggtgaatttatttgtctctcctaactacagttcaggtggagcttgatttagaagttgacgtaattccactgagacatgatgtttctctgcctgcttagtttagttctagggtattccaggagcttcttaggctccatatagaggcacgatggctgtggcagctcccaccgaacaagatcccaggttcaagtcccttaaggaaatgtgaattatctgctggttgcacctgataaggctctaaggtttacagtgcttgaatccactgatcttgtttccaaccattgaatctaaggctctgactgaggggaagttagtgtgctgattggcttggcccagggtttgtaatctttctaatggggaagaaagaagatgggagatgatggggaagagacagtaggatcagattgttctctgttgtggaccactaggtgatctctaagtgggaaagcgtggaagagaaagagaggaaagaggcaatttgtgtctggcaggcttgtatacatttacagatcacctgtttttaatctgagagtgtttatttattggctttccctttaaggactactttaaagcatgaatttatattatttccattattttattttccttgtctcagtattgaattagtctaacattaaaaatttgtagaatttggtgttaaaaaagatcttagaaattaatgaccccttcatttgacgtaagttgcccaaagtcatacaggtaggaagaacttgagctcaaattaaagattttaatgtataggttagtgttcttactatatatgtatcatatattaatgtatactatatatatatcattttccttaacagtaatctatataattattatttaagattaaaaaatttttggcttgtattccaaatttctgaaacaatatttccaaatataaacctgacttagtgattggatttgattagaatagtagtctgcatataaggtgataatatgtctgtgaatgcaagagactatcttagataactgcttggttttcagatatcatgacagaatttatacatgtatgcatgtataggtgtttgcatgtatgcatttatttatttttaatagaaagcaaagggtaaagtaagctgtggtaaatgatattgacacagacaaaacctactaactctactatttttgaaaacctcaagagatgatggtgattttatttttaattttgatcctctaacctctgctgcctaaatttattatgtatatctgagcaacatgggatattaggaagagttgctataagaaatatcttggggtactgaataatgaataaaatgtagagaagtagcagctgtttgcctagctacctcctctcctaatgagagatttacccaggctgtcttaatcacatgttagtgctagtggatttgactgaggaccatggctgtgccagttgaggccaggggatagtctccaggcactttaatggtccgtaatggaccttcaatggccagggcagctggcctggcacataggggtgtagacagtggttgaggaggaaggtttactgacttcatcatgcttccctttgtcactggaggcttgttttcgtacacttttgtctattatcataaataacttatgataataacttatgactctttttctgtcttatttatgtccttatgtgatgactgtcagtcctaaatgatgaagtttgtaataatttgccctaaccacctggtcagttggagcagattgctatctggtgttgactcattatgcccctttatctaaaccaacacttaaatgctcaggaaatatatgaatgaggtgaaggggctggcagcaacctacctcagaaccaatgcctttggagatctatgcaggaggctgtttaatgcacagagcactggccttgctacaggaggacttatgttccagtcttaagctctgtcactttctgaaatttgggagcagtcctttctgcttgatctttcatttctttatcaccaaaatgagaatattacaatgaagaatgactttaatgtcttgtctagtctactgaaccagacacttttaaggtgaaatgaataatatatgtgaaagtagttttatatttgtaaactaccataaaaatgtaaattttgttaggaatagaaactttgacaataaggaaagtattgctgaaggcacaaaaagtgtgtatgctgaagaagggaaatgaaaacaataaataaatgcttcatatatttgcatgtttaagtgatacattgcctctcaatgttggggaaagtggtataataaagaagaatgagcatggttcttgtgaataatgggtgattctgcaatcatgtatcataaagagcagtccccccaacttttttcacatatatgtatttcctatgtatgtataaataaactttaatgctaccaggtagttcactagccctcccatatctctgggggatacattccaaggtgcccggtagacgtctgaaactcgtatggaacccacccttaaatatactataccatgttgtttcaatctgataatggaaatggctactgagtgactaacaggcaagtgggctgtacaatatggacacactagacaaagggatgattcatgtcccgggtaggacggagtgagacagcatgtgatttcatcacgccactcagaagggtgtgtaatttaaaagctgtttatttatgaaattttttcgttttcttttcttttcttttcttttttttttttgagatggagtttcgcacttattgctcaggctggagtgcagtggcatgatcttggctcac

SEQ ID NO: 122841 - DNA, 1095 bp, Homo sapiens
atactatactgttatacttttaaggataaaataataaatctttctccagattggtatctattaatataaacccttcccagtgcagcctgttccttaaccagctgctcataggccgattctccaagcgctgttcaaggcagcagctgaccagccacagaaattcccttaatccgtgttggatagtggaggtgacctagcagctgcttaagtgacagactggcaacagttccttgatgtgatttttcttaggtcattcagtaaattcaagagtagagaggaaggctttctagggtcctcactacccacccagggattgatgactgattgcttcatggtcattggattcctcactgcaaggtgtcctgggattttgtggttcatggaccaatataattagcatcatctggaaatttgtgatgatctgtgatcatcagagtcaccccagatctactgaatcagaatctgcattttgatgaaatccccaggtgatttgatggaacatttaattctgggaaacactgctctaggacaaagaaagctcagtttaaaaagattgtcacatgaactttaccatagaatttcaagaatattgcaaaaggattaatgataacctgaaatacatttccttggatttatatttctttttcctttctttttctttttctttatttctttctttctttctttctttttttttttttggagatggagtcttgccctgtcacccaagctggagtgcagtggcacgatctcggctcactgaaacttctgcctcctgggttcaagagattctcctgcttcaggcttccaagtagctgggattacaggtgcgccaccatgcccagctaatttttgtatttttagtcaagatggggttttaccatgttgcccaggctggtcacgaactcctgagctgaagtgatattcctgttttagccttctaaaatgctgggattacaggtgtgagccaccatgcccggcccctggagtatatttctgatcaatatttacttgattattatttaatattccagacacatcaaaacaacagtactatacaagctttttaaaagaatgctcagatgactttgaaaa

SEQ ID NO: 122842 - DNA, 3832 bp, Homo sapiens
ggatttgcctttctccacaaattataagtttgttttgtaaatacttccttttttttctggctaccataaatcatttgatattttattgtcataaaattctatggcagtcagatttgttgcagacatagattagagatgtattgaagattggaggtgtattccatattgctggtttttcttatattttactttaactagtgaacttttattccttttgagaaatttaaataaacccactttaaaagtccaagacaaattcatgttgagaatttaaaaatatctgaagtatgtctttcaaatcatactcattaagatcagtttactttccgatatcatgtggttcctaatgtagtaagcttcaaaagcaaattttgaaaggctgagcattgttgggactttgatgtgtcatatacttattcagttttctttgtttaaaccaaaaatgtaagagtgttttcattattgtgacttttttcttagcttttgcagttaaagtgtaaaactgctgcactgtgagcctctttaaaaccagaacgttctgtaaatcccaactcatacattctttcagtttcacctctcacttaaaatgacacccatgtcatatctgaggaaaccgaggcatagaagaataaagaagtattaaagtttattcactgggttgtatagctgtgatctcttgatataatgtaagaaagttttctgtagaaggacttagatgactgacgaaaccagatgcaggtaaggtgacttggaaactcagctttctcctctgtaaaatggggataataatacccaacttgacctttccacatgttttttatgattaaatgaagtaatttatgggaactagcactgtaaattgtaaagcactgtgcagctatctggggtgtaatcatcattaagtgccttagtctcagctttttactccttccaaattctctctccagtaagtgcaggctgttcaggatttgtgtgtgagtgtgtgtgtgcgcacgtgtgtgtgtgcatgtgtgtgtgtgttttcactcagccagtcattcatttaattattgtttaacatagttattgttaaacataaacatactagattggccagaccataattttgtcagcacaatgatcgattatccttaatttttttaacttacctcgtataaatccttacttgagttagacccatggaagagtcactattaacattcctggcatttctaactacagaaaaaaatatttttagtcagtttctttagctgtttgtttaactgttggttcaggttttcaactctgtgttgagaataatatgtagctttctagatgcagtcttatcaatgacctagagagggactattgtctctcttgtatgataggagcctggaaatacagctcgagatcctgctttgtctatagttcctgacatgtcaccctgttgatgtgcacttagaatgctgtaactcatctaagcagcacctgagcagtatctgactccttgttgtctctttaggtgagattaatttctcttatacttattacctgctaggaagatactttggagccagcttgctttaaggtttgcctgttagttttttttggttttgattggctaaatatccctcgatccctcaattcattaaaactccacgttctaatcactagcaatcatatgtagctggacatttccaggactgtttttttttctctctctagttctcttgcatctgactcttgattttcctaggtcgtgagatgtagttttgtgtctggcctacccagacggaaagaggagagtctggctgctgtttggacattggcatgtgtgctgctgacagctcttctctttgtgctcataaaagtgaatttcaaaaataaatcaacccctctgccactctgccccctcccacactccctcctactcttttctagcaaaaacagagccccacatatatatacacaagatcacagcccttttgtttttgccaaatatattttagtgctgtacatgtccttaagaactggaaatatgactcatccactaaccaaagctaatgccaacattcccaccaaatctcatatttctagcaatgatggtttgttacaggtttttctggcctttaaggtaatatttaattcatgtgataagattccatatagaaaaagtgtgttggctactaatatttttaaagtgcagtataccaggtctactcaaactggtattaaagacagtgaacatcatgctaaatagggatctgtgctgctcccatttcccctacttgcttttcatggagtgcaggaagagagatgctggaagattgagagcaggaagcatcaagaaagtttacagattgttcttaaagacaaaacaaagaacacagggattctgtgtgtgtgcacgtgtatgtgtgtgtgtgagtgtgtgtatgtgtttttgatcttttacttaatttttagaagaggaaaaaagtcctatggtatttttgacttgtttattgaaatcagcctttgcctttgcgcaaacacattttctagttctgtcaatgtaaaaatttccctctgtgtattcttctcagtctttacactttgatcatatgtatctggtctgtgttccttcttcaaatggtgtttctttttgcctaaaaaggttgtaattgcttttgaacatgacttgtttttttaatcaaaactcatgctgtttgtcatagtactgaaaaaaaaaagtacaagacatcaattcatgataggtcttaaaacagtatttgataacaaagtaagtgaataatacattaatcaggctattttttatttcaattgaagcaaaaagcaaacttgcatatccatgaactaatcttttaatgtcacagaacatttatttgttgctgtttctgaagtctttaagttcccttttataaatggggatagacaatttcagaaccacattgcttgatattttgagataagtgagataagttacatacaactatgccttggaaaactgaaaaaatgttatgatgtttgatatcagtgtgaactctgaatagtttgtaaacttcacactccacattagtgcaaatgtgttttgtgaaaatactcctaaagaaacgtagtttcacataaaaggtttttaaagtttcatgaagattctgttgtgggaagtatgtttattttccttttgtattcttgtgggaattcttttgatctgtatttaatattttaataatgaaaactaagtgtatgtaattttaaaacttagtttcgtgaggttttttttagattgttgaggttctgggaaaacactgggcctgggatctaaggatcacattgatcctctcgtggaacattgccatttccccacttaactctggttgaaatttttggcattctccttcgtgtgttgataatccataaaaattacaagtggcttattttgtcacttacagttgttttaggatcaaattaagttgtcctaaatggaataatccgtgtttccacttgatatgattattgagctctgataatgaaaatgatgaacagggcagtgctggctgaatcctccaacaggtgtcattctaggaattgttttaataaggggaattcagaaacaaggcaaaataaaatagtgcgtagtggagttattgtttgtatttattttgttgggaaatgtgaaagatgtaagtatgtagtcctctgtgtgaatacacacacacacacacacacacacacacacatcttaacaatgctaggacttagttgtagaaacatttaggttagaaagaaggtaagggcatctagagatggtatcaaaactccatacttaacatttttggaaagagtagtgaaa

SEQ ID NO: 122843 - DNA, 2346 bp, Homo sapiens
cccggcccgctcctccgtcgtggatttcgcggcgatccccccggcagctctttgcaaagctgcttgaaacttctcccaaactcggcatggatacgactgcggcggcggcgctgcctgcttttgtggcgctcttgctcctctctccttggcctctcctgggatcggcccaaggccagttctccgcaggtgagtggccggggggcgtccccgacgaacgcctggagtcctgggctcacgaggggtgagccaggtccccgctagggctggggacaaggatcgtggggagctctctctgtccgggggtggggaacacagggtagagggagggctgtccccagagttcgtgccaggtgggacgcggggcacccattgttcctctccgaagcttgctcggggctcaggctggcacggtctagccggagagtgtggggacctgctggcttcggcgtctcgcgtggcctgcgccgggctagtggggaagagagaaagaaaaagtagttacgactcccgtgacggcactctgttgcttgtggtgcgggtttgttgctgtctgccacttgggtgtttaaacaaattccctgggaagccattgtcagaaatgtggagattcgaagggactgacctcggcgcgctttgccaggtgctttttgtcccgggaataacctcccctgactattgtctaactacttccccgtccctcccggagtccccttttctcctcccccagctctgggttgctcccgggcttgccctgtgcgctcgggcactgcttggagcatgttctgtgtgtgtgttggcggagccctgtaagatgtgttgaaatgcggttctaaggacccactctgagcgttcatgggcatcgaggtctgggcgcctggtggaggaagcctgactcgcgcgtgggagcccgctcctcgggcaaaaccaccgccaggctggccccgcgctccccggatccggcctggggctctggccccgcgctccccggatccggcctggggctggaagcggactgtaaatgtctgccttctgccggagaacccaaaaggagacaagtggagcgtctcgctgtagccctgggggttctcggtcaagccgctcagagaagtccgtgaaccctggctctcccggtcccgccctctgttcccctccagttttgttatccttcgtgtaggttggttgcttctttcgttctctcctctgggggctctgaagtttcaccaggtggacgctggggagcgggctcccgagcacttgtctacctcccgccagtcctgacaacttttctggccaacctacccagcttcgcttggctggcgagcgcatctgctgctggggttcgcggtgcagatggagacgcagtggtggccagagggtgatggagaagacgggaaaagcgacagccacgctcctggctgaagccgcaggacgcaaataacttactttgtacctgacagtttctcacgttgttgtggaggccctgtttcctggaaataaactcaaattgttgttttctggagtaatcgtttatttcccttccattgctctcctacccccgccccatttagaactctgtaaagggagttaaacaacagattcaggtggcagcatgtgtcgtacattcaggcagagattatgaaatggcagcacgcagaggaaaagccctgtatataattgatgtacgcagagggtaacagctctatgcaaaaaataatccaatggtttaattgaattctttctggagtaagcattactgcatgcatttctgacatataatgcccgttagcattgaaaccgtgcttgatgtaactcattatatgcaggcaagttggagtgagtattgatttctgcacagtgtttgtcactgcacggagagcctacgcttgaaaaggcttgtagtttgttaattgaaagtttgaactctaccagttgcataattaaacttacatgtattcaagagttgcaactattaatgtctcaacagcgatggatatattttcagcagttagaaaactttttctctttttaaatgttatttaccctttaattaacaaataaatactacttttcctccagctgaatgtgaaaatgagcttttctgatacctggagtttagatacgtacaataaacaattgtgttcttagatatctagttctaagtactttaactaaatatgcctggcttttctttagtgacaaagcataacatttgacatgatgttgtatatttaattaatataatgtgcattcctaaaaagtacagtaatcacaggattgcatctcaagattttgccctttaggaatgtatgcccagaaatgaatgtcttttattcccagagtttaaag

SEQ ID NO: 122844 - DNA, 1034 bp, Homo sapiens
tatgccacatttttggtctgttagaggagcatgaaactagtgatggtcaggaaatgattcagaaagcaagtcctaaggcagttgcaaagctgtagaaggaaagtcctggaaagctttaatgttttgggcttgcaaatgggtctctttgtcctcaaatgttttaagaataatttttcagtcataatttgtaaaaaccaatggcatttttgttgaaaatattttggcctcttgaggtggacttgcagaaaatactgcaacagcacttttgtacccccactaaccatttcgatgaactcagctgtatcatctcctgccctcacccactgtttcactcctggttactgccctctgttcttagcatatatgataccctgccatggctcattcgttctcagcaaggggacaaggaactcaagaactggcagcacgagagcaagttgcctcaggccaggggtcagacccggctataggtcttgccttgtctcctctccactttctctatttctttggctctcctgacaatttctcatagcttccctgtttgagcacacattttgcttttccccttgcatttctattgatcatccagaagctgtttgctggggcctttgcaactcccagcttgcaatatttatgtccattctcttgatacctatgtgtatccatttccctgacattttaaaatgtgtttctcctcagttttagctcttctcctgactactactttgccctgtccctagatatcctgccataattaatgttgaatgaaagaatctaatcaaccaagactggaaattcatacagactttgaaatggggacaaaatcttacatttgtttctagtgtgtccccatagatttgactatcacactttggggcatcagtggcattaagtgacaaattacttctgggagttgtaggatgattctatgtcaagctctccactcagatccaatgagtcactagttcctacttatgaacaggtattaacttgcttcatttgcaaaccccagcaagaattttggtcacaagcca

SEQ ID NO: 122845 - DNA, 1003 bp, Homo sapiens
aaaaatacaaaaattagctgggcatagtggtgtgcacctgtaatcccagctacttgggaggctgaggcaggagaattgcttgaacctgggaggcggaagttgcagtgagccgagactgcaccattgcactccagtctgggcgacaagagtgaaacttagtctcaaaaaaaattaaaaatacaaaaaaaaaaggaattaagattctttattcttaagaaactgttaggtgtaactagataatacatcaaagtataccgagttcattagacaatgttattttgataaggaatactctaaattttctgaaagaaaaatggctatccatttgtttttcttagcattttagtgcctgctatgtgctataccacaagttaggttgcgatgatgtaaaaatcaattgtatgtgcatttccacaaggagattggatttagatttgtgaataggattaatggggaatgtatccctagcaaatgggctttgatttgagggaagcagaatatgggtacaactgattgtatgggtaaaatgtaatgggaagatagagaaaggacactgttagttgggtaattgttaatggagatagtggtacttaagctggaagtgcagttagaatattgaagactagatcaggtcagaaatgatgaggctcagaattagggttgtggcagtgaaaagtgagaacggggcagacagatgttgcagaatgaggtcaaaaggatttgatgattccattggatggagagaagtgagggagcggagtttaaagacgtttagaagatgatggtgcttttcactgactcccagaactgggagaagtactgatttgaaatgaagggattggggcaagagaggggtaagtattatgggtgtgaaaggagagaagatgaggatatgttgagcttacagtgttgaagaagctgaacagttagaactgagacatcttttaggtaagatttctttgaaaatgtatatttagaaaatactttgcagggtggtgatatt

SEQ ID NO: 122846 - DNA, 1041 bp, Homo sapiens
agcataatttaaggcaagaggatgacaatagacaaattgcacccacttcaaaaggagagagtgtgtttacactgagtatttgttccaaggagctgagaagcaggcaccatgccctgatgggcccttcacactgggttgctgtcactgctgaaagagcagcctgtccttgtctgctgtactttcatcttctgccatatttgtattcatgtgcgctatcctcccacataaaagagcacagcttgctattcctgcctttgcttctgtgacctgcagtaaaaccattaaagatatattttaaggctttttacatggaatggtaattatgcacaatggtttttaatcatttggcatctagcatggagccttcagagagtattatgcctcagagagctgcagcttgcgtggatcttgggaggggcccttggtttcaggggctttgtgttctgtgtgtgtgtgtgtgtgtggcaacaccaggtagtgacaacagtgtcacctgggaaacagaggacacagatgactgcttggtggacttgaaaccagctctaaacagctgttgggttctgaacaaaactccaggaaaattgttcgctgggtgagctggtgggatgaagagactgggatgggctgagggtggagggccgaacggataccctgcacgttatttgtggtgttgtcaagggagagtttagagacatcacatgaatctcaccttgctgccaatttggttcatagaaagtcacagctggaaatcttcttagaagagaacatcttgttctcaagcccctcattatacagcggaggagactgtggcatgcagaggtgaaatgacttgcctgaagtcagttagctgcttggtaaaactagccaagaatccaggccttctgattcccccaccccagcaaatagtgtcttttttttttttttcatttaaagagaaaaagggtggatatttattaaatagggggaaagaaacagtaaagtagaatgaacaaagtataatcctattatcaaggcaaaccactgttaatatttttatattca

SEQ ID NO: 122847 - DNA, 1024 bp, Homo sapiens
gtgagaataggggagcagagcattgtgatttggcagctcctagaggaggggagtaggctgagaaagtcttggtggggggaggcagtaaaaaaaaaaaaaaaaagagttacgacttcacatacttttggtgaatctgaatgagtctccttttgatgcgaagtaggtggtataagagacttttcaaataatttaactgtccaccaacgtagccttctcttcaggcagtttgttttgcttttaaattatgagagggtaccaccctccatcctcggtgtgaatattctctaccagaatgcaggaaaaacgttacctgtgatatgtgatcttccttttcattttaatgggcacattgttgccactcagttctgaaatagagaatttctccatcttccacttcgttaactttgcacaatatattgaagaatatttaaaatactaaaactccaggtgactgtagacacctaccatataagaaagtgggaatgtcaaaataatgagatatccatgaagtgataatgtaagctctcttaggtttatttccttttttaaaaaagttgaatttagaccagagaaagcttgaacctgataaccaaattagcacacactgtagtcacaaataaaattctgaggaggtgttttggagttgaatttaaggggaattttaataaaaactgtctttatttcagtccagcaaagtagctttatgcaagcataagtgcctgaggagaaaaattatacaaagtataagagataaatagatacaaagttgatgtaatttctacttgcaatgtgtaacagggattatagtgtgccaaaattatggtgtcatagtgaatatatttagcataacttttataatatttgttcactctagaaaattaaggcaatactgaaaagtacaaataaaacaataaattgcctataaaaccattgcttgaatatagcttcattaacattttgatctatattattttagttatttttcctgaatttatttatttttttttttgagacgtttcactct

SEQ ID NO: 122848 - DNA, 1536 bp, Homo sapiens
tgtgatgttgagtcttccaatccaaaaataaggatgtttttctgtttgttcaagtctatttttatatctttcaagagtgtttaaagttttgcactatagattttgtacactaattgttaaatttatttctaagtactttatcttctttgttgctaatgttaatggggctttgtctgctctgtgttctccaactgattatcctttatgtaaatgattgcagcctgcccacacctccgaggctggccctgtggaccagttggccttatttcttcagtggaaatctagtcactatgatgtggtagttggcgtgttgtcaccttgctataaccataaacttcaaaatgtgataagcagctggctgatcattggatacaacatcctgcattaagtcaacgtgtgcttgtcaaattcataatagatgcccatggctgctaagggcctgtggaagaccaggaggatccctactactcaacatcacaaatccagctttgaatcaggaaattgaggcattcagtctttctgaagacacttcatcagggttcgctgaggaccgagttgtcagtgtgagtttccaacttctctacacgatccttattaccagtcttggggtgttctacaatgccaatgatgtgggtttccagaggaacgtcgctctcaagctttctcaggcagaacgggaagaggcccccttcattgttcactagagtcctccaagccatggtgtgcaggtgaacaagttgtgtacaagcacatggaacaattcatcttaccagagagctttgaaggtacaattgtatgggagagtgaagacctccacaactttgtgttaagaaatcttcacaaagtgacactgaatatggaggggggattcttggagtcattacagctggggagggtgcattgcctcatgaattattggaaggtatggagggagttggagtggttttagatgccttattgaaggaggaaaacatcatctatgatgatattgtttttgtggatgttgtcaacactcattgaaatatacctgcaaaattattgaactttatagatggactatggaaacaaccaactttgatttgttgctaaagacagatgatgactgttacataggcttgaaagctgtatttaatagaatttctcaaaagaatctgaataggtctaattttgttggggatatttcagactgaattgggtagttgacagaaccaggaagtggcaggagttggagcaccctggtcatgcttaccctgcctttgcatgtgggtcggggtatgtgatctccagggacatcatcaactggctggcaggcaactccaggaggttatagacctgtatgtctatgtatgcgtaagcacttggatggcagccacaggacctaacagttaccagcacagcatgtgactgtgtgagaagacttgtcagacaggaatattgtcttccccacagtattctccgcaggagctgacagaactgtggaaactgaaggaattctgtggtgatccttgtcaatctgaagcaagataacaggatttg

SEQ ID NO: 122849 - DNA, 1491 bp, Homo sapiens
gctgtgagcacggccctccccctcaccgcccccacccccaacgcctcgcatcccttggcccgcttctccacctcggggccaccgccagaaaaatgcattcgagatcattcagagtgcacagaaacaaaaatagatttttaattgttaggttaggggaaactgagatgagaaataagaatttggggtgggggggcgcggccggggcgagtgcgtccagttctccttttggttttcctagagcgttgtttgtgatgtctttattggtttagggagtccgagaggctctatgctggctatctcggtcgcgtggatttttgcgcaagtttttagaaaaacactgactcgagtagagagcatttctccggaaagtttcaagtgcagcaaaatagcgaacgtgcaaaactggccaaggggagacctctagtggttgaacgcgtcttttaagttcggaaggccgagagcaaagtttggcctttactcgtagctacgtagtccgttcagacgtggaagtaattagaggacctgagcgagcagccagatgttgtgtgaaaggatgctgatcagaaattgaaagtttagtaaatcgaagcaatgaattctgaggactcagaccctgtaacttccatccgacatgagttatatgggaaagacactttgcttttattcagagatttgagattgatcgctccctgaattggaaacaattgtttgcttttgcatttatcggtgtctgtacctctgatcaatttttaattaacgagtctcagctgatgactttattttgaatgttaagaaaactgctaagttgaaatgtgtttaaaactttgaagaaatggaaaagacctttagttgagatttgtcttttatatgagctgttcattttactgtctgataagtgtaaggcaattttatatagtttcttagctgtatagttatgtatagtccgagtaagtagtcccttttggttctaagactgtaattttgtttcactgagtacgaaattatttctgaatacttgtataatttgtgatttaaagtccttaaatacatgggcaaaaattttatgtaatatctattctttttccagtgtgttttctgtaaaatatctttaattttaaagataaaagcagtgagggaaattaaagttgactcaaatgatccttgtaactttcacctgcctgtcatatacaacaggagagacgttattgggtgaatttaggacatgggaatgatacgaatgattaaaatccatttcaactcatctagaaccagcttattttattttaatttaccgagtggcatggtgtaaaattatgcctaagtgattcagaatgtaagcttcttaactggggatggtggatttgaaggtttctttttgatgacagtgttttgattttaccttccctctctttaaaccaatgctagaacccttaggagaaatcttgagagtggacagcaattgtgaagatcgccagagagttctgtgtttca

SEQ ID NO: 122850 - DNA, 1011 bp, Homo sapiens
tgactactttaggttgggttgtcagggagccctctcaaagacgatggcatgaacagtgtgatctgatgaatgaagaggagtcagctatgtgaagttgagagtgaggcgtcttctgggtagtagaacttccagaggaaagtccttaaggtaagaacttgcacagcatgttttgttcgaggaaataaaaggaagtctggtcactggtttaggagagggtggagtaagatgaagttgaagaggtacctgtggtccagggcatgtagggttttatggtaaacaagagtcgagggtgttcattgtattctgagtgtcaggggaagcctctggaaagttaagacaagggaatgctttgatatgatgtatgttttaaatgaccactgtagccctgagtggaatcagggaaaccagttaggagtttattgcagtagacaacgtaagaaggctgaagatgatggaagtccgtggatttgggaatcaatgttagaggtagggttgtcagagtgtgtgaggaaaagagaaaaatcagggataaaactttggctttaacaattggctggataatcctgtctcttactgagaatgggaagatgagggtggagtgcagaacacagagtcctttggccatgatgggtttgaaatgctgattaaccatccaggtgaagatcccaagtaggcatttgtctacagccacatggagtaaggaagaggaagctgagggtgtggattgggagtatctggcctatgtaagatgaccttgaaaacccagggaaagggactagaaagagtagagaagggaactggattggaggagacatcagcagaggagacaaagaggagccagtaaggcgtgaggaaaatcagagcagagcggtcacgcagctgagagcagaaagtgtttcaaggagcggggagcggtgtccatgcccttccaaccggtaacacgtggatacagtcttattttgtaataacctcaggccaaaagcaacagttttcagatgaactatattctta

SEQ ID NO: 122851 - DNA, 1070 bp, Homo sapiens
tttcattgatgaaattgtggtggtttacagagactaagagctcattctgtcaacagaaacactaatctgtacagagcgctgtctcaggtcatgcattgtcctccaaacccaaaggtttttttcagggttggctagagagcgagtattgtgattttgctgaaaagacaaggtgtgaaggagcaacttcagttgacacaaaatttgaaatgctcacagatcagggaggtgatttcccaaagtaattgcccaagaacctccgttttggaaggattcctttttctgtagaatactttgcctcgatatataagcatacagatgcactttaaatgaaaacccttgattataaattgatagctggtagtgtttcttttgcaagaatgcatttctaaggcaaaaggtaaattattttgtccgtcttttgatgtactttctgattccaggattggatatttattcaaggactattttaaaaatagaaagtaagtttgtagcatgctgtctgaattctggggtaagttccacctcttctttagttgctttcgttttttatgatgtaggacttcctttgatatccctgttggaagtccattagcagtcctttgcatttgccaattcaaggtaaaacagggtcagtgacatctgcagtgtcccagtcatttatttgcatgaatctgcttaaataagttttttgttgctgttttttcttttttatgttttgttcagaatttgtacattcaagttgtacttgttatatctgacatgaatgaaataaaatcttaattacagatgctttttacatatgtatgatttttaagaaagcttctcaaataggagaggcagaacaagaacaggaagagcatcaagtatttggacattactagctatgtaatgaatctgtaggattcagaattgtcaaactgtgtcccaagatgatgacaaaaatattgaaagattatattgttaggtcaagtccaattcatccccattgggaatttttttcaagtgtaaagcatagaactaaagcatagtttaaatcatgagattttaaacatcttcttcttttttttttt

SEQ ID NO: 122852 - DNA, 1074 bp, Homo sapiens
aacacacactgaggtgtttagaatgattttttaaccaagtcctactagatagctcataattatgagataatgtaactataatttgtaaccctggttataattagctttgtatctgggctgggaaagccttcattagagttgtatggaaagtccctgtaggtaaattccaggcagttagcacagaaaggcttcacctgttgcctttgaggcaggtctaggtaaatgctgtagtgtctgaagacacccgtaatcagaagggattcttcaggaaagatcattgtaaagagggatggctgtacttgttattttaacttagtggaatttttagtgaagcttttgaatactacaggagttagattgttatatttggacttgtgtagcttcagaattttgacaatagctcattggccagaaaaggataactactgacatatagagggaacggatctgaactgattggttaaatgctgtacttctcatgatgactcttagcataaaggaaagaaattcatatttagcttaggaagatagataagaacaaagataaaagcaaatgtcaacttttacatttcttaagcaaaattagtagaggataaaaaataagcccttgtagtcatacacgttacttatcaaatagagggtagaatttaaaagaggaaaaataacttgtgcagcaacagaaatccaaacctgcaatgagatggacctcattttattaaggaatgtatatctgatttacagttttatcaagcagatccacttgttcctggacttacgctatgttttgtctgctgagatctgatatgtgctcaaacactcagaaaacatcagtgagtgcttattgtggtgtcatgctagctacccttccaggccttttctatgggcttataggctgatggagaggggactgataaatgtaccacagatcacctggcagctgaggtggtctgagagcagcaggggaccagtgcagactgggaagcagcatagtgggttgcagagggacctggatggggagttgtcatcttgactgagtcactaattaggtggctgtgggtaagtggctaagttcct

SEQ ID NO: 122853 - DNA, 1049 bp, Homo sapiens
gctactctgattgtattggactaaatcatgtgcccaaccctgtgtatatgtggttctggtgctgggatgaggaggaggaggctggtagggcactatgataggcagttctgtcaagattacatagagttgtggttctcccaagaaaataatgctgccaatcaaaaacaatagtctattattgggaataattccttccttttttgggacagccctctgcacaatgatctggagtttgcacatggaagcaactcaggtgcccaagacaatgcgtatcccaaaagtgggacctttctcccaagcaaggtatagcccagtgatgaaataatgccctcatgtttaaactttattaaaaggaggattgtttccagaatgggaaacacccattctggaatgaatgggaagccaccatttattcatatctatgtacttctagcaaatatccctgtgccttatttccagcccagagattttgtttccaaaagccctgcccatctagtgatgatgagattggataccccctactttggccattgtagagccagtgaaagtttgaacagggagctgaagtgattaacacagaactattgtttatgcaaatacattgggttgttggaaatgcacagaggggagtggcaggcacagattaggattttcatttaggaggcataagatgataggtttccaattagagtaatggcagcaagaatttgtgagcaatattatgaagttcttatgaggttatatgtcaggatgaaggagcatctttgttgacagaagcatttgtggaatgaaataggccaggagggagtagactaggaagacatcctgggccagtaggtgaaatggctatgcgtggtagataggttaatagcaaatagattgtgtagacaggaggcctgtggtcaccatgagtcctaggggcatgtatagaactgacatttaccaaggatctacttagtatggtaggttcatgttgcatactttaaagttattatattaatgtttatataaagtcagggaggtaaataacttactgaaggttatgaggc

SEQ ID NO: 122854 - DNA, 1059 bp, Homo sapiens
ttggctcactgcaacctctgcctcctgggttcaagcgattcttatgctgggactccacaagtagcctcccaagtagctggaactacaggcacacatcaccatgcctggctaatttttgtatttttagtagagatgaggtttcaccatgttggccaggctgggcttgaactcctgatctcacacaatccatctgtccttgggactcacaaagtgctgggactacaggtgtgagccactgcacccagcaaaatcacacaaaacagtatttttatgaaaatactaagccttttctttgaaaaggaaagagataatatgttccttatactctaagtattaacagtaattttaaattgtattcaaaatgctaaaattgaaatattgaaaaataaaaaatacacaagtataatcatcgtcttcctcacatacatttttttttctccctggttaagtaggaatctctggaaagtccacattttagataaagattttattaatatcacttggtcttatcacactttacttgacttgtggaaattccttatttattttgtgagtctcccaactctcaaactaacctctattcagaacttttcatgcataattgaatataagacaataataacacaaaattaatgatgcttgttaatgaatatttagctcagtgtcttctgggagatctattcaaatatacttattaagtcatcagacatttattgacacatactgagtgctggccattgtgttccatgctaagagcataacaagcttttctcaagaaactcaggctagagagccattgggtaatactttaagtacttagagcaagggaaagagttttgcaataagatgatatatgggactccctgagtctacgttggggtggcagtaatgaggagtgaaattgtgaattaattcagtaattccttaaatctggtatttggttaagtgatttgaaaagacaggttacaaaaaagaagtcaaagttaaaaaggcagcacatgccatccatctccaggtaacaaggccacctgcatcccaattcttatttctagagatacc

SEQ ID NO: 122855 - DNA, 1010 bp, Homo sapiens
tcgtcacactcaaagtccttggacttagaccggggtccctccactctaactgttcaggcagaacaacggaaacatccaagttggcctaggttggatcggaacaacagcaagggatatatgaaactagagaacaaagaagacccgatggataggttgcttgtgccccaagttgccatcaaaaaggactttaccaataaggagaagcttcttatgatttcaagatctcacaataatttgagttttgaacatgatgagtttttgagtaacaacctaaagaggggaacttctgaaacaaggttttaatgttaaaagaatatatcattttacaagggtatatattttaaaacgattttcactggtgtttccttcttaaagtattggctgtaagcctttttaatcaaatggtttgtagtgtattagaattggctgcttagttctgtaatgaagatggttgtatgtttgggttacttgtgactgcagtactctatgttaccacacatgattttatttttctcttcctttgaaagcatgatctcttttattaatatgaatgcaaaatgcttgcatccaaattaaagcttattttctttacttttaagttctttgattgccctattcataaaatgaaatgtccagtatggaaaacatagggtaccaaagtgtggaccaggagtacaaattcagtcccaatactcaatacgtattatagatgactatgagtgcaaaccttaggatgtgattttctgaataattgttctttgtaggatttggttacattatttaaaatgaaaaagatctagttttagtgtgagctcagtaatgttaattggttaagttcattgtgaatcttgagttttagataagtagttatttttttcaatatcacttctgtttttagtgatattatatcaagaaacaacgtattcaagagccatggctgacagtgccagatatacttagggataaacatcaaaatgcaattatagttgctataacgttagatactcgga

SEQ ID NO: 122856 - DNA, 1965 bp, Homo sapiens
cccaacatacatcttactgtcataatactgtgtacttcttcacctccatgcctctttcctcattgtgtttttccacctgaagcaccatttccattcgttttagcacaaagaaaatagactttgactttccctttccctgagtatagctttaaaacctaccttggtttctgtctttaaattcttacatatgaattgtctctgttttatgctaataaattcttttgcagtgaactcttatttgccagttgcttctagcgtacttgtcaattctccaggtattttaaggccctcgagagtggaatagtgtctcatgcttgtcttctggtaaacatactatttaatgtaagactaggcagacagtaactgttgattacttgattgaaaacttgatgaatgttacttaacatttttttcaagcctgtgtttttggaatatttaagccttctgttttttttttttttttctcttctagaaagtcattttttaaacaacactcaactttgtgaacccctgaagattttttgaccgttccaagtcttaatgccacaccactattccagcgaatttatgctacaactggtaacaatgaccagaagcctgaagaattaaaatgccaacaccaaacctttccttaccagctctggtctatattgctcccatgcatttaatatattattttgttttataaccacttctaaatattctcagttctttctttttgttgttgttaattaaggggttttggttttgttttctgtttactttgtgtgcaactacctgcttttaatgactcactttgatcaaatgacagtgaacaaagccagcccaagctggtaaggtgctgttcacttgaacaggtgctgttgcgcagaaaggaaactctgtgactaatttagatagtggctttccttcttctggattcttttcattgaattctcacagtaaatatttacggagttttcaaattgcagcaaatatactgtatgagaaaatattaatacagattaaaagcctttcttacatcttgaaaattttctaatatttgagaatttcacagggatgttttttatattggacccttttgactttccagtcctgtgactttctacttttagtagagagtcagaatctctggactggagaataatgaagaagttcactgactgtgcactgtgcttagagaccctgccgcaccacagtgccaatgcttgtcagacacatgcccttcggcagcattccagaacaggagggaagagaaagagaaaactttcttcccttctactaaaagattcaggcagcttaaaaccttagtgctttctttcttaacatacccacatttcaattctttccattatttgaacacttgggtagaactcttgctttgtattaaacctctttgtctacacatgtaaaacttaccttttgttattgagcaggcctatctctttcagatagttttatgattcacacaggtttgaggatgctggggagagggggagggggctgtggtggtgttctgttggttacaagaaagttataccatttaaagctggcaccagagacccgatagggacttattaactatattgaacattttttcctttgcctttgaccctatgtatagttacgatgccagattagatttatagcagcctcaagttgtattaaatgatattttgcttcctgtaatactattataaaataaagtttgtttattctctaaacttgtcacttctctttttctaaagggttaaaaaaacaaacttgagtgatatttttcatcagaagtcttagtattttgtgaaaagtagcatttcaaaatctgttttcagctcttctgtaatttgatgatgctgccaacatcactatttgaaacggtgaaagcgacgttgaaagtttgtaaatctaatgttgagagtgccagattccttctgcctggttacataatccattccagcttttacg

SEQ ID NO: 122857 - DNA, 1008 bp, Homo sapiens
ttgagaaacgcattgtgatcacaggagatggagatattgatcatgaccaggtaaataagttaagttctagttttggaaatggccctgtttgttttctaagtttcacatttgtcatcatgtcgcatacctgtgtaaacctcttctccccaaacctcctggatgaagtccacctcctaagcaggacataaagacacagcctggatacaagctttcctacctctgaatcagaataaaacacagatttctctttatttcccactggctttacatgcacttttgggtcaacgtaatctggaggatttctggaaaacataagattcgtgtgggcctggtttaaaggcaagtgatcaaatatttaaaaatgaatggcagttcaatgcaccagtttccaaaaaatgaagaaagccactaagcttgacctatgcctacttttaggaacttttcaagtatatttatggcattagaaaagttgagctatttacttccaggtgttttctcctattgcgattattgggggaggggaggtaatacaaggtttcttacaaagtgaaaatttacattgattctgaaaattttttaaaagaatcatgcctccattctaatgttaaatttggcagcatgcatggctttgagcaggtgatgaatggaactgctggagactttgagagcagttttaattttagactgcagtcccaagtgatgctgacaatttttttaaaagtgattttaactcagctttaaaggagaccaagctgttttccttttataacaacttgaagaaaaggaaaagaaatattcaattgactatctcagctggggagtaggagctaacgatagttacacagctttggacacaatactgagctcaggaaagaaaattttagagaacaaaattcctcatttgagaaaggcagcctatatgtgatcagagataaatggatttttcatgcctaagaagaaaattactcccaatttttttgacctttgtaagtatgatttgacttacat

SEQ ID NO: 122858 - DNA, 1030 bp, Homo sapiens
caacaacaatttaaaaaacagcaaaagtaatttgtaaatttaaaaatgccgcataaatgcaaggtactgttggtgctcattttaaagcatatccagttattaagcatagtgataagcctggtttgttatggtaaaatgctgtcacttgtgactgagagtgtacatttatcagagttgtaaatgttggatgtgcgctttcccaggaccgtgtggtatttgcttattgactgtttagaaggtcacagccagatgatctcctcagcctcatccagtgtgccccaggcactcgcagcttgtacggagcccataacgctgtgaggcagttcccccaggagctccctcctccagccccgctcgcagcctttgtctagccatgcgccatgtctacgtgtatgactacttacgcagggtgtcatcaaatcaaacattcaacaaaaatctcatccatcttccgtatctgaaaccaaagcaaatcctttttaaaattattgcactaaatgcaataaacaaaatcagcaaataaatttgtatgctcagaatccatcagtcaaaaccatcacatcatacagaagtcttctgtgatgggaaaaaaatatatatcacatcaaacagtttctcaaaccaaaaacagatacctaaattcttataatttcttgtaattctgcaagtaactgatttctccctactctcctttttaaaaattggccagctaggagtaaagaaactcgggaaactataacagaattcccttaaaggaactacttggattaaataatatctgtcctatcttaatcaagtgagattaagatgggacagatgccatcttgaatattgataaatgagttttaaggttgctctcagctgagggatacttgtggatgctataactttagtaataggattctctattgagcctaaaaataaagcacaaagtgtttctagaatatcagtcttttgctgcttgttgtgtgtggccttacaatgatccacaggtctaggtggactcccatctctgtttgctctgactgtg

SEQ ID NO: 122859 - DNA, 1318 bp, Homo sapiens
gaaaattattttggatatggcatccttgtgtgtgccttgatcccacataagcacaaataggtttcttatgaacagcttggcgggggagcattagtgatgtgtctgtgctgtgataagttgccagaatgaagacatacaggtgcatgacccaagtttgaaagagatttcctcttacagtcagaaaggctctggaccgtccagttatttcctcgtgtcagtgtcaggaaacagagggcaaatatgtttcgtgatcttaacataaactgttaggctattaatttgcttcattgattccccttggaaactctagaatcttctgcatctttcaatatcaaagcaaacaagttaaaatctattttaacatatgtatgggatttatatatatgtaggagcacatgcgtatgtgcagtattgaaatatatgtgcccgtatatatgctcacaacatgcaaactattacaggaacaatgtagttgatgaaaacaatcgctagaggtaagcagataaccaaatcatgcagattcagtttgtcctggtcaggttctgttgcttggtaatttgataaaatgtttatctatttttacccacctgtgcttaaaaaacaacaaactcagcgcttctggtcactgtggaaacttctctgcctggctctctagtttcattttctagcttgtgcaaaagtccttcagacaaattctgtcataattcccttgtagctttcagtcccacctactatgtccattctcctctcttttctccactcacacagttgagtttgcttctccatgtgcacctagccttttgcctctactcggtttcaaataccagccgctctcctggatggtaattactactgcaaacacgcaaaccacatggattttaaaagatgcatattcgatggggcggggatcttctctgacaacataacagaagttaagcattactttgtatttttcccccaactatccaaagattgatggcggggctggtggtgattcgggcacgttactgaccgcacaaaccatcacatctgagtccgtgtcaacaacgacaaccacacacatcaccaaggtaaagcaatgcaggggatcatatggagaggatggtacattacagacagaatcttttctgaattgtttctctcttcctgtacacacttccaagtaagatacagacagtgccagcggaatcaaaatgccttggtttaaagtatccaagaaattaggctccattgacaaatgcattcaagccaaattgcaattttgtgaagtacaagggggtaaaaatatgttacgaatagctatatgtaagatagctac

SEQ ID NO: 122860 - DNA, 4225 bp, Homo sapiens
agatcacctgaagtcaggagttagagaccagcctggccaacatggcaaaaccccgtctctactaaaaatataaaaattagctgggcatggtgctgcacgcctataatcccagctactggggaggctgaggcaggaaaatcacttaaacctgggaggtagaggttgcagtgagccgagatcgcggcacactgcactccagcctgagtgacagagcgagactccgtctcaaaaaaaaaaaaaaacctgaatagtggggtttattaggaattattctcacacttctgacatgagggggtgcttcatgatgactcttgaatattgacatttcaagtttctaaggacagttctgctgtccctcaggcaggttgggagccattgtttaagagccagacacagcaaagttaaatttgctttaatggtttaatttagggagaaataattttcacgttgctcattgagctttcaactctgagtttgtcttcctattttgaattgtttttctttacctgtttctttttgcaaaaaaaggggacagggtaatttactctgtggcatatttagcacgcctgagggaatgaatgtgggctgctgtcagaatgtttgttgtacagagagttaaggtggtattgaggagggagattgtaggagttggagtggtgagggaaggccttacagaaaatgcagactatgaagtgggcctcagggaggttagaaaactggaaaggcccagaatgtgcagataagggcaaagaagggccttggaggcaggagagggaggactgcccaagctgtaacacaggaataagcatttcaagtgtaggggccactgaagaggccattccgtgcagagaaaggccaaggaactacctcaagaatatatgaaatggcgtttgggtgggtcggttgtgctcagttggtgatcagccaagcagttttcactggtttctggaggtcgcaactatcaaagattctcaagcagggtggaaaagctggcgctcacaaacctcttcataagcctgctccagaatctgtcagaattctcatcttttctttcattttatgctgttctgttgttctttcttgtgtaacctttcctttcttccaataggtcactgctgtctgttctgacttattgctaattctttgctcttccttttctgacctctctagagcctagaagaggagataacatcaattttgtttagtgaaaagggcttttctgatagcatgaaagccaccttcacttcagccaccacttggacagcagagggcgctgttgtgagcgctaatgcaccttctgaaaagctttcttcctcgcccttctcacacttgcttgaggtgcattttactttgtttcccctgttactaaaagccacatatgagagagattttcatttttttaaatattcaggcaccattccctccagtgctttcattggtgaaattaattcttcctgggagaaacattcaagaaacaatgactgaattggaacatgaagaaaagatatagattggatgtttctcctgcttctttggtcaaagaaaaaaaaaatctgcctaaattcagagaataatttaaatcattaagttccagagtctgggctgttaagcagagggaaaccctcaaccagatatgctttgcagagttgacattttcaaaaccccaaatttcaggcatcctctgatggcatgttatttttaaaattctgtttatatggaaaaaatctgaagtgcctcccatgctccatgacataattgcttttgaatgaccctaaggaattccctgaacttgggcagaacctatccagctaattgaggttaagatataacaataataataattcactgatctataataataatgaaatgtgtgtttcagaaatgttctggtcactggatatgtttattatatgtagtcatggttaaattttacctgcttatcaaaatagattgagagttttttcagtttaatatctagaaacctctgagttttcaataaaactggaaagatagctgtcttctgttagtaatgtgatttacatggtattaatttgggtcaatgaaaccatgcccttaccatgtgtttaagaataatagggcaggtccaagagagtttgtgagtagacgttgacagtgctgcagagacgtgtgtgtgtgatgttaggatcttcagctcatggttgtccaagtgtctgggagagatgaactcagccctgctgtctattagaggctccagtccagttagtaccttggcagcttcacaacaatatccagagggctcagtggtgtggtgcccttctccatccagaatggagtcactttcgtgaataaatagggctcctggctctagctgaattatttttaagttagatcataggcagtagtaccacctagaagtcaaaaagttggccatgcttgagttatatcattgtaaagcagactttttgtaagtgtgagaaaaatgtgaagctttaaaaacccctctgtacaaaaaggtttccaccctagttaataatatcataacatagtaatttgttcctaatgtattaagtcaacagatatttattgaacatttaggtgctatattactcaactggagtaaattactttactcccaagaagtagatgtctgaaggggataggagtgaacatgtcaaataataaacttgactgagtttagatttcaaagatgctagtagaggagctaaattgtaaaaggaaacacttggagtcaccattgacacccaccctattgtataatatagcctttgccaacctatgatacgaattggaaagttaataaccatttctggaatgaacattttcatgttaatagccttctgaggctaactataattttgccaattaaaactttttttttttttttaaagaaaaccagcaaaaaataaaagtgccatctccttggtgctgtgttcatttaagaatcagcgttccaggctagactttatagtctgattaaaaccaaaactgttactaggttttaaaagttaaatttttttctttaaaatgatgagtcagctttggtataattcaatttttgtaaactgttttaactacataggtagagcttataggtatatctataataaaagcattttacttctttgggaggatgctggctgtttttgtgtctttttgtaagctttttggcatttgtcttgattgtcctctatgtgaccttgagcagaggtttctgtagatgttgattcttgctgttttgtctttgcagtgtcagatgtttgtttcagtggttgttgaggtaaaactgtattgattttgtgtcctcggttgctttttgttctgcagacacgtgctcccgagtcagaagggccttgcactggagccagggatgctgttaaggttctcccctttttccatgttaacaccattgcctcacgtttctcattgccctcacgtttgccccgcttccctttcagtcagccatcataatcatctttgtttttctccatgacatgaatctgccatcggttaatttgggtttccgttgtttttatttattcatatatttttgttttccctcatccatctttttttgtacagagttcacatgagactctgaatatagtggaggagaagaagcgggcagaggttgggaaagacgaaagagtaatcacagaagaaatgaatggtaaagagatatcacctgggagtggtcctggggagattcgtaaggtggagcctgtgacacaaaaagactccacctccctgtcttctgagagcagcagcagcagcagtgagagtgaggaggaagacgtgggagagtaccgtccccaccaccgagtgaccgagggcaccatcagggaggaacaggagtatgaagaagaggtggaggaagaaccccgcccggcagccaaggtagtagagagggaggaagcagtgcccgaagccagcccagtcacacaagcaggtgccagtgtaatcacagtagaaacagtgatccaggaaaatgtaggtgcccaaaagatacccggagagaagagtgtacacgaaggcgctcttaagcaagacatgggagaagaagcagaggaagagccacagaaagttaacggagaggtgtcccatgttgacattgatgttttgccacaaattatttgttgttcagaggtaaatgggagtcccaggtgggagccaaactctagagctgcttctcagatggggaactcctgcctttcttctcctgtcc

SEQ ID NO: 122861 - DNA, 1134 bp, Homo sapiens
acaaagtcatagtctgagtttcaaatccaggtactggaaggaagtgttattagccattttgatgatcagttccatgtcatctttctgataatgtaaataattattcctttaaaaatcctaaatagagaagaaatcagaaccctttaaaatgtaaatcattgaagaagtacgcattgactttattttcaaattttgatgaattcatgaacttactcatagataataatatggctttagagacttggcatttttcttgctttactatggttttttttttaatcgtaagtttgctttgtcttattttttggttttatttttgtcctactgggttttttccttttggatttttcccccctttgttacgttacatattgctaggaactggataaggcccaggaggacatactgaaacatcaggctagcattagtgaactcaagcgcaattttatggaatccacacctgagccgcgccctaatgaatgggaaaaacgacgtatcacacctctgtccctacagacacaaggggtatgtcattagctatttgttggctctgtctcacttcagttgctcaataaaacttaaattgttaatctctatgttgagtctagggaagttacaaaatgttcccatttaattatttttatgtaattactaacaattttgtaaatactaaatattaacaatgtaatagttattggcctagttcttaggtaaattgcatgagtttcaaaatacttttgaaatagttttaggataatttcactattttactcaggtaaattgtagtaatgaattgttatataggacaatttagaaactaacatactgtatttaataagctttttagttactgatatctgaaatagggacatttacttagtataaataattaataaataaagaaatataggctatctttagagtggtttaaagttattactgtgaggaaaatgagtttaacttagctttaaagaccgatgagccctgttgaaagcttgaaaaatattatatataatatgacttagtattgaaacttccttataatgaaatgttagaattgtgttttaaaaacgttttttcaatcataacatttctcctcacttactctatttcttttcatggtttacttctccc

SEQ ID NO: 122862 - DNA, 2933 bp, Homo sapiens
aaacatggctttttgaaaatttagactatataacactaagattgggcctcatagtgctcctttatttaaaattaggtgtttggtttgaggatttttacccctatataaggcaaatttttttcaagtatcctacctctgtgctactaagtcagcattaacatgtacaatatatttttgattattttgttaaatgtggcctggtgatttagtgcctcatattctatggatcctaccaatacatacagtaaatcacaaaatttagagcaaacctaaagaaaaatgtaaagataattgcagtgagtatgcattgtaggacaattgttaaaagtttacctgaggaatgtcaaagatcaacattttagggaattaaatgttgaccaaggagttggaagatgtttcttaacagattattgaatgtctgtgtctcatttttcacatctgataaagactctgagctccttgcttacctctgaaaaatactatgaatggttaaaaaggtaagccgtttgaactctcagatttgacactatcatcctaattaagaaggaaaaggatatatattaggaattaacctataaaggttaaatgatttgcctttgataagggagtcaatatttttattctcaccattttttcccttgagtcaaaattcagtcagtatttgttagttttaaacttctacattcattcttttgaatcatcagatattgagaaatgtccaactatgaaaaactgttcttatttaaagaattttatgtaagtggttatatttcaaagattatttttaaatacccaccattttaatatgaaactagttaaataagccaatccccctcccccagccagaaaagaaatccatatttaacaaactgaatcataggttgaacatttgttccccaatataaagctaaaaacgaattttacatcattatactttaccccatcactagttgctttagacatttcaaattagaacagattgaattatgccatttttgcactctcatattcttgttcctgagtacaaaatattcaaaagcagagcataatctagggactgagaaagagtgaagcttccatcctccattccacctttgcaaaggatcatttccatcattcgtacaacactgtaggtgaagaaagaccaaagaggcttaatattctgcatcttctgagggcctcacagtaaaggttggtaacactggttcaccatttaagttcaaatacagcttctttgcactgatggtagagtttccactaatactccccttctttctggccgtttgctgtgtgacttttcaggcgaagatggaagaagaggaaacgcagctggaagaggtggctgagttttccctaaagttaaacatctcatgactgctgcctgccattagtattgtgtggggagggtccactctcagggtttatttgtgagttgtgtttgttgtggctttaagttcataagatttgtattcctcttttattttaatgtcttagactgtcgaactctgggtcattttggtgcttgctgattgatacacttatgtttatttgccttttcccccctgtgtgtgatttaatttcacagaaaaattccttgagagtagaaggggataatatttatgtcagacatagcaatttaatgttggaggtttgtataatctaagaaaacaactctgtcctaatggctgcccggctgctgtggacgggaggtcacgcctaggctggctggcaatgttcttcaagcacggtgcatgcagtgcatgggggaattcagctcgggagtgcatgttaccagcctgacggtgttcctttcaagtggcttaggcaggactgtatctactagaagttctcaaagtgacaagtgggaaaaaaaagtttagtcaaatgaatcaagtttttatccagtactcttgaagttgttctacaagtaaacctattctctcctaaagggttaactctagggcatcaacctgaggtaacacaatctcatccttaatatgtattaactagaacagagatttgtttattgatctggcattaaatcatgtgactcttgatcttgatctgtgcccactttttttgttttttttggttaaaatccatgattgggaatgtggtccactttcagtattctgtttgagaatatgctaattaaagaaattattttaattagaaagaacaagcaaaagtgagagagaaggaaaggagaaaaagaaagcccaatcacccaattatgaatgtaaagtgtaaaatatgttccccgtgtcacgtgagaacatttttttttcccttcttattttacagtagtatgtggcaatgtattcaatggagaactgcagctctcagtaatctgactaatctgtttggttgcttttggcagcttggtaactgatggaaatgtatttttgcttaacttactaaaatgctgtacagtgtaataagtaacattgctttgaaccaatgcaagaaatgtgcctgatctcaagccacagtcatttttccatgccatgcaaagatttttagattttcatgagtttttgcaaatggctatagaagctcatagatgagctactatgcttgtgcatgaatatggaatatctaattttattggttgcatgacctgttccttaaagtgggatgaaagctataatccacaggtggccctatgatttttgaaatataaataaatatttaaaatttggttaaaacaaatactatttatgagagccagtcgaaaaaaattccacaaataccatttatcagggcctgctcccatgaaaatggacctggtagtttttcttgtatatttgtctgtataaggacgatctggcagttgcggaggctagaccccacttttgtgcttggcaagtacatgagaccagtctgtggtttatttattctataaagaggctaaacagaagcagcctctggaa

SEQ ID NO: 122863 - DNA, 1542 bp, Homo sapiens
ctcttgttgcccaggctggagtgcaatggctcgatctcagctcactgcagcctctgcctcccaggttcaagtgattctcctgcctcagcctcccaagtagctgggattacaggcgcctgccaccacgtgcccggctaattttgtatttttagagagacggggtttcaccgtgttggtcaggctcatcttgaactcctgacctcaagtgatccacctgcctcagcttcccaaagtgctgggattacaggtatgagccactgagcccggccgtatagtgttttctaaattttaactttgaaaatttttaaaagacataaatgtataaagacatgctagatgaagtagctgccagtgcctcaggaattcctacactgatagcctctgaggcccagcatggagaaggtctcagggaccaccacatgggcccagtcttgtgccacaaggtcaagtgctacctgtatagcaagtgacatcaaatcatcgacattccatcgttaaagaatttgtgactgtcatatggaaaaattatttggtggggaattcagataaaaataacagaaattgtgaccaacaaggtttctttcaattgctgacaagttgtcaggatagttctttaaaaattttgctaacaaggcacccaggagagtgactgcttacatctgaaacagaagagctcagcatttcagaatatctctgttccattttgcctagttaacttgacatatctagttattttccttaaaaaatgaaaaagttcttttaaatttcaaaggaaatcctccttgtctgcggtgaacaactgggtacactggcatttttgctaatgctttgaatgtctgtcagcaaccaggtttaaaagtaaataatgctgtttgagtttcatgggatctatttgcaactagtttgaaaataattaaatgagtcatatgtataaattttatgtgacacaagtagtctagtcttttctctttaaaaatgggtcatttaattcatttctaactacactgtgttaatatggtccctcctttaaagtaaacgttttcactaactactcattttttcttttgtcctctttctctcttgcatctgtttttcctttgattgtatctgttgtgtaatttcatattcaatcatgggtttgcacttgagaatagactgtttccatgtgcccaccttcacctctcatccaccgtacttcatctttttccccaaacctattgcctgtccctgaaatggacttgctttcagacatttcagaggaagacccctttggggaggctgaccagatcacactagacagcttagagcacctttccacaggtgaaatatcggagcagggggattctgaagttgctatgcctgatttggtcttggattctgccatagccccttctcagcctgactgtccttctcccatccatgggaagactcttaaagcagctgacgacagtgattctgagtttggttacttctccttcagtttctccaaatgttttccctccggcttcccctcccttcttgatgaagatggatatcttgctt

SEQ ID NO: 122864 - DNA, 1051 bp, Homo sapiens
tattaatcatacttcatatttacaaagcactctttttctcctcagtggcttcctttatttaaatatttttctttattacaaaactaatacatgttcatcatagaaaatagaggcaaacagaaggaaataaagatcacttaaatctttttatgcagaaataagcattcttaataccttttttcttttctttttttttttttagacccctgggcagttgaattcacatgccttctaaaaatggggtcatactatgagcatcatttttgttagttttttttttttaacttactattataagatttttctgtcagtaagtagtctctggcagcatcatttttaaccactagatgctgtatgcccttaattttaaaaagtactttcataccatctcattttttacaagtataccatctcatttaaagtttgaatgttttttaattttacagctacataaaacagtgcagagaatgacttgtttaaagccatgtattgttaaatggtctatctgcctgataccgtctggtaaatcctagtaggaggtgaaacagattgtcttaacactccagtgtttttcagatcattttctatgtaatggggacaggctaggttagccaagaaacagaaatagggaggaaggaaaaaatatgtttgagaccaaaaagagctcccaaacctctcctcctctagaccctgccattcttaccacatgcaaatcttgcatctctactttgttgattgttagttagaaaccaattcttaaatggcaatgctgtatgtaaggtttcaggattcttgtttttaatgttgtctcttagaaaagtaagaaattgtggactctgttctaagtataatactctttcttgctgtgtagttaggagcagaacactaaaaaaattcaagataaccttcattctgtttatcatccgatagactccttaggtaatatttgataagcaagatatttgtggcttattgaaaagaatatatgtggcagtttaaaagaacttttcatatttcatgtcgtttaaagttttgtgtctttatttttcat

SEQ ID NO: 122865 - DNA, 1037 bp, Homo sapiens
gtattcctaggtatttttttctcttagtagcaattgtgaatgggagttcactcatcatttggctctctattattggtgtataggaatgcttgtgattttcgcacattgattttgtatcctgagactttgctgaagttgcttatcagcttaagtagattttgggctgagacaatggggttttctaaatatacaatcatgtcatctgcaaacagagacaatttgacttcctttcttcctatttgaataccctttatttgtttctcttgcctgattggcctggccagagctgccagcacagcagtctgagtaaagctttcttaaggagttccttgtgattgctacttccaacttagaatgaggttaagaagaaagaagggtgttatattaagaccaggaagggaaatattgtctccaacctgaccttacctctccttacaattatagagttggagggaaagggaggattaaggaggaggagtagttcgttttaggagttgagataattgtgttcgcttggtatgtatatacttttagccaacagtttcaattttcacactttatccttcatgactaggaatccattattgtccttgaagagctctcatttcagtgtctgcaggggctatttgttggcagttctacagaataagactgtgtgaagatatgtctcatcatttggaccattttagatgcaggagaatgaggcccatgggacccaccttaaaagcatgtgaatattttacttatagtacacacttaccacatttacacacatatgtccccaaggacaaagcaatacttagcccagtggaatgctgataggtgcaagttgctttgaataatactttattaaaatgtgtttacacttaaataattatgtgaactgtaaactgttctattttagactctagaatatttcttatgaattaatttttttccctcatgcagaactggttagatcctgctaaagaaataaagagacaactgagaagtaagtatataaataatcattctttgaagttaaggtgtcttgatat

SEQ ID NO: 122866 - DNA, 1029 bp, Homo sapiens
tttttttttcttttcaatttggcgccattcaatttcgtttttcttgctatggttgttccttgggtgaaaattccacccatttgcccctttctcacctctctcccagcctccaaccagtgtgggctagaggctgaatgatgtgttttttcattcctgtgcacttatcgaggctggccatttgtgagccagctgttgggtgggacagcagctgcagtgcatgcaaactgaatggcaggctctcttctgaaggggtaattagagctgctccctcacatggcactggaggcacccttagagaggcctgctgcccctcacgtcagtagtgcatgcagctgggacaccagtaatatgaaactagaccatgctctggtagttctttattgagaggtttgaatataaccagtgttagaacagagccatgtacaccttggatccttgctaccccgagtgcgggccatgaacagtagtgaaacccgaggggccatgcggctctgctttcacagcatcttactgttttactttttaatagtgtcagttaatgttccgttataccattttaatatggtattaagacagcaggttattttctgtgtactaataagcattttaattgtttgctttatatatctgaataaaattctgtttaagcacagatgttgtaatacagtggtccccaacctgtttggcaacagggaccggttttgtggaagacaatttttccacataccggggtgggggtgagggaatggttttggcatgaaactgctccacctgagatcatcaagcgttagtcagagtctcataaggagtgtgcagcctagatccctctcttgtgcagttcacaatagggtttgtgctcctctgagaatctaacgcgggtggtgatctgacaggaggcggtgctcaggtggtaatgcccacttacctgctgttcacgtcctgctgtgcagcccagttcctaataggccacgatcggtaccagtccgtgggatgggggttgaggacccctgttatattattttggacact

SEQ ID NO: 122867 - DNA, 1049 bp, Homo sapiens
ctgaagctgtcactttcctgagttccttccctggagaatgttttaggatgttctgggcagttgtccatggacaaagagctgtcttttaaaaaatttgccgggtggatttttaccatcggccaaactggataatactttaacatgtacatagaagctcttagactagtcatatagaaagggcttggttttcatgtcatctcgcctgtgaatacagtgaccctattttgtgaaccgaaagtctgatttattaactttttgtgggtagaaatattcatatagagattaaattctttaatgtatataacacatcacctatggatatataaaattatgtgaagaagatatatataccaaaagatgataatttagttttattattgcaaatagtgatctactaatgatgatctgctggggaaggtacttgtatgcatatttattcttcaggcttgaatattgtttgaaaagaactaccctatgaggtagatgttgtgatccccattttgtgtttgaggaaattgaggcttaaagaagccaaggaatgtgcccaagttagagttgatagaaaaccagaattttactgcgtgtatttctgattccacggtttatatatgtggccacagcagacaaatctttaagtctaaaacctggcaatgaatactgtagtgtatcatggggtgagggcggttgttgtatgttgtgcacacacaccctcatgcatttttctcattctctgatggcattttccatctttttgtgtctgcttcttggtctgctcaaccctcctccttaagtgtcaaaccaagaaattaatttttattatttactgtatttatttaaaagttttgtttgttatttctttgtaactggtaatgcagatcattaacttgtatttcttttaagtcatttaagtcattttttttttacttaggaatttatgatgctataccccacttaccatctaagtactcattagagatatgtattcaagtaaaaataaatgtaataaaagtaatataacgtgatcatttaagatgatcacagcgtggaga

SEQ ID NO: 122868 - DNA, 1050 bp, Homo sapiens
atcatggaacaaaaaatcaaacatgaaaccaaagtgttgataggataaattatgttaggatctactgaataatagggctaaatgattttcctggggagtagtgtactttatagatatgagccaccttgaggaattgatggaagcagtttgaacatttttgaaataagaaaatgaacagctaacatttcgcctttttcgtcctttttatgtctatattgagtagcagtaaagcagacggtgcttgcttatgcttttgtttcagattttatgctttgtatatgtgtgcagggtgggagggctaaagttaaaaaattaatcacttttatattgttagaaaatgagaaaacaaatatttaatgttaatttataataaatcatgtatctgatatgatgtcttaaatttatagcagtcttggaatctttagtacttgaaaagtaaagttattattttttctccagaaacatgccaagggacaagtgttatttgacaaagtgtgtgaacacctcaatctcttggagaaagactactttggacttttgtttcaggaaagccctgagcagaaagtaagtgatttcaagtttatttttatctttttagaacatattgtatttttttattaaccagtttatctcagtttaaaatttagctttaaaataacttaggtgtttattatgacttcactgtgaaatttggtaaatactgaaaaactatcttgtgtagagagaaaccacctgtagctttttggtgtatgtgtatttgtgtgtgtgcatgcatatgtgtacatgctttgcacttacatcatgagcagacagaatagaatgtcatcagtggaaaagtgatgttctggcataaagagaacacagaataaatggtattattttaatcacttttggctctcaatcactcagtctggcctttcggtactaaataagtaaagaagctggtcacatctgctcatattgtgcagtcacctgtatgctaggtattaaagcatacctgaaaggcagggaaggcggcacattggaacgattctgtctgaggataccaag

SEQ ID NO: 122869 - DNA, 1848 bp, Homo sapiens
gagaggcagatggaagcttaagtaatgtgtatgtgcaatcaggatctcatcaagcattgagaatatctgttccctggagagagaaggaaagaatagtagagaagcagctttagcatctagaaacattttggtgtttgttagatgtggactagtgaaggaatagttgacagtagagtactgctatggttggttgaggcatattccatctcactgggttaattttattctcacgtgagctctgaggtagctattaccctcattttacagacagggagacttaagtggttttactttgtcacactggtgcggtgcagtaatagtaaatgcttacaaaatgttgaatgatagaggaactaggtccgatagaggaactggtccagccatcatgctgatacctcatgtactgccaaattgtagtggtgagctgtgtggatgttttttcctcttaatcttgtaaggaaattctgcccatgagggcatgttcctatttttgaaatggaaaccaatgagaacatgtgaattattagtaagagttgacttgaagctagtgttggaattggaacgtgttttctccttgaactgaggtgtatttttgtagacatcagttgtcttaaatatcctttttaccctaatttcaaatagcatcataaccaattgttatgtactgcaactcttttagtactcaccgcacctcctgtggtatctgctatctgttatccccatttcacagatgagcagattaaggcaagcagacgttaagtgtcttgccatgggtcacatagcttgtaagtagtggaagtgtatttagaactttggtgtttgacatacagagcccaatactcttattctctatgctgtatttgtatatacttttaatatgtagacaaacaagcacatatctatcttaaacatgctcagtaatttaattgactattaaatcctcattgcaaacctgtaatatgtatgtgacacattgttttatttttaaattttttattatttatgtatttatttattgagacagggtctcactgtcacccagcctggattgcagtggcgtgaacacagctcactgcagcctcagcctcccaggcttaagcaatccttccaccccagcctccggagtagctgagactacaagcacacgccaccacacctggctaacgtttgtattttttgtagagatgaggtttcaccatgttgcccaggctgatcttgaactcctgagctcaagagatatgcctgcctcagcctcccaaagtgctgggattacaggcgtgagctaccatgccaggccttacactgcttattatgttgaaataatgttatctgtgtggcattctccttcttccctttacaatttgatgcaattctattcttttcagaaatgttaccataagaggcttaataataaaaataccagattctcctcctcaagatacatgtgtggggaacattaattttcacacactggatgagctagtacacattttgatagtgagagggcattcgttttgaggatggaaaagtctgatggctttttctttttcactagcagtgcattggtggcttttatcagtgcacctggggaggaggcgtgtgtctgacctgacctcacagttgggttgttccaggggtgtgcatcttaattggagatgagtcaccactctgcttatgttttgccattgaagagacaatgagcttttcttctatggctgtcaaaggctcttacatctctgttcacagcagcttcttaaatttatatatatatattcaaggtaaaaatatgttaagtccttaggggcagttgatttcttgtcccacttccattatcttgtatttttagaa

SEQ ID NO: 122870 - DNA, 1021 bp, Homo sapiens
ttcaaaatatttctttttgaagtgtatttggcaagttttattaacagttgcatggtttttattgtttaataaacttgatatcatattattagaatagagattgactcggattgtactttatgaagattctactgtaagaacagaaacaaagcaaaggcatgcttcagatagcaagaagaaatgacagcgaaagtgatgtcttagtggaggaatgtgcaagactaggaaaccccctgtcctttctgcataaagatgaggtatggcctactcttaagaggaaggggcagattggctttttccctctagttcccaaaatgtatttggaaatgccctagtttactaaggaagagtataagcataatgtagaattgtgaaaatgaagtgttggtctgtgctggtcttctcccagaaactagttggcagtgtgtgtttggtttaggtccttgaacattatgggttggtagtccatcagctaggtaaggaagattgtgtaagaaaccagcaggcctgaattctagactcaactctgccaactttttgactggccttatggcattgagccgttccatcagcagctatcttttggcctactagtcagctaattactcagtaggaggcattgaagtaagatgtcctctttcttaaagaactcagtatctgaaagtaataagtatcaaaaggagtagaatagaagaataagtgccatagatgtgaataatgctcttgaaggagaatgatgcaatattgagagattggaacaggcttcatagggaaggatattttggagatttgtatacaagtagaggtagttttgacacttgtaaataaatcagaggaaaaaaattagaatatgtcttgataagtcagtaagtggttctctttatctggggcaataccccaaaattgctgtgacaactaatgaagcaactacgtgtactggtatcttaggtgaaagttatgaagcaaaattatgtgtatattttgcttggttaacaaatgtatatttgtagtcctttttata

SEQ ID NO: 122871 - DNA, 1743 bp, Homo sapiens
ggtactgtttcattgttgtcactgataattacaatttacattctatactaatttatcatctattgatagtcaactgagatctcaaaaatttttcgaaaaaactttgaagattttttaatgaagaaactttataacttgatttttttggaaatgtttttatctcattgagatatttaaatggtatgtgccaaccttctttggttccagagttaaattgtagagaatttttgggtgtctcttggatcctgcatgtttacttcagggacttgactctagcactctttatgatgttgctgctaaggtcatttacatactcagtgtgttaaaacagcagagctctttcctctaagcgggggaaaaaaacaataaggtttagttgaagccatggatataaagtcaggcgatctatgtttacttttctttttactctttgggtatcttgggggagtcacttcctctcttctattctcagattgcaaagagaatgaaaatatttgcttcctccatttctagaattgagctggttttactacaactgataagtcggtatatgtgttttaaagtttgcaaataagtgtgaaagttcctgcaagactttggaagcttgagtgaatgtgcattctgagttagagttgctcacattttcctctggcatctcaaagttgttcccacatgttgattttgtctgagaatcaagggcattgtttctgcctacacaggaatgtcagtaccgttttttcttagttatgaataaggctaacaatgtaggctctcttcatcagtgttctgttgataaaagtatttctcagagagcagaatgtgtcgaggtctttttgcctttcttgtgttgagttcgggtctcggaaatccaatttgctatcattactttgagtgtgttttatttgcttgtttgtttattgttgtttcttttcaccctccaaggtggtatttcagacctatagtactgacacttactaagtttactagttaaacagtttcaactatctacatatttgtagaggatctggaagttatggcactctataagattccataaaaatagtggcagatttatatgtcattttgggaactaggaataatttaatgggcatgtattatgtgcaatttaaaattccagtgacattggtcaaggtggcatgtctttatccttttagcttaaaacaggatttagggtggtaattctattcaaaacttaatttgtatttactaaatgggaaaagactgccgtgccatgtaagtgatagaatattttggtccagcttgaagaacacaaggagctcacagcagcagagcctggcctcataatcaagtcactccttagctggacctcggcccccctccctcctccactcttggtcacgtataacctcaggctatcttttgacctctgttaccacttgattttctgagtcttcccttgtgtcaagttggtcctctaatcagacatatgctgagttgcctggccttccttccagtttctgaccctaccaactccacattttgctttccccatcacatgattcctgcctatcttagtttccaactcaaatccagctctcagaatgttcttttcttccttggaacttgtttgcaccattagtttggcaattaagcatgcactgccttgtgaaagactctcttgtattgctgtgttgaacaactgctaaactcttgtattgtttgatttttctcatgctgatgttgtttcttcacctggtttat

SEQ ID NO: 122872 - DNA, 2178 bp, Homo sapiens
catttatttttagtactactgagattagtgactctattttgccatttaattttggattgtctatttttcttcgtttacttgaatttgcttttttcccttttactgctgctcttttagaaattaagtatattacagacacacttgagttaataaagtctaatgctaatcactatgcctactcgcctctttccccatcttatttagtatgcatttcgtagatctcggatctcgttttggaatgatacaaaaacaacaatttcttatctgtgtaactagtccttctatgatctactacctgtagggaatcaacttactgtgttgcctgaagcagagttgagatagtatccaaagcgaaaagcagcagtttagtcttctaattcaccaagatttaaattgggaaagcataggagtcttcatttttatgactgtattaatttatagttagagtatcttttcatttaatagatgattacttaatattgccattataagaatgaactttggaggacaagacatgatgaaataagcttaaaaacagcatttgtgttgagtaatcctttctttttcttttgagttcatagcaaaatggagtttgaatagattttagtgatgctatcccacagcagatcttatgtaccagcagttcacttgaattctaagctgtgactttacatctcaacataggccataattcatcaatatcctaatagctattataacaatgcagaagttataaattatattccccattttattgcattttccttttatacaagttttcctcttattttgattttcccgttgcttgcttagtatcattagtttgggtctgttactcatcagacctgttcttgtttcctcctcaggagtggagcccagagtacagccatcatggggttgagcaggctaatgtttcccaattccagtgttgaccttaggcagattggatgatatgctgatgctgcttatcggtggttctgtatctctacaccggaaatcaccgtctgaggactatttggggaagtagatatgggaaactgtagctattaatgaacttttgagcactcaaggaaggagaatagaatatgggaaagaaatacttgtatttggtttgagagaatagatttgtttccatctgtttactctcagcaaatattgtatttctttatggctcttcagaggactgtagttattgtttgttctttttctttctatatgtacatgtgtctaattttcaattaaaccttgatataacatgcccactgaagaagacctaattgtcttcacttagggtgtttacaacaatggagagaagccactcaaagcatgggctgtgcaggaagtcatgaggtgatagcttggcttacagggatcttatagagagtagggtgaggttctaaaaggcctcaaatgccaggatgagaagattaaaactgatccatagcaaaaaggagctgcttagtaatggaccagaggttgtaaagtcattggtatacaggacctagcaaagtcaagggcgctgtttagattttggaacattgtagctagctatatggctgcagtaatttaaggggctggggggggggtcttctttattcagtgcattgcttatgatgcacatcagtggtctctatagataatttttttttgtgatgcgattagaacattgggtatgttaggcactttcctgttcttgttacctatcagtacctttggtcaacaaaagtaccccctttaaaccatttaatgtgaatattgctatatcaatggaataatttttttaaaatcaaaaaacataattcatgggggcatttttgtttgacatctgaacatcatctctgcttcctagcttactcactctatataattaatatattctgtataatctatattaacatgttgttatatatttatatgtattttatgtgtctatatccccatgtatctgttcatatcccttctttctcccctcatcctctactttttatggcttcctgtttccacattgtttttcctgtgggctatcaacctattctttatctcctaaacttcaggaattagataaagacaactgtccaaggaaccaatacagtactgtttttaaaaacaaatcgccatctttgaaatttgtgttcttttaaggaaagagggcatttgctaatattaagtggataaaaa

SEQ ID NO: 122873 - DNA, 1343 bp, Homo sapiens
gtagatttgtgtgtgcgcattttagttgcctaacaaagcctaggttttgccatggtataagattttaattggaaatgttattatttgagatgatacttaaattgtagttgctgggatgtagtttctttgattcatttaatgccaaataaccaacttggcaaaatgagaattttggccatgaaaagaggatgaggggaaatatcctttctattggaattttcaagtctttaaaaatctgaaagttacagtgtttaaagtaacgatcctaattcttatgaaagattttccttttagtatgttgtcatctgcaaggtggttgactatagtatgaatttatttttttttcctcaacagcctactgaattagtaagtaaggagagagaagagaaggtaaaagaaacacaggaagacaaattagaaggaggagcagcaaaaagggagaccaaggaagtgcagaccaatgagctgaaagcagagaaggcatctcaaaaagtcaccaagaagaccaaaactgtccagtgtaaagtgaccctcttagatggcaccgaatacagctgtgacctggaggtgagatagggagctgagtgagagctagcttgatatgtggattgtggcatggcatgatgaatagatttttgtgttttattaagttcctgtaagccagttgattacagttttgcactaaaaaaaatacattgaagtgggtcatcatttctgtcacaaatatttcatgaccttgggataagcagggatgctattctgccagtctgcactagccgtgtttactggttcgtgtgttaatgactgggtgttaaatatttggaatattgcttttggctagaagatgtttttcttgaggaaaaatgatagcactaggctgacatttcagaataaagaagtttcagcagtaaacttagccccaagtgttttatcctgagacagatactggcttaacatctaatttatttactttcatttaattaaaaaacatctatgatttgcaaaacatacagttcattagcgctggtgctgacagaagtcactttaatcttttaacgcatctagtaccttataattttatgtcaatcagaagagtttgttgctttccacaaattatttacgtaacgtatactaatagctaatgtttgctgaagaactgtgtgaagtgctttgaatggattatcttgtttaatggattatcttgttttattgattaagaatcaataaaggtagatattatcattgctattttcagtgttacatgttacaacggggaacttagggcttagagaagttaaattccttgcccaaagttttagggctgggtgcggtggctcaagcct

SEQ ID NO: 122874 - DNA, 1139 bp, Homo sapiens
cacttaaaactgttttttctaatacctaacattttgatagattttgggtttaatgtatgaaattgtagtgaaatgtgtctcattgctttctagcactgttgataacatcttcctgttacagaataaagaataccaagtacagataaaagtaatttttcttaaaaaacttggattttagatatcaattattgtttataacaagttgaaaccaaataaaagtaatccctgtttcttgagttcttgatgattttaagttctagctatatggaactcagaacacacagagttctattgtgatgctagttttgggtctgtgatgctgatagagaattctaaaagttcgagcaacagtctccattttgtcttgtgcttttgaatcttctttcttgatgtgctttctccctgtcatctgttactcttcttctcatctttccttaccatgcccctcgcaaccaaactaaatttgagagaacttacaaaatgacattttatgatttttgttttgattacagcataagctgtggccatgactactgaagtaggctctgtgtctgaagtgaagaaggactctagccagttaggaacagatgcaaccaaggaaaaacctaaagaagtagcagaaaatcagcagaatcagtcttccgatccagaggaggaaaaaggttcccagccacctcctgcagctgaaagccaaagtagtctacgccgccagaagagagagaaggaaacatcggagagcaggggtatttctcggttcataccgccatggcttaagaagcaaaagtcatataccttagtagtggccaaagatggaggagataaaaaagagcctacccaagctgttgttgaagaacaggtcttagataaagaggaaccccttccagaagaacagagacaggctaagggtgatgctgaagaaatggctcagaagaaacaagagattaaagttgaagtcaaggaagaaaaaccctcagtgagcaaggaagaaaaaccctcagtgagcaaagtggagatgcaggtatgtttgggaataattgcctggaaatgaaaacctgatagcgtaaccacataataaaaagggtttgtttgttttggatcatttccagatttcttgtactgagatactgctttagcttaat

SEQ ID NO: 122875 - DNA, 2101 bp, Homo sapiens
agctcaaatgaaagcctccctccatcctcttgctaccatttttgaagcttagaaatacataccttcccattttgtgaatcttggatccttacaaaatgggttgagctctcttggtagaaattaaagactctcatattgcttgtgatctcagcaaagaatgggagctactcagctggcagcagcacctaccctgttccctgctcaggggttttgttaacagtaaggtcccagtttcctcaatgttttaaggaaacatctgaacccaagaattagcatgaaccccttgcttgaagttgtttgtgtgtttgtgaggttgtgtatctgctttgctttgcttgctgtagtattctgattaagggccaatgttttaagtagcatgatgttatatggttggcagttcagcctagtgatagagatagcacattagaatttacctccttttttaaacgttggaaaaaaaagaatgggtttatgtaacacagctccttacctaaccagtactgatcctctattgatgatggttttctgcttcattgcatgttaaatgatgcatgctttttctcatgaagctgtcacaatgacgaacacttttatcaacccagatggagcatgccaacatggtaattgtgtcaaaaccacatgcttgtctaatgggcgggctgttcacagcagtgttctttttagttgatgataagtagaaagatcattacttaatgtattatataactatactaatgatggattttgggtaattataattaaatattagtcaatgagcattgccagagtttgggaaaccttagttccagttttggcttgcccatctgactttaccatctcaggcaaatctcctggtctttctgatcctcagtttggttgttgataaaataaagtgaggatattagactagatgattgaacaatactcatttagtaagtacttaatagatacctattatgtgccagtctagatgctgggaacatagcagtatataaaagagagatcccagccctcatggagttttcattttagtgggaatgtcagcattccactacaagagttctcattttcatgggtgatagagtttaaaggcttatccacatatgaaagaaactcagggttataggcatgataattagggtgagtggatgtactgtaatcatgttttcttgatggtggtaatttgttcaagaagccattttatcaacaaagaaggtagtgttttgttttgagctctgttgaactcttgaaactgtttcaagaatatgttgagtaatgatccaattagtcttttccattgttttctgtcttgtaacttccatttggatgggtgacactgatcatcacttttgaggctcttaacccttatgggtgttgtgaatacagtggtgattgaggatgacttcgtgaggcttaaccatatggttttgtcggtgctcttcctgtctgtatttgtactttgtcttcagtgtctgtcaaccagctcagttatgattacatggtcaagcaataacgtacaaatgggattttctttgttatttaaattcatctataaatttcttacttttaagagagaatattttgaataaatctgagaatacatttatgttatttcatagtcattttcactaactggcaggaaccttctttgagtactaggccaaggactctgtggttgagtaggtcattcgtgcataatggagctgtgattgcattatgaagtgtgtgtgagggaaggtatacacagctgtgtggttctccattagtggctttggataagtgactactgtttattatttgtaaaacagggataatacatactttgtagaatattttgagaaacagattatgggcactgtgtcagacagtaaacagtgagtggaaacccttatgattaaaatataaacaactattaatgcttttaacataatagtggaaactcaagttttatatttcactgcttctaaaatattttggccaaaaatcagccttagttgattggttcccagactatttctcacagccaaagtaattagagagctgccaatttatcttggttagcttagacaagtatggggcattttggttttaattttaccag

SEQ ID NO: 122876 - DNA, 1032 bp, Homo sapiens
cattgcttattacaatacaccttaatgtttccccagcttgccctggtagaagcagcattcaactttatacaacatgttttttgataaaagctttgtgtttacacgtttgatgtttatatggttctagcagagcctcttggaatggtggtggctgttttaaagtaaaggagagaaaagaaagaagggaaattataggggatgggttaggtagggatagaattttccttctacaaattgagaaagaaatagatacattggattggtaggaaattattatacattaatgtttgctttttaaaaataaagttaaaccataatgataccttccaccacttttaggggaaaaggcgtagatgaaccttttgaccatggaaattctgtgtttaacagtaaattgcattcatttagtgttttgcactttaccagtagctattatgattcttttttgatctttaaaacaatcccattatataggtaggttagcagctgctacttttatgttatacgtgtagctaactggcaacatgggagcatatctcaagctgtttgaggacgtttgatgttccttaaggttaagaagagtagataatttcttgacaattgcccttttatttttggagacttagaattttgggggaggagggaggttatggcatttttcatgagtacagaagttggagcagagctggggagcattgtagatctcttggattcctagtcttagggctgttttgtttcttctggcccttggacaacaatgaagggtctctattctttttttcttttttctctccttaacagtgtgtctccccttctcatccaggcaggacagtttgctacaggaaaaggcattgagattattagtaagaatctgacatctatcctggtgagatcttgctactgatttgctatgtaaataatctaactgctgggccttagatttcccatctaattaaaggcaagaggtagaggtacatgaacattgagatccttttagctctgaactactttgattctttacaaattccattt

SEQ ID NO: 122877 - DNA, 1991 bp, Homo sapiens
aattttatttgcaaacttaacagttgcaataactcgatttttaaaacattaggtgctcttatatacaataatgagtgaaacttgtgtccaatagtttcttttaattcttccctacagactgtcattctccatgtttagctctgttttgtgttaattttcactgccttttcccccctgaaatgcaatagtcctgtagtgtcctactggaaacattgttctctttgttagggctaaagaagtgcctttgtcactcctttgagacattctgcagatgccattttgcagtcctgaaaaacacgtccctgtccgccttgtgctgtgttaaattgtgcgtgtattgtgcttgatattttaatgaagtcgtagagaaaatttgacagtaacagttgtcatataacaaagaaaggctctttcttgatctaatgtagatatgtgttccctgatcccttcgtagctctgtgtggtctgaaagtagatcccccctgcacttagatgtgacctcagatggttgatgctttttgactaccttcataggaaactgttaaaacaacttctgagcaggaactcttaagtcttttgttgatgtgcattgctttttaaagacctcttaatttacatgatcttaatagcgttttaagtggcaagtacactctctaatttgctaagtggctttaatccttgtatgaagaactgagggaaaaatctcctgggaaattgctgtgataaaatccaggaaattcctttcattcttttaaatccagttcaaatctaacttaaagaaaagtcctctaatgtaacagtgtctgaaagcttctcagagtccagtgatttcttgtgtatagtgccaagctcaaagaggaatagtatgaatgtacctctgtgtttttggtaaatctataccacatggcacaataccaatttattataactttgctgggacttagttatcctgttttgtactgcccttaaaactgttaaggagtatagagttaaagggagaaaaccctacatttttccattttaatggactttatttaaatttttgaaaattataacacatgttcagtgcagaaaacttggtaacagaaaaatgcaaataaagcaaaatttccaggtacccacatttcaggaataattaccgttaccattttggttgaacatttccagtctcttgtctgtgaatatgttcacataggttaaagcaacagcattatccttttaaattcacttgttttccctttgcaaaatagggtgatgcattgccacaaattcttaaggtagtagaacttaattttggaagtgttaatctatagggcattcattcattcattcattagatggactcatttgaaagttcacagtttgtagaaagtgtgtacatttattgcctacagaagatgtgcatcagaaagacataggctagtcattttggatgttttccaggatcatataagtgtaacaagtctatattataactcttaagaaggctttgaaacaagtaaagatcagatcacataagccctgacccgtcctggaggggccagctcactgatttccaacaagagctgatctgtgctggcctgactcctgtcatctggggcagaggtacacaggggttccagtgtttgtttatgtctgggcatcagttgggcttgttttatagaatgattccaagctcttggtcatgccattccatctgtgtcttttaaagataaatacacaattggtataggacagatcctgttacagtaaactttatggcagaaaccaactctttatatggatgttcttttgtaactaaggggtataagtgagaggaaaccctccaaggagactcagatactggggccagtccctctccaaagaagagacagagtatctctggctcccttattactctgaggtccagtgggaagaatatttacttatgatatacagataatagaacaggaaaaacaagtttccttatctattcataactgtgctattga

SEQ ID NO: 122878 - DNA, 1970 bp, Homo sapiens
ttttgccaggaggttaggtttctgcctttgctcaggatattctaaaaagctgatctttcagtcagttagctcagtctaaaatttctttgattctctaatatctgcataataaagggttggctaagttattttcttgggtcccttccagatctaaaattaatatgattcaggaggattgtatacccctcccaaattaattttagcatgttttctggagacatttctagtttcttcttgcttttcttagaatttgatacctttttgaagctagtgacccagtaggccaatcttaatccatgagaagcaatcatgcagggtgaagatagtaaataccatgcttcccccattttcttgaaaggaatcttaaaagacgacatgagatttcttactacaaatgtgccgaaataatatttgttccagtagagtgctgtttgacttaatattacaataactttattgaatcattaagatggttatcttggataatagaaaagtaagattataatgcctagaatggtttgaaaacttaggcatgctggatttttcttattgtttctttctgcccaacatatattaagtagaactttgtgcaaaagggtatggttggttgctgtggtgcatacagaaataagtaagacagacttgcttggtaaggtggataagatgggcgcattgggcctagagtgtagaaaagtgctgagctctgaaagaggggtaggggacactaggggatctgggagagagaagaacagcattgagctggggtaggcagggaagtctggcaaagtcatagcctggtaactggactctacggtggtgctcgtcattatgggcattctacttggttggctgtcttttgagaagaggcttgaggattgagcctggagacagtggctcttacctccagaatgatagctttcatcctgggcagaactgagtagaaaggctggaaaaggagagtcaggccagagtgtggaggactctattcgaggtagaagaattgctttctgggtttgctttcctctctcagtggagtcactgaggtttcctgtacaggtgaatgatatgatcagaactggagttcaggaagattagttgggtagcagtgtcctgggattcaaagtaggattgacaatttatgaaacaaatagtcatagggagaaaaatttacctgttgctaacttatttactggttttatttactgtaatcagagtctactgtttgtaactatggctgaagttgttttttcacaatatagaaatcatcaaatagtttttcagagtactgtccactgaagataactaagcacatacacctcagataaagtgaggaataatcagtttagtatcctgattatcatctttccccatccagtctattcagatatgctatttattttgtaattaatcctaactctcatcattccttctcttcgtttttttcctaaggcattcttaagctactcttttaacagtgttttgcaagtgttacttggttgatcttgggtgggtgtatcccaatttcccctacacccccaattcattaagcaactagctccatttttgtatggtgttataggaaagttcttgtcccatttttgaaaagaatttgtccttaatccatgtgaaaattatttgattttcatagtcttggaattcaaaagatcttggaaagaaagtcaaagtctcatagctagtaagtgaaggagttggaattgaaactcagatctgtctgatgctgagctatgttatatctctaagactcaatttccttacttataaaatggagtcattggtagtacatttctcatagagtggtcgtgagaaattaaatgaaatgatacacatagattgcttatcataatactgttattgcttgtttataaactaccttttaacaggaattatagaaatacagtgcttatgaatcaaattaattcagttgataagtaaggttattttgtgatttt

SEQ ID NO: 122879 - DNA, 2312 bp, Homo sapiens
gtacagggcttcctaagcagagccagtcaaatatgagtgtgttttatgttcaacagcgttgggtgggctcagagattcaagctgcaagctgcattccagggacagttcagacccatggctggtaatgacatcacctccacaggtgccaaattattctcctctttttttccgatataacctgcccatgcttttgaaaaaaggaaaaagaaaatgtttaagtactactgggagattttgttgtgaaaataagtatgaaatccaattctgggcatgtgtgtagaagtagggagatgacaatatgatggtttttgaaaaccatacagttccagaaattccagttttaggttacttgcgttcagtcactcccaagaggtttttgtgaggaggggtggggatggagaaagggattttagactagatgagaaaagtagtagtggaaaaacaaaactgtggttttgccctttctcttttccccctaattgaagactgggcttacagtgtttctaagacaactctgattggcagtgtatttcgaagaggctgaagagctctgattgaaaatgtcaagcttggattcaaaggattggatctttttatatgtttattgactacaattggaaatagagatcataaataataaaatgagacctggcctcatttccaccttcactgttaaaattatatcgtttttatctttgtatgctacattcatggcttatggaataaatctttaagtaaacacatatttttgtacatttcacaaagtgaggctcgtattctggttttgttgtcatttttcactcagtgttattttgtgtactctttgcagtgccaagtgatttttttttaaatgtagaattttataactaagtgacacttaaaaagagataactaatccctcctgctttaattttactgattaggaaatttagtaaagtgaaatcaaataacttgcttaaaactactattattttcatagctggaattagaattggttccacctattccagaacatttttcactataccattctgcctgttttactttatctactgggaaaagtttataaagtattgttttcctgtaggatgacttaaaagatcattgaccccgagggttaaatccatctaactgtaacgttgagtgaaaaattgagaccacccaaacacagctgtttagttaatttggcccaagcgattggaagaagtttgaaaaccattatgatgtggctggattgttgccattttagggttgtttgatgtgaacctgaaagaaatagaggttaaaaacacacagtcatatctgaagtatttctcttccaccatattaaaactaataaatccattaaccttttaaaatgattttgccaaagtaactatcatctcacatgccagattccttttactctggaatgtattcacttcattttgctgaattcctgtaggaattcgtagctgtgtaattcctttagcaattgctcatacacagacttacggcatttattctaatgtcaccttgaaatttgacctgtttattaatgttaactttccatgaggttgtctgtgttagcggtctaggttatcagctcctcagggacaaggctgttgtattgccattccccttctttcttctctctcccctccactttccctcgactccatagtgctagcagagggccttgtacgttctcagtattattgctaggactggtgaaaaacgttctgagtgcatttggggctaatttgaggacaaggtctcttctctgtgtgagtttatagttgtgctggcactggtgatcgaaggaatgcctctgaaaaaaaagcaagtctggcatgattggcacactttgaatcaacaggtagttaaagttctttttgaggcagtaatcatggcttcagactcacctttatttgcatttgactttagtctaaatctagacaaatctatatgtgacggctcaggtgaatttggtgagatgagaaggaatgtctgaaaaatagatgattgagaatcattagtttttgttttgcttggaaatattcttccacagaaatctttagaatattaaatttggcatcctaaagacttatggacaattttgtgcatttctcggctttctttatcttgagggaagaattgaagctggcatgggggcaatggagaaatttagttttgaaagtctaaggagagcagggaaaaaaggaagtaactttcgttgctaggatctacttataggtagggaaagaaggacaggaagaaagaatggaaagagatcaagaaataagggggataaacagccaaatattagggtg

SEQ ID NO: 122880 - DNA, 1100 bp, Homo sapiens
ggagttcgagaccagcctggccaacctggtgaaaccttgtctctactaaaaaatacaaaattaccctagtgtggtggtgggtgcctgtaatcccagctactcaggaggctgaggcatgagaatcgcttgaacctgggaggcagaggttgcagtgagccgagatcgagccagtgcacttcagcgtggttgacagagcgaaactccatctcaaaaaaaagaacaaacaaaagaaaacctaacacacaacaagaaggacttctttttgggaaaggaaagaaataaggaaggagaggaaagagatgcaccttttttttctggctgaggctatctgctgtcagggagaaggctttttgagtggaagggttggggctggatttagcatgaactcctccccaagcttagccttgagtcttgatcagagtgatcacatagtcatttaaaaatgttgttttcattaaaactgggtgtgtttactgtgtatttgtgaactgcgttgggatgtaaatatttccctctgggtcacagttggaaaaaattgaaagccagttcttggtgcatgaccgtgggaatgggtaactgagatagtgagaaaaaacaggattactgagatttgccttttaagtaggaatgcatacacactcgcatagtcttctgccctgtgccttatagaagggagcaggaatatgggtaataactaagaaatgtttacatttggaatacattatacatgtgaaggcttggctttagattctggctccccccaacactcccctttccactgactttaaacattctagagtggtggggaaaagcatggcccagaggtattggttgaacttctggctccacacagatagctccagcttcattgtcagactgggaaaaatagattagacaaatgtcaggttctagggcatctctaagatcttgtgagtctgtaaaagctgtgcaatgaggagaggggactttggatgtgctttgggtcacagggagagagctttctgggacatagctatgttgttgcctataaaccacatcaccagcagtagataattgaaaactgactactttttagaggtttttgaaggttaaaaaaaaaa

SEQ ID NO: 122881 - DNA, 1009 bp, Homo sapiens
aggtctgaacaatctgtagtagcttgtggctggaaaacaacttctgtgaggcaaaaacagcaactctaaactggctctggatatgtgtgagaaaatactcttttttctacttgattattaggcttcatagaaaatttcttttataaagtgaatttttaatctcaaccccttgaaaatggtattttagctgatttggataaaagtctggggaaatatatttggagtgagtgcaagtgggaaataatgtgatacttaaaaaaaaagtagcatttatattttgcttttattatagccatgtgcttggttggtaatccatgtttttctcctgcctttagagtgaagtaaattttggcatcttaggcatgtattttacaggattgggtcttatatatatatatttttttttttctttagttaactgattagaagtgtgttttcttcttagttcctcttgggcaatgtcttccattttgtagtaaaaacatgtttacaaaataatatgtgtaactactggtaattgccatttattagtacttacagtgtgccaggcactgtgctcatgttcttacattggttacaccttttacttctctggataggggaaatagcttagagagggtgtcatgtagttagaagatagttggaaccgggatttggagtcctgtctatgtgttgctaattattattaatacaaaatagttactattacaaatgttcattttgtagaatcaaatcagttaaagaagattcttgtagaatgggcttggatatgtggaatgaagatagagttggtttgacttggttttaatgtttttactaaactctttctttgttgcacttccgccatgcctgagcacctgtgtacctaatcatttaatgtaattttgtggtctcagttagcaattagcatcacatacactcaatcatgtttttatttaaatgctgcagactttgctttgctttactttgttggacttaattttcattttttttccctcttctattgggg

SEQ ID NO: 122882 - DNA, 1119 bp, Homo sapiens
tttttgaaacattctttttactggaaagatcatttaaaaacatgattattttaaaattccacagaataattttgctggaaaaggtataacagaaaataactgaatggaaaaaaatcacgttgtttcaaacaattatcccaagccagcttggaagttacagttctcttctcatagaagatttctttagccacaagctactgggaattgttcagcccattggcagctacacagaacattgcccttttcaccctgtccagcacacaaacctagacgattcatagctggaacctatcttcaagaaagtgatggctttattgaagccaaatgtccagactttttcatttagacacatgaaggaccttcagtgcttttgccatataaaagtgaaccacagagacattcttaaaaacaacacccggaagcaaataaaacacctgaacttactgtgtgcaaattacagatgcagacatagcctatttggcagtaagtacatctctctgtctagctcactctatccctcttcagtactagctgtgtgctttttaatatagtaactgtacaataaatattagttgaatgtaggtggaagtaggatgagaatgaacagaaatcagtgaccaattctgtatttttcatctcttttgttttttagaagagtccagttttgttttaagatgagtgttctaatagggtgaatttaaaaatgtaacagtagtaaagagattccttaattgctcatttagtttgatttgaagtaaatcttccccaggctgaagttttctactgtgggccaggaaacccatgtttaaactgtgaactcgagtgctttatcttcttatgccagacctctggataacgttggcctagttgttctgttgttgtttacttattcgaaagttattcttgtgaagatgtggaccattaactcaagaaatctctgtttttactttttggtgattgtcttacaggctattttatgatagtggtgaacagcacacaaaactccttcagaccctcccaagtgagtttccaacacagactctttcttcttgctctttccacagatgctttctcataagtagtatcgattacagatgtactttgatgatgctgataagc

SEQ ID NO: 122883 - DNA, 1048 bp, Homo sapiens
agccatggcttgcttactcctgtacttgtagtcagaatgtacttgggtctgttctagctaggcctttaggtagccttggccaagtggcaatcctgttgaaaatagcctatatgctacaaggattaaaaatctagattatatgaaaaactgttacaaattaataagaaaaaggcagataacctagtagcaaaatagagcataattgtacacaatgcagagaaatggaaactcaaatggccaataaccctgagtctcactagtagttaggcaaatgtaagttaaaatggagatgttttaataaccatcataatatgagtataaaaataccagtgttggggaagattcattgttggtgagagcctaagttggcataaccatcttggagaacagtttggcagtgtaaaactgaccataccatactagctagcaattgcactaggtatgaactcttgagattcctgtacctgtaggtgaagggaaactcagaaggcatgcttattgacacattgataatagcaaaactttggaaccaacctatccttcaattaggaaaaataaagtatattttataatgaagtactgtataggagttaaaatgagtgagctgcatatgaactacatagagctacatatattaacataatgtactaaaatacaaaaaaactgtgaatatggtgagaatttatataaaatatgaaaacaataatgaaactatgtgaagtactgttatcatccattgagagatgtgcaaactctgataaatgatttctactcatcagtgaattttctggaagcctaaaaattgatttttaaaatccagccaatgttagtttgttttattcccaacaaggttttacttgctgggatactgaaaccactgagctgctcctagtccagtggtataatgttaaaatgtaaaacactttgcaaaacatgtttatgtatatttttatttaagtattctaataactttatgagataatatgacaggtaggatttttattgtaactcaaattaagtgatggtagttggacttgaacttaccatt

SEQ ID NO: 122884 - DNA, 1301 bp, Homo sapiens
tttaatttctggaattaatttggcagtttaaaaatagagctgtgatagttctaatgttgaatcctttctgcgtgtttaaaaaattatttctatagaatgaaattgtagaatgtaagtatagcttctgaaaggacagttattaatgtgctatttagccaggtggttttcagaatttgactagtggaattaagcatgctttttttttttttttttttttttaaacaaatgctgaagtagggtgggtgtgatattttcaggtttttgcaaaaccctaaactgttatgcttttcagtcctaagcaaaacagaaaaaaacatcagtattcccttgatgcttttcccaagtatagcccactaaaggaggaagttgtaaggagacaaagtcttgtatttccttaccagaattttgggaagtagagagatgttagggaggaaaatacccatgcaaatatgaaatattcaagatttttttccctttagcattctctgtccattgttaccactgatgagttatactgagtggaagatgggaaggttgaaacgtttgctatttgatagaagcaattgatctcctagagagaattgtggtagctttgcagaattctttgtaaccctctaaagccaagttgatcagtcattttggtgtacccttagtaatctggctattcaaaaatgcaacaagggttttatagcatttgtatgtatacatggagataaaaggaatgaagacatggcaagtgtagattattttagagtgagaaatgttgctttagataattattacttagagcatttgagtcacctagttacccaagtatgattggaggtcaataatgaagtgaaaaacatgtatatataaatacatacttatctgtggtaggtaatgtaccctgaagaattttccatgaaactggttttatgcgatattaatacatatttagataatttggtatatgatttagagactgtatgatctttttttcttgtgatgatgggaacaaaaatcttgtgttgtttgagggctacttcagtgaggtatgtgtacttagacaatgtagtattatagtgttcaaagtatggaatcagatttaatgatttatcatatatgtaattaacattttctcttttaaaataataaaacagctagagtcaacttttcatatagtctagtatgtcccgagcaccagacattgggatatttttagttcattgctttattccttggagagcaaaattgttgcactaagggatgacccaatccattcgtgacaaataaatagaacatggccaggtaggctcaga

SEQ ID NO: 122885 - DNA, 1018 bp, Homo sapiens
aaaacatatattatcagagcttcatggtcaaaagattcattttatagtgacaattactatctcacaggttggattatttgtttcttttggttgtaaatgtttacaattctactgaattttcagctagtgtgcttataagttattttcttttttgtgtggcaattcatatgacagaagaattgaatgaggaaattaggaagttttgaactgtcacatttgctaggagttggatttaatttattattagtaaaatttccagttaaataagataattctaatatttataggttactgtgtattctttcagcatgctccttggtacaaaactattcaattgaatttactaactatatatgattatcttggagccttttttggtactctatcagctgtttctatggtaattttttgttcattgttatcacttatagcttactctattatggctttttaaaaaaaaaatctctgtatattttcttatccttacttgtttgcttacttttctaaccattagtctaaattgacatttaggtaaatttgcttttaagttgaatacttaagccaatgattcagtcattttgtcttttctggggtgggtagtgcctactagacatttaattgtgctgcattttaatatttcttaccattcattataaactttttttttttagacaggctctccctccgttgcccagactggagtgcagtggcaccattttggctcattgcatccttaacctcttgggctcaggcgatccccccaccttagcctcctgagtagctgggactactggtgcgtgccactgccatgccttgctaatttttgtaccttttttttttttttctgtagagatgggattttgccatgttgctcgggctggtcctcgagctcctgagctcaagcgatctgcctgccttggcctcccaaagtgctgggattacaggcgtgagacacaccatgccctgcctctcaatacactatttaatacatcagaccctttggtacctctaggcagag

SEQ ID NO: 122886 - DNA, 1026 bp, Homo sapiens
acaccttgtagtatgttcagaaactggcatgctgactttatggttctccatattcattagatgttttaacagtcataagctctttctatgcttatgtcttcaagtaattgttggtgatgatagatttagcccttcagtttcattttttattgtggtaaaatacatataaagatatattaaaaactatacaaaaatatgtaaaaaatttgccattttaaccatttgtaaatgtgcagctcagaagcatgaagtatgttcacaatgctgtgcaaccatcaccactgtctatttccagaactttttcatcatcacaaacacagactctgtacccgttaaacagtaactcctcttcctttttccttgcagccccaggtaacttttattttactttctgtttatatgaatttgcctattctcagtacttcataaaagtggaatcatacaatatttgtctttctttatctggcttatttcacttagcatagtgttttcaaaattcattcatgttgtagcatgtgtcagaattttattcctttttaaggctgaatgatatttcattgtatgtatatgtcttacttatccattcatctattgttggacatttttgtttctaccttttgtctattgtgaataatgctgttatgaacattggtgcacaaatatctatttgggtccctgctttcacttcttttgagtgcatacctatgtgtggaattgctaggtcatatggtaattcttaaatttgtggggaacaaacagacaattctacaagggatgtgccattcattctatattcctgccagcaactcataagggttttatttcctctacctccttgcctatacttgttttgctccttccttccttccttctttccttctccctccctcccttctttctttctctctctcctgtctttctttgtctttctctgtctctttttttcttttttaaatcatagccatcctggccaggcacagtggctcacgcatgtaatcctagcactttgggaggccgaggcagatg

SEQ ID NO: 122887 - DNA, 2122 bp, Homo sapiens
ggttttcaaagtataaagatgaataacatttttgaaaaaaaaattaccataattatagctgagactaattttttcagttttattttcttaaagcattttataagcatttatatgctttagagccactttttttcaaaccctgggccctgtgtaagtgagtcatatcatctaaggcacagctcatatgtcagcttttctaagtcttttctaactcccacaagtagcgttaatacctctgtcttttgtggcacttaccaggttggattttgaaatccttaaaatgtcagttttctccgcttatataaatttttccagggcagcagccctaatttattcatgtattcccaatgatcggcatatactaagcttagcgttctgtagatgcttgtggaatgatgaaaaccggtaaatgaaatgaaagttgtaataaagttcagattgtttaatagtttgcttgttttggaataagcaaatacattagctgcctttggcaatatttttattgtacagaaatttctgaagtgctaatcgtaatgtgaattggcttatagttgaatttgagacagattcttcaatggagaaggtggaggagatcagctcacaacttctgctttgcaacctaagagcgacttacccaaccatacctctttcctgcccctctcagtggaaaagatggccttgtttcagtctgtgcataagtacgcttatcctggctgtgccctagaattctgtctcatcacttctggcctattctcagatgtcctattagttaacccataactgtttttttctcctttgtttaggcaatggtattcaaccctggcttgtacaatagaaacatttggggatcttaaaaaaaacctgggcctcaatccagataaattgtatcagaatcttagaatcatagttggaggagataaaagttattttatgaaggaattgagacctagagactttaggggacttttctaagctaatgcttctaattagtttaaaaacttgaggcaagaactgtggttgccattcccatcccattgtcccagaatcattgaatcccattcgtttgatttctccttggttttcatcctcttactcttccttttcccagtttattctactctttatgctgtttttttattacatccgtcttctgctctttaagatgctattattgttttattatgccactctcttgctcagtaacctctagtagctcctttctacctatggtggaggtaaaaatgagcagttcatgttttctcctcccttttcccccattggatcttatgctgtagctaggggatcgtttcctgacttctatacagctatatatttttgagaattttacaacattccataaactgtacctggaattccttcctcctttcactttgcctacctggttcctacaccaaataacagaatgttagctctggaagattataatcatcctttaagtcagtttttgaaattacaaatagaaaaattgagaccctgaaattttaaatgattccccactgcccatcacccaggtcacaaagcaaattagcctcagatccaggttataactaatgtctctctgttcacttttcactttgaagatgtaactgagatttgaccgtttctctcaaaccttctctaatcaacttagagggtctattctggcctccaaactttggtgccattttttaaatcatgggagcatttgtgctttctcttgtagtaataattagcagtgacattgctaacctctcacttctgaactctggactgttaagcatattgcttatctcatttaacctcacaagcacacatagatattgttatccacattatagaagtaaggaagctgaaatttagagaggtaaagtcttaaagggtcaaagtttacatttgaatccaggtctatctggtcacagaactggactcaataccctgtattgtaatcttttacacagaaagtttgaaatgtaaggctctggataacaataaataggtcactaaatgtctttaaattttctactacatcatcccagaagagctcagtaaatatttattgacttcagttggaaagatcataacttttgactgcatcttgaaggtaaaggtgttggtgtatgtc

SEQ ID NO: 122888 - DNA, 1463 bp, Homo sapiens
gcgaaaccccatctctactaaaaatacaatgaattagtcaggcgtggaggtgcgcacctgtaatcccagctgcttgggaggctgaggcatgagaatcgcttgaaaccagaaggcagaggttgcagtgagccgggattgcgccactgcactccagcctgggcaacagaacgagactctgtctccacataaaaaaggctaaaatggttaattttaggtatgtgtattttaccacaattctttaaaaatcccattttatcaccattttgctattcccaaagagataactgattcaggtaaaatcaccaatggatactaacactattatgtcaaagacgtcaaggaactaactatttgtatggtaccaacatctcactcctcccagattatatgccagtatcaaagggaaaactataattttacaacagggagatctgtcatcaccttactcaatcttagcttcactaatagtgagataactgcattatgtggtgcctgatatgaagcaatgtaaaccatacaaaattggctatgaaaatacccttaccaaaaatgtttgttctgaatctaatcaagaatttagatctaaattctacttacagaaaatacagagtttagacgaatgaattaaataccctcacatagaaacaattaagccaaccaagaaaaacaaagattctccaagacctgtaacatcttgcatctctccaacagttcaccgtcatgaaaagggaatgaaaaaggaaggagaagaactattttagattgtaagtgacttaagtgacataaccataattaaatgcaatccttggcaggatcccagtttgccaaacacactatacaagacatcacgggaatgactggagagactttaacatagcacagatattagaaaatattagagaactactgtcaactgatataatagtgtgctggttaaacgggaaactgtccatgttttttacaaatacataacaaaaaagttagggctgaaatgtgatgtttcataatttaaattacttcaggaaaaaacatatgggaaaaagttaatgtaaggaaataatgtatctaggcaataatcaccgatggctgttaaaaaccattaggcaaaaaagcttaatgggaaatcaagcttttcccatcagactgatggatggatcagtccagctagaaacacctgagctcactgatcaatcttcatgccaaaaagaaaactaatcctatattgtatcacttgataggaagcagtaagaaatatacactgataactaggaaggattctatactcctaactcccaattaatcttgaatctgagtaagccccagatctactaccaatttataggaaattcagaagggagaaacatactaaacagcaccacaggcagggatgcaatcaacaaattccagaatgtgggaaactctatagagcaaacaatagagtttcaacaaatcaattgaatata

SEQ ID NO: 122889 - DNA, 1131 bp, Homo sapiens
aaagcttgatttcccattaagcttttttgcctaatggtttttaacagccatcggtgattattgcctagatacattatttccttacattaactttttcccatatgttttttcctgaagtaatttaaattatgaaacatcacatttcagccctaacttttttgttatgtatttgtaaaaaacatggacagtttcccgtttaaccagcacactattatatcagttgacagtagttctctaatattttctaatatctgtgctatgttaaagtctctccagtcattcccgtgatgtcttgtatagtgtgtttggcaaactgggatcctgccaaggattgcatttaattatggttatgtcacttaagtcacttacaatctaaaatagttcttctccttcctttttcattcccttttcatgacggtgaactgttggagagatgcaagatgttacaggtcttggagaatctttgtttttcttggttggcttaattgtttctatgtgagggtatttaattcattcgtctaaactctgtattttctgtaagtagaatttagatctaaattcttgattagattcagaacaaacatttttggtaagggtattttcatagccaattttgtatggtttacattgcttcatatcaggcaccacataatgcagttatctcactattagtgaagctaagattgagtaaggtgatgacagatctccctgttgtaaaattatagttttccctttgatactggcatataatctgggaggagtgagatgttggtaccatacaaatagttagttccttgacgtctttgacataatagtgttagtatccattggtgattttacctgaatcagttatctctttgggaatagcaaaatggtgataaaatgggatttttaaagaattgtggtaaaatacacatacctaaaattaaccattttagccttttttatgtggagacagagtctcgttctgttgcccaggctggagtgcagtggcgcaatcccggctcactgcaacctctgccttctggtttcaagcgattctcatgcctcagcctcccaagcagctgggattacaggtgcgcacctccacgcctgactaattcattgtatttttagtagagatggggtttc

SEQ ID NO: 122890 - DNA, 1761 bp, Homo sapiens
agaaagaatgtaccattatcagttacagaaaagtgttcttcttttttaaactttttactatggaaaattttcaatatattcagaagtagagaatagtagtataatgaacctcgcgtatcctcgcctggcttcaacagttaccagtcacatgaccagtcttgtttcatctgtatttccctttgactccctgacccactctcatctttattttgaagcaaactccagacatcatataattttatttgtgaataagtgagattcccctgctccccttttcttggcatgtacttcttggtctcccaaataaagctcatatttattacggattttgtggaataacagaaaatagatcatttgtgacatactgttgtgatgtttttggaataaatatctgaatattgttttagtcagtaaaagcagtttcacctaaatgtagcattgtggacatagagaatgctttaaccagtgctaaaaacaaggaacataaaacaaaaaatacaacaaaaaccccaacaatttctaaaccaaatctgaactgatattcaaattctagtatgttctcaaggtaatgttaaagttgatgttgtataattttttttcctatgaatcctgcttatgtttatgttagattttattgtttttagatttttcttttctttttttctttttttttttttttttttgagacagagtcttgctctgtcgcccaggcctgaggtacagtggcgcgatctcggctcactgcaacctctgccccacagattcaagcagttctctgcctcagcctcctgagtagctgggattacatgtacccgccactatgcctggcttatttttgtatttttagtagagacagggtttcaccatcttggccaggctgattttgaactcctgacctcgtgatccacctgccttggcctcccaagtgctgggattacaggcatgagccaccgcgcccagccgatttttcttttttcttttcttcctcccaccctgccttctttcttcccttcttttgcctaacgtagtttagaggcaatatgttggaactagaccaagcaaaatattcttttttagctgactgaattttaatgggactatacagttataaaaatcaaagcaacctgtttgtatatggttctgtctggcagtatcgaggggaaggtacatgccttaaacattgatgatacactaatttagaaatcgttgtgtaaattgttggcattatagctgtagctgacaatcacttaatggtcgaagtgcttttcctaaataacaggcaggatttttatgttggagatagtttattttatatattaatttgtactttcaattaagatgtaattatttaatataatttccttgcaaagacattgaattataaaatattgataacaataagcaccatgttttgagtacttaatatatgtcagacactgttctataggcacttttatttttaaatattttttttagagatggggtcttgctgtgttgtctgggccggagtacactgggtactcacagatgtgatcattgcatactacagccttgaactcctgggctcaagtgatccttctgtctcagtttcctgagtacctgggactagaggtgtgtgccaccatgctggttatctataagcacttttacatttatttatttatttaattcttgtagtaactctttgtggtaggtactattatcctaagtatcctataagaaaactgaggcactgcagtttgaagtaacttgctcagggtc

SEQ ID NO: 122891 - DNA, 1096 bp, Homo sapiens
gctgggattacaggtgtgagccaccgcacccggtccccatttgatttttaaaacaattttgtaccacgggtctgacaagtaagaagagcgaagagtttaaacttaaccaaagtcctggagcagttactaatggagcttcaggcacagccaaggtctcttgtgtccagagttgttccctctatactgtgcacttttgccagttgaagttttcttggaaaactcaggaagtctgccaagttttgtagctaaagagatgtcctgtagcttttatatatttgtgtcttgagccctgaaggtagacagagctcagtcttccaaaaatagttcaataaatgtgtcaacattttgaaatactactgaaaaaacaagtaaaagtcctatgggattattggaaaatgatgccaaatgcctccacaagtatttgaaaagcaaatgtggcagtggttatacgctagacaatggttcatattcagccttcgcttttggggaccatttttattatgataatcttttactgtttcccagtactctgtttagttgcttctagactctggtagaaaagctactaagtgtctacactctggtagaaaagctactaaatgaacatcttctttggaaaattttctttaatccacttctcttaaagagaaaaaggaaaactttttttccttaataaagtgggtgaaagttgtgtatgggaaaggtcagaatgtcaagtactgagttgggtctgtccactgcaaagaaatcaaatttatccatgaacttgtaactagaactgtttctggatcttggccattgaaatcaacatcagtaaagcctacatcttaatttccttaatgccaagattgtctgttttaaattatacacatatgggaatgtgaatacattcgtcttcccccacctccctctgcccgaaaacaggaggaaaataaaggtacgttgaagatattctaaacttttgcagctctgcaatgaagagctgtggatgtgggctgcatatgtggtgcagatgtggctcctaccaattgaggtcattttaccttcatcttcagtgctgcaagcttaaatcgaaagagggtagattctagaatag

SEQ ID NO: 122892 - DNA, 1007 bp, Homo sapiens
aaagaatgagggttatgatcaactcagtataccactggaggctatatgagtaagcaacaaaatgtttctcataaatgtagaatgttggcaaactgacaaactgtgtatgccacccagaaggaatgctgaaggcagtcacgccccaagtgcagtgtttcttgtgattaggtacatctgaagcctgttagtaacaatatgaacctgcgatcagttaagcagctgaccagttgctacctcctcctccctgttcttgttacccaataaatacgaagggctgtggagctcaggggggctgcctttgctgactagaagcagggagcttttcttcccctggcctttcctttaaaacagtttctttttttttttttttttttttttttatcatttccatgttcgtcccttcgtcccgtctcctaatgagggtctcaagtagtaacagtagtaactgttgtagtgatggtctcaagtagtaaccgtgacagtctgccacaactactttcactagttttggttttattttctggtgttttgtctctaaataacatgattttcttgtttcttgattttttttttaaagtttcagaatatttttatgttttattatttgttaaaatttacttgctgggcacggtgattcatgcctgtaatcccagcactttgggaggccgaggcgggcagatcacctgaggtcaggagtttgagaccagcctagccaacatggtgaaaccccatctctactaaaaatacaaaattagccaggcgtggtggtgcatgcctgtaatcccagctgctcaggaggcggagacaaggagaatcgcttgaacccaggaggtggaagtttcagtgagccaagatcgcaccatagcactccagcctgggcaacaagagcgaaactcctcaaaaaaaaaaatttatatttttgtgtgtagatagttgttcaaattgatgtttctgtagggggtgaggttagcagggcgagtggggcagagaagcactagaaaagccta

SEQ ID NO: 122893 - DNA, 1804 bp, Homo sapiens
tagggtagttcatgcatttaaatcaaatctttctgaagagaccagtttcctcttgctttgctcttagggcctcaccatcaaccttcatgaaagaattttcaaatacttaaaaacttatgttacccttcagttgcctttttccaggataattgtggttttaaaaagcttgtcatatagttctgattaccaactctgaagtcaccttttccaagcccttgtatttacgtttccagacctgctgatgagcttcagggctgggccattataacaacagtgctgaattcactcatatttttcagagtttcctacattctactgatatatgtacatatcccagtagcttgaagacataaaattaaaatgtgatttacactctgccataattctttgtttctttctctttttgtccagaagctacttgtttttcaccctagattcatttaccttgagggagattatttggttcagactcctgacctggggtggagagtggggttcttgggcctcatgggtgcataaactgcctgagactgtaagtgaggtattgtgttcccatgtgcatgcactcctgtgtgtgtgcagcatctctgtgtgtgtgtgcacaagtggatgagagagacaggttaagggagaaagagaactttaggagtggtttttgaaagggttttgggaaacagaaaagattgagaactgatgtttcagttcttattttcgagattagaagatggaagttttaagagtattttgtttttctctttttttttaattttttcaccctattgcacttttcatcatttattctcccctatctcccattgtacttctttccattcaattgaattcatttagttgacccccatttacctaactgtcaaggttaaactgaattctgatataatcctggccactcatattcttacctgtgaacttaatgaatgtgcatttatttccttacaaatttctttgatggaatattgattagaaggaatcagtaacatgtccactctatttgatgctggttagactgccacatatgccattgtgaccttgggcaaattatttctcaaagcctcgtttgctgtagtaaggggttaaaaatcatacctacctcagagttacatgaggattaaatgaactaatgcttataaaatgcttcatagagtgcctggcatctgtaaaaattgttaggttaagaagagacctagtgggttggttactggtgaatatgtggtaagcagattttttgcagtggtcaggaataattatctgtgtggaagtacagtctttgaaatgaaacagtaatttcctatggtgatcacaagttaaaaccactttttaacaatttcagtccagtatctataatgtttgagcttttagaaactcttgtcttaacttcattctttttgttaatttacaaaagagcatatatatgggaaaacagttgggatctagtttcaacagcacagggataatgtagtcttttttgttatgttgccagaggtaactgattataaatgtaaaattgtgtgcatatgttctaacttcttctctctataaccacagtaaacttgttgaaaaaagcctattagtgagtagaatttttgttgacaatgtttaaacctctgcatatggcattaaaatgtaacctttataaatctttgtgtgaaatatacctgcacacatattttccagcaacatcgtgttttaacttgttagttgccaacattaagaaatcaggtttcatataaatatccttattttaggctagaaaaattagatgatggtgtagcacttggtccactgg

SEQ ID NO: 122894 - DNA, 2870 bp, Homo sapiens
tgaacttcttgcctctgaaatggcatgtgtgtgccaggcgtcttgttcctcttgttactgttatttaagctgttttaaaaaaacgactttcgcggttttcccctcagtttttcagtctttatttcctcccccaccctacgtttttattgtttttttcaacggaatacattatttatctggtctctttataacgctgttgagaattagcatttcagttggtgttctgtcagatttcaccttggacttagcagttgagggaaactgagtcagtttctatgctgcaggggctaggatttagaattctcaagctttgaacaggtttcagtgggggaacgaatagtgcttaatcctattcagtttccctttgcaggctcattgctgtgagaaatcactgggtggctgttgcagccactgatgggggctgcattgcaatgcaatcttgaattgtgataagggccaactggctccatccgttaggctgtgagtttgacacaacttttgaagagctatgctgtgtcacctgtcagagctcgagtggtcattcttttaattcaatttaagaaccaccatcaaacttcagatatctattctttggaggttattggagaactgtacaagtggtaatggcttggaacaatggtgtggatttagcgctaatttaatcctatcctgtcttcctcacttcttgggcagaattcccactgaagtcagtagtggtcttgtgtgcagacagactgccgagaacaagaggctgctcatttagagtaacgggaagggacggtttctttccttttaaaacatccctctgtaagaaagacttagtcataacagttctttaatctttaaccactagtccaagtagttgagagcactttttgcaaaaaccttcgaaagaaaattcgtggatgaattgagccacgtccctcgaactcttcatatatctacgttgcatggtgatccttaaaaaagattaaaagtgattttaaaaaatcagttaaagctataatttcagtaaaatttttcctaacttttgtaaaaaatgtaaactgccagggagcattttgtagcaactaagtgtgtatatttcaaatctgaaatttaagtccaagtagaaagaagcaaatttaatttaggggatgaatctgaagagaggccaccaaaaaaataaccatctaaatataaaagaaggaagttcagatatctcttgctgtttttcaggagatagctttagggcagtttgctcactttcatacctgttcttaacgatttactgactgcctgggtccatcattagataatgctagcacttggaggtttccaaatgagttttgtgctgatctgagttgctgagctagttagatccttggcttcttaacgtaacattcttgtggcttaccctttccaaattactagttctaaggaattgagtttagaaaacctaaccagtgaccagaatgtaaaaataggtatttaaaaatcagaaccatgtccacgtgtactacccaaccacttgctttcaactaaaaatacttgcaaagatgacaaagcagtccacaaccaaaatatttattggtacaatttctctgtaattagtaatattgtacagttatgtttaacatcaggttctgccctgaatcacccctctcatattactgtggctggtgaactacaaaggttgtatctttgccatttcatttaggaatatagggtttatattttatatagcagaatgctaaatatttttgaaggttttgttttgtttctgtttctactctgtctctactaaaaatacaaaaattagccgggcatggtggcgcacgcctgtaatcccagctgaagacatgggcctttttctttcttttttgaactgaagtagcctgtttaaaagctatgtgtgggctttttattgaaaagtgtgaattgctactagttttataaggcaaataaacagtttatagggatcaataccactgagtcacattttgcatttctaaaatctgtgctgtttacttggagaaaacaaaagaaatgtgcctacctcctccatcccacctttatttagaaacatttccagtgggcttgtttttttcagattcagaattactgtacctaaccactgggtacccttacagatttcaaagcctgaagtaaatgtttatgctggctttcgtagtcagcaaataatagccaaaccctaattcactgctcttttatagaatcttggaatctcagggctgaaccgttaggagtcagcagatccactcttagccctagtctcttcctctcaacatgcaaacagttctaatgtctttggaatgtctgagcaaatagaagatttgtatgcgattctgtcaccaattctagacagaacatcctttgggatgccatgttttggcataaaccagcaacttgatattatgagatttgtatcatttctctgcgtgggcagtgccctagactaaaatctaaaatggagtcaatgcctgatgtcattaactatagggaaatggcctccaagttagctattagagttgtttaggaattatagctgggcgcgatggctcacgcctgtaatcccacctctttgggaggctgaggcgggtggatcatgaggtcaggagatcgagaccatcctggctaacacggtgaaaccccgtctctactaaaaatacagaaaattagccaggcgtggtggcaggcatctgtagtcccagctactcgggaggctgaggcaggagaatggcgtgaacccgggaggcagagcttgctgtgagcggagattgcgccactgcacgccagcctgggtgacagagccagactccatctcaaaaaaaaaaaaaaaaaagttataggtaagccaagaaggaaag

SEQ ID NO: 122895 - DNA, 1024 bp, Homo sapiens
gacccagttttccttattctgcatctccaggctctgctccagtgtttacctctaggaaggcgctcagtgaaggtttagtcagcaaatgcactttgaataaataacttttaaaagttgagaggacatttaaggccgggaatcgcagttgagaacgccttgcccaggcgcattagctgtcatccgggctgccctgagggcgaaagacgtcctccacccccgggtctccgcggccgcgcttgccgaatcccgcgggaaaggtcccccgcccgcgcaggggcggggcctgggcgtcgggggcgggaccgcccgcgggggtttccgcgccgggggctcgtccggcggggtcgcgggaggggcttccgccgcgagggggcggggccggccctcagagtcctctgacggccccagtcagggaatttcaatttgaaacctagcggagggaggaggcaggcgcggctgccggcggctgggactgaagagggacgggtcccgcggcgagcgagctcctgaggtacggcgtcggggtaaggaggcgtgcggggctgcacgggccgggcgactggtcagtgtggggttgcaggggcggctcagatttttcctctggctgcagctgggaagctgattccgggcaggaagcggtggcgggacggtcccaccgggatggggggcggggagagggggcccggctttgggattttctgcggctccctctctcctttccttcccggtctctgcccgacccgattcttgcccgggggtccgggtcctgttgctccgggccggatcccggcttcgctgctccccgcggtccccctcttccctcttccgggggaccggggccgcgtcccggcggagccaggaaaggcgggggcacggggaggacgccgtcccccccggggtgccgtgggctcaggtcacgcgtccgggccccgtggagcaacagcgggaaaaatccggctccatcccccccgcggggagggggtcggccgcggcgtcgcccttcaggaggaaggttttaggaggg

SEQ ID NO: 122896 - DNA, 1037 bp, Homo sapiens
ccgcctcggcctcgcctccagccccgggacgcggcccgccaccgccgctgccgccagcccagacgcgccgcccgcatgcgccgcgaccatggagcgccccgaagcgggtgagaccgggctgtccagcgggccggggcgggggcgacaggagccgcgggggcctgggcctgctctgcgctcgaactttgggagggcctgacccgcgccggcccttctccgagtctccctccttcccaaaaggactcagggtagcaccgagaagcccggtgcaaccggggtgtacatcagtgctgcctgtagcgaagcgttttaatgcacgcattgtgggtccgacaggaggcgggggtatgagcccatccccgagtttcacttttctttctccctttctcatcctgtgaccctttgcacaaagttcatgccagtacacattccttccgacggtgttgatgtgggtaaatgtaaacaaaacctagtaaaatttcgattttatcttatatcacaaatattaagcacccgaaccaccatactgtctcatttaggattttctgccaggtttggacatgaccgcttttaaaactggcgccaagtctacactagcgcccggaatgaatttccagtttaggtcagcgtttgttgtgaactgaactttgtgatagagcgagttaggggtggactttcggtaaaagggtccgcaaaccaattagagaaaaggtgctcctctgcaagagtttcataggataaactcatagaagagtataaaaagcataaaaacgttaaagtgtactatataaatagcagttaatcgtgtgaatatgttgacaattgttaagtgaatgatgacagtgagtttttgcatttaggaaatgcatgggaatggaaattgttaaggagaaaagagccatactccagttccttgtttaagtgccgtggctttgcaattcaggatcctgttagcatatctgtatattttccttactcataaagtttaagatgtttgtggaggttacttcctcctttcatccattttcggacactat

SEQ ID NO: 122897 - DNA, 1082 bp, Homo sapiens
atgatgtgctgatgggatagggaaggtggggaaggggattgagaggaaggaagagaaaaaaattctttcctttcaccactaacttctaggctttgcatcacaaaggtgaagggagaaaggggatgagagtcctgtccgcagcttttagttttcatcctttaacctgctgtagcctttgtttctgcctctctacccctgtaaagttgtgtagatgctggaaagagtgcaggctttgggtctgacagacttgttagtcccagctgagtcacagactccgctgcatgtgcaggtcaggttacctaaatttttcaagtttcagtttgttcaggtgtaaaatgaggtgggtgataatacctcctttagatgactattttttaaacccgaatatagccgtgtcaccaacctgcttatatacttcaggattttcccatcgataggataaagacaacctcttttccatgttctctgaggttttgtcgttgttcgtctctccttcagcccttgctttttctgcccgagctcttctacccttccttgggcttgccaggttcccttggccccaggaaaagccttctctggctggagctttctctttgctcctcttggttttgttaatgccggaatctcagctcaaacctctctacccatgaccacctcgtctaggtcaactatccctttccttgccccattcctgtcagctaaaggctttcacagctttctgtatgccatttgtcatccttgcaacttgacacttgtcttcctcacaaggtttttagtgcatgcccatacctagactggtgtttgttcaagagtaggtgcgcacacatacacgctctttcgctctcgctctctctctctctctgctgctgtttcatggcaaaagcgtgtttctgtcattccaagttataaccagaatacttaaaaataataaatacagtgtaatggtggtttcataatacaggttcaacagcagttactggttttggaggaggtagggtaacttataatagagggaaatgcaggtttcaagtgaccttgaaaccaaataatgtaatgtttccttttcaagagacttatttgta

SEQ ID NO: 122898 - DNA, 1010 bp, Homo sapiens
aatacaaaaaattagcagggtgtgatgggacctgtagtcccagctactcaagaggccgaggcaggagaatcacttgaacccgggaggcggaggttgcagtgagccgagatcgtgccactgcactccagcctaggtgacagagcgagactccatctcaaaaaaaaaaaaaaaagaaaaaagaaaaaattctttttaattttaatatcaggactatttctcttgaacatgttgttttttacctaatgaatgttgaacatttaacttgtgtctttgggttagaattggttacttgaacacttagaatccagtttattgcatacttcaatttagaatataggacataatgctattctttttgtgcacttacctcatacctggcttcatgttatctttccagttttagtttctgtttgtctcattttctttattttaaatttacttattatagtgtatacttctttggagttatcttaaatcctatttttagggatagggtgaagcaaaacatgtaagcaagcatgcaaacaaataagcaatatttacaagtcaaggagtacttaaaatcattagtaggccaatgagaaggcaactctaattgttctgagggcaaatcatctgggaccaatgcccacagttaatcttttcttcctgggcaaatcatttgggactgatagtccacagttaaacttaatcttttcttcttggctgctctggaaaaaatgctagacttagagcttttctttggtaatataaatatctctgcactcaagaaacatttctaattactcattcattcattgttcttttaaataattcactgggtgcttgcaacattgagaattccatccattctttgcaaatattctcacaaaggcattttccaatattgatgaaagatccattgtgtgctgaggaatgtgaagtatcaccagctttaatatgaatataagcccgaagatgttggtttgttgttactgctcctgtaattcctttcttgattccagaggtat

SEQ ID NO: 122899 - DNA, 1004 bp, Homo sapiens
agtagctgatagaattaagaagatattgaaaattttgcatttatatggcatgttcccacattttataatgaatgatgaaattgcattgaaaagctttttgcatagaaatggatatgtgatttcattcattttttcagccatatataattttaagcttgcgagactgagagattgctaaaaatttagcccactagaattataatagttcttgcaaaacttttttttttaaatagaaaagtgcccttggttagcatgataaaagattctaagtacatttatctcatacaagaaaaaatgaaaggtttttagaatgttcatttgaacattatgctttctttcattttgactgtcatttcccccaaaagatggagagactacattccgtgttttctgctccttgtgaagaatctgttcagtttctggtatctttaggcccttctagggtgctctattactacatgaagtcttggatttctgaccaccacaggctggtgggtgtcccagcagcctgctaaccgttcccctaatggcttgggctacgctttcttcagaaacgtaaaaataacttagccacacttcacttagaagaccagcttgtcttcttaactaggatggctgcattcacagacctgcaccattgaggccattagagccttagttttataccctgcctctgtttgcatatgcctccaagcacacttcatccttcctctcctttctcatctctctcttaatcctttttattctcacctcttttatttacttgattttcaatcaaacactttctaaatggactgactttgtaccaggcattattctaattatcttattaaatatcaatttcatcctgacaaacctatgaggtatgggctgtcttcgttcattttgtgttgctataacagaatacttgaggctgggtaatttatgaaggaaagacgtttattgagctcacaattttgcaggctgggaagttcaagagcatagcactgcactggctggctccc

SEQ ID NO: 122900 - DNA, 1015 bp, Homo sapiens
agaactgaccttaatgtcactcagaatatagtatatcccccttgacatgctgaggattcccattttggtttgctggggttctgaggaatggtgggaccttggtgagtggagtgtaataagaagtggtgatgagcaaagttaggtgccccatgacaatgcaggagtgaggggcagccaccggattcagaaaacctgaagattttccattgtcatgggagtggtccttcagtttctggtatggaggggtggtgtatagtgagactgtctggaaaagagctaaatgatatctcctgttgagatgctctgttttaaagactgaagccagatggtgtcctccttatatttcaatttgacctgctagagggtagtctggaaatgattttatgtatgatactgatgcactgaaagtactgatgcactaaaagcacctaaagtactggtgctactgttgtcagggtagacatgatgattgttggtaaaaaggggtgtgctgtgtagaggaatgctctggattattacaggaaatattataggaaaattctgagatagtaagatagccggtccattcattattgtctataggaggtataatgcgatattctgtagtgataaaccaattgagatttttttttaatcatctagtcattgtcatttaaaaagtaacctgaaaagctgttacccatgtcaacttaaaaaattagattcaaagtcagagctatcatcagtctgtttatgaaggtaaaacatctcattgacattaaagatgtggacagatggctggtgcaggggatgagcattcaccccctgggaggtcgtacagatctagtgtgagggtttcccagtggtgttcagtatttggtgcagaagtccctgggcttccggggtcctgtcctctggtaggcacttgttggcaggtaattgcatgtagtagtagtaaccaaaagcccagtggggaactaaacattcaatatattgtgttcaaaattttgaaaatacagaaactctctctcaaatg

SEQ ID NO: 122901 - DNA, 1038 bp, Homo sapiens
gttcttagtccatcctagtacacatgcacttgttccccacagagaactgaaattcctttgcctgggagcagttcgtgcacatgtgaagatcaagagcttgagaagcaaatgtcaactgatgggtcaaattaatttatatttacatgtcatcagtgtactattactcaacaagtttaaatgctagttccatttcctacagtaagaatttacattttcaaagaaccttaataaacagtatacatcaccaaagagaactttaaaacaatttagtttttgtctgaatactttttggagcctcttgtaaattgataattgtaggccactgagaagagaaatatcctaaattactttcttcagtcattcttcatgaagctaaagcaataaatttatgagatcaccaagctgcaggggtttttgttgttgttgttgttgttgttgttttttaacggtgtgctctgtctctctgttcatttttatgatatttctagaaaagttggccaaagatgaccctttctcttgattttgttgtaatgattaatcaacttatcttcaagttctctttagcatcacactctatttgacccattattattacttttataattctcgataaacttggttgacagattgattagtattcacaagcaagatgtactgaccaaatatttctgtgtacctggagtttcatgttcagacttcaaagaaaaacagtggcagttaaacctattttatgtgtttgctagctgaataattagaaaaattcacagggtaaaccatattctactcactcatccaaaaagcatttggtttaggattagtcagctgagttaaagattgcagagctaattttgaataattttaaaaaatattatgaaaaaatattttaatataatgttttcaccctgtgatgtttaaagtatttgtgatgctcttggtcactttgtagttttgcttacattttaggccctctcactaagcataatgactggatattggcatcaaagataaaatgaagcagcatcactagtcagtgacata

SEQ ID NO: 122902 - DNA, 1045 bp, Homo sapiens
aatcctattttgataagtcagtatgccatatttaatgaaatgttattatataatttttttttcttaggcaagaaacctattggaattcgagacttaattaatgaagctttgcatcgagaaacgatgggtctgaagtccaaagtgaaacagataaaggaacttttattaaagcctgagactcaggccagaattaggagggagctttttgaaggaagacttattaacaacagtaattcagcaaatgacgttgatttcagcacaactttgacataagctctacattgcgattgtgacaacatagcttatgaaatcttttcagcttattaagtagctctttggtaaacaccaaagaagtttctgatagtgtctgcacaacagcaaaccaacatttggtgaggaattagcaatttcttgccaaagaaaattgattctgcccaattattttttgagctacacttgtgttttagaatatctgtttctgtaatattgagagttattttatagaaatgatttcttaattagctgttgtgagatatttctcgggtccttgcagaaaaaaacatacagactgtgaacaaatcattcacaaacagaataaaacagagccaacaacagtattttaagggtcacttgcctcctgttgacacaattgttgctaaatcaaaagaagcgttgtccaggtgtgtctacatctagtgttacttttaatgagaatttgaatgtttattgaacaatagtacttgaatgaacatttataaatgtaattattgcgatcactggttaagaatgttttatatatccttataatatttttcactgatcaaaatgttgttctgctttttcatttcttaaggaatacatgtttgggatttttattttttacgtgtccgaagataagctccaggtcttatcgtatcccttgccatctgaacttgtttgcactgcttctgtttgaaagagcatcttgaaaaacttccccggtatgatgattgttggtaacaactttttctatagtcattgatggagtagatcatgatggagggga

SEQ ID NO: 122903 - DNA, 1037 bp, Homo sapiens
ccgctgtttcagttagctactgctatgtgaggccttgaaggggccacgctgttccatctgttggcaggaagagcttagagttctagaagactttacactctgtttgacttgtgttggttgtcagcttcgtgtagggaagccccagtggcacatattcatatttatcaacaaatgccaacatttttggggatcaatcactggaaaaataatatgtcctagatgaattaagaatgtcaaaaagtaatattttcaacagcaggacaaaattctgtcagctttgaacttggacccatttataaaatgttagatgattattgtattagtctacttctcagcatagaagtatttatttttatagggctttgagatatactagatttatattcaataaattttaatttttaagattaataatttttaatttagagacaaaaaaatcttaattttaagattaataattttaagattcaaattattcattccaaaactccaaatgtgttaccttccagtcatcccagcagccaggcactcccataaggaggtaattaaagcagtttgacttcatgttctggacattatttcaggcatgtgaccaaacagatgtgtttgcttctctgcattcgatcacagatgcagaaaccatctatcacatcatggagcaaattaggaatttatttcattatacaatcaagatagtgatttatttcattatacaaactgtagattttatactgtaaatttaaacttttagtatctccacacataaattgatgaatggataacctttcgtcatcccttattttcaacactttcaaatctcacctataataattttaactttaaacaaattgtagatacaaccctaaattccagttttcctaggtagatagacttcatataaaaataaataaacttggtgtactttaaaaaatagtttctaggtccctatatgaatttgagagcagcacagatgctaatgagacaagtccctagattatttcattcacagtgaaaatgaatattaaagcagttcactt

SEQ ID NO: 122904 - DNA, 1125 bp, Homo sapiens
ggttgctagagaagtacaattaccacattttttttcttgtgtgtgtgtgtctgatgctttcaaaaatgttatgatcattacttttataatgaaaaacacatgctttgaaattgttgacctatatgagttgtatatattatcggcaattaagaacaaataagctatgaattgcctcacatacttatttagaaatgtaagcttgtgatgaatatttagatgaaatccattcatatttcatacattttctgctgtactaggtcaaaatacagatattgtaagacttcaaattgagcgaagtctgtttctataataaaagtaacctataaaatttttttaaaggcagaaaatttgatataaaatataggtcaatgcttttctgtctatatttctaaattttctctcttcttatggccttggttacttcctttgtgccagattcccatagacacagttattcaacaagacctgtggtctccgcccagcaccaggctgattcttccgttcttcttgacttctgccaccttgccagccagctgctcgcttgcttttcccacagaccttggattcttcacaatttgaaagggactgtcattagggatgtcagcaaagggcaggtccccataatccttcacatcacactctaaaattaaaaagttttgagttactaaattaaaaagtagattataaatcagtctgtgtaggatgatctcaattgtataaaataggcatatattcacaagtataagcaaaggaaaaacctgaaaggtctgtaaatcttgggaaggtagacccatgtctgcttttgcttgacgtcatgttaccagtatcacacactggtgcggctgtatactgggctctcagtgaacacttcttgaatccatccagttaaactagacaccaaaatgtaacagtgataatcttctggtttgggcttaatagggaatgccactgtctctgtctctgtctctctgtctctctctgcttatgtgctttttacctttctatagtaagcatgcttcattttgataataattaaatacatatatatcggtatatatatgtattctcagaaaatttagaaagcactggtgtattttcatctggagatacacacacacacagaca

SEQ ID NO: 122905 - DNA, 1054 bp, Homo sapiens
gatttcttctgtgatgtagagaccttctctgtatgtcagacctcccacgactggtgtgccagtagctggtgtgaaagatgggtccagtccgtcaacatcaaaacttagatgaattggccttttctttcttttaagaagtgggaaaggatttcagtttaaggttgatggcttcacatttcatagataataatctgttaacttgttttataaaaagtagcaacccattatttcatgtaaagactttattaataactttggttgtcagtagcaaccttttctgttgcacacacatgtgtgcacacacaaaagaatcctaccttcctagtagatagctgagtgtttcttccatcaccttgccaattcctagtctgtccacttcagtcattgaaaagtatttaatgcctagagttttcaaaatgtagctataaaagagaaattaagataattataattaataaggctgactgtgcccgcctgtctccttttaagggaaatataaatatagtaaaatatataaaacatttaggttctatgaacctaactcaatatagttttatttgtatttatttttaacagcaagtcaattgagatttaattgcctggatacatacatatgtatgtacatgtatataaatatatgtgtgtgggcatgtgtgtgtgtgtgtgtcttgatgtttaattttctctcatagagttggtcagtaaagcatatctagcacacaaagggacaaaaatggaggcaaatcacatcaaggaataagcttactgttccccagggtccacgtctctcaagccaatatacacaatatccttggcagatatacagggagtcacccaggagaatcctggcacatcgggaatctaaaattacaatgttttcacttggttatgtatgattctcttgaacaaatcctacattcaaaggtaaagacacatattggattgcgtatatcttatatttagaatataaatacagaagaaatcatgtaaaaataatacacaattaagaagaggatgtgtgcctccccttgattgctttgactttgccttgaac

SEQ ID NO: 122906 - DNA, 1062 bp, Homo sapiens
tgctagcttttggtagtgggatgactggctagctagatgagtggatacgcctttgtaagtatatgcatatatatgaatatacatatggtacatgtacagacatgcacatataatatataaggggtgtgtgtgagggagaacgtattgtttctcatgcaagaaagaaatcattgtatctgcttttcttaaaacacagaacatgttaagaaacttctcatctaccccacgacactccttagtttattgtctccggatatgtgtaaatcctgctttaaatgtgagaagttgaaattctctgattaaagtacgttttaatgtgtttttatttcttaggtagagaagattatctgtaacttaaaaccagctttaaaacttcgtcttcgattcatcacacacattagcaagatggagccagctgcagtgcctccacaagccatgaacagtgggtctccagcacctcagtctaatcaggtgcccgtgtctttaccagtaactcagtgaagccagactgtactgtggagaaagtagaaatatatccgtctttgagagtggactcaaaccttttaaatctgaatgcgatcacactgtagtgatatagtagaagcagtgatgatattcagattgttttattttgattcaaatgatgaatctgttgacaccttataactcccatctccctatctatatttttgtctctaagagatcaagtaagatacatgttgttcatattcataacaacttattagagctatgtaggaacatagaggtatctgtgatcaaatgacttgtcattggcactttcagtctttcctattctagccgttgtttttgtttgtattttttattattaatgacatatttagtcttcagatatattattttaaaggcaccacacatgtaaaacagttattacaaatattttatacataaatctcttggtagattttcagaataatagagatttatatcaagaaaaggaatctagattttgttgcattgtaggagcaaacaaggcttcatattctttttaaaatgacttgaaattttattataaatttccat

SEQ ID NO: 122907 - DNA, 1052 bp, Homo sapiens
ttcgtaggcagccagtgttaccagtctcttgccatcccctcttagatatcctggctggttttgtttgtttgtttgtttgtttgtttgtttgttttaacacaagtgttctgtaccctgtttgtttcaactttatcatgtattagggttggtcatttgtattagtacgtaaagagctgcctcatacatgccagatttactttatcagtcccctgtttttgaccttttaggctgtttttcatctttcgctagtataaacagggctgcaatgacatcccttgttgtatgtcaagggattaaaatttatgcaggataaattttcagaaatggaattgcttccacttaaataaaaacaaatataaatacaaactgtatattactagaaacattctgagccttctgcctctcctcagattaaaatattcatagtatacaattgcccagcatgtgaagttgtttcataaatcttctgagctgtttttcagttatctggaaagcagttgatcagtttttcacagttattagtaaccagttaaacattgtggtggtatgtttttttcttggcagatcgtccagtgacttatctgtataacactctgcactattatgaaatgcacctgagagaccgcgcatttctcaaacgaaaactcgtccatgcgatcattggctctctgaaggataatcgaccgcagggctggtgtctaagtgacacttacctgaaatgcgctatgaatgcacgagaggaaaatccttgggttccagatgacacctactattgcagattgattggcagactagtcgataatatcctttttattgtgattttagactcccagaaataacagtattttgatttatgagaatatattttttcttttaaagtaattttttatgtatttcaaggttttaattttttttaagatcacttccattttcatctctgtaaagatttgaaatcttaaattaacagcatcatgccaattaggctgaaattctgttaaaatttttattttagaacttgaggataagcggtaaaaaaattatatttaaaaata

SEQ ID NO: 122908 - DNA, 1740 bp, Homo sapiens
caggcagaaggaatggtaagccagaaataggcaagaaaggtcatatatgtttggggaatactgaacagttggtttgggatagactagacgtctaaggaaattataatagtgagattttactttgttaaaatctaggctttcagatggccctcatgattttacacaggttgaacattttcatataatttttctgttgtttttcaaaggccatgcgtagtcacgaaggaaatgaagcccaggtttgttatttcataattcagttgctgttactcaaaccaaacgattttagaaatcgagtaagtgactttgtgaaggaaaattccccagagcactggttacagaatgactggcacaccaagcacatgaattatcacaaggtactagtcctaattggtatttcaaatagtccttttaaagccatacttgagtatttgatgaagtgatttggccgttttctctctggttctaatgttttttctcttgtctatatagaagtaagttagctctctgaacttcttcaaggtttgagagtttctataatgttgagaataaattgaaactgcagttttagtggacataaggacttctataaaaagaagtaaagtataatcaagtataattttaaatgtttccttgcaaaaaaaaatctaaacaatgttttcacatttagctcttttaagagaattttttaaaaaatgctctaaccatttatcatcttctcaattccacagaaatatccagagaagttgtattttgagggcctcgcggaacaggtggatcctcctgtacagatccagtctccctatctgcccatctattttgggaatgtgtgtcttcgattccttccagtatttgatatagtaatccacagatttttagagttgcttccggtatccaaatcactggagactctactggatcatctaggaggcttatataaatttcatggtgagctttttccaattttaatttcgtctaatacctccattatcaaaagtaggatgggcaggaccacatggtaatagtggctctaaaggttttattttaaatattttaaaaatgaagtgttttgaggataagtactatggatggtgccatgaagtataaaatatacaacataaaaatataaacaaaagtatgagttcagaacagggtgatgttactgtaaactaaacagatcttggcggccttcttggatgggtaggatttggacttgatgcatccaatttatagcagcagcagggaaaatatagcacacgaggcagaagggatcatttgggggaaatcatggaggagataaagtatatttgaagaaaaattgctacattgggttgaattgaaaattcttaccagagagttctagaaataagattggaaagacagattgtacctaactgtagatcaccttgaatgctaggctgattttgtaattgcagataataatcaactggaagttattgagtatgatcatggcataggaaacattatttcagaaagatacatccagttatagttggcagcagtcttaggatgaagccattacaaggacatgtcaaaaagctcagttgtgtgattagtatctaagcaacagtggttgcattgaaaatgagagaaaagggacaaatggtcacaaaagaaggaacaggacttgattggctggttataaggagaatattgaaagaaaaagacaactaaaattttaagcatagttactggagagtggcagggtcagtgacagaa

SEQ ID NO: 122909 - DNA, 1214 bp, Homo sapiens
tagccaaagggtagagacacttcattcttttttttctttttaagattggcggaagtatcaacagatgattgaagaagctttgaattcaggcttacttagaatttccatttaggaaatctaggaaaaggaatcttggagataatctagtcaagcttatgtattttccagacacagaaattcaggccttaattgctgagttgctcaaggtgacctagagtttattagtgtcagaatcaagtctagaactggtttattaactccatatccagtgctctttctactataaccaatgaaataaacttctaatcctctttttaggcattcttcaaacaaaataatgtgcctcaggaaagccgttttaatctgaaaaaaaatgtggaggaggagtataggaagtggaagtcaatgagcaacgaaaacgacattattacccacttctctatgcagggctcccctcctctctttctttgtcttctctggaaaatgctcttggaaacagatcatattaatcagattggctataggtaagtcaaaaacctaatttgcattccatttggcaaattgttgtatccatacaacaatggagtttatgttttactctctgccttccagagtattagagagaattggagccagggccttggtagcccatgtgaggacatttgcagatttcctggtatatgagttttctacatcagcagggggtcagcaactcaataaatgcattgaaattcttaatgacatggtatggaagtataacattgttacactggacagattaattctctgcctggtaagaataaatacatttctaagcttattctcttagatcaagatgtatgactaatatatgttatgccaatctgctctatattgctttgaaggatttaatgaatttatactatatcaagcattgctgtcacttccctaaagagccggaaattttccaatttctgtttttgtttgtttttgtttttttgtttgttttttgagacagggtctcgctctgtcgcccagtgcagtggcgtgatcatggctcactgcagcctcaacctcctggtctcaagcaatctcctcctgcctcagcctcctgagtagctgggagtacaggcatatgctaccatacccagctagttttttttctttttaacttttttatagagatggggtttctccatgttgcccaggctggtctcgaactcctgggctgaagc

SEQ ID NO: 122910 - DNA, 2950 bp, Homo sapiens
gatagagtattccccaggttttgatgagatttttaaaataagaattatcccatattaaacttgattctcatgcacacatgatcaacttaaagaggtggtgttgtgcatgttgtatatgactatgttctaaaacattgcatttttatatgcattagttgttttggggagcaggaaataagcatatatataatattaaaataatttagcaggttttgcatggtgtgtcttgaattgagactaagtaattactaagtgccaaagttagatgctgactttctcagagcaagaaccaggtttctccttaaaaacaaaaacaaaaaaacaacaaaaacttcctgtattcatctctttaagtagcagtgtatacatgtgtatttaaacatcttttatagttagcagggcgaggactgattaaaggcagagatcatcttatgtgggttctcctgcaattcatttctggaagtattcagaaaaatgcactagctgattttctccctgtgatgaagctcttcgacttgctatacccagaaaaagaagtaagctttactgagtaactattcataacaacatgatgagtaaattatgtctaatttatgtttaaggattttagtgtgattttgtgtatttctaaagtttatgctaaatcacaattgaatgttaagtgtagcaagctctttctctacattctaggtaggtctacagttttacaaatcactaaagctgttttaatctatatacatcattgaatggccagataacagtctttattaatagctattttttctttgacagttgagcctcagtatgtcccctgggtattttatcatataagatatttgagtaaaatgtgatgtattttgatgattgccattttctagaagtactttatcatgaattgttgttgttgttgttgttgttgttaaggagtttcactgttgtcacccaggctggagtgcagtggcgtgatctcagctcactgcaacctccacctcctgggttgaagcaattctcctgcctcagcctcccgagtagctgagattacatgcacatgccaacatgcccgactaatttttgtatttttggtagagacagggtttcgccgtgttggccaggctggtcttgaactcctgaccttaggtgatctgcccagaaaattttaagatgaaacaagagtatttcttgatgatgggtataacatgatggggttactgtaaccccaccatgcactagctgtaaccccaccatgcactagctgtaaccccaccatgttatacccatcatcaagaaatactcttgtttcatctttcctccttattttttttgttaatgttggacaattttcaagcaaatcccagacatccatatcattttacccattaatagtcaatatgtttaaatgtaattatttaggttgcgtatttcttagatttttatctgttcttaaaaattattatgagacttttagaaagtcttgtttttagttacatttgtcactttagtaagatttcatgatgatgtgttttaattttttaaaagtaaaaattaaaaatttatttttatttgagaatgctctgcgatagtaggaaaagcttgaccaagcacctgtgaatatgtgttacttaaagcaagtaaaaacatataccaaataaagcatcttgtaataatttcaaaattttatggctgttagaccttctgatttgtattattgaattatcggggctaaagtaagacatgatatgctaaaaagagttatattagaaattgattactaaaatacacataattatttaattcttctctttcttctattgtgttatttttcaaattgttatttttcagtatatcccagttcctgatattaacaaaccccagtcaacccatgcctttgcaatgacctgtatttggattcatctcaatagaaaagctcaaaatgacaactccaagctacagattccaatacctcattccctaagacttcaccatgagtaagttatttgttgcttgatacttaattttcttgtttaattaatagcggattgtagactaatattggtctcggtgtttgtgtgaaatttggaaatctccgcatacccactataggtaagggcaaatacttgatgtatatgtcatagcaggagaatctgaccagtacctatatcaggaaacagctacaaggttagtcttgcttatatgtatagatttttttttttaatttttaaggctgatcttcagttgtatatgttatactttaaagttattaatataatgaaagcatatcaatttttataaatgtaaaaatgtttcagaatttcccaagtgcttggaacttcagcataagctgactgagatatcattcatctctgggctgccaggattgattgagctgatctggctggcatgccccttaatatctcttccaaagttgtgatgactcaatgaagataccattcttagatagtattgtattgtagtcaagggtgctaggagtagcctaacttcccacctagaacttctgagaaggactgccacttctcttcacaggagatggcaggattgtcagacttgatacttcatttggttttcattttatgagacagcccttaaccaccttttcatagtggtatctgtaatgaagacattgttgtgtttatacagacagataataaatagaaacctggttcatagacttgtgagttatttcttcattctctgaaacttagcctaatatggtggtcatatatgtagtgcatacttaacagtacccattaattgtttatttaaaattatttttcttctgaaatgctactcaaacttctatgtgtattcccactgtacatttcacacagaaactataatacctataggaacaaagatagcattaataaataattgcataaaattgaacttttaaaaaaatacaaattaacattatggaagttattttcatttt

SEQ ID NO: 122911 - DNA, 1133 bp, Homo sapiens
tcttctgctaccatcaggtaccggagcattaggtactgtagatattcctgacttaatttttgacagaaaagttaagggtaatcttgagtcatggcatatattgaaagaccatcagctttaactgtaaatttcctagttgttcttgctttgtcaaaatcgtactatttttgctttccttttaaaatcattaactgtatgataatcactacatgcctaaaaatatgtaggtgaaaatccagtttttttcttaaatagctaatactaaaaaaggaaactccaaagtgactcaagtgctaaaaactagttttatttagtttgctcttttttcctaaagcagattgatggaagaccattatggatggagaaatagatgacaaattggtcagtttccaaactggaagcaaattcccatcactagtgaaaaattcctactggaaatcctggctttacttcttttcacaattttttctgactctgtatactttgaatgatctcactctaaatttgtgttgtctgacacatttcttaggttgttggtggttggcagaactagtgaatttcaagccctgtacacagtagttttgcatgctgatttaagaaatagtctgtagtgttgtctgttgcactttgctctgcttcataatgataattacatttggaggaaaagtactgtagtctcaactggtggtgttaatattgctatttgtaaacctgtaatgtgattgaactgtggtcatggcattgtgtttttggaaaaaatatgaaacaaccattgatgcttatcatttggatagatgtttgttttatttgcatgctttaagaaactacagctatattggagcttacaagtttggagctggcaaagagcatgcaaaagaggggatgctattcattatgtcttgtttatttccaaatttgtccccattttgcatttttttccctaaatttgaaaaaatcatatccctttttcatggcaaaagactgataatcacatctaaagtttagggggaaagatctgtattagtaattgtattcactagaagggcttccaactgcctgctactaagtcatataacatatttataaaggaaatatgaaaatggcttaaacatggcttaacatatttcttttgg

SEQ ID NO: 122912 - DNA, 1019 bp, Homo sapiens
acatgagcacctaggacaaaatctatataaattgacattagtgagatgctaaaatttaaaaaatttaaaccttctgcgttttcagggaaaggatagtagaaagtgcactggggaagggggattggaaggtctggtgctagtgttatctttattgttaccctctgtatgaccttggggcaagccacttcatctcaggtgtcaaatgaggcaaatgaggggtgggaacagatgaactgtaagcactaaaatcctatgatttttttcccactagatactgcctactctgtgaaggtaacaagtgcctttagaggattttttaatctcatttctaataatttggattaatgttgacattgatcttgaagcaatgattttcttattttctttaaaggatctgtttgaaccacagactgctttgttgagatatgtattggagcagccttattccagggatatggtctgcaatatgctaggtttaaataagcaggtactgtactatgctggaaacctagtaaattctgcatagaatctgcactattcttttctcttttctttgctatagctaactgagcaaaacagttaagaactatttagtgacttttaaaaatatacatggttttttaaacaatgtattattcctatcatttatatattgctttaagaatgtttaaatttaaaaagaaaaatttttaaagttggtttattttgcattgcttttttttctataaggccagtttcaagtataccttttgccagagaaacctacacatgactcaaccataatttttgactttttttgttgtttgggtgtctatttttatataacccttggtatcttcagcgtggccttcttgctgattttttttttttttttttttttttttttttttggtgtgtgtttgcttgtttttggtggtttaacatgtgggagggtttgtgctgactctgggttccttgaggctggcctcatagtcactgttttgtcttttctttttttcttcctttatttttgttctgtc

SEQ ID NO: 122913 - DNA, 1061 bp, Homo sapiens
ccaaaccaatgcctatttcagcatatatgttcattaaatatttgtgaagtgaatgaagtactgctgtgttcacatttacttaaaaacatttttgtaatacatacaggtcgctgtagtcttctgccagttgtaaataattcgggtgccatttgtaattcatggaaactggatcctgctactcttcgttttcctttgaaaggccttttgccatatgataaggtatgttgctaaatataatggcacttttagtccatctgacagtcttcaacctagattataagatatgtgatgctaaattgttgcttcataatctgaagaagtaaatatttaatgaaagatagtttatagtttatcatgttattctagtatctaaatataccctgtggtttatgctattgtgggtgtttatgctccagtggtccacctctggcaaagtatttggaggtgagaaactgaaattttaaatggcaaactgaaattttaaattgattccttgattaagtcctcacattttaaaagtagtagagctttttaaatgtgaactcagtctaattccagaatctacactcttaacacctgtgctatcaagttatttgtctttccaaatttggaaatagtgtttttgtttacacttgtaaaacagaatttagaaactgtctccattcttcttagattacatttccgagcagaaaattacttccttacaatgatacttaagactaatgtgactatatctgaagtcacatttctgagtttaaccctaaagggacgagggtatgctttttcaaatcactgaaattttgatataccctttaaggggcaccagtccctctaaattgttgcattagtgagcagtcttgctgactgaactgataattttttgggcctagttgctctttttacaactatatctacattgtcaactcttgctataagaatgtctttgtaaaacagtcactttggttattctgtttttaaatgcctcaggaattctttaaaattagcacattgaagtgaatgcttatgtactcagacccctttcccagacattttactgttaa

SEQ ID NO: 122914 - DNA, 1048 bp, Homo sapiens
aaacagttatattaatcttatttttgtgtgcttatttttttaatgatgacttttatccttagataatatgtatatttttaatcatgatgtatttctttcatttccatttccattgagaatttatatgccatgtaataaaatatgatcagcttcatcaaatagctaaggatatggtggtgtgacttggtttaattaagggacagatgaactggcgagtgattttttagaaggaagcaaaagggagctaacctttaaacagttatcatgtgcaatctttacatatattatctcattttatataaatgttcatatatttcaggggcagtctcaattttccttttgtacgtatttatttgacttccctctttctttctctctttagttacttggaaacctagtatcagactttgtggataccttcaggcccacagcaaggataaactccatttgtggtaggattataattttaaatatgccaaatagtacctgatttttagtaatctaattattgaacaaagctgagggatgttctcttaatatgtgccttggtggcttgtcattttggtgactctctaagagcttaatataatgcctttcccttgttttcacttactctgtgtgccaagtacagggaggaaaaagaaactctctggaatgggtttaagcttcatttaaaaccattctagaagtgggtttcttggtgattagaaagacattttaatacagctagtaaagcaccatggaatttctaggcagctggaagtctgaacagacctgtccctctgtggctacagaacgtgaaagtgtcaggctcactcagcccattctaattcccacttttgcttttcctttcgcattttcccatgttttgttagagtctctgaactttcttttaaaaataaccatgtgatttggcaatttttgcagtgcccacatatcctctttaattatttctagaaatcatggtgacctcaactgtgtggaaatatagaccattgtttattcagtgatcaaatattgagtacttcctataagccaggtgctattc

SEQ ID NO: 122915 - DNA, 1035 bp, Homo sapiens
aaataaatgttgaatgaaatttcttctttatatatcagataatgtaactggtattggatatgtggaaatgattaacagaatagccttggatatccttgagagattaaggtatgtgatggatgagaagggagaataggccagtcacagtggcttacacctataatcccagcacaaaagggagtgagcagaaacagtcctctaccaaaaagtttgatattgttactcaagttttcagagtgcattgaagtcttgttacaatatatttctgtctatatgtataattaaggtttttgacccttgtaacaacgtaaacccttctaatgttatgagggccaaaaaagcttgacaaactgtataatgactttctttgctcattgtattttaagacagtctttagaactctgttttggaacatgactcttctgttgggttaatgttagggacttagattgtaactgattcagaaaatttaaaggtgtgaccttgaaggaatatatcaccctgaaaccttcggacgttttagctaacacagtagacactacttaattttaacccatgtcttttttcttatatcagggtgttcgagatctcttaaaagtgattttggagaagattttgacaattcctaatacagtgagctctgctgttgtacagcagcttctggcagcaagagaggtaatttagacatgtctgaaattcgtgatcataacctcaaaaaagtctagctttgtttaggtctgtgcttttaatacttacggtattttgtgagatgctctatttcttctaccaaaaaaaaatcacttctattttaaaagatgctagttcccttatatttcaaaaggacattttaaattttaattcatggttttaaattatgaaaacaatgaaatagaaattaaaatagcttaaacattacaagaccttagcatatggaccacttaaaagatctttgtactttgtaactagtatcgcaagaattgttacgttggtctgttgcactcctgtttaagtgtgccaatatttaaagcatgtgca

SEQ ID NO: 122916 - DNA, 1050 bp, Homo sapiens
cataaagggcactgtttacaatgccttacaacaatctgtgttaagagttttctattgaccgttaatatgttaactaattaattactacttttgaagttcccatgtaataaaaatggtagcattttatctatgtaattacaaaatgttaagcttaatgtgacaaatactaaatctgaattttttaattttgctttttttaaaaattattttcatccacagatgctcatagtgaagtatttctttcatagtattggtatacttccagttgtagtattagctattggttataaaaatgtaactttagaccccaagtaaaatcattctctcattttccaggagtctcatgaacagtgtatccagtggattgttaagtttattcatggtcagcatagtcctaaaagaatttcttttctttatgactgcttagcaatggcagttgagactggtctccttccacccaggtacgtttaatgggtatgagcaatctgaagaattttcttttctatatgtgattggaaattggttgaggttgttgttgtaaaaaggtaagagaatgaagaagaaggtgaggtttatcaagtaatcctttatataatacctcaggttttagtttctaggagtaatagtctttgaattaggtaatgcttgtgggctcaaaaccagatgtttctgcccaggggctgaaattaatcactttaattagtttgtaaccctttacttttgctgcacaacctcaacaccttatggcttaaaacagtaatactcaggttttaaaattattcatggttttagtggttgactcggcttaggagacactttttactcaaggtcataatgattgtgatcaatgtggctagggctggagcatggcaaaagcttccccactcagatatctggtggttgattcctggctgtcatctggaacctcagctgggattattagccagaacctccgcaggccctcaccttgtggcctagactttctcacctcatggtggagcctaacagcaagtgtgcaaaagagggctaggcagaaattgtatcaccttg

SEQ ID NO: 122917 - DNA, 1148 bp, Homo sapiens
aagtttagtgattctcaaactgctgtcaagttcattgtatcctttgaaatcgatacagtgacaggccagacaggtattgatagtttcagagctgattaaggtgacttgccctgtgttacattgtaatacttggctaagggaggcgcctttttaaaattaacattgtttacattttgttttttttttttttacagaaaacggaagttatagaagaggcttttcctgggtgagtgtatgcgtggcagagttttgtgtttttatgtgattgtgtctgtcagattttacttagtttcgtgttggaaggttataagatccactattctgattgtgtgtaattacctttttaaaacgaatgacaaataatgtaatttttatttttttagcatgtttatggatactcctgaagatgagaaaacaaaactaattagctgtttgggggccttcagacagttttggggtggtctttctcaggtgagcgcttcatttttaatacattcagctgatgatttttggcctcttctttttttttttttttttcttttaacatttactttcatgctgctcttaagatcttcctgagaagggagaaataaaattgttatcattttttattctggcttccatttgttttaatttgtatatttcagtggaaaacctgtgttgagaagtcaagttgatactgcacagtgtgagatgtttaaaaaaaaaaacctcccctatgttagattaattgagatcattttcatcctattcggatttatttggtacacttgaaaacagatatgttaagctttacttgtcaaggatacaaattccatttttctgctaaataaaggaattggcacagcattgatacaaagatgctacaataggaataccaagattctataataaggataggaaaatattatagtaaaaatgaggagacaaactgtaaaagtaacaaagaacagctaccagaaaatgtatccgtgaaaaagacaaaaatgtgtcatcctcgaagagctcacattgcagtagtgccttaccttctcatggtacactataggtagggaaatgagaactgtttgcgtgtcagccactggtgataagatttgccactcagacatggatcatataatgccaatacagtcatgttttaacctttt

SEQ ID NO: 122918 - DNA, 1086 bp, Homo sapiens
aactgtattcagtattatcccttatgaaaactctaatgcaaattaatatcttaaatcatattttacacgtaagaaatttgagtaacaacaagttaacattacgttaaactcaaaagttggaatccatgacagaacgctttgtggcgctgattttttgcatgattataactacctctcaatcacttttttattgcatgagtattttaagacaagaaagtgagaaattaaaatcattgtaccctattatttgctgaaccaacaattgtatcctattttacttcactcctagagatagtctcttttgcctattttctctctcttgtcatttcatgtggtaagatctgccaccccccctcaccccccaaataaattttccttgattttattttcttttttcttttttttaattttaaatttttttctttttctttttactccagaaatacgcttatccatttccttgattttattactctctcttttccctttgccatcaaacttttggggtaaagagggctcatttcattgcttcagttttctcagcccccaaccattcctttgtgctctggctttgtttctactgtactgagtccctgactcaaaagtcagtcctcctcgtccttcatccacttgagtgttcataacaacaataacttcctggtactttctcattctgaattattctctccccttgcttctaccatgacattgacattttcattttatgacttttttccttatctgcattcttagccaacaatttatctttattctcatgaaaattacaacacaagcttcactaaaccctatctaagatctcttaagaaatctcatgttctctaatagtctttttaattttaattttatttttgagacagggtctctctcctttgggatctcacctcaccacaacctctgtttcccaggctcaagtgatcctcctgcctcagcctcctgagtagcttggaccacaggcacatgccacaaggctcagctaagtttttgtgagtttttttctttcttttcttttttttgtagagactgggtttcaccatgttgcccaggctggtctcaaactcctggatc

SEQ ID NO: 122919 - DNA, 1021 bp, Homo sapiens
atcctcaaaaaaataatttatgtacttcttaattatctaagcaaaatctgatgtttttttcttttgtgaaagttattttttgtgtctgaaactataacaaaggttattgtaaaatactttcctaagtaatttgattacgtgtctttctgccattctttatgacaacatacagtattcaagccctgtcatccagcatgcttatctctggacttcatggaagaggaaagagggcagctagaagaattctttttaattatatcatagtttaatctaatcatagcataaagttcgttacaccaaagggctttgtcagcagagcgataatgaatgacataaacaatctttggtcaggcagtttccaaattatcctaagtggtttgtatgagtggaagaccaaaacagattatttgctagttaactatttggacaatgtatttttacgtatgttaaatattattatcatcctgtgatagagtaggaaaaaaagccctgctcccttagaatgaggcagttaaggatttaacagttctgcaattcttttcaataaatgatcacaaatgggtgcctggtttaaaaaaaatggcccagaaaaatggttttatggttttaattcttaactttaactcaatttgcagttaagttcattgcatttgaatggtaaatgtgtttgaatttgaagatctgtaataaatggtatctttaaattctgccaaaatattctttcttaatttcaagcattaaataaaatactatacctccagttaggccagatactagatcattgttggatctggtatctggcataactagtacgctgcaggtacttagagagaatactgagaaagggtggttatttgtatctttgtaattttttaaaaaattataaaagttactttttcctttttgcaataggttcttcttgctttgctggtgatcatgtcacttggattaggcctggggcttggactcaggaaactggaaaagcaaggtatacccctcagccttttctcagaacattccc

SEQ ID NO: 122920 - DNA, 1062 bp, Homo sapiens
agtcttgctttgtcacccaggctagagttcagtggcacaatctcagctcactgcaacctctgcctcctgggttcaagcaattctcctgcctcagtctcccaagtagctaggaccataggcgtgcaccaccacacctggttaagttttgtatttttagtagagatggggttttgccatgttagccagactggtctcaaactcctgacctcaagtgattcttctgccttggcctcacaaagtgttgttattacaggcatgagccatggcacctggccatatcagtgtcattatttattacattgtattggcagatcctgcagcaccataaaaatcatctagttgtctgtcatagtctgtgctgtgtacttcctgtgtgcttccactgcttaggtatgagatattgaatagctcctaaatgttcgggccctatttcctttactttgtaggcagctgcaggaagaagtgctttgatgcatcatttagaggactggagaactgccggtgtgatgtggcatgtaaagaccgaggtgattgctgctgggattttgaagacacctgtgtggaatcaagtatgagttctgagaataagtttattagcatgttgcttgtgttactattaatacatgtcaaatttttttcttttctttccttttttttgagacagagtgtcactctgttgcctaggctggagtgcagtggcatgatcatggccaactccagacttgatctcctgggtccaattgatctttccacctcagcctcctgagtagctaggaccacaggcatgcaccaccacacctggctaattgtttttaatttttttgtagagacagagtctcaccatgttgcctaggctggtcttgaactcctgggctcaagcagttgtcccaccttggcctcccaaagtgctgggattataggcatgaaccactatgccagggctgtgtccaaattttcacctacataccttgtgtattagtttcctaaggctgccatgacaaagtaccacagactgggtggcttagccaacagaagtctgttttcttacagttttggagactg

SEQ ID NO: 122921 - DNA, 1092 bp, Homo sapiens
gctgctctgtcactgctgtcactttccactgagaagtaccttgatctgcctacattctcaaagacatgactgtgctcctgttacttctgttgtcaccttttcttccttgctgcttgtccttagacaaggctgggcaaagctgcttttgggtggcaataatcagtcagggctagtgattcttcaccttggggagctcctgctcttgggtcggaataggagccatgttcagatcttctccaagctcacagtgtacctgctaagtaaacctgggttgcgatttataaagctgcatttctctctgccacctggctagtgaagaaaagtggtggtttgcccctcatttggtattatgtattttcatttattaatacagataaaccaagaatttgattgtgttattataatataggaataaataaatgaaatttgtatattttatactgcaggcttaaatgctcagaactgaattgtatcgttttacagctcgaatatggatgtgcaataaatttcgttgtggagagaccagattagaggccagcctttgctcttgttcagatgactgtttgcagaggaaagattgctgtgctgactataagagtgtttgccaaggtgagcaggaggatgttgactcatttgcccctgcgagtttagaggaactccatgagtttcctagagccatgctaggctgcaaaaatcaaaacacatcggagaatctttagttactctgtctgtgctgcagcaagtatcaagattttgatcttatgcttttcaggagaaacctcatggctggaagaaaactgtgacacagcccagcagtctcagtgcccagaagggtgagcatgactgatacagggatttttatcctcctttaacaaaggtgcacataagaatgtagttagttgagacgcagagaggaatttcccccaattcatgtacatttcaaaacagaatagtccacaaaggattagatttcttgtggcttccaagttctaatggacttttgtttgctttattttttcacaaagcccttttatattaatttattatattcatgtcttacaacgacgactttattttgtttttgtctttgag

SEQ ID NO: 122922 - DNA, 1089 bp, Homo sapiens
taggcatttattactataacttccatcttagagctgcttttgctgcattccattttcatgttcgttcattttgtttcaagatattttctaatttctcctttgatttcttctttgacccattggttgttcaaaagtgtgttacataatttctacattatttgtaaatttttcagttttccctgtaatatagatttctagtgttattccattgtagttggagaaaatacttggtatgatcccaattttttaaatatgttaagacttgttctgtgatctaatatgtgatctatcctggagaatgttccatgcatacttgagaaaaacatgttgtgttgggtttaatgttctgtaagggttctgctttaaaaaaaaaacctgctgatagttttatagggcttctcttgtatattgtgagttgcttttattttgctgctttgaaaattcattgtctttgacttttgacatttgattataatatgtcttagtgtggatttctttaggttcatcttatttagaatccttcaagcttcctggatctggttgcccatttttcctccctagatttgggagtttttagccattatttctttctataaactttctggttctttctctttttcttctccggaaaaccccatcatgcatatattaatccacatgttggtgtcccacagttctcttaatctttcatcacttctttccattcttttttctttttgctcctttgcctgaataatttttaaaggcctgagtttgcctctctttgttgaaattctcactttattcatgcattgttctcatcacctcaacgagcatctttatgacagttgttttgaaatgtctgttaggaaaattgtatctctgcttcattcaggtcaattcctgaagatttatcttgttcctttgctttgaacatatttccccatttactcattttcctttactctctgtgttgacatctgcacgttggacaaaacagtcacctttctcagttttcatggaccggcctcgtataggagaaaccctcgccagttggcctgatcagcgattctggaggccccttaaaccttcatgctagtccagccttgt

SEQ ID NO: 122923 - DNA, 1036 bp, Homo sapiens
gttttttatttttctgagagactttcatgttcagatttttagttatccaaaaaactgaagaagaaacaacttcctaatttctcaccatattctgttgcagaaacatgtggaattcattcaaaatacatgagagctatgtatcctaccaaaaccttcccaaatcattacaccattgtcacggtaagtgcttgacccagtggtaagacaggccaaagaccagaactgaccacataaacagacatgtttgggcaggaactgaccgagttctgtgacttacccttctgaagcacatggggggatagttcatggctgaattcaggctgtgaaggaatggctcaatatgaggccagtccagggctgtgaggaatgaactatgaataagtgtccagcattaggttaattcacctgtgtcgagccaaaaacagaccctttgatgtgagaaataccattttcctctgatctttcgattgccctttgtttatctgagggtctgctgggaacagtaggctatatatagggacaactactttgatgtgggaaattttgttctttcctagtcttttcattacaattaacttgatagaacttctttttcataaatgaattcacactgtctacatctctttagataaagcaataaaagcaagtgatataaaaaagatgtaggtagaatgtgtgaaaagtgtataaaaagatgtaggtagaatgattaaaatgagctcaaataaaaattaaattatttaagatagatagatttataacacattttaaggcatcggctgcctcaaaggatatttgtgtcttcattactttgagttttaatcttttattactatggaacagtaactatgacatttacattttaacccccacacaaatgtatgtatgtattctcattacttgcagattctgtatttgtgggtttgcttactcactaaaatttatttgtaacccccaaatcaataagtatagtgcatttgtggtcatttgcagccatcacaaagaagcacaaaaagttgagttgcccaatgcttat

SEQ ID NO: 122924 - DNA, 1088 bp, Homo sapiens
gttaggaaacctatccttgctggagccaagtagaactactgggtctgaacaaggaggaggaggttagagagaaagaaaaggcaatggctagcaagcccaagatctacaaaatcccccaatccagcctgtatgtttatagcaaattgataatatatttctgtttcaattttacccctagacccaggttttataccatgtattttgaagaacctgattcctctggacatgcaggtggaccagtcagtgccagagtaagttgttgttttcttaaaagaaaaaaaaaaatgtaaaatcatctaaccctaacccacaaaacaagatagtattctttaacttctactgagcacaaatgtatttgatacatacacaagaagatcaaaatagttaaaggtataaaagggatgccatggttcaactgcctacttaaccataaaatagttgaaattctagaaaggacaactgccttattaactatatattgaatcatttgaaaagccctcattgaatattagatgtggcactgttgttgcatataatgaaaacatcaaggctagatactatacaagccaattcatactaatgtggtgcatttcaggctaagtcacctgcaagtccactgtggtatatccggctgtctactccccgacagttcagttataagttccttataattggatttaacatgttattgcctcaggcagagttgtttcccttctaggctcccattgtcattgaagtggactctctaatatgagtttattcattatctaggccattctgttatgattttactacacaaacatagtccttaaatattgcgtttaacaaaacaagccattctgtcttctaaactccgctaaagcctctattgtcttggacacagtggaaagatgcaaaggctgccatgaatgtggcatttccccaccccatggaaactcgttgacaattgtcctcaattggaatgcaagcatattcgctctggcagcatgcctttgcaatttctcagaaaagctttttttaaattccttcctattaggccaaaatgattcctagtatagggacttactcaagcctcaccacttttaagc

SEQ ID NO: 122925 - DNA, 2097 bp, Homo sapiens
ccagagaaggagtcaggcaccaatcctgcagggccttgcaggtccttgcagtctagaaaaagtacaataagaagcattgaagcattgtaataaaggaggtgacaggaccagatctatgtgtatttagagatcacttttattgtgtaagaggaatgagttggaggaagcaggggaaagtggggagagacaggttagctttcccaacattccagaaaagagataacagtgatttggactaaggtagaggcaaacattgtggatggaagaagatataactgagattcttttaggagatagacttggcatgacttaatgtgagttgggtgagggggttgggggatcaagattgatttcctagtttctatcatgtgccagcaggtggtcccatttatattaataagactgctaaagcagggtaagtttggggagatgcttgttttgcaattgaggtgcctgtgatgtccaaatgaggatgtccagaagacaaataaatgtggatttaaagctcaaaggaggtgaagatctgggatatcggcagcatatagatggtgcacagaagtggagatggcctaaggagaaagcaaagagagaaaatagaagggttaggaccaactgtcacttaaaacttgagaagaagaggcaaatgaatggaagtagagattttctgactttcttaattattattgttagttttaatcgcatacctttattcagagttaatatgacttataaattgacagtaaaaaggcgattttagtttattttggcccattcactaagtggaaaacttatcactcaaacttatcaaagctactcaattgttgcccattataggaatttcttgtttctttcctttggttgggtgagagttgggaactggcatttcacattctatggagtgtgtacttcatgacagaatctgggttcaagaaatatgtaatgatttgggttgcatgatccctttcctgtgagaactcatgctctccttgagaggcagacaggtacacagatgatttcaaaactgtaaagagtccaatggcagccatatgccagggtgctggcagaggacagaagaggagggggttcttggtgtggttgggggagtgaatcagatgactatgtaaaaggaacgttatgtcatgacaacaggtggaaacagtaactctcgctggcaaaccaaagtgcaggtcacactaagactgaaggccaggaaagcatcttggagttgatgatggattgagctgtagatagagagtggcttgtgttcaagtcctgctctgtcccttattaactgaaggactgtgaacatgtcacttaacttctttaaacctcaagtttcctgacctttacaactgactgttctggtagcactttccatgaatatttgctgtgaggatttcaagagataatgcactaaagaccttaactctatcaggcttgtaaaattccttctcaaaaaaagaaaaagaagaggcaatcattgttataatagtactctgagagataagacatttctttccccaatccattgctattatgctttcttattcactggaaaaaaaaaaacacagaaaatttacatcagtgaaatttacttaaactttatattagttccatgattatattcataaagtgtagaaaattaaaaaacacaaaggcagtgagtataaacaataaaataaaaatgaactccaattctactatttagagacaaccactgtcaatagtactttgatatatttccttatagttttctgtgtatgcatgtttactaagaaatgctaaatatatttcaaaacaaaatcaggattatgcaatatgtatacagtttggttttcatttttattgcttaacattgttttgtgactattttcctatgccattgttttttgtgggggatggggagagggagttttactctttcacccagactggagtgaagtggtgcaatcttggctcactgcccccctggggttcaagtgattctcctgcctcagcttccctagtagctgggattataggtgcctgccagcacgcccaactaatttttgcatttttagtagagatggggtttcaccattttggccaggcttgtct

SEQ ID NO: 122926 - DNA, 1124 bp, Homo sapiens
aaaattccaggtatgaggggttgtgtggcattaaagggaatgtttatgtttttagtacttttcccctgctgtcttgcattcttgaatttttatgagctttggcggaaaccaaaggcggagagattctaagtgggctcagactaggagtttaatacaattcttctttgttattgttttaaaactagcttccttgttaccaaaagttcctgtcctttcactgatcccacagaagtacttgtgtatttctccttccctgtgacaggatggaattctagcaattttctgctttctaattcagaaattactctgttagtgtgttgtggttcaagaaaattacatacaaggatgttttgggattcacataaaaatgttgtaaatcagctctgtgtttcaaaaaatcaggcttaaataagcactttttggaacatggacccaattggtcttagcctttaagatttatagagcttttgtttttctgtggttttggtgggttttgtaatttttgttgtatctcagaagagttctggggaagtagttgtgatttgaaatcatggtcgtagaacagctgattcaaaaccattaaggttagtcagaccatacatagattttgcttctgggcctgttcagaaggaagatatgcactagtgttcctgttgctaggtgataaattgaaaataagagcaagaattgtgattactgtttaaaataggtatttcagaatttaatatgaaatcaaataacttttcagagtagaaatctagtgtactttgaaaaatgcctctctgtctccctatgtatctatgtatctctcgctctatttacctatctatagctatatgtctatctatctgtcaatctacacacatatcattccatgttaaaaagccttttttcttgtttctaaagattattttgtgagtctttgaaacaggggcattattgtgtgttgcaaacatttttgaactatgaaagaattatttttccctgtagaaaataaatcatacaaccaaataattaaaaacatacatagttattatccttaccgtaaggcaaaattgtaactatctaatcttcaaacaagtaggttttagcttgtacattcagcctacaggtaagaagcatct

SEQ ID NO: 122927 - DNA, 1085 bp, Homo sapiens
acaagtcacttaacaagacctagatatatcactatagattacaaacgttaataccgaatgaaaaaaattgtagaataccacttataatattaacataagtttaaaaactcatcagtactacatattgtatagtgatgtacagtaaaagtttgaaaaaacagactggattcaccctgatataaagatgtttagttctgaacagaggagccctggggacttaacttcatctgcaatatttaatttcattaaaaaaattacatctgaagtaaacataaaaatagataaattttgacaacggtgttctatgttagttatagtatactttgtacttgtgttttctttttatttttaaaaactaaatttagctgtatcaaattaagatttaaggaggtaaaaatcatcggcaaaaagacaacttctaagcaataaaaatatttctgttcatgaaaaatactgccttgtgaaaaaaaaagtgttgtgcttttctttttcaggaaggtaaaccagaagctctttgggttgaagaaagatttacagctcacattgcccgggtccgtgatgtagaacttctcactgggcttgacttctatcaggataaagtgcagcctgtctctgaaattttgcaactaaagacatatttaccaacatttgaaaccactatttaacttaataatgtctacttaatatataatttactgtataaagtaattttggcaaaatataagtgatttttttctggagaattgtaaaataaagttttctatttttccttaagtcccctaaaagccataatttttattattcctttttctcttttttcaattctatgaatatgtattattttaaagttatatttttcacacagagatgatgctatattacaccttcccttttttgttggtttcttaaactctaatctcatgacagattataccttccttattacttgttttatcttactcagaatctttgaatatatttttctgcccagaattatctaaacaaaagggagaacaaaagaagtatgtctcacttgggaactgaatcaactctaaatcagttttgtcacaaaactttttgtattt

SEQ ID NO: 122928 - DNA, 1049 bp, Homo sapiens
gtgcactttattagtgtgaagtcaacaatcagctgtttctgggagcttccaaagtaggtatacttttgggaaattgtgcttttcttcttagtttgagtttccttcttggcttattttgaaatgtagtagaatagaaaaatagagagttttgatagaaagtgattttgggatgtgtggtggctcatgcctctaaaggagaccgaggcaggagaatcacttgaggccataatttaagatcagcctgggcaatataatgaaaccccatgtctatctctctctctctctcaatctctctctgtctctctttctttctctctctccatacacacacacacacacacacacacacacacacgtgtgtatgtacatatctccatattttatatatatgtataatatgcataagaaaatcattttggaggaagtaaattgtcacagcgaattgtcacaagtgtttctcatttatggattgaccattttctcaccgtatttcaggactttgcacagacttagctggcaaacatcctataacaggtgtgatttgagagtcttaaaaaaaaatcactatcttggttttcaggtgaatatttttgagaaactagcttgttcctaaagatgtgtttcccgatccccctcctgcttagaaagctttttttgacgttagcaagcatctgggggatcttgatgctctcttatggttagagagagagaattgaaaagaaactcagtagattaagacattatttgccctttcactgtgttgacttttacaccgtggtattaaaggagtgatggcaccttagcagacgtcattgcaatgacaccaattgtacaagtagtcatgcacttgcaataaaaaaaaagccatttcactaaaaagaacaccttagatgttttattgcttagatgaagcaataaaaatgtccttgatgaggctggtcgcggtggctcacatttgtaatccttgcactttgggaggccgaggcgggtggatcacgaggtcaggagatcgagaccatcctggctaacacggtgaaatgccgtctcta

SEQ ID NO: 122929 - DNA, 3481 bp, Homo sapiens
cgagccgcggccgcccggagcgtataaaagcctcgggccgcccgccccaaactcacacaacaactcttccccgctgagaggagacagccagtgcgactccaccctccagctcgacggcagccgccccggccgacagccccgagacgacagcccggcgcgtcccggtccccacctccgaccaccgccagcgctccaggccccgccgctccccgctcgccgccaccgcgccctccgctccgcccgcagtgccaaccatgaccgccgccagtatgggccccgtccgcgtcgccttcgtggtcctcctcgccctctgcagccgggtaagcgccgggagcccccgctgcggccggcggctgccagggagggactcggggccggccggggagggcgtgcgcgccgaccgagcgccgctgaccgccctgtcctccctgcagccggccgtcggccagaactgcagcgggccgtgccggtgcccggacgagccggcgccgcgctgcccggcgggcgtgagcctcgtgctggacggctgcggctgctgccgcgtctgcgccaagcagctgggcgagctgtgcaccgagcgcgacccatgcgacccgcacaagggcctattctgtcacttcggctccccggccaaccgcaagatcggcgtgtgcaccggtaagacccgcagcccccaccgctaggtgtccggccgcctcctccctcacgcccacccgcccgctggaaaaagaaaccgctcggactgagtttctttctccagctgctgccagcccgccccctgcagcccagatcccaactcgcatccctgacgctctggatgtgagagtgccccaatgcctgacctctgcatcccccacccctctcttcccttcctcttctccagccaaagatggtgctccctgcatcttcggtggtacggtgtaccgcagcggagagtccttccagagcagctgcaagtaccagtgcacgtgcctggacggggcggtgggctgcatgcccctgtgcagcatggacgttcgtctgcccagccctgactgccccttcccgaggagggtcaagctgcccgggaaatgctgcgaggagtgggtgtgtgacgagcccaaggaccaaaccgtggttgggcctgccctcgcgggtgagtcgagtcttcctctaagtcagggtcgtgattctctcccagggagggagtcctaactgtgccgaccgaacgggggaaataccttatccaggcgttttacatggtgtttgtgtgctctgctctcgcagcttaccgactggaagacacgtttggcccagacccaactatgattagagccaactgcctggtccagaccacagagtggagcgcctgttccaagacctgtgggatgggcatctccacccgggttaccaatgacaacgcctcctgcaggctagagaagcagagccgcctgtgcatggtcaggccttgcgaagctgacctggaagagaacattaaggtacatgttctgctcctattaactatttttcacaggaaaaacagtggataggacccaacttagggctcttgccacgcttgttagtataagcccgttatctccaaaactatctaaccattgagctgttttgctggaatgagagcttgtgtaatagcaaccaccagttttccactacgaaatcttccacagggttagttaattcaagacattccaagagaggctctggctatttttggacatagcaaatgagactcaaacttcctcccctcaaaatataaacagaagtcagacaacagaagactaaaacacagagggttgaagaaagccactcctcttgtagagtcgctgatttttttttttcctctctcttttcccttgtcttccttagaagggcaaaaagtgcatccgtactcccaaaatctccaagcctatcaagtttgagctttctggctgcaccagcatgaagacataccgagctaaattctgtggagtatgtaccgacggccgatgctgcaccccccacagaaccaccaccctgccggtggagttcaagtgccctgacggcgaggtcatgaagaagaacatgatgttcatcaagacctgtgcctgccattacaactgtcccggagacaatgacatctttgaatcgctgtactacaggaagatgtacggagacatggcatgaagccagagagtgagagacattaactcattagactggaacttgaactgattcacatctcatttttccgtaaaaatgatttcagtagcacaagttatttaaatctgtttttctaactgggggaaaagattcccacccaattcaaaacattgtgccatgtcaaacaaatagtctatcaaccccagacactggtttgaagaatgttaagacttgacagtggaactacattagtacacagcaccagaatgtatattaaggtgtggctttaggagcagtgggagggtaccagcagaaaggttagtatcatcagatagcatcttatacgagtaatatgcctgctatttgaagtgtaattgagaaggaaaattttagcgtgctcactgacctgcctgtagccccagtgacagctaggatgtgcattctccagccatcaagagactgagtcaagttgttccttaagtcagaacagcagactcagctctgacattctgattcgaatgacactgttcaggaatcggaatcctgtcgattagactggacagcttgtggcaagtgaatttgcctgtaacaagccagattttttaaaatttatattgtaaatattgtgtgtgtgtgtgtgtgtgtatatatatatatatgtacagttatctaagttaatttaaagttgtttgtgcctttttatttttgtttttaatgctttgatatttcaatgttagcctcaatttctgaacaccataggtagaatgtaaagcttgtctgatcgttcaaagcatgaaatggatacttatatggaaattctgctcagatagaatgacagtccgtcaaaacagattgtttgcaaaggggaggcatcagtgtccttggcaggctgatttctaggtaggaaatgtggtagcctcacttttaatgaacaaatggcctttattaaaaactgagtgactctatatagctgatcagttttttcacctggaagcatttgtttctactttgatatgactgtttttcggacagtttatttgttgagagtgtgaccaaaagttacatgtttgcacctttctagttgaaaataaagtgtatattttttctataaagggcttggttattcatttatccttctaaacatttctgagttttcttgagcataaataggaagttcttattaatcataagataattcaccaataattttctaaatatctttaattattctatacattaataaattgattattccatagaatttttatgtaaacatacttcacactgaatcaagtatcacagacttgcaggcatacacaccacattgactatacagccattt

SEQ ID NO: 122930 - DNA, 1024 bp, Homo sapiens
aaattgaaaagacttgtaattaaactgaaattaaaccagtggtgacagagtgttttttaggtaaaaagacatagagacatgagagcaagaaaaacaggggtcaagatcaaggagttgccaaattcaattggatcagaaattctcataagaaaacaaaaacaaaacactggaggagacctgatttcgcctgccacagacttgatcatgtccatgaggaaaaaaaaacatcggtgcaactcttttgctataagtgatctacagctctattcccgtatggcaatggccaccttggcaatacaacatagtacatagaattatcaaatcttagcctgccaaagaactccataatactgacatctttctttgaaagctgttcatgccttaaggctttttggattctgaacatctagaaagcacttgacaaaaaacctagacctagtactacctttacttgcacataagagaggcccctgccattaactgcatatcacaaacacatgacaaatacttttagtaaaaaacacatgagtgcccttactgtggatccagtcctcagcactggcacagcatgacctataaccctaaccactgctctcgtgactaaaatggctcaggctccagggaaatgcttctgcctatctcatgccctgtatcctagaaaaagtgattgtgtctgtgctgttgctgatgtagaagagagaaactgttttggagtagaggcaagatttgaacagcagaagcccttaggtaagagaacaagaaaatattaagtaacttgtcaaattcctcctctctaataatatgaatgcaattcattctttcataacaaagtcttgtttccaagtagtgctgagccattttcttactcaaaaaggaagttttcttacttctcttcatgttccaattggtggctccagaaatacgcacaaactagtgtagtatccacaaccatcatataacgtggctgtagagcattccacaatattaaaaattcatattactgttaaatctgtttacctctttt

SEQ ID NO: 122931 - DNA, 1062 bp, Homo sapiens
tcagataaaaaatgtttgaaaaaattgcatctatattgaacatgcacagaatatttttattgtcatcattccttaacaatacagcataataaccatctacatagcacttacattgtattaggtattataagtaatctggagataatttaaagtagctaggagcatgtgcataagttatatgtaactactacaccattttatataagtgtcttgaacatcacagattttgctatcctcagtcccccatggataccaaggggcaactgtgtatttctttttaattatttgttagaatttttgttcattgttcattgaattacttgttttcttattactgagttgtaagaattctttatactttggatgtaagttctctgttggatgcctgtttacagacaatttctcccagtctgtggcttgactttcattttataaaagctgtatttattgaagtttgtttcatcatttttttggtttgttttgtgcttttcatatcctgcttaaaaaatctttgcctactcaagggaagactttctcttgttttccccctgaaaagttcacagttttagcttttacatttaggtggatccattttgaacacatttttgtgtgtagtgtaaggtaaatccaacgttctttgtttttcatatagatatcaagttgtgcaagaaccatttgatgaaagaaaactacctttttactattgaattactttggaatatttgttggaaaatcatttgtccatatattggttctttctggattttctattctgtttcattgctctatatgtttagccttactctaaaaccacatttaattattatagttttataggaagtcttaaatgtaggtctccaaaactttgtcattttttcccaaaattattttgatagtctaggtttattctattttcatacatatatttaaatcaacttgtcaatttcatttttaaaaaggacctgctgggatttgattgggattatactgaatttctagacaatttgagagaattgataccttaacaatattgagtcttctaatctatgaacatggtatgcc

SEQ ID NO: 122932 - DNA, 1024 bp, Homo sapiens
gtgcccagagttttttggaggaactagtcatataggtggtctctgcctaccacttactaaaattccatacttccagatggaaagcagttgttcagcataaactgcattgtttgcacagtataggcacaatgagtcactcttatcattagagaaagtttatgtcaatataggaaatcgtttactatttaagtttccaggcacctgccaaggattatccttgcaagcaggcctttctgaggtgggcctattatgttaactctttaggtataattgttctctttcggtacaattataggagctatttaagatataataaacaagattcatattttccttgccctcttgagattgtattctggagtgagggagaggtaataaacaaaaaaagatattttaaatagtaatagatgttatgaagacaaaacagtgaaggaagtatgtagttgttgtcaacaggataaagaaagcctctctgggttggtgatatctgagcagcgacctccgtgataaggagccagctatagagatatgcaaattctgcacaggaaagagccagtgtaatgaatgaccctgtggttagtctgaacctaccgtgtttgtggagcagcaagagagtgcatttggctgcagaagagtgaagtatggtagagaataagtgaggacacatgagagcaggtgggaccagatgatttaggactttatgggcaacataaggccttggggctttaagtgcaaagggaagcaattaaaggatataaataaagtcaatttggctactatactgggaaaggactctaggagggctagactggaaggaatatcaatcaggaaactattgtgattgtctagttgagggatgaaggtcacttgtgccaaggtggtgacaccaagttgatgagacacattccattcaggttactttttgaaaggagcacccacaggcttgttgatcaatggcatctcatggaggcagtgagggatagagcagagtaaaggctcagtgatggtgtgaatggtgttaggg

SEQ ID NO: 122933 - DNA, 1135 bp, Homo sapiens
actcccatttcctcaagttgtaccctccactaaacaagttatgtccatccttaaggaacattcttggtgtctcacttaatatccccatggtggtctgaaaatttcctctctagaaattattcttctatttttcaggagtttgatagtcaggtaattttttctcccatattatcagtttcttaatttatatttatccttacatgtcatttccaagcacttctttttctttctttttttccctgtctttgctcacatcctttctattttgccaagggcttgcttcttccaagcctttttatcctctcctcccgtgatcagtacccaagtttgcagcaaggttccttgttgttttatgggttggtgtttttgcttaggaaatcctcatgttttaggctgcaccctcaatctgtaatctgaaggtcagattacagtttaattcttcttgaagccctcatcaagtttcaaagagaagccttgttatttgccctttgtaagaaggaacaccttgaaaggccatgggtctgtcttctcatcctagaggccaaggggcactgggactggagtggcagggaggccatgagccccctccccaggtgtaagactcccagtctggcactgcacctctgagggcatctgcatgtggtggtccctgctagtggcttccagaagtaccttctggcattggctcctgaggtcatcacccttgttgatgacagctgtcggcaacttgccttactgaagcctttcatcctccctcccaccggcagcaacttccagggtccttgatgcatctccaacacgcttcctacaataatgtgtagccgtaggaaagtacagactttggggtcacactagcctggtttaaaatcccatcaccctttcccagctgtggtactttgggcttgttgtctaatctctgagtttcagtaaatctgtaagataaggattataacatctttcttatagatttgttgtaaatattaaatgaaatacatagaatgattcatatgtggctagtagatagtaggtctaaataaaagacagatgttattattattccagggataaattggtagctttgcagtttggtgttagttttagcacttcctatgaagacaaaaaaaaaagcacttgc

SEQ ID NO: 122934 - DNA, 1055 bp, Homo sapiens
gaagtttctttcttaatactaggcgttgatgtatttctcttatattctgtattctttctcatcttcaataatattagagagctaaaggcctttgagaagacagatcaacaaaaatgtatgcctgaggaagatttccatctttcatgcaatttttaaactaaaactttgaaatctcaagtttcttaggaaaaactaaatgtctgccttttttttctatgaagtttatacattgaaacctcacttataaaaggaaactcatgacagatgtaaccaggtagacactaggcctcctggtacttggcagacccagatccttttggatagggccaagatgagttcatgctatggcagattgcagtccagtcatgagcaggccaagttaatagagaagtgagaactgggaaagatactttttattcctatgtcaaaatttcaagttcatctgcacattagaatcacttggagatgttttaataattccagtgcccaggcaaccccatcccccaccagtcaaagcacaatccttgggaggtggacacaggcattaatatatttttcaagtttctccattgattccaatgtgggccaagttgagtaactactgaccttatatggttaggttgtttgataggaatcaggcaattcaacctgcagaagcatggaaaattgcagacataggacatggggatacaaagcaagattccatacacagccattcagagtgaccatctgatgttttaaacaagggctagcatgtgcttgcacatttaagattattttttaagataggaaaataagcttggttttcctggcatggaaacccttctgggataagcttaatgagtaagtattttctctaatttatatagtgagggctgggcacagtggctcatgcttataatcctagctactcaggaggttgaggcaggaggatcacttgaagccaggagtttgaggctgtagtgagctatgattgcaccactgcactccagcctgggcaacagagcaagactctgtcccccaaataataataataataatttatggactgacac

SEQ ID NO: 122935 - DNA, 1170 bp, Homo sapiens
cacacctgcaatacaccccgcttcatccctgatgggaagggagaaggacctaggctttggctttggggacctaatgggacagctctcagaggagggaagggacagagcgctttagtacgtcgcggacttgctgtctaggagtggaaatctcagaacttcccaaatcgtggctatttgggagcctccaggcgcggggctgatgtcagctacaccattctccagaagaatgaagggcccctaagaatcgcttagggactttcctattccgagagctgttcaggaagccacatttagagaccaaaatcgaaggtccccaggcaaaatatcctatgaagtgacaaaactttggcttactttaataaccaataaagttaatttgaccgctgctgatttactttgaaggagcctaagtaaccaccttgcctgttcatgggtgctttactaaatagaaagaaaaaaaaaaaggaagaagaagattgtgagatgaccagaatgattaggtggctaggtttcctggacatccttgcttgatcgtgaccaacgtttggatggcggtgaacgtacacgctttgttattataaaaattcatccgaacatactgccctttgctaaaagtcttgatccagatgaaaactccgaattgttctggcattgcattaaggctttgatagtatttaaatcagtgttctccgtggatttagagtgcgcttcttagtaattttatccccaggttcttttcgactgaaatatgccatcaaacttgaacgctgattctggcactgagctgttaactctggaaggaaataaagtgacaacaataaaaagttcaaaaccactctattatctattttttcataaattaatcgtttcttcccccaaataagtaactttacaactccaataaaataaagttttatgaggattgcattctgctgaagtcactgatgtataaatattctcctcctgcagcatctcagacattaactttatgaaccaagtatttgaccacaaatgcaggcctcactaggggaatgactcattctcctgtaatataaagtagacaataccttatttaaatacctatttaacgttttttaaaaaagaaattttaccgtttagggagaggagtatagtatgccccttaactatccttgcatgttctacaaaagg

SEQ ID NO: 122936 - DNA, 1040 bp, Homo sapiens
atgcagataaagggcttccacatccccagtatctcaaacataaaggatcagacatctaacagtctctccttcaggttccctctgattcaagtcatctgtgtttctaaatggccgttgaattgatttctctaagcttgcctaccctgtgtgagtgaagaacctgacatataatatttgctcattatttatcaaagaataggatatgaaattttttttgatagagaaagttgagagccagtttatgaaaaggcaatttttgtacaactgtttatcagtgttgattcaaaaggcagagttgaagcttaaagaagtatattagtcctttggctgtaatgcgtgttttctcactttaggcaacagaagcagcagtatactaaccagcttgccaaagaaacagataagtacattaaagagtttggatctctgcccaccacccccagtgaacaggtatcaagctttaagacacattgttgatgtattgaatgtgaaaaaaacccagtgcactgtaggatctttgaactgttacgctagaaaggaaattatgctagaaaggaaatcaaaaataattctgtttgagattagttcacagaacacaaaactatatttaattgctcaggtagtatcctgtggttcaataaagcaaaaattatttccatgcatttgccctgacccataattaagttagttctcagaaaatgcttcctgagtaattatttcctggccttccggggctgactgcgtggaacatgcaggctcattcaagatgtgaggtgtcctgggggcacatatttatttccctgcttatttaatggaagttattacttagctaaaagtataaggctttatttgcctgaaaaagaattactttaaaatagcctcaaaataataagctagtttttagcagcgtgaaaacctgaggtgagaaatccagcataatgggtcttttgcctcaagttaaatatgcacagtatttgacatactatcagaatgttactgagagttaatctgtaaggccctgtaattggggagtaagtgaaaac

SEQ ID NO: 122937 - DNA, 1998 bp, Homo sapiens
caggctggtgtaaggacttttactctgggtggagcaagggttatgaggagaggagtgcagtgctggtgcagaggcagtgcaatgttggactcaaccagaattttagattttgtcaagtggttaagaagggagagaggggcttaagatatatgcaagagtctggatatggactgactccagagtttaagttggttagggagtgggtgacgacattggaggtgaggaaatgtggcagagtggcaggatcaatggatggcaggttggagttggggccaggggagtgagctggacatgcaggaggtgatttctaagtagattgcctgaaaccaagattatggaagagtgacagttcctggtaatgagaaggtgtttgatgggatcttggagtgtgtggctgagggagggtggaggacagaatcatttcagtaggagacgtgtgcaaagaatggaggccagcaggatggtggaaggatcgtcagcctgtgtattgaaatcacaaaaaaattaagataggagtcatgttggacagaatggcagcgagccagaaactacaaccaatgaagagtgaggggcggcccaaggaacctaaaatgactaaacctgcagtgggtggtgatcatgaggcctgatgtgttctgcgtctgtctgttattgtgcttcttgtcatggggtctttatttttgaatttgtccttcttttctgagttccttcagtctctagttagtcagtgcatgcatgttatctggccatctcttaagagttcttttgtgatcttcctttaaactgtgattacttcattgagttttttttttttcttttaatcctgtgggtattttggggtataatttttaccatattcactttgtggcaacatgttctcctgctgtgagttcttttagggagttttactgttcttttccacattttaaaatagtcttttgtgtggttactctccccatttttttttgtttttcaatggaatgagtttgattttcctggcaggagattcctgtggagggagagggaagtgcccatttctctgctcaagggctctattctctctgctgtgctgtgctgtgctgtgctgtgctgtgctgtgctgtgctgtgctgtgctgtgctgcactgagggactgtttctttcctcctctgcctctcagcccctagcctggtgtaggagggcttcccgctccatccctgatgtcatcccaatcacttcatcggccccaagatgcacagacacctctttccaaggtgttccccacctggtttttgagtagggtcggcagcccatggcctcctgaatctgttccgtgtctccttttcccaccttctccagcagagtccccggtgcttctcagccctgcttctgcccattctcactctgggtgggatcagctcttctgatgatttgctggtgacagtgtggagctctgcaaccccggttattctccgccccacccatacggcttcctgctcaggacctgctattttctgttgcttttggccgtatgtacacgtttttgagaatttggtcatatttacacattttgtgttaatttctctgaaaatgtaatttttatgggttttctacctgctcccccattctataatatgccttgaggagggaagaaggaggaatattcagaaacatgcttctaccgtgtttctataagaagcagaaatcgattttcagtgttttagaaacagctgccagcatgtgttggcagttagaactgatcagaaatgactgaagtaaaaggtttgggaatcactgcctgtaaactagaggggaactcgtgacaacaattcagctgcttttggagcagtaggagaattattgggccctcgagtggatgacaggaaggaagctcatcatgatgggcaaaagatgtgtcagcggggttggggaattgcaaggcgcaaggcctcaccactgcccagtcctttcctgtttgcttcttacacaaatcacattgttatggaaccgttgttgctt

SEQ ID NO: 122938 - DNA, 1039 bp, Homo sapiens
tcttatatgttcttttggtgcatgtatgtgaaggaattgggttactggctcataggatatgtttatgttcagcttttgtggataacagctaaacagtgtcctaaagtggttgtaccagatatgagtacagccagtgtatcagagtttgtgctgctcaaagtccttgtcaacatttgatgtttacagctttttattcattttagtcataggtttctcatgatttactttgcaattctctgattagaatcagagtttttagagtgtagctgagctaaagaaatcaatgagataatcggaaacatttctaatcaagcaagctgtatgtgattgcatgtacatttcctgaaatcagatccaaatagcggtgtgaccttgagtaagctctcgaaccttccaagacatggttttctcatgtgtattttctgtgggctaggttatggtctcttcaaactttaacaggcaataattctaaccaaagttttttaagagtcccgaaactcttctaacaggtacaagattattctatgttttgttaagaggctgattgccatatctgaatccataatgcatgctcataaaatcccataattgaagaagccatcacactcaagactagctagagttccaccaaggcttatgtattatttttaagtgttaggagatgggaaagctggggcacagaggtttgtatcctgtcagaattaacaaaattttgtattgaaggaaattggtgaatagaaatgagaatagctatgaaacacagtccttgagataaaaatttccctaactcctaaataacatagtaagcctttccactagtgctaatgtgaattctcgcatttgagtatttttttttaaaataataacctgaaagaggaagatgtagtgtggctaaagttggaaagtgaataaaacagatatattggaaacataaaatctactcatcagaatttatgagtatagaagtttctgctaaaatatgcatcatgtatcacatgggcttgtggatgtgtgttttttccagaaaatttggaaagac

SEQ ID NO: 122939 - DNA, 1063 bp, Homo sapiens
aagaatgtttcaagaatgagtgaggcattatctctccctaatgctgctgagagactaagataaaagcagataattggatttggtaaactggtgactttgaaaagaacattctcatagccatattgcaagtgtagatggaggaagggaaggagaagcacccactctttccattttaaagagactttccagattttctcctcatctctgcttatgtcattgatcaggtggctacacctagctgccagagaggctgaaaacatcttagcaggatttcagtgtgctcactaaaattggggattattctatttgagaaagaaggatgagagaatcaatatttagtaggcaactagcagactctgctatgaaagtagaaagaggatcaaagaaagggttccattttacactgcaacagagaaattctggtaagcgtataattgcaaaggaaatgttttgaaagtgagggcatgggaatggaccactagcaagttcacatttcatccaccgtatagaggtgaggctacgtgtggtacagatggaaacatggtgggcaaacatgggagatttcctgtttgagtgggtctgttcttaaatgaaatgggaagcaaggtcatcagatagagaatgggcgggaaagaagggggtttagcaaatgtgttgagtatacatttaagatttggggccatgaatttagtgaaaccagtcatcactgtactttttctaattctgagattcaatgtctaaatgaaggggagtttagattagataaagtattgttaaaaatctaactactgtcaagtatgtgtactgataagggctatgcagaaatcacgtggaagtgaaaggcagaagtgtgaaatttcagttcacttttttccccatttggtaatgctaataatactgggtgcgattgaataaaatgatactttgcaccacatttaggttctcttcacactacatttgcaacttttgaaattgtgtcagtacaattatctgattttacaaaagaaacctaaagagaagatgctgtaagtaaggtaacctgtaattagaatatgagcatctg

SEQ ID NO: 122940 - DNA, 1036 bp, Homo sapiens
gtaggaatgtagcagtaaacaatctataaggtcctgctctcattgtagtttacagtgtagtaaggagaaataatgagcaacttaactttctgtaaagaaaatatagtgaaagtgaggtgagagcaagtgactggggaagctacctttactttagatggtctttgaatgaggatgaggagggactggtagtgagaagattcagagaaagggcatttcagacagaaggaataactagcattaaaaattcaaaagcagacctgggcttgaaatactcagaaaatagggaaaagggaaaaagctagtgtggctgaagcacagcatctggggcaagagtgccaggagatgaaaccagaggggtctggcgggtcagctggggccttgcaggtggttcaggaagtttagatttcattttaagaggcagtggaaatcactggaggcatttaagcagaggagagacataatcagatctacactgtgaaaaaattactttggctgctgcttagaaaatagacattgagggaatagcagggaggtatgctggtcatcacagaggtctggggagagctcggatgctggcttgcaccagggtgatggcagtggggatggagagaagcaatgagtgtgttttggaggtagagccagcgggacttgctgatgcatgtgggtagggatggtagaggaaggaaggagttaaagatgactccatagtttttgcattgagcaaccgactaggtggtggcaagtgtgtactgaaacgggagggactacagttcaggacaagtaggggagagttttgttttgactaagtatattttgagatatcatttagatatctaagtggagatatcaaacatctactttagatacaggaatttggaagtcagagtgtcctcagagtataaatggtatttaaaaccataggtgtaaagtaatcacgtaagagtgaggaaagagaagaggcctggaacattaaaaaatgtggaaatcaggaaggtagcatgaagaatctaaggagtgacctgtgaggtaagataaa

SEQ ID NO: 122941 - DNA, 1054 bp, Homo sapiens
aggctattctttttaacagaatgttaacacattgcagaaatagtgttttcaaatgaccatactctgtttctttatctaatcattaactcctcaacagctgttcctctacctgaattatttaaatgagatgctagtgtgttttaggagcaaagagaataaaactagactctaaaaaggtgctgctgtgcacagtggtataaaataacccttattctgatttggggtgatttctgggttttttacctatttctggaagaacaaggaagtgcacagtgccaggcaccacgttgtccacagcagggactgtaggaatggtacattgagaactgctgcagtttgtcacaggccaccggcgttggctctgctttgctcctctggcatcagatctgttctgatggtggccacagaagagcctctttccttttcttttttttttttaatggctcccttgctgctggttagaaatagcactggtctgccccaagtgtatctggctacctgtgcaaaaattaaggaagtttataattctaattacatatgtggaaaattaggacctttatgcaagaaaggaggccaagaggcctttctccaaagaagaggataagcatcctgtgttgggaaagctaaacagtgttaggaattgaggatgaggaatgactgtcctgtactgagattgtagaagtagcaagcagtaggtagtatgaaagatacatggattgaagattgtgtgtgaacatgaactggaaggagaaaagagttgacttaaatcaggccatgttccctaagaaagagatcagttgatccagaggatgagaagtgacagattgggccagagttgaatatttatggcaggttggtagctaagtgtgcgagtacatccggggcagtattggatcatgtgaaggtctggctatgatactccacagtctatgtgaagagctgttaagaagactgggactgttggcagggcatggtggctcacacctgtaatcccagcactttgggaggccgaggcaggcagatcacgggaggtcaggagttcgagaccagcctg

SEQ ID NO: 122942 - DNA, 1032 bp, Homo sapiens
ataggaaatggcacccagcaaaggcccaaggcagcaagaagcctgggaccttcggtatctgaaagaaggcactggaattttatgttttggaaatggtaatatttaccctcacgctgggtgtgtgttcttaggaggtgggtacattcattcattctacaaatgtttgttaagcacttgtgatgtagccaggcagtgagaatagtgcagtccacaaaacagacaaaaaaatgctcaccccccacccctcagaacttacttggggtagagggtatagagaagtccagttgtttatgctgatgctaatgattaagaaagtgaaattgactacttctttgcccagggtagatttatagagcatgagatatatgctaaatggaaatcttaaggattctacagtatatcggattttaactgggagtagtgtttgacacttcaagattaaattttaacattccttttgttcattcctttgtgttctttagaagccgtcttgagaagactctcatctgagtgttgcactttgattctcccttcctgtttttctctttatagtgtttgtatatcttcatagaaagatgattattgcaatgtggagattagcactgtgcaatagatctttctgtgataatggaagtggtctatgaatgagctgtccaagctgctggccactagccacacagaatttttgaacatttgaaaggtgtctagtgtgactgaggaactgatttttttcatttaacttaattttaattaattttaattttttaaaaacgagagctacaatgtaatttaagtgatacacaatataaaatggtgtaaattgtcacatgaaaaaatgaaatgtagagtaaaagtgtagtttcttactgcaatcagttatcttgttagcagcttaaaataacctgtaataagatttttttgcttttattattttaatcgacagataatgatttacatatttgtggatacatgtgatacatcagtagatgtgtacaatgtgtaatgatcaaatcagggtaattagcatatcca

SEQ ID NO: 122943 - DNA, 1079 bp, Homo sapiens
tatttgttttctccaaaacccttttgcagtcagctctggctgctggtgctgatattagttgtaagtggcctctctgctggaatgagtataattccaactttcccggaaattctcagttgtgcacagtaagttacttccattgcttgaagagctgtattgtgaataagtagtaagtatcacaggctttcttgaatttctcaattttgcagcatgttggatatttttgccccaatgttaaatcttcatgattttgtagcatatgatattatgatataaatagtaataatacactaatagaaatgataatagtacattaatagctaaaatgggttgtggacagatgtctggcttggtttatgcctcagtatgtaagtaattttgaaaagctaaagcaaaatagataggtctcagcattgttcctctttcatggaggaggtccatgagagagcctagagtgaccagcatctgtcacctggtcatcattcttttgtttaataggcatgatgatgaagaacactaagtactatggctgtgctgggtcagttcaatagttctcatgggaataaggaactatctctgttttttaaaagttgcctttgttctctttccatcttcatctcattttaagaatttcttaattatatatttttataagtatttaatgcaaatgagccatgcttcttaatatcatatatatatgcagaaaaattatttctagaaaaccatggagtaaatgtaactatgaaaattcttttaaataagatttgctttttatcttagaagcagagtattcttgctgttggtttttttccagattatccttggtttatcttaattgatctatcatacaattttttctttcacacaggttttccttttaataatggatacactcatgtctctttttgcagtgaaaatgggtttgaagagggattaagtacattgggacttgtatcaggtctttttagtgcaatgtggtcaattgggtgagtagtcatttaatttctttctttttttttttttttgagatggagtttcactctcatcacccaggctggagtgcaatggtgcgatcttgg

SEQ ID NO: 122944 - DNA, 1074 bp, Homo sapiens
ggcgcagtggctcacacctgtaatcccagcacttcgggagtccaaggtgggcggatcaaccaaggtcaggtgttccagactagcctggccaacatggtgaaactcccatttctactaaaaatacaaaacttagctgggcatagtggtgggcacctgtaattccagctacttgggactgaggcaggagaatcgcttgaacctgggaggtggaggttgcagtgagccaagatcccgacactgccttggctacaagaacaaaactccatctcaaaaaaaaaaaaaaaaaaaaaaagtgaactaggagaatctatattaaagaacccctgtatcaccagtgtgccccctgacttcattttgggggttagaactggttatataagtaggacttatataagtaggttatataagttatataagtaggttatataagtaggacttaaaaaaaaatgtagctccctctaaggagggaggtttgtgtgaaaagacattttagtgcagtgaaacattaaagcagagatccacgatgtctgagtcaatagaacagattagcagctgctgaaagatagaaaccaagtctgagctggttggtactgggaacaactgccttagctaacaaggcacttgatcattttccccccacataaatatgctgtttggcagtgaatgttttcacttaggtttcccaaattccctgcttcttccttaaaaatttgtttggggaaggaatctaatatgcttagcatatcaactgtactgtctttagataatgagaaatgcgctgaaagactatttgccacattctctttcaaaaatacaaacgtgttaattataacctccaaaaaaggcaagaaggatttcatgcctttgcccctacactttcatccatttagaataccctcctctccttccatgctcaccgatttggaatctcttagtttttgttttgagcctgtttcgaatgctgccagaagcctgaggtcctcttaccttttcacaccatccccactccctaaccccctgccactttgtatctcctctgtggccctgaggtattctgatttttgtctaaaatct

SEQ ID NO: 122945 - DNA, 1414 bp, Homo sapiens
cacatgcgcacaggggacctgaaaaacccttaaataccggcatgcgtgcggatgaggcctctttccctgccgccgccgagtcgcgcggaggcggaggcttggggtaagttgagcgaggcggcaggggggtgtattggttataatttgtggctcgttgcgttcttgctgggattcgtgacgagtatctggttctttaacaagtcaatgcttttgttttttagtgcgttcaagattcaacttcacccgtaacccaccgccatggccgaggaagggtgagcccaggggccggggttggagttggggtcggggtgcggctgaggcgtggggctagagctggcggaacaggactgggtcaaacgggtcgccgtaagcgcgtctgttgtacacttagcttttgctgagtgcaaggccttatgtggtgtgaggattttaactgatggttctgatgtgtcgcgtttaagcattgctgctggaggtgtaatggacgttaatactgctttacaagaggttctgaagactgccctcatccacgatggcctagcacgtggaattcgcgaagctgccaaagccttagacaagtacgtgtatcagtctcaatactgtgggttcttgcaaccggaacaaaactgccacccaagggaagaaggcatggagttcatggtgttagcgcaaaagttctgaatggcatccgtcctaccggaaacctaggaaaaggtatcagaactcagatctataaagcccacttaaaatgtgtgggttgctgtttggaatggggataagcactcaaaactacagtgtttgaatgatgactttaattgtcggataccccttcactccttttatgagtgaaacataagagtctgacaaacctgtaggttgtggagctagtcagtcttatacttatctggcagatagatgagatggagagccacattacatctggtagtttgcaaaacaagcattaatttaatggaatttcaaactcaggtttcagaagcatttggtcctagatgaatttagtagtataatagctgtgatttatttgaatttgggatatttgttaatgtatttgaatggatcgagttaatgtgttttttagggtggtggcattgacaaatcaacctactcttgagctgaatttaaatgcagttttaaggttttacaggacaagttcgttttggtgtaatctagccagttcaatccgatggaaacggcattattgtttaatgtatttagtaggtcctagtatgagtcttctgtatttctatttcggcattattgcatggcatttcataactgttccattaatgccacagtcttttttttttcttttttcttttttttttttgagacaaagagtcttgctctgtcccccaggctggagtgcagtggcgcgatctcattgcaacctcta

SEQ ID NO: 122946 - DNA, 1807 bp, Homo sapiens
gctggcttacaagaaagctattatggttgggttttggccagaagttttaaaaatgacttacaccaattcagtgtgtcagggacagaggttttactgaagaccagttgtaggttaattgaagatgtatatgctccctagcaggttcttcagactcaagcaattttgtacgcatttatgtgttcagtggattggctgcttatgtttcgcaagtgttagtgcaaagataaccctcctaaaatgcaagaatgatggatttggatctgagttttagctccattttcattgtaatttgaatttcaggcgccaagcccatctttgtgtgcttgcatccaactgtgatgagcctatgtatgtcaagttggtggaggccctttgtgctgaacaccaaatcaacctaattaaggtaaggctgctaaggattgtgttgggactaatgttcagtgatgcttgtatatgggggtaaattctgtgaagtctcaagctgttcattttgtgcaggtgtaaacattacgtgcacctgatactgtcggccattttaaagatgattgtaggtagaagcattttatacctgcagaattgaatcctaattttgacgttggtatacaacaaagattagtagcaggcttgtaggtgatcttagtgctgtacatgatgacaactggctccctctactgaactgccatgaggaaactgccatgtcacccttctgattacagccaccttttgggtttcatttaattttggtagtgttaatgtctattaatgtgattttttttttttttaacctttctcccaataggttgatgacaacaagaaactaggagaatgggtaggcctttgtaaaattgacagagaggggaaaccccgtaaagtggttggttgcagttgtgtagtagttaaggtaagtcaccgtttattctagggatgaaggttatgctgggtaatcatataaaaccttgtattgaaataagttgaggatcttataaaaggaaaaaactgattcaacaggtttaaagcattttctgcatttcaggaaaaaaataaaagctgtaatttacaagccagccaatgaatctgcttacctgattgtgtttgtgcagacatactttaaaaactggcaatagtaaagccatgttacgagccttaaggacattgaagtcgttaaggtccctgagaatggctataacaaatcttagtgatgggaaacatttttataagacatagctaattgttgaagctccactataattgatactaatagcttggtgaaattcctaaatattaacaagaaattgcatgcgtgttttgttttttttaaggactatggcaaggagtctcaggccaaggatgtcattgaagagtatttcaaatgcaagaaatgaagaaataaatctttggctcacattcctcatgtctggctttttatttggggcagtaaaataaggtccctgttagcaaagtaaaatgtaatcatcgcaaagtgattgctacagattaactggaaacttgctctcaaagtcttctccccagccaatgactgcatcatggggcaattcaaacctggacagccttagcaaagataggtctgccatgcagtgttggtgatggccaggattacttagctatgggcatttatccctcactagactagcctagaatttggagagagaggttgtgtttttaatagattgcagtctatgaaaggacagtgagtagacttgctgggcaggttagtagaaagtacacagttgggccaggatcatatcttgcatgtgggacaagtgttatgatacccaggaatgcttgt

SEQ ID NO: 122947 - DNA, 1427 bp, Homo sapiens
gagacagagtatcgctttgttgcccaggctggagtactgtggtgcgatctcggctcactgcaagctccgcctcgcgggttcacgccattctcctgcctcagtctcccgagtagctgggactacaggcgcccgccaccacgcccggctaattttttttgtatttttagtagagacggggtttcaccgtgttagccaggatggtcgcgatctcctgacctcatgatctgcctgcctcggcctcccaaagtgctgggattacagccgtgagccactgcgcccggccagtttaagttttataaatgatatcaattagaattctgtaaccaccagtggacactggctgttttttatctttcttccaaggttactaattttgctcaattgcaatatatatgtgtgaaatacaaataaattataaaaatttaaaccgttgattttcaatgttttctccaccatactgagaatatgcctagaactacccgaagaacaagtttccagagaaagcctattctggaaaatgggcataatttggagatgatcaaggcaaggggtatactttggagattaaattctccacaccatagctccatggaagcatcatctatgttctgagcctttatctcccgtgcctaggacagtgcgtggtgtagtaggaactcagatatttcaattgtttgtttgtgggctttcttttcagtcttaaactcctcagccttttttcaccctctattttttaaggttccttttcctctggcaacgaaagtaagtctctaggttgggctgctttgagtcgagtgtggagccaagctgtctcaacttcctttctctccagctccactctagggagcagggcatagaaacatatcctatcacaatatggagtacatggctctaagaagctgaaaaaatacgtttaaaggccattgtgagacctgggaacagtaaaaagcatgtgaattcagagaaactatttttacattgcaataagttcttttttgaagcttatttatcgagacatatgccaacagcacggaattatatgagtgatgtgaattaaaccttacacaaatgtagtatttgtctttttatttttccttctctcaactacccccaactaaaatttacaaatggatataaaaatcctgtttgtacttggttggctcgttagagaaataccgagtcaaaggtctgtgatatttcacagtgctgcccccaggtgaaaagaagcaaaatgcacattaaaaaaaaataaatatgagatccataaggggaaaataaaatattagcatataaaatgctacaaattaaaaagcctgccttctcctgtagatttgaagctggataaacttgatggattctaggagtcagcagatgttttgctaaatgggtacatgttgtgtcttgcagggaggtacttagccccacga

SEQ ID NO: 122948 - DNA, 1001 bp, Homo sapiens
gaccagcctgaccaaaatggcaaaaccccgtctctactaaaaatacaaaaattagctgggcgtggtggtgggcgcctgtaatcccagctactcgggaggctgaggcaggagaatcacttgaacccagaaggcagaggttgcagtgagctgagattgcaccattgcactccagcctggacaacagagtgagactccatctcaaaaataaataaataaataaaaaggaagaagaatatggagccaggcacttgggttcagacctcagctctaacattgatgagtttgtaacatcaaacacattactgaaacagattttgcttcagtttctcatgtgtaacagaacatgcctcatggggttctgatgagaattcaatgagtaaatatatgtaaatatatttagagtagtgcttgatatgagtatcagttgttattactatgattgggtatctttcattagattacccccaaatgttccagagatatttagagctgaaggtcttttttggggggctatggattggtgaccataaatggagtgtccagtagtccaagtataaattagatactgtgggtcatcttggcaaatctgaggttgtatttggagccttaagagaagacactataggtgctcaacagttggcattggccatttacgttgtgcagtaatatttcttttagtaaatatttccgcatacagtaatctagattgttttagagctttaatctgtgtggttccttaactactttaagcaattataagcacgttgtataatggtagtactttatagccaatatttaagtttcctcagttgcttttttttcagccgtaaggtaccaattatgagaatttgtataattttcaatagtcagtgggcctgatgaactcaatgtaaactttttaaaaggtagctttacatattgctatgattcttacctttagagagacagtaggaggtaattagtacctctacttacagaatttatcacttggattcagatat

SEQ ID NO: 122949 - DNA, 1133 bp, Homo sapiens
acatgcaaaatgaagagctctgtctataaggtcccttctaataccacatgcctatagttttcccttggggtgatctactcagcaagaacacggactctggagccaatctgttgaattctcaaatgaactctgccacttaccgcggtaagtatctttggtcatttagcctctcttttctctagtctccttgtttgtactttgtactaatcatcatgcaatatgaatgcattgtctacatcggacagaaaaggaaccagaagcatcacagactcttgcaacaccattaaaaccgccaggaaaagtggttacatttggcacaatgtcgtctgtgatcatatcaaacataccatttagaagaacaaatacacacacacaatgacatctattaagcacatagataatcattattacttaagagttaccaataatggcagaaatataacagacatgtccttcatatgcttctttccttacatattttattctttgatagaatctacttgaaattttgaatatcagatgcaatctaatggacatagttgaaaaagacagacctggtttccagttaccaattctgtggtcctgaataccttcaacttccccagtggtaccacatgtagcatagatcttggtgtaaggagagctaccaccttgggttagtgagaagattaggagaaaacatgctaaggaggctgtacaatgctaactcaccatgaatgctcttggctaaatgatagcaattattatcttagccagcaaagttcctattcttacaagtgaaactcaaagattaaaaaagaattaaaccctgtttgctgagcatagatagaagctttaacagtcaaacgctagctgacatttattaattccttaccatttggcaggcacacggtaaatatgaagtgatttacaagttatttaattccttacaagcaccacttctcaccactccattcctaaaaactggccttgtaaccggtcttcctcgtgcccttgccctagctaggctattctcaaaacagcagccaaggtgtccttatgaaacatattatgttattacttgcccaaaactctccagtggctttatctcactccaaatcctaataatgaccaataaagacctacaaactctg

SEQ ID NO: 122950 - DNA, 1068 bp, Homo sapiens
ccattcaagctggactatcattttgatattcttcctcaccatatagctttgctcaagactccaccctcaacaacaaagtaaatgttttaactggagctctaactctttaatagcttctttgcttccatcctctttttctgcttctaagaaatttaacttctcttcttagtttttttcttaccacccttctcattttttttttccattccttccatcttgggctatatttcactttcagaataggactttcttccatttccctgtagcactgagcctaagactatgcccttttatgtttcctttgcctttccttgttggggagaggggtttaggattaagtgtaggtgtatccacatctcctaagatcttttaagattatattttattttcattttcttcttagtaagcaggttctcttatttaaaacctctccccaaactcatgtcgataacattttattacttttttaaagatagaagttacatattggacttataaggtatgggagtgccagggtgtgggagagcttgctttgttaactttttggtttacaatgaaggagatgctcccttttattttggatagaaggacattgttcctcctcctgtggagtaggaaagtttgctccaagccaagcatgcctccttcctgaggactgaggaatagctatctgcctgtgtctattcttcacattgcctggagaaagttagaatagaggtggagattgagtatctagccacatgaagtgattcttactgtcattcatatttaacatttattgcctttattttggggaaaaatcatttagatggaagactcctctctttttaattttatctcccattccagctgatctacagtatattttctaggagaaaatagatttagatactaattaggataatttaatgaaatataaaatctgtgcgaggttagttgttgctattccaataggaaaatgaaactggattcagttatcttattgctaaaatatgctaaccaagattcagctattcagataactttagagctgtaaaatatattttataactctgttttcattctttc

SEQ ID NO: 122951 - DNA, 1030 bp, Homo sapiens
cagatggaaagtgtttttacagtagggaaataattaaattgggtgtggagactttgacaagagaattcttgaagtgacatatgtgtatcagcaaattctttttcttgcttggccttaattcttttgggaagaaatgcttgggctgcagatgtaatggtatattgggaaaaagaatttacaaacccatgcagtataagtacggcaccaaactatcttctttgaaatagcattacatgtatatagtataagccagatgtcaggaatagtattttttccctgtttcctaaagctactaaacttgatgtcatgtggaaagggatgtgatgtgctttgtgtaaaatttgacattccttaaatgtttttctttttttgctttcctctgtgttgctaaccatgtccaggatgtactattgttcctaaactaatgttaaccataaaatgaatttatgagaaaaacaaaattaatatccttaccctaaaattaagtttgttactagatagaccatcttaaaacataaactgaaatgatattttgcattgatgtttttttctgtcttcatggtgaatttatttgtgtcaatttgggtcccatttgactcatcaccgaaaatacatggttcttgtttaatgtaataaatagctcctggacaaatgaattttacagcagaagtttccatgaatcttatttttttaactcctctactttcagtcctttttatttctgataatgaggtgaggaaataatttatttcattcttgtattgcatactttacaaatatcttagggtgtctctgtgttaaagtagtccctataacacacaaatgatttctctgttgaatttctatttctgtttctctttgcttttcctctcttgggccactgactagcattttcaccaagaagagatcaaagacataggaaggaaataaaactcaaaataggaaatttttattttatactcgttttgttaactagagagtgaatagaaatagaaattgtggtgaaattgggctgtgaagtgacttatca

SEQ ID NO: 122952 - DNA, 1067 bp, Homo sapiens
tttagaagttatcattcccataagtgcattcacattatattttagtacatatttatgaattcagaaacaatatataatatgcttttgccagttttaaaaatccacataaatataaaattgtatgcataatgctgtgacatttaaaaatctaagattatattctttatatttattcctattaatacatgtagctctagctcatttattataaccgctgtatagtatttcattgtaattatatggcatagactatgctctcttttagatagacatttaagttatttctaattcttaactcttagaaaccatgttatggaataatttttctggagttgaaacagaaaagaggaatttggggacttagtgcaaggtacttgcttcaccatttattgtgtaatacaagttttaataacagtaaattaaagtattagaatgtgtgcattcaataataacattttgtaaaaatatttcaaagatttcaataaaaattaataaacacaattggtagaatatccctctgcctgctattggctttgctgcctccctagtctttagttccctcaacccagaatacccttggaattgccccttctgacttggctggccctgtaagggcttcctgtcttcctgctgagtgtatgcagctttgagtgaagttctttctgtatctctggcaacagttttgttttctctctctacccaccttgcccactctctgactgcttcccatcccaaaggagagatgtgttttcagatggcacttctcatctctactcagcctttttttggagggtgagtggctagatatgggcgatggggaacacaaagggaaatgctaagacacaaggggttttcatgagtggtaaaatgactggagggtttgcaggaggatcagggaggagaaagagtaaggaaaggggaaggagagagggaacagggaaaaatctaggaggggtggactaagatattatagtttcaaatatcagtatttatgcaaaatacacaaaaatatatgctagtactttaaaatggcacctattaatggaaaattaaaaaccggtgttaca

SEQ ID NO: 122953 - DNA, 1064 bp, Homo sapiens
tcaggccggcatcggcctttccaccagagctcggctgcagtcagaagcccctggcgttagttgaggtcaatggcagccctgatttaattattaaaagaccacgccgagccgggttcatgggtacctggcctctgattggtgggaatcagatgaaaaaaatgaaaatgccactgcctttttaaaagagaagacgtgggctgaattcttggggttttgacagtaggcaaccatttaggtattttattatttacgagatctccaaggatgcctcttgattttttgctttcccctctgagtgttcagaaacatattcgagcatttgaaagctccgtagaatgatggagtttgttttcatttctgtactaatttatttttcaagggatagtgattatagttgggtcaggtttaataaagaaagtgaacaagaagctgggttagaaagtaatgtctgtgtggtggtggggagaggacttttaggaggtaacatctcagccaatttctaaaagggatgggagtgggaagaatgtatgtagagtgttccagtcagagggaacaagatatgctgagtacttgctgtgctggggtattagtgtggctagggcatcaggaaacagtgcaaaggaagaatgacagtcattgaaattggagggaaattaaggtcttgaactttcagtgccttgtagaccatagaaggagtttggactttcttccaagtgctagggaaagtggagttttagcctggaaaataacatgatttgccaaggaaacggcaggggagactctctattccagtggctactgccactcctgaaaagtcaacgttacagcaatggcgacaagttctaaggtccttacgaggcattctccttcaaggggaccagccaaatacctagaagcaggaatgtcaattactttagactcccttttgtcatggatcagccaatagtttgcttccctacattagttccacattctggaatgggatttggttttgctgcaagcactattccctattaattatagacctattatactattccggtgatggttaacactaaaagccc

SEQ ID NO: 122954 - DNA, 1060 bp, Homo sapiens
tctgtgagctctctgactgcatctgtcacctgcagttccaaagcgacactggcagtaagtgcatgagcttctgtatttagggtttagaacagtgccttaaaactgtgacttaagaaaagggagcaggtttgcgtgtgtgtgtgtaagcaatgtggattctctgggaaaatataaaaagagacataagaaggttcagccatcctggcataatttcgcagtctctttgagaaaatggcagttccttcctattgagaagtgactgttagcactatctggttgaaaggattattcacagtttggtatgcccagtgaaatatcagtttatgttacctctttagtcttacatcacaagctgcttaatggttttatactttacaaaatcattttgggtgagtaaatgaggttttcctgtagcacaatgaaaaggccacatatacatacaaagttctttatgtaaagttgaagattaaagatgaaaataaaattgataaatcataggagcaattaggtcaaccacagcttctgtttgttccccaccccttttgttaaacctgacttctcctaagcaaaaaggtgtcatcctttccccagcctcctctttacgtaccctctgccctcaaaatcagtatcagaaactctagtgacctattactatgtgcccttgattgggctggcttgttcctgaatgagggctagccagaatatagcttcaactcaggcgttttcatcttaagcttttaatatggaattgaggtccagtgtctgttaaaggaatttcattcatgtgtaaagaagtggacaggatgcaaagtgtgaacattgggaaacttaagttgcattttaagacattaagaagaaaaagatagattaatgaatcaaagactgttgcttaatctttgtagcagttctgtgaaggatatactgggatagccatacttgaggctgtggatgttgagtcctggggttatctttgtgcatatgagacttgacgaagtgtccctcaacctcagggctgccatcagactcacttgacccagatctagtttgccgttgtctgtct
